United States Patent Application Publication US 2011/0183924 A1 - sequence listing, part 60

SEQ ID NO: 198781 - DNA, 4936 bp, Homo sapiens
gctgtaccgggcgaagtgtatgatatcccctcgaaggatgaccccaaggagctgcccgaccccttcaacgacctctctgtagggggctgggagatcacggaggagcctgtgggccgcctgtcagtgtgggctgtgtctctgcagggcaaggtgtggtacagagaggacgtcagccactccaaccccgaagggtcctcctggtccctgctggacacccccggggaggtggttcagatcagctgtgggccccacgacctcctgtgggccacactctgggagggacaggccctggtccgggaaggaatcaacaggagcaatcccaaaggaagttcctggtccatcgtggagcctcctggatctgaaaacggggtcatgcacatctcggtgggagtcagcgtggtctgggctgtcaccaaggactggaaggtgtggttccgaagaggcgtcaactctcacaatccctgcggcaccagttggattgagatggttggtgagatgacgatggtgaacgtgggaatgaacgaccaggtgtggggcattggctgtgaggaccgagccgtgtacttccggcagggtgtcacccccagcgagctcagtgggaagacctggaaagccatcatcgcggcccgagagtgtgaccggtcacactctggcagctcgtctagtctcctcagtgccggctgcttcttcggtgatgaggtgaggggtagtggcgagtctgcccccagcgacaccgatgcctcctcggaagtcgagagaccagggcctggccagattctccctgcagaacctctagacgattccaagaatgccacagggaactcagcctcaggcctgggggctggcaggaccgcagaagataccgtggaagatgcctgcccagccgagggcagcagggaggccagacccaacacgcaccccggcccggcccccaccccggccgagctgccctggaccaatattgacctcaaggaggccaagaaagtgcccagccactcggccgctggcttccccgagaccaccagcctctcctctctggggctcctcccactgggcttggaggagccgtatggggtggatgaccacccgctgtgggcctgggtgtcgggaggcggctgcgtggtggaggcatgtgccatgcccagatggttcactgtccaggcgggcctgtcctcctcggtacacatgctgtccctgtccatcacgccggcccagaccgctgcctggaggaagcagatcttccagcagctcacggaaaggaccaagcgggagctggagaacttcagacactacgagcaggccgtggagcagtcggtgtgggtgaagaccggggcgctgcagtggtggtgcgactggaagccccacaagtgggtggacgtgcgcttggccctggagcagttcacggggcacgacggcgtccgggacagcatcctcttcatctactatgtggtccacgaggagaagaagtacatccacatattcctgaatgaggtggtggcgctggtcccagtgctgaacgagaccaagcactcctttgccctgtacacccctgagcggacacggcagaggtggccggtgcgtctggctgctgccaccgagcaggacatgaatgactggctcgccctgctcagcctgtcttgctgcgagagccggaaggtgcagggccgcccgtccccgcaggccatctggtccatcacctgcaagggggacatcttcgtgagcgagcccagcccagacctggaggcccacgagcaccccctgccctgcgaccagatgttttggcggcagatgggaggccacctgcggatggtggaggccaacagccggggcgtggtgtggggcatcggctatgaccacacggcctgggtatacacaggcggctatggaggcggctgcttccaaggcctggccagcagcaccagtaacatctacacgcagtcagacgtgaagtgtgttcacatctatgagaaccagcgctggaaccccgtcacaggctacaccagcaggggtctgcccacggaccggtacatgtggagcgatgcctcggggctgcaggagtgcacgaaggctggcacgaagcccccgtccctgcagtgggcctgggtttccgactggttcgtggatttcagcgttccggggggcacggaccaggaggggtggcagtatgccagcgacttccctgcctcataccatgggtccaaaacgatgaaggattttgtgaggaggaggtgctgggccagaaaatgcaagctggtgaccagtgggccctggctggaggtgccccccatcgccctcagggacgtgtccatcatcccggagagcccgggtgccgaggggagtgggcacagcatcgccctctgggccgtcagcgacaagggggatgtgctgtgccgcctgggcgtgtcggagctcaaccctgcgggctcctcctggctgcacgttggcaccgaccagcccttcgcctccatctccatcggggcctgctaccaggtgtgggccgtggcaagggacggctccgccttctaccggggatccgtgtacccctcgcagccagccggtgactgctggtaccacatcccgtccccaccgagacagaggctgaagcaggtgtccgcggggcagacgtcggtgtatgccctggatgagaatggaaacctgtggtatcgccaagggatcacgcccagctacccgcagggctccagctgggagcacgtgtccaacaacgtgtgccgagtgtccgtggggcccctggaccaggtctgggtgatcgccaacaaagtgcagggcagccacagcctgagccgggggacagtgtgtcatcgcaccggcgtgcagcctcacgagcccaagggccacggctgggactacggcatcgggggaggctgggaccatatctctgtccgggccaatgccaccagggccccccggagctcgtcccaggagcaggagccgagtgccccaccagaggcccatggccccgtctgctgctgaggcccccccacacacctacatgcagggacggtgcccagtttgggggatcaaggctgagccattcttgtgctggagtgtgcaccgtgggagcaatgtggcccaggtggactcaggagggaacctggccccaaggctgcggccacttcagaggcactggctgagacggccctgaaatgtgaagctccgcggacactcccacacgtgtccccgtctgcgaggagtcccggggtgtggggcatggggtggggctgcacctcccagaggcccctcccacccttcccttcccctctcccttctgcctttccaggactagaaccgggaacctggagccctccgggaacgccggccctggggcagcagagccaggatggagccctcctgagctggcatctcagacagcacccgggcccgccacccctcaccaagagagatggccatggggctcagggcctctttaccatgtgcagtgaccatttctcagagcaggacttgcaaagaggctttaatttcaaaagtgaaggaaggaggccaggcgccgtggctcacgcctgtaatcccagcactttgggaggctgaggtgggcagatcacctaggtcaagagtttcaaaccagacgggccaacatggtgaaaccccatctctactaaaaatacaaaaaaaaaaattagctgggcatggtggtgggtgcctgtaatcccagctactcgggaggctgaggcaggagaatcgtttgaacccgggaggcggaggctgcagtgagccgagatcatgccactgcactccagcctgggcgacagagactccatctcaaaaaaaaaaaaaaaaaaaagtgaaggaaggagacagcagattggaaataacactggagtggatgggatgtcctcttccctgagggggccggggtaccagacgggaggctgggagaggatgagaggctgccccatggctggaggcagcgtccgtgtgtgcagtcaccatcatcaacccccattcggccccttccccagatgcgctggtgacaggggcttcttggatgtcaaatcatgttgtaggagggtgcagactgcgggcttctgtggggagcagtactactgtgtctgtcggcagtggccatgggaccctcagcccgtcctgtacatggagcagggtgcacagtcaccctccatcctgtggcgagaggctggcccggcccggccaggcgaggcagaaggtgtcggccaagtggccccgaccccatcccgcaatctctcagctgctttttattacctttgtgccccatttgggagtttgcttcctccacctggacactttgcccgggaggtcatcagagcccaaccccaggctctgctcggttggagaggggatgacttcaccaccacctgaccttcctagggtcctggtctcactgtcagctgggggtccgttgtgtgtatttgtacagttttgctgtatggggtttgtcacccaaaagctgatgctgagaaaggcctccctggggcccctcccgcgggcatctgagagacctggtgttccagtgtttctggaaatgggtcccagtgccgccggctgtgaagctctcagatcaatcacgggaagggcctggcggtggtggccacctggaaccaccctgtcctgtctgtttacatttcactatcaggttttctctgggcattacgatttgttcccctacaacagtgacctgtgcattctgctgtggcctgctgtgtctgcaggtggctctcagcgaggtacggggagggcgtcaccctgcagaacggcagagtgacgcgtcctctcgctgctgagcaccagctgtttacctgccctgcatcacttcctcggatactttactcaataagcatttcccctggagtgtccgtgccctggtgttttttatcgatacgttgattaaaacgcgtggttccccgtgtgcctgaagcagaca

SEQ ID NO: 198782 - DNA, 5384 bp, Homo sapiens
  misc_feature (1469)..(1469): n is a, c, g, or t
gctgtaccgggcgaagtgtatgatatcccctcgaaggatgaccccaaggagctgcccgaccccttcaacgacctctctgtagggggctgggagatcacggaggagcctgtgggccgcctgtcagtgtgggctgtgtctctgcagggcaaggtgtggtacagagaggacgtcagccactccaaccccgaagggtcctcctggtccctgctggacacccccggggaggtggttcagatcagctgtgggccccacgacctcctgtgggccacactctgggagggacaggccctggtccgggaaggaatcaacaggagcaatcccaaaggaagttcctggtccatcgtggagcctcctggatctgaaaacggggtcatgcacatctcggtgggagtcagcgtggtctgggctgtcaccaaggactggaaggtgtggttccgaagaggcgtcaactctcacaatccctgcggcaccagttggattgagatggttggtgagatgacgatggtgaacgtgggaatgaacgaccaggtgtggggcattggctgtgaggaccgagccgtgtacttccggcagggtgtcacccccagcgagctcagtgggaagacctggaaagccatcatcgcggcccgagagtgtgaccggtcacactctggcagctcgtctagtctcctcagtgccggctgcttcttcggtgatgaggtgaggggtagtggcgagtctgcccccagcgacaccgatgcctcctcggaagtcgagagaccagggcctggccagattctccctgcagaacctctagacgattccaagaatgccacagggaactcagcctcaggcctgggggctggcaggaccgcagaagataccgtggaagatgcctgcccagccgagggcagcagggaggccagacccaacacgcaccccggcccggcccccaccccggccgagctgccctggaccaatattgacctcaaggaggccaagaaagtgcccagccactcggccgctggcttccccgagaccaccagcctctcctctctggggctcctcccactgggcttggaggagccgtatggggtggatgaccacccgctgtgggcctgggtgtcgggaggcggctgcgtggtggaggcatgtgccatgcccagatggttcactgtccaggcgggtaagggctcctgcagggcctgggggcatccacatggccaggtgccctgggggtgtggggtgtgggaggaggccggggtcagggggctcgggcaggcctgctgtcctccctggacgcctcactgtgctcagcagctctgagccaggcattgcgctcctctgtggcctccagagaccagcccgaggctgtcaggacctggaagcacggtggccagtgccccttcccctgtctgcagcccctcccctgtgctagcggtggtggctgctttccaggctgaattactgggggagagcaactcatccancagggcaaagggtggaaggaggcttaacagagagcgtagcttttgagctagaaagggctgatttggtggaggggagcgccgtggcttcctgcccagctgcgggcaggacagtgccccggccctgaggctctctctgccccacaggcctgtcctcctcggtacacatgctgtccctgtccatcacgccggcccagaccgctgcctggaggaagcagatcttccagcagctcacggaaaggaccaagcgggagctggagaacttcagacactacgagcaggccgtggagcagtcggtgtgggtgaagaccggggcgctgcagtggtggtgcgactggaagccccacaagtgggtggacgtgcgcttggccctggagcagttcacggggcacgacggcgtccgggacagcatcctcttcatctactatgtggtccacgaggagaagaagtacatccacatattcctgaatgaggtggtggcgctggtcccagtgctgaacgagaccaagcactcctttgccctgtacacccctgagcggacacggcagaggtggccggtgcgtctggctgctgccaccgagcaggacatgaatgactggctcgccctgctcagcctgtcttgctgcgagagccggaaggtgcagggccgcccgtccccgcaggccatctggtccatcacctgcaagggggacatcttcgtgagcgagcccagcccagacctggaggcccacgagcaccccctgccctgcgaccagatgttttggcggcagatgggaggccacctgcggatggtggaggccaacagccggggcgtggtgtggggcatcggctatgaccacacggcctgggtatacacaggcggctatggaggcggctgcttccaaggcctggccagcagcaccagtaacatctacacgcagtcagacgtgaagtgtgttcacatctatgagaaccagcgctggaaccccgtcacaggctacaccagcaggggtctgcccacggaccggtacatgtggagcgatgcctcggggctgcaggagtgcacgaaggctggcacgaagcccccgtccctgcagtgggcctgggtttccgactggttcgtggatttcagcgttccggggggcacggaccaggaggggtggcagtatgccagcgacttccctgcctcataccatgggtccaaaacgatgaaggattttgtgaggaggaggtgctgggccagaaaatgcaagctggtgaccagtgggccctggctggaggtgccccccatcgccctcagggacgtgtccatcatcccggagagcccgggtgccgaggggagtgggcacagcatcgccctctgggccgtcagcgacaagggggatgtgctgtgccgcctgggcgtgtcggagctcaaccctgcgggctcctcctggctgcacgttggcaccgaccagcccttcgcctccatctccatcggggcctgctaccaggtgtgggccgtggcaagggacggctccgccttctaccggggatccgtgtacccctcgcagccagccggtgactgctggtaccacatcccgtccccaccgagacagaggctgaagcaggtgtccgcggggcagacgtcggtgtatgccctggatgagaatggaaacctgtggtatcgccaagggatcacgcccagctacccgcagggctccagctgggagcacgtgtccaacaacgtgtgccgagtgtccgtggggcccctggaccaggtctgggtgatcgccaacaaagtgcagggcagccacagcctgagccgggggacagtgtgtcatcgcaccggcgtgcagcctcacgagcccaagggccacggctgggactacggcatcgggggaggctgggaccatatctctgtccgggccaatgccaccagggccccccggagctcgtcccaggagcaggagccgagtgccccaccagaggcccatggccccgtctgctgctgaggcccccccacacacctacatgcagggacggtgcccagtttgggggatcaaggctgagccattcttgtgctggagtgtgcaccgtgggagcaatgtggcccaggtggactcaggagggaacctggccccaaggctgcggccacttcagaggcactggctgagacggccctgaaatgtgaagctccgcggacactcccacacgtgtccccgtctgcgaggagtcccggggtgtggggcatggggtggggctgcacctcccagaggcccctcccacccttcccttcccctctcccttctgcctttccaggactagaaccgggaacctggagccctccgggaacgccggccctggggcagcagagccaggatggagccctcctgagctggcatctcagacagcacccgggcccgccacccctcaccaagagagatggccatggggctcagggcctctttaccatgtgcagtgaccatttctcagagcaggacttgcaaagaggctttaatttcaaaagtgaaggaaggaggccaggcgccgtggctcacgcctgtaatcccagcactttgggaggctgaggtgggcagatcacctaggtcaagagtttcaaaccagacgggccaacatggtgaaaccccatctctactaaaaatacaaaaaaaaaaattagctgggcatggtggtgggtgcctgtaatcccagctactcgggaggctgaggcaggagaatcgtttgaacccgggaggcggaggctgcagtgagccgagatcatgccactgcactccagcctgggcgacagagactccatctcaaaaaaaaaaaaaaaaaaaagtgaaggaaggagacagcagattggaaataacactggagtggatgggatgtcctcttccctgagggggccggggtaccagacgggaggctgggagaggatgagaggctgccccatggctggaggcagcgtccgtgtgtgcagtcaccatcatcaacccccattcggccccttccccagatgcgctggtgacaggggcttcttggatgtcaaatcatgttgtaggagggtgcagactgcgggcttctgtggggagcagtactactgtgtctgtcggcagtggccatgggaccctcagcccgtcctgtacatggagcagggtgcacagtcaccctccatcctgtggcgagaggctggcccggcccggccaggcgaggcagaaggtgtcggccaagtggccccgaccccatcccgcaatctctcagctgctttttattacctttgtgccccatttgggagtttgcttcctccacctggacactttgcccgggaggtcatcagagcccaaccccaggctctgctcggttggagaggggatgacttcaccaccacctgaccttcctagggtcctggtctcactgtcagctgggggtccgttgtgtgtatttgtacagttttgctgtatggggtttgtcacccaaaagctgatgctgagaaaggcctccctggggcccctcccgcgggcatctgagagacctggtgttccagtgtttctggaaatgggtcccagtgccgccggctgtgaagctctcagatcaatcacgggaagggcctggcggtggtggccacctggaaccaccctgtcctgtctgtttacatttcactatcaggttttctctgggcattacgatttgttcccctacaacagtgacctgtgcattctgctgtggcctgctgtgtctgcaggtggctctcagcgaggtacggggagggcgtcaccctgcagaacggcagagtgacgcgtcctctcgctgctgagcaccagctgtttacctgccctgcatcacttcctcggatactttactcaataagcatttcccctggagtgtccgtgccctggtgttttttatcgatacgttgattaaaacgcgtggttccccgtgtgcctgaagcagaca

SEQ ID NO: 198783 - DNA, 4304 bp, Homo sapiens
  misc_feature (1469)..(1469): n is a, c, g, or t
gctgtaccgggcgaagtgtatgatatcccctcgaaggatgaccccaaggagctgcccgaccccttcaacgacctctctgtagggggctgggagatcacggaggagcctgtgggccgcctgtcagtgtgggctgtgtctctgcagggcaaggtgtggtacagagaggacgtcagccactccaaccccgaagggtcctcctggtccctgctggacacccccggggaggtggttcagatcagctgtgggccccacgacctcctgtgggccacactctgggagggacaggccctggtccgggaaggaatcaacaggagcaatcccaaaggaagttcctggtccatcgtggagcctcctggatctgaaaacggggtcatgcacatctcggtgggagtcagcgtggtctgggctgtcaccaaggactggaaggtgtggttccgaagaggcgtcaactctcacaatccctgcggcaccagttggattgagatggttggtgagatgacgatggtgaacgtgggaatgaacgaccaggtgtggggcattggctgtgaggaccgagccgtgtacttccggcagggtgtcacccccagcgagctcagtgggaagacctggaaagccatcatcgcggcccgagagtgtgaccggtcacactctggcagctcgtctagtctcctcagtgccggctgcttcttcggtgatgaggtgaggggtagtggcgagtctgcccccagcgacaccgatgcctcctcggaagtcgagagaccagggcctggccagattctccctgcagaacctctagacgattccaagaatgccacagggaactcagcctcaggcctgggggctggcaggaccgcagaagataccgtggaagatgcctgcccagccgagggcagcagggaggccagacccaacacgcaccccggcccggcccccaccccggccgagctgccctggaccaatattgacctcaaggaggccaagaaagtgcccagccactcggccgctggcttccccgagaccaccagcctctcctctctggggctcctcccactgggcttggaggagccgtatggggtggatgaccacccgctgtgggcctgggtgtcgggaggcggctgcgtggtggaggcatgtgccatgcccagatggttcactgtccaggcgggtaagggctcctgcagggcctgggggcatccacatggccaggtgccctgggggtgtggggtgtgggaggaggccggggtcagggggctcgggcaggcctgctgtcctccctggacgcctcactgtgctcagcagctctgagccaggcattgcgctcctctgtggcctccagagaccagcccgaggctgtcaggacctggaagcacggtggccagtgccccttcccctgtctgcagcccctcccctgtgctagcggtggtggctgctttccaggctgaattactgggggagagcaactcatccancagggcaaagggtggaaggaggcttaacagagagcgtagcttttgagctagaaagggctgatttggtggaggggagcgccgtggcttcctgcccagctgcgggcaggacagtgccccggccctgaggctctctctgccccacaggcctgtcctcctcggtacacatgctgtccctgtccatcacgccggcccagaccgctgcctggaggaagcagatcttccagcagctcacggaaaggaccaagcgggagctggagaacttcagacactacgagcaggccgtggagcagtcggtgtgggtgaagaccggggcgctgcagtggtggtgcgactggaagccccacaagtgggtggacgtgcgcttggccctggagcagttcacggggcacgacggcgtccgggacagcatcctcttcatctactatgtggtccacgaggagaagaagtacatccacatattcctgaatgaggtggtggcgctggtcccagtgctgaacgagaccaagcactcctttgccctgtacacccctgagcggacacggcagaggtggccggtgcgtctggctgctgccaccgagcaggacatgaatgactggctcgccctgctcagcctgtcttgctgcgagagccggaaggtgcagggccgcccgtccccgcaggccatctggtccatcacctgcaagggggacatcttcgtgagcgagcccagcccagacctggaggcccacgagcaccccctgccctgcgaccagatgttttggcggcagatgggaggccacctgcggatggtggaggccaacagccggggcgtggtgtggggcatcggctatgaccacacggcctgggtatacacaggcggctatggaggcggctgcttccaaggcctggccagcagcaccagtaacatctacacgcagtcagacgtgaagtgtgttcacatctatgagaaccagcgctggaaccccgtcacaggctacaccagcaggggtctgcccacggaccggtacatgtggagcgatgcctcggggctgcaggagtgcacgaaggctggcacgaagcccccgtccctgcagtgggcctgggtttccgactggttcgtggatttcagcgttccggggggcacggaccaggaggggtggcagtatgccagcgacttccctgcctcataccatgggtccaaaacgatgaaggattttgtgaggaggaggtgctgggccagaaaatgcaagctggtgaccagtgggccctggctggaggtgccccccatcgccctcagggacgtgtccatcatcccggagagcccgggtgccgaggggagtgggcacagcatcgccctctgggccgtcagcgacaagggggatgtgctgtgccgcctgggcgtgtcggagctcaaccctgcgggctcctcctggctgcacgttggcaccgaccagcccttcgcctccatctccatcggggcctgctaccaggtgtgggccgtggcaagggacggctccgccttctaccggggatccgtgtacccctcgcagccagccggtgactgctggtaccacatcccgtccccaccgagacagaggctgaagcaggtgtccgcggggcagacgtcggtgtatgccctggatgagaatggaaacctgtggtatcgccaagggatcacgcccagctacccgcagggctccagctgggagcacgtgtccaacaacgtgtgccgagtgtccgtggggcccctggaccaggtctgggtgatcgccaacaaagtgcagggcagccacagcctgagccgggggacagtgtgtcatcgcaccggcgtgcagcctcacgagcccaagggccacggctgggactacggcatcgggggaggctgggaccatatctctgtccgggccaatgccaccagggccccccggagctcgtcccaggagcaggagccgagtgccccaccagaggcccatggccccgtctgctgctgaggcccccccacacacctacatgcagggacggtgcccagtttgggggatcaaggctgagccattcttgtgctggagtgtgcaccgtgggagcaatgtggcccaggtggactcaggagggaacctggccccaaggctgcggccacttcagaggcactggctgagacggccctgaaatgtgaagctccgcggacactcccacacgtgtccccgtctgcgaggagtcccggggtgtggggcatggggtggggctgcacctcccagaggcccctcccacccttcccttcccctctcccttctgcctttccaggactagaaccgggaacctggagccctccgggaacgccggccctggggcagcagagccaggatggagccctcctgagctggcatctcagacagcacccgggcccgccacccctcaccaagagagatggccatggggctcagggcctctttaccatgtgcagtgaccatttctcagagcaggacttgcaaagaggctttaatttcaaaagtgaaggaaggaggccaggcgccgtggctcacgcctgtaatcccagcactttgggaggctgaggttttctctgggcattacgatttgttcccctacaacagtgacctgtgcattctgctgtggcctgctgtgtctgcaggtggctctcagcgaggtacggggagggcgtcaccctgcagaacggcagagtgacgcgtcctctcgctgctgagcaccagctgtttacctgccctgcatcacttcctcggatactttactcaataagcatttcccctggagtgtccgtgccctggtgttttttatcgatacgttgattaaaacgcgtggttccccgtgtgcctgaagcagaca

SEQ ID NO: 198784 - DNA, 2207 bp, Homo sapiens
tgagggcttcatggggtctgtgctccaggtctgggtgatcgccaacaaagtgcagggcagccacagcctgagccgggggacagtgtgtcatcgcaccggcgtgcagcctcacgagcccaagggccacggctgggactacggcatcgggggaggctgggaccatatctctgtccgggccaatgccaccagggccccccggagctcgtcccaggagcaggagccgagtgccccaccagaggcccatggccccgtctgctgctgaggcccccccacacacctacatgcagggacggtgcccagtttgggggatcaaggctgagccattcttgtgctggagtgtgcaccgtgggagcaatgtggcccaggtggactcaggagggaacctggccccaaggctgcggccacttcagaggcactggctgagacggccctgaaatgtgaagctccgcggacactcccacacgtgtccccgtctgcgaggagtcccggggtgtggggcatggggtggggctgcacctcccagaggcccctcccacccttcccttcccctctcccttctgcctttccaggactagaaccgggaacctggagccctccgggaacgccggccctggggcagcagagccaggatggagccctcctgagctggcatctcagacagcacccgggcccgccacccctcaccaagagagatggccatggggctcagggcctctttaccatgtgcagtgaccatttctcagagcaggacttgcaaagaggctttaatttcaaaagtgaaggaaggaggccaggcgccgtggctcacgcctgtaatcccagcactttgggaggctgaggtgggcagatcacctaggtcaagagtttcaaaccagacgggccaacatggtgaaaccccatctctactaaaaatacaaaaaaaaaaattagctgggcatggtggtgggtgcctgtaatcccagctactcgggaggctgaggcaggagaatcgtttgaacccgggaggcggaggctgcagtgagccgagatcatgccactgcactccagcctgggcgacagagactccatctcaaaaaaaaaaaaaaaaaaaagtgaaggaaggagacagcagattggaaataacactggagtggatgggatgtcctcttccctgagggggccggggtaccagacgggaggctgggagaggatgagaggctgccccatggctggaggcagcgtccgtgtgtgcagtcaccatcatcaacccccattcggccccttccccagatgcgctggtgacaggggcttcttggatgtcaaatcatgttgtaggagggtgcagactgcgggcttctgtggggagcagtactactgtgtctgtcggcagtggccatgggaccctcagcccgtcctgtacatggagcagggtgcacagtcaccctccatcctgtggcgagaggctggcccggcccggccaggcgaggcagaaggtgtcggccaagtggccccgaccccatcccgcaatctctcagctgctttttattacctttgtgccccatttgggagtttgcttcctccacctggacactttgcccgggaggtcatcagagcccaaccccaggctctgctcggttggagaggggatgacttcaccaccacctgaccttcctagggtcctggtctcactgtcagctgggggtccgttgtgtgtatttgtacagttttgctgtatggggtttgtcacccaaaagctgatgctgagaaaggcctccctggggcccctcccgcgggcatctgagagacctggtgttccagtgtttctggaaatgggtcccagtgccgccggctgtgaagctctcagatcaatcacgggaagggcctggcggtggtggccacctggaaccaccctgtcctgtctgtttacatttcactatcaggttttctctgggcattacgatttgttcccctacaacagtgacctgtgcattctgctgtggcctgctgtgtctgcaggtggctctcagcgaggtacggggagggcgtcaccctgcagaacggcagagtgacgcgtcctctcgctgctgagcaccagctgtttacctgccctgcatcacttcctcggatactttactcaataagcatttcccctggagtgtccgtgccctggtgttttttatcgatacgttgattaaaacgcgtggttccccgtgtgcctgaagcagaca

SEQ ID NO: 198785 - DNA, 531 bp, Homo sapiens
ttaagttgtatttaagcagtttgggtgccaaagacatttatatctggcatgagtgaatgaggaggtcaaaaaattctctctccccaaattttcaaaaacagcaaaggcttaaaacaaattgagaagcatttattcatgaaaaccactgtacttggggtaagaacagcaggagttttgtcgtgttgcctgggcctgttcctatttctcccagccctgacagtgcagtagttcaaccagggtggggctggcggtgaaaaccagtagctttatgactgctgcaggagggagctttcttgatttggaatgttgtcagttaaatttgatgatctttgtggcaagtgaaacagggccagcaaatctgctactctgaggttgcagttctgtttaggataaacagtgggccagtagactagccagggctttaacaaggaggtctggtaggtgagacagtttcaaggggcttgataagctctccgaatatcctgggttggagtatttatgcacatcagacacctgtgtgagcccagacta

SEQ ID NO: 198786 - DNA, 343 bp, Homo sapiens
gcaggggaaaggccgttccctgagctgctggttggctctaagaagacagctgctgcatgtttcaatcagagactagcttatacataaaattacagattgacttcaccatactgcacttttatgaataagctcatttctgactggctacaggacttttaagaactatattattcaacaggtagtcgtcacctgttcagccaaagctgagtttttaaaaatctcagactcacaagacagcgtgcaccagtccctcccatactcacccactactttacaccggttttgttttgatggggggagggtgctgacgttctatacagcacagcattgacagcacatccca

SEQ ID NO: 198787 - DNA, 100 bp, Homo sapiens
cacactgtactgttttaataccttgactatggctttattccctctccatgtggccaaggtcaatatttataattgtttgctgcctcccatttgagctgct

SEQ ID NO: 198788 - DNA, 721 bp, Homo sapiens
gatttctctattctggatatttcatacaagttgactcatactataggtgacctcttgtgtctggcttttttcatttcacgtaaggtttgcaaggttcgtccactttatagcatggatcagtatttcattccttctcatgggtgaataatgttgtacagcatggatataccaccatttgtttatccattcatctgcagatgggcatttaggctgtctgttcccactttttggctattgtgaatagtcagttgctgcctgttcctcctccctaaaaccctgtgaatgaggacagttgttcatccccattccccagaagacaacattgaggttcatttgtgatacagatggtgacttgaactgaagcccctgccgcccaaatgaaagtgcccttcttacatccttgtctcccaccagccattcacccatcccaagtgtcatgccttccctgggcatctgttaccacattctgggctctgtgccaactgctggccacctggtgtggacagctcaggccaagtcccagactctactatagtctgaagctgcagaggcctggaggctgcagtctcaccctctgggatgggctcctgtccagccaaggagtcccaggatccagggccaggggccaggcataccacatccaagatgcgtatagacaggagtgccctgctcctgccctccctggatcccagtattcctcaatgcacagaggaagatggcc

SEQ ID NO: 198789 - DNA, 328 bp, Homo sapiens
aagaaaaattagaaacttagaagtgtgcctctgagggcaaggaggggctgggaaccttaatatcagctggacatctgttgagggtcaggctacaatgggattagcaagccttgggaagctctgatggcattggagaatgggagcagagtcaatctctgctcccaaacatctcatttacattgctaataatgagccaatcactcttgatcagatttttaaaaataaatgacagctacagaatatataaaagtacacaggaaaatttacaccatgcaatccagtaacatctaagcaagtggttaatgttactccactccaaaagtgttgc

SEQ ID NO: 198790 - DNA, 1333 bp, Homo sapiens
catagctgactcttgaggatcaactgtcgctactgtatcctaggctctgtaaccatgtcaagaacaagctagtactcctgacttggattctgacagtctctctgccttattcatcttctgacagctcagtggtttggaagaagcagtctctgatttttaggtttgaagggaaggttgttttcagattctctgcctcagttgtcagcatttctgcccaaagattcttatcatttcttgagagtcacacacaagagcaagagcacaatctgtgaggtcacgtagtctttccttgcatgttttgtctttgggcaagttgcttaagccattggaacctcagcctctgcatcagtaagaatgagagtaataccacccactttggatcatgattatacaagattccaatgtgatgactagcacagtaaaaataataaaacttcttcctaattgtgcattctgcagccatctcttaggatgtaggttattggcttagtatgggataaatagtcacacggaagggagaatttgggctattgctttgtgaggatctagttaagggggtcaagaaatcctcatttatggttactctctgcttcgagtggctctctggccagggaaactgaattcttaatattgtgattagctttgatctgccatgtttacatattttgacttttgcctttttttttagacagagtctctctctgtcacccatgctggagtgcagtggcacgatctcagctcactgaaacctccacctcccaagttcaagtgattctcttgcctcagcctccagagtagctaggactacaggcacacaccaccatgcccaactactttttttgggatttttagtagagacgggatttcgctgtgttggctaggctggttgcgaactcctgacctcaaatgattcacctgactcggcctccaaaagtgctgggattacaggcatgaaccactgcgcctggcctcttttgcctgtgttttggtgaccacttggtagagaatgcttccggattctgagggtgggcagctttgcttgtgatgttaggataatagtgaagaagattcctttaaactagtcatgaaatcacgttatttggattccattcacattgggacatcgaatctgcttccttccccctgctacttaatttcacatacatgactttatttaatcctttcaggtagagaatattaggtccattcaacaggtgaggagatggagccttatagagtttatgtaactcatctcaccgtgtcctctgagtcaagtcaaaggttttttctagagcagttagctttccagcaaaaacaaaacaaaacaaaacaa

SEQ ID NO: 198791 - DNA, 759 bp, Homo sapiens
ggatgaagaaaaaggagaggtggaaagcagaaagtagggaagaggaataagagaccaaagagactaagaagtcagactttgaaagagtgaaagctggaggaataaggatccccccaaccccaccaaaattatgatttgtagcaagagcaaggatatgcattaaaaacaaagaaaaaatcagaatgacagttttttgtacccatggacctatatgctactggcaacctgagtttgagcaattcctcattgattgattgattcattcattcattcagaaccaggtggaattcacctgcagtatcctaggctctgtaaccatgtcaagaacaagctagtactcctgacttggattctgacagtctctctgccttattcatcttctgacagctcagtggtttggaagaagcagtctctgatttttaggtttgaagggaaggttgttttcagattctctgcctcagttgtcagcatttctgcccaaagattcttatcatttcttgagagtcacacacaagagcaagagcacaatctgtgaggtcacgtagtctttccttgcatgttttgtctttgggcaagttgcttaagccattggaacctcagcctctgcatcagtaagaatgagagtaataccacccactttggatcatgattatacaagattccaatgtgatgactagcacagtaaaaataataaaacttcttcctaattgtgcattctgcagccatctcttaggatgtaggttattggcttagtatggg

SEQ ID NO: 198792 - DNA, 421 bp, Homo sapiens
gtgacactcctgggatttgggggatgggaggagcatgctgttatgcccaaatcctgctccgtttgtttacttttttcctaattgtctctgaaagaaagagcaggcccaatcttttgggacactatgtagtgagaactggtatgacacatcgtaagtgcacagagagttcaattcagtaactgagacaaagtctagagccgaaccacttgggtctgaacgttagcttcactattaacaagatttgtagccttgcaaaagttcatccttgtatacctcagtttccttacctgtaaaaggagataacagtacctattttatcaaaatgtcaggagaaattaagtattatgtgtaaagcctataaaacaacatcttgcatgtagttagaacctaataaatattagtatattccatgaatggtagc

SEQ ID NO: 198793 - DNA, 438 bp, Homo sapiens
acattcttatactaaaaaactctctgctgttcatctgaaattcaggcagaactggatgcgctgcgttttatctggcaacaccatgggagagccaggggggctgggctgagttctctaaccccgtgaggaccagcacgccgggaggctccgcagagagaatgaaagcaaagccgaagacgcaatctgaaatcctggcttccccaggaaaagccagtgccaggagtagctactaacgaggagaaaagaaaatcatcacagtcaaagcaagttcaacaaaaacagcattttgctgctaacttgctccaagaaaacctaaaatcttcaactggctcattcgtcctccagtacctctgatgaaaaggtagacagacttttccactaattatttcagccactgtgaaaatatgaaagctgacctgggagagaagatacataata

SEQ ID NO: 198794 - DNA, 418 bp, Homo sapiens
tgatagagttttttgttgtgttgtgccagtcagctccaaaaagtaggtcaaggtgccagtttctccctgcaggggactgaaattggtggcctgaattgcctcccagtgctgtatatcccgtgagtaattctactgcaaacttctgcttttctccagttgcctttggaagttccagaggcaaaactgtgtccctttagcacaggtacctgggttgctaagggggcagtgggctcagagtatgggtttgctttggggttataattttccccattataaaaggaagatatgtgtagaaaatttagaccagagaatagctctgaagttgagggtcaagaatcagagaccttgtctccgtgcctgtgtgttgggctttgacttggcaccacactgcttgttccctgcctaactcactgagtgc

SEQ ID NO: 198795 - DNA, 353 bp, Homo sapiens
agactttctggagcttgtgtgcaccattgtacacataaatgctgctgtggcaattagacacgctccactgtgagctggaatgtataaggttggattagcaagttactggcaaaccattcagtgtcataaccccgaattaaacatgctatcccatcaggtagaaagtagacacacgtccacgcccttatgctaaccaagatggttctgaacactttcaggtcatgatgaagtcacactcattccaaacgaaatcaactccagtccctaaccagagatgggttttctgcttaattaacgaagcaccattgtgggaggagagagagccacatgtgaagaaatcaaccacagggcta

SEQ ID NO: 198796 - DNA, 374 bp, Homo sapiens
actattggtgtcttaagatgtaaaatacaaaatgtttgcaagataaggtgcactgagtttgcatcaggaacaaggcattgagcttccttacaacacagtaaacactcaaaatttcaaagtcccctttcaagtgataaaaacttctcgtgagtacttaagttgtcagtaaatacaaaaacaaaaaaaagaaaaagaaaaaacccagagttctaaagacgagaatagctccaaagaaaaacatgaaagaaaaggtaaaaagcttttgaaaagactgcaaaataggaatctgcagagcatgctcaggcctttatgttctcaagctgttcttggcatctcctaccctagaggagttgctgacccaaactgtgatgctg

SEQ ID NO: 198797 - DNA, 111 bp, Homo sapiens
ccctttccaatcagcactaagtcccactcatttgacttccccggggttttctggctttgtcttctgctctccttctgttccatccctaccttagcccaggccctcatctct

SEQ ID NO: 198798 - DNA, 525 bp, Homo sapiens
atgtgattaggtggttagtgatacagctctgtgcaattcttgggtacattatacatcaggaataaatgtggatgccttagtggcgtagggtatagagttgtgtggtagtgatggcagaaggttgttaatatccttgtgggaaaagacttttgggtcctcctgttctcattttccccacaatggcgattgtgaaataggtaggtccatgtgtaaggatgaaggatgagtctttttcttgggttgtagacaaaatttggtttaccaatttgtgccgacagtctctgtttcttggagttcttgatgctttgtgtgcctgtagttcagtggtcccatctctctctggtttctaattccaggcttgctctccctttgtctgatcctgcatcttaaaccattaaactacattctgcagtttggatgtccttccagtttcttttctgtttcattacatgctacatacatgcatacatacatgaaaatatatacatcaatgtgcatatctattatacttacctatttttttct

SEQ ID NO: 198799 - DNA, 184 bp, Homo sapiens
ttacttaaagaggtttattcagggccaatgagtgaccacagccccaggaaaatacaaacccaaaaagccttaagtgttcccgaggcagtcagattatagtttggttttatacatttcagggagccaggggttacaggcaaagacataaatcaatgtgtggaaggtatacactggtttggctcca

SEQ ID NO: 198800 - DNA, 543 bp, Homo sapiens
tcttacgtggtggaagcaggccaagaaagctctccgggcttcctttataagggcactaatcccattcgtaagggctctaccctcatgaccttatcacctcccgaagaccccacctcctaataccattacattgggagttagcatttcaatatataaattttgggaggacacaaacattcagtccataacaggtgtcatgttcataatcccatgggaagtttttgaatgggtgggcataggtggatttcctagagcaaaattctgggagcaggaacttggaaaaggaaagtagaaagcaaaaagttattttcataacaaatataatagtgtcctggcttctctgaagggcctagttgaatgtttcacagaggcaaatattaaaaacattcctttctgggggtttggaaatattttgatgtaggatttgatttcctgtcatagtcctgtaaattgtatttgttttcctgtgcttaatttagtgcttagcttagtttccttttgaaaaaatgttggattttagtgtaaatagagtatatatttaaa

SEQ ID NO: 198801 - DNA, 428 bp, Homo sapiens
taattgagagaaagagaaggtgttctcccaggtgagagtcgggggtcagagggcagtaggaaaaaaaaatgcatagaaaacaaggagttctgggttccaagatgcaacccccatgaccaggagatgctcttcagatctgcctttgctgggaaagaggcgggaggtggcctggggtccaggtggcatcttttcaaacccttctcattatttaagggcaaactcacatcaagaaccaagaggagagtggctccaagtgacaaaagaattacacttagaggaacatagcaagcggcttctcacaccaggctgcaggctggggagggggaaaatgggagcagaatgacagaatccagggctggccagaatgaaagactgaatggaataggctaatttacacaggaagtaagcacttaccagacccttcatct

SEQ ID NO: 198802 - DNA, 479 bp, Homo sapiens
tctctacagaaatcttccctgcttctccgctttctcttccattcctaatgtcaaaataatcatcatcatcttcttcatcattatcatcattatcaccaatactatttattgagtacttattatgggccaagcatggaattaagtactttacctgcattatctcctttcacaagaaactcaagagttagttgagaaagaaagggagacattctactccagccgcctcagctgacatgagaaacccacatggctgcagagagtgcaggctgggttggggagcggaaccaggccttgaaggaaacactgcgtctactttctttcttctttagcagctttaattaccaagctcttatggaagctgagggaattggcattaactctgtttcaatttgtacttttgcaaatgagatgtagttacatgacaatgattcacttctgtgaggtgtcaaaaataaactgctaggatggaaaagtgccca

SEQ ID NO: 198803 - DNA, 409 bp, Homo sapiens
ttataggcttgcgccaccacgcctggctaattttgtatttttagtagtggtagggtttcactgcgttggtcaggctggtctcaaactcctgacctcaggtgatccacctgccttggcctcccaaagtgctggtgagccaccacgcctggccgcctttggattttctgttgatctttctatgtgtcaaattaatactgcctcggttggtgttgactcacacctggaattccagcactccgggaggctgaggcagaaggattgctgagcccaagagtttgagaccagcctgggcaacatagctacaatcctatctctataaaataataatactgcctcatttggtagaacacagagagagaaaatactgacattgctttctcttgctattacttatgattacttttttttt

SEQ ID NO: 198804 - DNA, 416 bp, Homo sapiens
aagcttgattgccagggactcagaataatcggaatagggagtgactgctgaaatatgtggggtttcttttttcgggtgatgaaactattctgaaattagaggatgatggtgtacaattctgtggatatacggaaaatactaaatgatgcactttaaagggttaagtttatggtatttcaatttcatctccaaaaaaattaaatgtactgggtgcagtggctcatgcctataatccccaaactttgggaggtcaagggggaagaatcacttgagcccaagagtttgagaccagcctgggcaacatagctacaatcctatctctataaaataataatactgcctcatttggtagaacacagagagagaaaatactgacattgctttctcttgctattacttatgattacttttttttt

SEQ ID NO: 198805 - DNA, 173 bp, Homo sapiens
tgtgtgtgtgtgtgtgtgtgtggtgtgtccaggtacctaaaggaataacctaccttgatttgaattaatattccatgtctttatttaaagcaatcacctatttcttacaacacaggaccatgaattcctagcctataggattgaacaaaagcttacttaaaacccaactagta

SEQ ID NO: 198806 - DNA, 587 bp, Homo sapiens
gttaatgcagtgcatacatttagtttttatttttcaagtcctgaatagagaactcttcatagaaagggcaggtagtaggtagggaattgccatgacgtcttctggagggttgtcaggaaatgggctctgtcaccaacagtggcccgcagcctcacttgcctgtttcttagagaacagactttgactttggtgcacttcttctttttcctctcatctgtcttctcctgcttcccctcacctcagtgtgattcagctctaattgaggttgttaagaaaccgctttgttcagagggttagtaggggagaggagagatctgcctctgtattcctgacatcaaataactttccaaggtgctcctgcagcacattgtatccctttgatacacacattaaaacaacacaataataaagcgctttatcataaagaccaaataagcgataaatcattaatcgcaggagtagtattccctactttagaatatatatgtgtatatattctatatatacatatacatgtgtgtatgtattctatatatacatatacgtgtgtatgtattctatatatacatatacatgtgtatgtattc

SEQ ID NO: 198807 - DNA, 117 bp, Homo sapiens
acaaatatattcctgaaatagggatagaagccagaataatcattttaaagcctaaatcagatcatgttcctcctctgctttaaaacattacagtggtttcccacctcacacagggta

SEQ ID NO: 198808 - DNA, 962 bp, Homo sapiens
tcttgatgtagagaggttatcctgggtgacctgggatatccaatcacaagtatccttataagagacaggcaggagatcatcttcacagagcacatgtaagacagaggcacagattggagtgatgtggccacaagccaaggaatgccagagaatgccagcagccaccacaagctagaagaggcaaggaacagattccacaaacagattctacccctgagccttcaaggggaacgtggccctgcagagagcatgagggagtaagtttatgttgttttaagccacagagtttgtgataatttgtcctagcagccctaagaaattaatacaggctgtaaattttctgagaggtggggtgatgtgttccctgttcctgtcttctgcacagtatgcatgtttctgcacagaacaggcactcaaatacccgagtgcttgaactgacttgacttcttcactggttcagaaattcagagcctaaagatttggatataaaattttattggaagaacagtgagaccagtaagatctgagcattcatttgcaaaagaagaaattaatgcccctgaggttagtcccttagagtttattgcctcttgaagctgagatttataccacgttttaatgtagcaatttttttttttgccttgctggaatattaataataccatgaagaaaacttcatctaggccgggcgtggtggctcacacctgtaatcccagcactttgggaggccgaggcgggcagatcacgaggtcaggagatcgagaccatcctggctaacacggtgaaaccccgtctctactaaaaatacaaaaaattagccaggcgtggtggcgggcgcctgtagtcccagctacttgggaggctgaggcaggagaatggcgtgaacccgggaagcggagcttgcagtgagccgagatagcaccactgcactccaacctgggcgacagagcgagactccgtct

SEQ ID NO: 198809 - DNA, 450 bp, Homo sapiens
ctaaattatcagcttgagaaatatcctaaaaattaaacacatctcttttttttcctcttgctttctgacccatttttgttttgcagtgattccaaaatgctacccaaattagagggcttctcacgagtcaaactcatttttaaatatggtttacatctaacaggtacacctttcatgagacttcaggcttatcattttaaaagtagagaggtggccagcatgaactgccaagtttttaagagcaggatggcccaagaattctcagacccttcatttgccagacagggtctggaacctcactgctcactgagcctcaggacccagcagaatctgagctaccaggggctgactctggggatctccagcctgatgctggccttgcgttgtgctgtagctcagcttactgtgggcacacgccacctagtcaaccaatccaaagacataataagc

SEQ ID NO: 198810 - DNA, 352 bp, Homo sapiens
actttctatttctccctcccctcagcccctaggtaaccaccaatttcctttaggtctctatagatttacttgttgatgacatttcatataaatggagtcatacaatgtgtggtcttttatgacttgcttctttcacttagttttttttgttttgttttgtttgtttgttttttgagatggagtttcactcttgttgcccaggctggagtgcagtggtgcgatttcggctcactgaacctccgcctcccaggttcaagcgattctcctgcctcagcctcccaagtagctgggattacaggcatgtgccatcatgcccggctaattttgtgtttttagtagagagggttttgcc

SEQ ID NO: 198811 - DNA, 436 bp, Homo sapiens
caggtaaggtaaggaataagtatctgaagaattgcaaaaagtatggtacacagaaagaaagacgtgtttaggaagataaaactaacactacccagaaccatctggccatgatgatataggagaagggagttaagaatggcactgattgagatttctaatctgagtaatgatgacaagtaaaattttatgtcaactaagaactagattattctcgaagcttgcttatacacatgtacacacacaaatatatgcaaattgccctatgtttctgtttaataacaccattgtctcatacatccctctctaagtagctgactgtgcacaccatttacacaatgagagaattagatgttaacaaatggcagggatgacactgtgagctaacactgtaattctaaaatgcccaacacaaacaaactagaccaccatttcagta

SEQ ID NO: 198812 - DNA, 663 bp, Homo sapiens
aatttatttcatacattattttacaataatggatgcacttgtcaaaatccactagcggaatgagaaaaagatgcataatctttaaggaaataggtagacatggtaattcagcattttggaggagcaaacctttattattatgcatagatacagatattactttaaggttactttaagggagaacattctagaatgtttttctttaaaataatatgttcaccaattgcgtacgtgaaaatgcagaggaaaatttaagcataataagccttagtattgcgtgatgtctgagtggcccatgttttttcacacttaagttctcttaggctttggtttgattttttgagtgtggtagaagtcagtgatggcagcgtgtctgtataacaagaagagaagctttctcttctgatgttagtgatactaccctaacaaacagtatggattaataggatacatctgcagacttttgaaaatatttggcatatactcactcattctgaaacgcaggaagtaaagaaatattacgttgcctgtatctcaaagaacaaacagagctaattaaataattggcaaatagggaacacatagcctgacacatgtttgagattacacacgattctgtagaaaatgactgtaagcaatactaatgccttaagaatggggttc

SEQ ID NO: 198813 - DNA, 776 bp, Homo sapiens
gcacagaatggggaggggcaggctgtaggtagcactggaaaaggtaacctttggttggttaaaaagcattattcagaaagaaccagtgggaaagagtgggcaaacaggaatagaagttctcactccaggctgcaggtttcaggctgtttttggcttgaaggtggggtttcaccagggacccacccctgtctatctgggcatttgactgcttcctgttgctttcataaggaactacccaagatggtaatttataaagaaaagaggtttaagtggctcacagttccacaggctataaggaagcatggctggggaggcctcaggaaacttacagtcatgacagaaggggaggcaggcatgtcccacatggtggagcaggaggaagagctcacctacagcaaattatttaagaccgagcatttgtctctgttctgttccctctctggacgcaccctcctgcctccaccctgacttgccgtctcctgagcactgaagatatttttggcttgtccgatgtgactccacagacagcagaaacgcttgcttgatcagggcagcatcagggcaccacacatgcctgggcttgcacaacacagcgggagcactgccactcagcagcagctgctgctttcattaaacagttaccttgagaagaaaagataggtgtcgagggctgagagctgtgctagagtttcagggtccgagttggcaggaactgaagtcccgatgctcctcagcccttggctgtcctcagggctgccctctgcgtggggacacca

SEQ ID NO: 198814 - DNA, 357 bp, Homo sapiens
  misc_feature (101)..(101): n is a, c, g, or t
gccttcccagtttctctctgctcctttgggaggctctaatacttagaatgggaagcatccgtgtggctgactggtctctctgaattcctcccagaacttcnttgcctcctctgaccacttcccacccttatgcttctcccagaagccatgcagagctcctgactttgggctctgggcatctgtagctggcctgtgatggcctggccctcatctccccatcgggctaagatgcatccctcttggaaccaagaggaaagtgtggaagccattttactgtgtgttttaccacccttgcaagtggaaatttattagaggctggtcgacgcggccgcgaatttagtagtagtaggcggccgc

SEQ ID NO: 198815 - DNA, 358 bp, Homo sapiens
tgaagtgtttccagtcactgttcttataggctttgttctccaaattgtgtttttagtgtataatgggatttgaattattttttctcatgtgtgaatttactatgttcaggtcattaacttttcagtggaagatttcctagtcatcatattcataaagtttctctccagcatgaattttctgatatgtaatgaggtatgacttgtaaagaaaaccctacccacattcagtacaaacagaaaattactcttcctcatgaattatctgatgcatacgtaaatgtttgagtgtatgttttcgtatattttctgaatacacagtatgattcactttttaaaaattaatttaaaatgcattctt

SEQ ID NO: 198816 - DNA, 139 bp, Homo sapiens
ctttgcttctgctccctcaaccccgatagatgtcttccctaccccatttgaactccaacaccccatgccaggctgcctatctacggaaatgccctctttagtcagtcttctactttcccaccgtaggcaacccttctac

SEQ ID NO: 198817 - DNA, 544 bp, Homo sapiens
ctctatgtgctatcttacttaattctcacaaaccaccacgaggggtaggatgtatactatcatctctacttttgaaatgagaaaactgaggcttcagtggtgaagacaaatgtgtctcttctagggaaccacactaccttattctcccaccccggcccgggggtgtgtaatgagggactcctatcgaagtcagctgtaagtctatcttgcctattcattatacaggctgtcgtcttcgcgcagtaaggataatatgtgttttgattcaaagaccatccagcttgcacactgtgatgaacagagatcaggagctcatgaaggcaagggcaagtcttatttacctttatctccccgaacctagaagcgaggtcaaacagaagcgctcggggtagcaagaaggctttgtagatattgaaatgtgaatgcatgcccagcccttaccaggtgcgtgaccttaggaaatgcacttgtcctttctgtgccttaattttttcaccaacctgctaatgtatgttcctcagtgaaaatttaaaaaaaaaagtta

SEQ ID NO: 198818 - DNA, 270 bp, Homo sapiens
acacatggttctacgatcaccatggtaagatataagttagaatcacatataggccacgaaactcctgtgcccatgatgcacataacacattttacatttttaatgggtcacttttacttccaaagaaactagaagcccatgattaagacttaaaatatgaacaaacatcctccacaatgcctattttaaaaataattaagtaggataaggggattgggaaagtgtgccagaggtaaaagctacagccaaggaaaacaaggaaaaagtgag

SEQ ID NO: 198819 - DNA, 130 bp, Homo sapiens
cgtgcccatgtgcctggattaccagcttcgcacagagccagacgctgcagcagtaacggggcgccgggcccacctgctgcccctctcctgtgcatagggcgctctctccctgccccgagcttcggcttct

SEQ ID NO: 198820 - DNA, 400 bp, Homo sapiens
aacaacttagggaggtaacaggtggggaggaatgtgcttttgacttcatttcaaagagaaaaaaatcttcgggtaaactctccacaaagcattagtgtcactttctgtttctgatcattggttctaaatgcttattaaaaatgcgttgatttccgattattattatggacacatgtggcttaaactttggtaaaaggctgagctaaggtggatggtgtaagaaagtccatctttgtggggacgcagacgttttcatacagtcagttacgatgcctcttctccccatcctccttgtgcatgtgaaggctgcttttgccatgctaagggtcgaacgtgctctcaggcatgacatgatcctggaaggctcagtcccacacgtcaaaagataaagagctttgta

SEQ ID NO: 198821 - DNA, 226 bp, Homo sapiens
gacatgccttgggcagcagggtagacagtagttatattaaaagttaaataatataataagcataacaactaacagctattcagctatttgccgttgtgctaggaactgtgttaagcacttcatatgcatgataaaatttaatcctcacaccaactctagaaggtaagtactatttttttctcttttacagatgaggaaactgagatttagaagggttatataatat

SEQ ID NO: 198822 - DNA, 408 bp, Homo sapiens
gtaatcacatgtctttatagagtcagagggacatctgactacagatgagaaggcattttacagacaaaggctgactgaagtcatcacgtgctttgaaaatggaaggggccatgataacctgaaataagcaagaaaacagattctcccttcacagcctccagaaggtaccagtcccgccaccaccttgattttagccatatgactaattgcagactcctgatttccagaacgctaagataataaatgtgtggtttatgctactacatttgtgataatttgttacattcagaaacaggaaaccaatacatgggggatatgttatttaccacgaggttgaaaagattccttgaatgagatgtcattagaaggaaggtaagagaagagggtggtgtggcgccacaggaacca

SEQ ID NO: 198823 - DNA, 351 bp, Homo sapiens
agggtcgcgtatctgtaggggtccttctttcccctttttctggccctgcagctcccgcctgcccccaccctagccctcctgtgcaatcctcagaaggcgcctgtctccctgattggagtgagtgagtgagagtgagtgtgtgtgtgtgtgttcaggtattctggtgttcaggggatggggctgggggcgaagttcagtttatgatttgagatgggacagggaagaggtgaggaggacactgggggcacagaggagatacccccagcgagaatgacccctgcttcccagtcagcgtggaggtcctcaccccactagagattcacaaaacagaaggtccatggacttctcccc

SEQ ID NO: 198824 - DNA, 467 bp, Homo sapiens
tgaattatgattattttaatgtgttccaaagggcctaactacattctgagtgatgaatcacaagacactggctgagttattttggttgaattagaggctttggtattgagtaatgtagactaagtggattattggcttggttctatatagcttgtattgtaatgcattttgaccttgtttttgaggtcattttcttcagtgtgtccaaatgtgttagtatataaagagctgtctagaggagcacatgaagaagcttgattgtttattgacatgagcatgacattagacttgtgactatagaactagatagaatcatgagaggtatgtagaatacaattggatgtcattttgatagttattagagttagggccctgccacacaagataataatacaaaaaaagaacacagaacaattaatgcaggttaaaaaacatatgaaggacttgaggcattaaatatcatgatt

SEQ ID NO: 198825 - DNA, 260 bp, Homo sapiens
caatgaaatgaaatatcacataggttgtgaaagtgctcttggcacagtcatatattgtctttgtcttttaaaaaaatgttacatagaagatatcttactatctgtaacttactttctgttttactcaacaatatattttcagagcttatctgtgttgctaaatgtagatcttgttttcaaattttagctggtgtatagtgtttcattgtatgaatatgatacaacttatttatccagtccctattaatgtatatttattt

SEQ ID NO: 198826 - DNA, 922 bp, Homo sapiens
actggaaactttttatctattcaaggaagaattaatttttgatgtttactggctatatattttgcactctccaccttgccaccaccacatatttatactgtgaccaacctagctgaaatgaacttatattttaaatgagtcattttgcagagcaagtaataaatcagctatcaggagtaaggagctctcagcaggccatactgctccattgccaggagggattattttagtagtatcacactaggatttctgaatttatgcccttaatttatgagacattcattgcaggggctttcccaagtgttattttcataaacagcagattaatataggggctttttcttgcatttctttggaaaaatcttgcccccatgtagaatattcaagctctgctacctataaataagctaatgtctttcctctgggctgttgtcccttagccttcaacatcttctagtctgaagcaaaaatcatgcttcattttgttttgctatctttctaatacagtaagagcttcaggtcaaagaactgaagagaatgtgagagcttgaccctctgttatgtttttcgttatttgtagattttccttatgcacttgcccttctgtggaatctttcctcttcattcccttatccctattaggattctaccaatttattgttctaaccttgaagaaacagctttttatttaccttcagctgtaggtggcccaccaggtgtcaacaactgtagagttccatcaagagtcatcattttacagttacaagtcggaggggccttcacagatccgtcaggctcaacactgcctccttagtgagcctgtgaaccacccaagacggctggtcatcagtgtcatcctcttccttttccggacaactatctttaaaagaaaaaaaaagagtgtctttgaatgtatccattt

SEQ ID NO: 198827 - DNA, 1040 bp, Homo sapiens
ctctccaggcaaggcacactgacctggaactccagaacagccatgaaacacccatttgacctcttcaactggcagcagctctgcatttctctgggatgaagctcccagatgcaatagacatatctgctgtttttgctgctattgcagctccagccactacccaactgccttcaaggtcaggagggagtgaagagtgttatgactgttgtgggcctccagcacagggcaagctgccttctggaaaagcagtcatatagtttttaatgttggtcatggccccttctactcctcactggtcagggcctcctggcttgagcctccagcacagccacctacctcagcctgacaacttgggccagaagcagcattgcatttccctgggacagagctctcataggtataagacaggcctgccgtttttgcctgctatagcccctgcccataatgccctcagatcaagagatagcaaagaggcttaaggattatagcaggtcttcagctcagcacatctgccttatggaggtgttgtcagacttttttccatgtctgtctttgctcctgctacttctcactgggtagggcctcccgacctcggccccagcacagctaccctgctcccacttgaacacttcagacagtggcacctgtgcatttctctgggatagaattcccagtgacaacccacagcccctctgccattacatacagtggtaccacccttgctgcctgatatggtttggctctgtgtccccattcaaatctcatcctgtagatcccacaattcccatgttttgtgggaggtacctggtgggaaatgactgaataatggagatgggtatttcccatgctgttctcgtcatagtggatgggtctcatgagatctaatgattttaaaaacaggagtttcctgacacaagctctctcttagcctgctgccatccatgtaagatgtgacttgctcctacttacctttcaccatgattgtgaggccttcccagccacgtggaactgtaagttgattaaacctccttcttttgtaa

SEQ ID NO: 198828 - DNA, 1023 bp, Homo sapiens
aaattagccaggcatggtggctgatgcctgtaatcccagctacttgggaggctgaggcaggagaatcgcttgaacctggggggcggaggttgcagtgagccgagatcatgccattgcattccagcgacaaaagcaaaattccgtctcaaaaaaaaaatgtttctttcagtatctcctgttttgtaaacttgactttggaatgatgtaaatattttacataattatgaaaccaaagtaaaagatttgaggatgaagctggtgcatctaaatgagtatccagggggtagcataaccataccaataatagctttttatcaaaacagtaatttgtgcatcactagtggaatatacctcaaagaaaataagatagtaaaaatatgtattttcagtcatattattagtggtgatgttggtattagtattctgagaccgttgcatgtgtactgtgggttaaagcaaatgagcaataatctaatctgtcattagtagtgtagttcagaactgagattctctgcataggagaaaggagatgtaaaatagaagagaagtaaaaccctgtggtcctgagtttgcattgcaattatctgtatgaatgcactctgtattttactgtaaaagaaaacaaaacatatctcctttttatttatactgaagaggcctaaaaataatcaccaatcctatggcagcgagcatcctagcccttggacagtaattttgaattgacctttcccactaaaggagccacttcataaacattctctttactcatctttttaaaaaaaaaaaaaaaaacaaagacacacccacaccaacaaacaaagaaacagaagaaaaaaaaagaaaaacacaaaacagagacacgcaaacaaagcagcagctgaacagaaagcgcggagacgagcaaaacaaaaagaagacaagcacaacgcgggggagcgggccacaacaagagaacaacaaacagacgacagagagagcaaacgaagaccacgcaaacaaacacgcgggggctaaccaaaacag

SEQ ID NO: 198829 - DNA, 425 bp, Homo sapiens
cacgagggcccaggttagaacagcaagggcaggtagagaagtcaccaaaggacactgaccagatctgtcccatgcatgaatctgggttgtccctgtgtgagccccttgaaccaacagattgtggcagagtgacattgcaccagtctgagacctacaccttaaggatgcctggcagctcctgcttttgtgttcctcggagtcatgagccacgaagtcaagctaccctgctggagagaccagctgaagaagcctcttgaagaggacctgagacttaaggctcagccatcccagactgtgagttaaacctccagatgagtccaaccccacctgctatctgactacagctacatagacgacaaaccacctaagtgattccagtcaacccacacaactgtaaaagataataaaagttgtttaagtcacta

SEQ ID NO: 198830 - DNA, 343 bp, Homo sapiens
tcaatttttttataatttttcctcctcttaaaatattgtaagtcctcatttttaacaaactgaatatctgttattgactttgcattccatatatttgtcataatcattttttagatttttaatccaggttgacttcgtaactagcatttgggaccatatatattttcattcctgctcaaataactggcttaccacctaacccactactctattcagtcttcccttgaattttgtcattatggcaaaagaactgtgtgaagttattagcaattttggctacagtctctcttagaatgtttgttgtccttagggactcacagcaggcaaaaaaaaaaaaaatcac

SEQ ID NO: 198831 - DNA, 1171 bp, Homo sapiens
ctgccacataaatcctctgagggagatgatgacaattcactgctgattaatgccattctgcctttactgtaattagaaggaaataaccccagaatacaaggaatttagcaagataaggaacccctgctgctacctaaacatccatctaaacaaagatgtttggcttttgaagcaaagagtttggttcttaagactgtgttctttgacagttaattttcaagaagactgaagactgaattatcattgttgagaattctctaggtctcagtaaccctctgaaccagcagtttgggtggtcgatgcctagcaaataggagtgggtggccttttctctggtgtataagattcatctaatttttaggaatttttgtaccattttccccctctagaaacacatttactccccaataattgtacgggaggtgatcgaggaagaagaaccaagtgaaaaatcagaggccacctacatgaccatgcacccagtttggccttctctgaggtcagatcggaacaactcacttgaaaaaaagtcaggtgggggaatgccaaaaacacagcaagccttttgagaagaatggagagtcccttcatctcagcagcggtggagactctctcctgtgtgtgtcctgggccactctaccagtgatttcagactcccgctctcccagctgtcctcctgtctcattgtttggtcaatacactgaagatggagaatttggagcctggcagagagactggacagctctggaggaacaggcctgctgaggggaggggagcatggacttggcctctggagtgggacactggccctgggaaccaggctgagctgagtggcctcaaaccccccgttggatcagaccctcctgtgggcagggttcttagtggatgagttactgggaagaatcagagataaaaaccaacccaaatcattcctctggcacattatttctaaataagtgttgtttgtggaaatcgtcctatttttatgcctcggttgagggggcaagtaaagtcctggtgaggaatatacagttagaaacttttggaaaaactgaagttcctggaggaaagccaaaccgtgctaacacactagaggctggttttggtcctgggaaaggtttggggtgaatgggttggaagtagggtatgaatacagttttgggatttaact

SEQ ID NO: 198832 - DNA, 1899 bp, Homo sapiens
gagtgctcgcagcagtctttcagttgagcttggggactgcagctgtggggagatttcagtgcattgcctcccctgggtgctcttcatcttggatttgaaagttgagagcagcatgttttgcccactgaaactcatcctgctgccagtgttactggattattccttgggcctgaatgacttgaatgtttccccgcctgagctaacagtccatgtgggtgattcagctctgatgggatgtgttttccagagcacagaagacaaatgtatattcaagatagactggactctgtcaccaggagagcacgccaaggacgaatatgtgctatactattactccaatctcagtgtgcctattgggcgcttccagaaccgcgtacacttgatgggggacatcttatgcaatgatggctctctcctgctccaagatgtgcaagaggctgaccagggaacctatatctgtgaaatccgcctcaaaggggagagccaggtgttcaagaaggcggtggtactgcatgtgcttccagaggagcccaaagagctcatggtccatgtgggtggattgattcagatgggatgtgttttccagagcacagaagtgaaacacgtgaccaaggtagaatggatattttcaggacggcgcgcaaaggaggagattgtatttcgttactaccacaaactcaggatgtctgtggagtactcccagagctggggccacttccagaatcgtgtgaacctggtgggggacattttccgcaatgacggttccatcatgcttcaaggagtgagggagtcagatggaggaaactacacctgcagtatccacctagggaacctggtgttcaagaaaaccattgtgctgcatgtcagcccggaagagcctcgaacactggtgaccccggcagccctgaggcctctggtcttgggtggtaatcagttggtgatcattgtgggaattgtctgtgccacaatcctgctgctccctgttctgatattgatcgtgaagaagacctgtggaaataagagttcagtgaattctacagtcttggtgaagaacacgaagaagactaatccagagataaaagaaaaaccctgccattttgaaagatgtgaaggggagaaacacatttactccccaataattgtacgggaggtgatcgaggaagaagaaccaagtgaaaaatcagaggccacctacatgaccatgcacccagtttggccttctctgaggtcagatcggaacaactcacttgaaaaaaagtcaggtgggggaatgccaaaaacacagcaagccttttgagaagaatggagagtcccttcatctcagcagcggtggagactctctcctgtgtgtgtcctgggccactctaccagtgatttcagactcccgctctcccagctgtcctcctgtctcattgtttggtcaatacactgaagatggagaatttggagcctggcagagagactggacagctctggaggaacaggcctgctgaggggaggggagcatggacttggcctctggagtgggacactggccctgggaaccaggctgagctgagtggcctcaaaccccccgttggatcagaccctcctgtgggcagggttcttagtggatgagttactgggaagaatcagagataaaaaccaacccaaatcattcctctggcacattatttctaaataagtgttgtttgtggaaatcgtcctatttttatgcctcggttgagggggcaagtaaagtcctggtgaggaatatacagttagaaacttttggaaaaactgaagttcctggaggaaagccaaaccgtgctaacacactagaggctggttttggtcctgggaaaggtttggggtgaatgggttggaagtagggtatgaatacagttttgggatttaact

SEQ ID NO: 198833 - DNA, 1836 bp, Homo sapiens
gagtgctcgcagcagtctttcagttgagcttggggactgcagctgtggggagatttcagtgcattgcctcccctgggtgctcttcatcttggattattccttgggcctgaatgacttgaatgtttccccgcctgagctaacagtccatgtgggtgattcagctctgatgggatgtgttttccagagcacagaagacaaatgtatattcaagatagactggactctgtcaccaggagagcacgccaaggacgaatatgtgctatactattactccaatctcagtgtgcctattgggcgcttccagaaccgcgtacacttgatgggggacatcttatgcaatgatggctctctcctgctccaagatgtgcaagaggctgaccagggaacctatatctgtgaaatccgcctcaaaggggagagccaggtgttcaagaaggcggtggtactgcatgtgcttccagaggagcccaaagagctcatggtccatgtgggtggattgattcagatgggatgtgttttccagagcacagaagtgaaacacgtgaccaaggtagaatggatattttcaggacggcgcgcaaaggaggagattgtatttcgttactaccacaaactcaggatgtctgtggagtactcccagagctggggccacttccagaatcgtgtgaacctggtgggggacattttccgcaatgacggttccatcatgcttcaaggagtgagggagtcagatggaggaaactacacctgcagtatccacctagggaacctggtgttcaagaaaaccattgtgctgcatgtcagcccggaagagcctcgaacactggtgaccccggcagccctgaggcctctggtcttgggtggtaatcagttggtgatcattgtgggaattgtctgtgccacaatcctgctgctccctgttctgatattgatcgtgaagaagacctgtggaaataagagttcagtgaattctacagtcttggtgaagaacacgaagaagactaatccagagataaaagaaaaaccctgccattttgaaagatgtgaaggggagaaacacatttactccccaataattgtacgggaggtgatcgaggaagaagaaccaagtgaaaaatcagaggccacctacatgaccatgcacccagtttggccttctctgaggtcagatcggaacaactcacttgaaaaaaagtcaggtgggggaatgccaaaaacacagcaagccttttgagaagaatggagagtcccttcatctcagcagcggtggagactctctcctgtgtgtgtcctgggccactctaccagtgatttcagactcccgctctcccagctgtcctcctgtctcattgtttggtcaatacactgaagatggagaatttggagcctggcagagagactggacagctctggaggaacaggcctgctgaggggaggggagcatggacttggcctctggagtgggacactggccctgggaaccaggctgagctgagtggcctcaaaccccccgttggatcagaccctcctgtgggcagggttcttagtggatgagttactgggaagaatcagagataaaaaccaacccaaatcattcctctggcacattatttctaaataagtgttgtttgtggaaatcgtcctatttttatgcctcggttgagggggcaagtaaagtcctggtgaggaatatacagttagaaacttttggaaaaactgaagttcctggaggaaagccaaaccgtgctaacacactagaggctggttttggtcctgggaaaggtttggggtgaatgggttggaagtagggtatgaatacagttttgggatttaact

SEQ ID NO: 198834 - DNA, 1567 bp, Homo sapiens
gaaatgtcatcaagaataaaagtatacttttgctttttttttattggaaaggtgcacaaaatgaaagtcctccttttcttatccctccattcagatggaaaaactgttcatggttttgtgatgtccttcacaagtacacacgcatgcacatgtgtgtgtacatgactttgtgttatttaatgctttctgataatacccttactgccttcacctagcagggccttggagtcctgagatcttccctcccccattttctctgctccccgctccactccagtcctcacaatatcatactttttgtctttcacttctaggaggagattgtatttcgttactaccacaaactcaggatgtctgtggagtactcccagagctggggccacttccagaatcgtgtgaacctggtgggggacattttccgcaatgacggttccatcatgcttcaaggagtgagggagtcagatggaggaaactacacctgcagtatccacctagggaacctggtgttcaagaaaaccattgtgctgcatgtcagcccggaagagcctcgaacactggtgaccccggcagccctgaggcctctggtcttgggtggtaatcagttggtgatcattgtgggaattgtctgtgccacaatcctgctgctccctgttctgatattgatcgtgaagaagacctgtggaaataagagttcagtgaattctacagtcttggtgaagaacacgaagaagactaatccagagataaaagaaaaaccctgccattttgaaagatgtgaaggggagaaacacatttactccccaataattgtacgggaggtgatcgaggaagaagaaccaagtgaaaaatcagaggccacctacatgaccatgcacccagtttggccttctctgaggtcagatcggaacaactcacttgaaaaaaagtcaggtgggggaatgccaaaaacacagcaagccttttgagaagaatggagagtcccttcatctcagcagcggtggagactctctcctgtgtgtgtcctgggccactctaccagtgatttcagactcccgctctcccagctgtcctcctgtctcattgtttggtcaatacactgaagatggagaatttggagcctggcagagagactggacagctctggaggaacaggcctgctgaggggaggggagcatggacttggcctctggagtgggacactggccctgggaaccaggctgagctgagtggcctcaaaccccccgttggatcagaccctcctgtgggcagggttcttagtggatgagttactgggaagaatcagagataaaaaccaacccaaatcattcctctggcacattatttctaaataagtgttgtttgtggaaatcgtcctatttttatgcctcggttgagggggcaagtaaagtcctggtgaggaatatacagttagaaacttttggaaaaactgaagttcctggaggaaagccaaaccgtgctaacacactagaggctggttttggtcctgggaaaggtttggggtgaatgggttggaagtagggtatgaatacagttttgggatttaact

SEQ ID NO: 198835 - DNA, 1929 bp, Homo sapiens
gagtgctcgcagcagtctttcagttgagcttggggactgcagctgtggggagatttcagtgcattgcctcccctgggtgctcttcatcttggatttgaaagttgagagcagcatgttttgcccactgaaactcatcctgctgccagtgttactggattattccttgggcctgaatgacttgaatgtttccccgcctgagctaacagtccatgtgggtgattcagctctgatgggatgtgttttccagagcacagaagacaaatgtatattcaagatagactggactctgtcaccaggagagcacgccaaggacgaatatgtgctatactattactccaatctcagtgtgcctattgggcgcttccagaaccgcgtacacttgatgggggacatcttatgcaatgatggctctctcctgctccaagatgtgcaagaggctgaccagggaacctatatctgtgaaatccgcctcaaaggggagagccaggtgttcaagaaggcggtggtactgcatgtgcttccagaggagcccaaagagctcatggtccatgtgggtggattgattcagatgggatgtgttttccagagcacagaagtgaaacacgtgaccaaggtagaatggatattttcaggacggcgcgcaaaggaggagattgtatttcgttactaccacaaactcaggatgtctgtggagtactcccagagctggggccacttccagaatcgtgtgaacctggtgggggacattttccgcaatgacggttccatcatgcttcaaggagtgagggagtcagatggaggaaactacacctgcagtatccacctagggaacctggtgttcaagaaaaccattgtgctgcatgtcagcccggaagagcctcgaacactggtgaccccggcagccctgaggcctctggtcttgggtggtaatcagttggtgatcattgtgggaattgtctgtgccacaatcctgctgctccctgttctgatattgatcgtgaagaagacctgtggaaataagagttcagtgaattctacagtcttggtgaagaacacgaagaagactaatccagagataaaagaaaaaccctgccattttgaaagatgtgaaggggaggtgaacacacgcttcagcctaaaacactaaaaacacatttactccccaataattgtacgggaggtgatcgaggaagaagaaccaagtgaaaaatcagaggccacctacatgaccatgcacccagtttggccttctctgaggtcagatcggaacaactcacttgaaaaaaagtcaggtgggggaatgccaaaaacacagcaagccttttgagaagaatggagagtcccttcatctcagcagcggtggagactctctcctgtgtgtgtcctgggccactctaccagtgatttcagactcccgctctcccagctgtcctcctgtctcattgtttggtcaatacactgaagatggagaatttggagcctggcagagagactggacagctctggaggaacaggcctgctgaggggaggggagcatggacttggcctctggagtgggacactggccctgggaaccaggctgagctgagtggcctcaaaccccccgttggatcagaccctcctgtgggcagggttcttagtggatgagttactgggaagaatcagagataaaaaccaacccaaatcattcctctggcacattatttctaaataagtgttgtttgtggaaatcgtcctatttttatgcctcggttgagggggcaagtaaagtcctggtgaggaatatacagttagaaacttttggaaaaactgaagttcctggaggaaagccaaaccgtgctaacacactagaggctggttttggtcctgggaaaggtttggggtgaatgggttggaagtagggtatgaatacagttttgggatttaact

SEQ ID NO: 198836 - DNA, 869 bp, Homo sapiens
gagtgctcgcagcagtctttcagttgagcttggggactgcagctgtggggagatttcagtgcattgcctcccctgggtgctcttcatcttggatttgaaagttgagagcagcatgttttgcccactgaaactcatcctgctgccagtgttactggattattccttgggcctgaatgacttgaatgtttccccgcctgagctaacagtccatgtgggtgattcagctctgatgggatgtgttttccagagcacagaagacaaatgtatattcaagatagactggactctgtcaccaggagagcacgccaaggacgaatatgtgctatactattactccaatctcagtgtgcctattgggcgcttccagaaccgcgtacacttgatgggggacatcttatgcaatgatggctctctcctgctccaagatgtgcaagaggctgaccagggaacctatatctgtgaaatccgcctcaaaggggagagccaggtgttcaagaaggcggtggtactgcatgtgcttccagaggagcccaaagagctcatggtccatgtgggtggattgattcagatgggatgtgttttccagagcacagaagtgaaacacgtgaccaaggtagaatggatattttcaggacggcgcgcaaaggtaacaaggaggaaacatcactgtgttagagaaggctctggctgatggtatcaggacaaaggtagaatcaggcacatgaggaggtgttgcaagagcctgggctttggtgcttatcagaactggaccttctcctagcaatttcagctttctggtgggaaagataactccaatgaagaacaagaacaagaagatgatgatgatgcttaactttttggatgccgat

SEQ ID NO: 198837 - DNA, 179 bp, Homo sapiens
gctgctattggaaccacaggaccgatgcttacaggagacacatctgttagtatgacgcacaggataatgcttaggataaatcattcaatttgcataagagtgtgccaacttatttaatgtttgtaaattcacagtagccataacaattctgagtggtgagaaaaccacttatggaggag

SEQ ID NO: 198838 - DNA, 385 bp, Homo sapiens
ctaaaatcaccctaacttattcaacatcactgcgcggctgttcacttatcttcacattttaaaagataagcactccaagcaggtagaaaattccaatgatatttttgcaggaattaccaaacacaacctactcacccttatgcaaatgtgaaatcatgttagcccaagcgaatggaagttacaaactcattcattccataagcatttctggagaacctagtgtcccagattctgtacagaggctcccactgacctcatttccaccagccacttaactgttctcttctcaagatctcttctttcagtcacaaggaatcaaatagaacagccctgagctggctctactgaagggctcactaacaagtcaaatataggaaaggaaaga

SEQ ID NO: 198839 - DNA, 290 bp, Homo sapiens
ctcaagagtttggggtggagactgaaggaacagacaggagagaaagaagaaggatttgggacaagttcgcactgggagtagagactagggagggactgatgtgtagtaaagaatgcctggacgtcaggcacctcagacccatttgcccattttttcgacaaaaatcatccagataaaatggagaaatcaaaagtgttgttttctggctatttagaacaattattgagtttgtattggggccaagcggtgttgcagaagaaaataagacgcttaggttttaggtcaggcaa

SEQ ID NO: 198840 - DNA, 388 bp, Homo sapiens
tttgtccacacaaaaacttgcacatgaatatctatagagaagctttattcacaactgccaaaatctggaagcaaccaagatgtctttcagtaggtaaatggataaactgtggcaaaagcagcttcctgaaaaggaaaagtcgaattctgaaaaagagaaggaaaacaggcagcccatgtggcctggggccaaaaatggggaatgaatcccccatatggaagagtgtaagtgagtgtccttctggggtccactttccctgggaaactgtacaatccaggccattggagagcaccttgactctcctaatctcagaatcacatttaaggagcagccaggaaaccatgagaagaaactgctccagggtgtgtcctatgtgctctctcagacc

SEQ ID NO: 198841 - DNA, 284 bp, Homo sapiens
gggagtttgtctgctgggaacctgtaggaggatgtgggaacacacctcagggcacagctggcaggcagagcctgagaccccaggagtgacaatagctcccacaaataatgagaatatacagtttgtctttttgtgcctgacttatttcattgaacataatgacctatagttttgttcatgtgctgcaaatgactgtacctccttctcttttatggccaaatattactcccttgtgtatatgtactgtagtgaacagtgctgccataaacatgggaatgcggata

SEQ ID NO: 198842 - DNA, 781 bp, Homo sapiens
tgaaatgaaatgatgaaataatgaaacaaaattaaatatgaaatgaaataccaaagtgctgggattacaggcgtgaaccaccaggccgggccaagccagattctttaaagtggctctatcttctctgtaatttgctcccttgccactttgatgactccagattctactcctattcccattgtcttttaactcccacttcagggcctttattcttgctgttaccatttcctagaacaatccttccagatacctacctcaaatgctgcatcatctgtccatctttgttcagataccaccttttctttgaggccttctcttaaacactgtcgtacatacagttttgcacatacattttagttgcaggataaattgctaaaaattaagttatttgagaaaattatctgcatgcttaaaacgtgaatgactactgcccaatgacccttctagtacttgctaacgtttgccagtgtgagcatctaccatcactttttttttttttttgagacagagtttcactctcgttggccagactggagtacaatggcatgatcttggctcacagcaacctctgcctcctgagttcaagcgattctcctgcctcagcctccccagtagctggaattacaggcatgcaccacgatgcccggctaattttgtgtatttttagtagagacggggtttctccatgttggtcaggctgatctcgaactcccgacctcaggttgcagtgagcagagatcgcgccactgaattccagcctgggcgatagagcgagtctgtc

SEQ ID NO: 198843 - DNA, 692 bp, Homo sapiens
ccaggcgcgcggggacgcggaggccgcgcatcctttcccagctccccaccctccttgcctttgggtgcgcgacaaacaatcgctccgggctcagggctgcgcggctcttcccttcattccatgggcctttttttgggcacaataaagcgtttaaacctttaaaaaaagaaagcaacataatatgaacatctttgttaaaaaacgaaccttttctttgaggccttctcttaaacactgtcgtacatacagttttgcacatacattttagttgcaggataaattgctaaaaattaagttatttgagaaaattatctgcatgcttaaaacgtgaatgactactgcccaatgacccttctagtacttgctaacgtttgccagtgtgagcatctaccatcactttttttttttttttgagacagagtttcactctcgttggccagactggagtacaatggcatgatcttggctcacagcaacctctgcctcctgagttcaagcgattctcctgcctcagcctccccagtagctggaattacaggcatgcaccacgatgcccggctaattttgtgtatttttagtagagacggggtttctccatgttggtcaggctgatctcgaactcccgacctcaggttgcagtgagcagagatcgcgccactgaattccagcctgggcgatagagcgagtctgtc

SEQ ID NO: 198844 - DNA, 539 bp, Homo sapiens
ttcatctaattttcaattcaatgattttagtatgattcagtgattttagtaaacttgcttagtctgcaaccatcaccataatccagttttagaacatttccatctttccagtaagttccctcaggccagtcagcagtgaatccccattccctctctcagccctgggtaaatgaaactgacccagtggtctcatagatattttctgataaatataggaattgacccttctaatcttaaagcttgaaacttatatttgtttaatctgagttcctccctcagaaaatgaccatcaggtctctcaaaaaaaagtatcaaacaactgaaactcaccagatcatcacatccagacaatgagatgccagacccctcattcaccgtgatggcttccttgcgtctccctagttcctgttttcttacacacagttgcattttttttccctgttatataaactcctggttttagcaggtcagggaggtggatttgagagtgagtttccatctcctcagctgcagcacctgattaaagattcttccttggc

SEQ ID NO: 198845 - DNA, 151 bp, Homo sapiens
aacatctggctctccaccacttggcatgtccagatgcagaaacacaaagtgataatgtgcttatctgttaactaccagatgttgttccttcacattctcattcagtctgtttgagactcatgatacgttttttcttattacattagtctaa

SEQ ID NO: 198846 - DNA, 476 bp, Homo sapiens
aaaaaaaaatatatttctagagaagtcatttttgtgcctcagctttcttaactgtaaaatgaaaattttatactttttcttctactttgtaaggttattgtgagtatcaaatgaaatcaggatgtgaatatgctttgtttactgtaaggcattgctaccagcataattcacaaaggatattttttcttataattaaccaaaacataaacctcattgctcagagattctgaagtccacaagtgctcagaaggttgaaatgcttctttgccatggctctggcaatacagtaacagaatgaagcttttaatacacaaaacaaactaaccaacaaaacagataactgactgagtcttggggaaattactgagaatacttctagttgagtgttgtgtaaatgactaaatacttcaaggcaggagcatttaggaagaccaataaaaaccagagtatggtcattcggcgagtgcagggtagag

SEQ ID NO: 198847 - DNA, 291 bp, Homo sapiens
tacaagcagaccaagacaagaataagagcaacaaaacacatgttgcagaaaaggcacttccctgaagccctgccttggcctccaaacctccactatgagatgccgcagctggtatcttctcttccaagttgctgtcccctcaaatacatacacatgagcacttcagctacatctgctctgtggggaggggaagatagctctatgtgagatgtaaacacaaaggcaggcagcactattctattctcagtcctcttcctcttcaccaaccatttttgttcctagtggagtcat

SEQ ID NO: 198848 - DNA, 531 bp, Homo sapiens
ggtgtgctgtgtgccttgtgaccagtccagaaagaaaagcagaggtctctgaggagcaaggggcccctgccagcctgctcttttcaaagctcatctttcaattcctgacccttggctccagcccctcgagtgggtgcccactgctcttaggatgaaaaccagtgtcctgttcctgactgctggtgcctatgtggtctggccttgccagcctgtctgacctcatactcaccgctgactgtctgctcaccaagctttggccacgagggccttcttaaattcctcaaatgcccagcccctacccaccccagagccacctgtctagaactttctttcctccctttggtctggcagtgtctcctcatccctctgctctcagcttattattttattttaaaatatttctttttaaaaggccaggtgcagtggctcgcgcctgtaatcccagcactttgggaggctgaggtgggcagattgcttgagcccaggagtttgagaccagtctgggcaacgtggtgaaactccgtctctaca

SEQ ID NO: 198849 - DNA, 478 bp, Homo sapiens
cgtttacgagttgacatctctgaaggctctatgaagaggaatagcatgagtgtgctgtcagaatcagatgttactgctaaaatttacatgtagtgatgtaaattgtgtagaaaaccattaaatcattcaaaataataaactatttttattagcagaatgtatactatttagcaaagctgtctccttatttaaataaaatagtgttcgtctgtagttcagtgtaggggcaatcttgggggggattcttctctaatctttccagaaactttgtctgcgaacactctttaatggaccagatcaggatttgagcggaagaacgaatgtaactttaaggcatgaaggcactcgacatgattcatgtgcatgtgccatcatccccggcctgtctgaaactctttttgtgatgttagtgttgacctaaaatgaagaagctgagtgaagagtttatttgggccaagcatgatgattgcaacccagg

SEQ ID NO: 198850 - DNA, 572 bp, Homo sapiens
tactattatctccatctacaagtgaggaaactgagacatggcacagttaagtcatccgcccgatgtcatactatcaatgaatgagaaagctgagatacagacccaggcagtggctctaaagcctggaccctggcatgctaacccagaagagatgcctcatatcatggataagggaggctggaaaaagcgccccagaacataggaggtggtgactaaggtgggtcttagagggagaacaggaccctgcgtgccaggggtgggagtggggttacgaagtggatattctaggcagaaggaagaacaagagagagatgtgaaactgcgtgacacattcaaggaactgcaaatagctcgacacagctgctggaaaacagctctgaagtggctggagcctcatcctgcagggcctcatctaccacagtagggaactggacccatcacagtaagttaaaggcttcacaacatgactgtattctggcaacagtgaggggagtggatatttttggggcagtgggcaagacaaaagacagggagatcagctgaagatgatgaaggcaggagcagaaggaatg

SEQ ID NO: 198851 - DNA, 314 bp, Homo sapiens
taacgttattgtttgacccaagtctgttgttatttttttcttgttttctgaattatctgcatttaatatataaccttggtttgagttctccttactgaaggcatagctttgttttttgttttttcaattgattttaagaagaaattcctattattgtcatgaacactggacatactagaaactttcttttcatggtaacaaaggtatttggaattcttttattttcctttcttcctttttttctctttcaacacactattaaagcagaagaattcatgctgtaggtatgctcttgctcagtcaaacaataaata

SEQ ID NO: 198852 - DNA, 557 bp, Homo sapiens
tgaccgcggaaaacattcatgcttttattatagatctgcaccatctttcttaacattggattagaacaccatgaagtaatttctcttttaaaatggatacataatagttgtacatattttgagggtacacgtgatattttaatatatgcatacaatgtgtaatgatcaaatcagggtaactgggatattaatcacctccaacatttatctttttatgggaagactccagttcttctcttccagctattttaaaatatacaataaattattgttaactacagtcacccaactgtactatcaaacactaactcttattccttctatctaactgtatttttgttcccattaactaaccactctctatccccccatactccctacctttcccagactctggtaaccaccaatatatcctctacctccatgagatccacttttttagttcccacaatgagtgagaacatgtgatatttgtctttctgtgcctggcttatttcacttaacataatgaccttcagttccatccatattgctgcaaatgacagaatttccttctt

SEQ ID NO: 198853 - DNA, 483 bp, Homo sapiens
ggccctggatgaggaattcctgggtcgccccccttagaacatgtctggttttggaaacaggttaaaaatacttgaggagggcatggcacgctcagtctgcttccctgatgtttgaaataggccaggaatgtgggccgggaagcccagaggagcctgcgtgtcccgcagggttttgtagttggagcctggggtttctcctctccatcatcaccccctttaactgccagtgaccacatgccagattcatgaagggcacactgaaattgacgaagacctgtgccatgggtagcgggaaaaactgggctccctttagtaagcaggatggtgttgaggtctcggaggcaggcaaggggtgggctcggaatctctcctggaagagaaaagagaagggaatttggattctgtatacaaatatagaaattccctaagagtttaaatttgaacatggcattcaggggagaagattatgggttccaagccttt

SEQ ID NO: 198854 - DNA, 536 bp, Homo sapiens
  misc_feature (6)..(6): n is a, c, g, or t
cacccnttcgtctgcatagtttgcccttttcaaaaatgtcatatagttggaatcctccagtatgcagatttttcaaattggcttctttcacttggcaatatgcatttaaggttcctcaatgtcttttcacagcctgattactcactcatttagggtttaagaagtaatgaaaacgttctaaaatttagttgtgatgatggctgctgagctctacgaacatactaaaaaaaaaaaaatttttttttaaatcgctgaattatacacgttaaaagggtgacttctagttgggtgcagtggctcacgcctgtagtcccaacacatcatgaagctaaggcttgagcccaggagttcaagaccagcctggacaacacagcaaaaccccatctctacaaaaataaaaaattaaactttacaaagtattttctcctaccataacaaaagtaaactaaaaatttgtaacaaaaaggtatctggaaagtaactaaatatttagaaactaaacacatatctaaataatccacaggtcaaatgggaag

SEQ ID NO: 198855 - DNA, 141 bp, Homo sapiens
ggcaattttttttcatgatttcaccaacaaatagcaagccctctctctaagaaatgtcaatgatgctggaaaaaaaataaagttccattttcatgtgatataacatgtgatattaattagggtaatactagccatgaaaag

SEQ ID NO: 198856 - DNA, 608 bp, Homo sapiens
tattacaagatgctagccctgaaattcaggactaatgctgtaattaataaggatatgatgaaatagtcaatattatgcaggttcattcaagaaacatttattgagttcctcctatgagtcagatccaaaccttgctttcaagttgctcaccacccagcgctggccactcacccataagcaacacaggacaactgccacgtcatgtataaggtgctaggagagcatgaggaaagggaagacccaggttctaaatagagaggaccagcagaattaggaaaaatcccttcacatcttgctgactagccctaattctactcaccttacttccaagcagggggcatgcacatacacattcaattaataaactattatctgctggccaaaaccctccagtcatttcagtgaaggtcaagccctcttttgtttctgtagtggtggaggactctaggtagccaggaagaaggatgcagatattcctaggatttaaggtagtaccaataacgctatgcaaagttactaaaaatttgaaatctgttccttccactgtaacgtgcccttaaaagtcaactgaatcaaaccttgagttgtgtggtcctaaaagatgaagt

SEQ ID NO: 198857 - DNA, 522 bp, Homo sapiens
cattgcaggcttaaaatgttaacagcctctataaatgtgtcttttggctgtttgcaagattagtctatgcattgttatatttaaagatagttatttagagataatactgatgaaacattccttatggataaatttgaatagaaaggataacatttctgttggtatcaggatagagttttgtgtaagttaacgatttttaaatattttaagtcattttagtttagttgacataggcggtatggtgaatcacataccatttgaaaacatttactgttatgaccgcttaagaaaagcattatgtttgtaattaagtggggaaggatattgttttttaaaaaggggagtgctatataaatagtatatggcttgttatgacctgttgttaaatttacttccttggtatttttttaataccttatactaagcatcggtccttaaatgctaataaaatgatatgctatagaaatttacaatcagtgcttcacaatcccatctacattaaacttaaggaccattcaaaaa

SEQ ID NO: 198858 - DNA, 306 bp, Homo sapiens
acccagacatcctttctattgataataactttttcaatcaaccaattgccaatcaggacatgtttaaatcttcctgtgatctggaaacacccaccccccgcccagcttcaagttgtcctgcccgtctagatcgaaccaatgtaaaaatcttacatgtattgattgctgtatcatgtctccctaaaatgtataaaagcaagctgtatcctgaccaccttgggcacatgtcaagacctcctgaggctgtgtcactggcccatccttaaccttggcaaaataaacttcctaaattgattgagacctgtc

SEQ ID NO: 198859 - DNA, 460 bp, Homo sapiens
aagaaggcaacaaaaagaaataaaaggcatccatattggaaaattcaaaataaaactggcactatttatgaacaataggattatcatgtagaaaatcctaaggaatccactaaaatgctgctagaactaacaagcacaaagaatgcaaagtcaatatgaaaaaaaccgtatcttatatatagtaacaatgaacaattgcaaattcaaataaaactgtatcatttacattaattagacataaatccaactaaatatggactatatgctgaaaattacaaaaccaatggtaggaaaaattaaagaatacctttagatgtccgcctttgtaacctacttaaaaagattatgttcttatacaccttgaagcataaagcagagcaagaaatggaaattttaccctgtgagtgttctacttgggagagaagcagaaagaaaacttaaaaactggattcaagaaagc

SEQ ID NO: 198860 - DNA, 346 bp, Homo sapiens
cgagggttcagacatgatccaggattgcagccctggagggccgcagggctcacggttgaagccctcgcggaaagccccggaggaagtcaaacctcccggctctttatgaggggactctgagcctctgctctgaggatctgaaacacacacaccctgacagtgtaaaatccaaaaggagccgcctgaatcatgttgcctcatgtggaaatccttagtccgccgccacgtgaagatggatgtgactagaacggagggcgcgggaggctcacatcagaggagctgctcacgtcaggccaacatcctcctctcctgatcccattcaggaatcgtcagacaaaaccatcct

SEQ ID NO: 198861 - DNA, 505 bp, Homo sapiens
ggccgacccttccttaggcctcagctttcccatctgcaccctgcagcatctctaagggcccctccagcataggtggtttgtgaaactcacaggtggtccccaggccaagatgggcaggtgtcacaaagaagagggccctaagggctcacaaccaaagtgatccgccaagcagggcagtatctgggttacagccacagcaggaagaaccactggagagacactcagaaggacttccctgacatctgcaccaaggagagtctggacaaagctactgaaactcctccacctgcttctaaaatgcccagaagacaactggaccagtttggtattagaagtaggaggctggacgacttcacccccaaagggtcctgaagccccagaactggcatgtggaaggggctgaggcctaattgaggttggtggattcacacatgggggtcctccaggacctcagctgcacccattttctggaggttttgctgcccacaacaccagtatttcacaa

SEQ ID NO: 198862 - DNA, 900 bp, Homo sapiens
tttgtaatatattgttttataattattcactatagacattcactggtgggttgaagtgtgaggcagtgagctgtgggtattaataactgactcgtgtcagaagcttagcagtgaacaaagcactttctcggatacggttcttagagcttctcctgcttcttttcccggggaagaaacttgagctgctaacattttgtaaacctcctaatttcctgtaaatcacatgtccctgctgagtggggctgaaaatgtttcgggcaatggttttcacccttaggtctgttcacactgcccagcagccagttagcttctctctgtagtttatggtgtagtttgtcctttttctgccggggtgggaggcatggggctttcatgctctggggtttttgaggtctgccagcctctggggagggaggtgttgggcaagcctcgtgctctggtggaaactgaccccctagatgtgacctcggcatttcctaaagctgggggcgggactggggtaggcggtagtcaaggccctttggtgaagcaagcgattgtctccagcgttgtcagcttcgctcctccataagacagttgctaatttccacctctgttttcacctacataagacactttatgacaggtttaacttttatgttattattagctctagccactggtatttcatactcagttcgtctgagctacttataaagtgacaagtccagccagggcaacatggtgaaactccgtctctacaaaaattagctgggcctggtggcatgcacctgtagtcttagctacttgggaggctgaggtgggaggattgcttaagcccagaaggcagaggttggagtgagccatgatcacgccactgcactccagcttgggtgacagagcaagaccctgtctcaaaaa

SEQ ID NO: 198863 - DNA, 422 bp, Homo sapiens
aagaaataacaacaaaaaaacccagtgttaaccctgatctttcatggttgactccctgagtcaaaggtcaggctttatatgtgaccagcacagaagggccaattggtggtattcttagaacaatgacccgggcccacagcagtcactggcaatagtaacagctgcatagggtctgcttaggtctggatgttggggatggatctggcatggctttttgtggaagacatgttggaactcaggtctgtgggagaggaaggtgtcccctcccctcggcaggtttgtctccttgccttggatatggggaaggccagaggcacaaggggaaacagggtgtcaggaggttgagaagaggcctgtgttgctagaactcagagagtgaggggagcagggccttgtaggtccctggaaaggtttgatcttta

SEQ ID NO: 198864 - DNA, 180 bp, Homo sapiens
ccctttagacataccaaatcttgagccatttgagatagtggatatctttctaaagtggaaaccctcccccacgaccatctttttaaacacagtaaagcactggcataccaacgcaggagcagtaggagtggtctgtctggggtgcaaacaataagagggtagtgtgtagagaatttaaag

SEQ ID NO: 198865 - DNA, 434 bp, Homo sapiens
cagtgtacccgccctccttccaagggggtggtgaggaccaagggtggggcagcctggctgggcagcctttcctcctctagccgatcccattgccatgggctctatttagagctcttgtttcttgtgagctctgcctgggccaccaggaaggtgcaggaagggcacacgttggctgggtatgagcgtctcaggaactagtggcttttcaatgataaattgaatgcacagagccacttgcttccacaactctgactcttgacttttttttttttttcctaaaggcaagttttaaaatttggaacaaggtatcatctagccagaggacacagtacagtcctcagagagaaaaggggcctggctgacccttttagctccgctggctccaggagaatctgaggttgcaccagaggtggaatgcgtaggcttcagggtcc

SEQ ID NO: 198866 - DNA, 97 bp, Homo sapiens
caatgcatgaaaatgccatttggggcaagattcaaagaaatggtgtgtagaagtaaaagatgagtaacatccctcagcatatattcttttcagtggc

SEQ ID NO: 198867 - DNA, 444 bp, Homo sapiens
acctagacttatttctgaagaacttcaaacactgtagatttaggaggagcttatactcttcctccactactaacctcaatcctgtggccaagaattcaaattttatcctcattcctctgtctagcacatcttttggtacaggtgctcaaaagcacagaatgactctaggatgaccaagctcagtccctgagccacccaggacccctgtatgtggtgtgaatgttgagccctagtgaagggaactcggggattaaatggagataattctttggaggcaaacttaacctgtggctgggtcacttctcaaaggttattatcactctctgaagtcagaaggccacacttgggaccctctgacccatgtcacaggaagtagaggggcaattctagtgcagttcacacacgtgggtatttaaacaaattatctcctctttgcactccctt

SEQ ID NO: 198868 - DNA, 257 bp, Homo sapiens
gaaaagaaatctcttttaaattcaggaactcataggcagaagggacagtagccttgtctcagatgagactttgaactttttacacttggaatgagttaaggctgttggaacttttgaaaaggcatgattgtattttgctctgagttaaggacatgagattctggaatatcagggtcagaataatatggtttggctgtgtgtccctataaaaattcaggtggaattgtaattccaaatgttgaaggtggggcctgggg

SEQ ID NO: 198869 - DNA, 438 bp, Homo sapiens
gattgtttctactttttggctgctatgaataatgctgctgtaaatatttgtatacaagttttggaatggacatgggtttttaaaaatttctcttgcatagatatctatgagtggaatttctgggttatatggtgactttatggttgatattttgagaaactgccaaactgtttttcagaatgagtgcaccattttacaatccaaccagcaatgtatgagagccccaatttattcacagctcaccaacacttgttactgtcttttcttcttatgttagccattttagtggatgtgacatggtctcctaatacatgaaagattttggttttgatttgcattttcctaatgactgatgttgttgaacatcttatgttacgatcagagaatgtaaacctgtcaattcccaacattaaaacatttatcagattttttggtggc

SEQ ID NO: 198870 - DNA, 386 bp, Homo sapiens
gtttgtgtttatgagctcagttggcctataattttcttttattgtattattcttggcttatttttatataaaagttatgcagtcctataaaagaagtgagtgttccctctttttctgttcactagcagagtttggcagttggaagaatttactggtgaaacccatctgaacctgaagttttattttgagattctttattttgtgtgtgtgtgtgtgtgtgtgtgtgtgtgtgtgtgtgtgtgtgtgtgtgttttgagacagggtctggctttgtcactgaggctggagtgcagtggtgcaatctcggttcactacaacctctgcctcccaggcttaagccatcctctcacctcagcctccaagtagctgagaccagagatgcatgc

SEQ ID NO: 198871 - DNA, 475 bp, Homo sapiens
gtgagccaagatcacatcactgcactccagcccgggtgacaaagtgagaccctgtcttttaaaaaaagaatcatttattgagctctgggactggcgtggtggctcacgcctataatctcagcattttgggaggctgaggcaggagaattgcttgaacctgggaggcggaggttgcagtgagccaagattgcactattgtaccccagcctgggtgacagaacaagactccatctcaaaaaaaaaaaaaaaattatgctagtattaaatgattctatcctcatatgaaaacaaaacacaacatattgctcctttatatatcctcctcttcccactcttctccccagatatggcttgatacacatccttctaaacacttgtctatgaatatacataaataaaagtacataaaaatactgtatatacaaatgtgatctgtgcatacttttctgcaattttttctcaggtattcagaagc

SEQ ID NO: 198872 - DNA, 560 bp, Homo sapiens
atgattttcccaaccccagaggtttggtatagggtggagggtcccactgtctacagagacaaagcaggtaaggcatgagtgaagcagggcgtgtgtgagtgaacaaaagaggtgccacggtcaatggttaccatggcctgggagacgacagggagtggtgaggtctgcggaaaagcagagcaaaaagcccatctcacagggactgctactcgcactctgcattctgcagtgtcaggtcctctgctttttcgagcaatgccagaaacagatttctttttttgatatattaagttaactcaatttaaaaacaaaaatcactcctctgtgttagcaggttgtaatcattagtctagcacctagttaggtgctcaaggaatcataataaaaggttcaattccttcttgctctgcacttaaagcttgtctacctcaaagctaacaaggcctctggcactgtcccctcctgctccagcccacgaccatcacctcctgctctaagcctattaccccaagagccctttgctactaatcataggtagtcaccctggccctggactcaca

SEQ ID NO: 198873 - DNA, 2040 bp, Homo sapiens
tttgaaaggttaccctgagacctgtaccagcacggtgataacgcactttattttgttttgttttttacagactttaatgtttttcagaacctaaatatgcacagatacattcttcttgtaaaaatcaatcaacgtagaagtgtacaaagtaaaaagtcctttctgtccctcccttcctccctctctccttcctcccctcctttgcttctttttgtccatccatcactactgttgttagtttgatgtttcttttccaggtatttttttcatttgcatatgcacttgtggacttaagagaaatatagagccaggtttcttttttaaaaagtttttacataagtgatggtatcctggatacattattctgcaattttcttttttttttcccatccaacggtatatcttggagacgttttcatgccagaacatgtacagtacagatctgtgccattatttttatctgctgtgtagtattccatagtatggattaccagaattttctaactagctccttattgatgcagatttttccagtagcttcgcttttgccacagtgaatgttttatttccatgtgcaaatgtttatcgaggacagatgtgatgaaatgaaagagatggatctgaaggtattaaatttgaatgagaaaagtgctagaccccatgggctggtccccctgtctctatggggcagccaagtgaggggaaggggccagaatactgtgctctgtggcaggctcgtgggttggttttagggtccacagttgcctgggtttggatgaggggtgtgaggctgccatcagtcagcccttgacctcactgggctatgctcagcttcctggcagcactacagagcctgctgctttcagcaggctgggaacggctgcttcttgctggtggagctggtgtttgggaggctgccggggtgttagctcacagtggcgtgggagcgtggggtggcagctcccccactcccctgagctcacagcagcctctgagtcaacctcccccacctgcctggggaatgtgagttgtttccagagaaaggcaggctaggaactcactgagtttcatcctctggtcccatattgcctttagactagtgtccttgcccttggacctgcctgagccccatgctcactgctctcactgccatcaccctctgccccaggcgacgccagctccaccaagatcctcccatattccctgcgttatcttacctccacacctttgtatatgcaattccctctgtctgggacactcttcctgtgactaactcctgtaaccctcagctttgagtccggcgtgatctctggggagccatctgtgagccttttcccggccctggttaaagtagcaactcaatacgtagctgatgtttactgagagacagtgtagtgtcatggctaggagcacagaccctgcagtttgtcctccaggattcaaatcctagctctaccgtttactagctgtgcatccttgggaaagttactttacttctcagtgcctccatctccccatcggtaaaaatgaggatgatgatgtacccgcttcataacgttgttggggggttaaattaagttgataaatgttgaagtggtatggtcagagctacgtaagtggtataaattgttgttattctacactattctacatttacgtaatctattattacagcatattctgattgtcatcattgttattatttatcaggtgctttgtaccaggcagcttgccttacatatgttatctcggttaatcttcacagcaactctctgaggttagagagtcaaaccccatttttaaaaaatagcttggggttcagtttacatattataaaatttgcccactttaagtgtactattcaatgattttcagtaaatttacagaattgtgcatccatcagccacaatccagttgtaaaacattgccatcgctgagtggtgtggctaacacttgttatcccagcactttgggaggccaaggtagaggatcgcttaagcccaggagttctagaccagcctggagagcctgtctgtactg

SEQ ID NO: 198874 - DNA, 708 bp, Homo sapiens
cacaataatgtccacacataggaaatgagatctcaggtaaatgtgcaggtgacagaaggtggagcagagactcagacacatctactgattgcagaaacagattgtaacctgatagcccggcccacctggcccgtcgtgtgccagtttctttgcagatcagaaatataaccctaaacgtggtgatgagtctttggttccaggttatctctaaccccttatggggatgtgaacaccttccccagacagctcagctgagtaattttggttttgaattgagaaaccagtttagtctaggcctatttgttctaagtaatatgtctactcttccgtgagtaacaggctaaaaaaaaatgtctgtatacacatgaaggtaatcaaacttgttaattgttcaatcttgacttttaagggtactgatagagtttacattagaggaatcagagaagttctgccccagaatgtcttggaaaaggcaagttctaatgatgaatataggcagattctattaagtttagaaaactggcagaaatttttgtcccagtgatgtttacttaaagctgatttagtaaacaaacttcaaaaagtctcttaaaaatgtatggtatctatacacactcacataaatatactcatattcaatgacaaacctctgacaagtttcatgatattcatttcctcacccattaatccactcgtttattaatttag

SEQ ID NO: 198875 - DNA, 458 bp, Homo sapiens
tattgggatgatttctcattcatcctgatcacggttgctgcttcctcctaaggaacattcttctgtaagctttgcttgtccttctgtaggctgataggacagtggaacagccaacacacacaactttgggcatgacgaaagagcatggtgacttgatagcatcctggtcatttcacatccatgaagaaggaattggttcgtcaccaggagcttctcatgttttctggagaggcatgaaggagatccttctctagagacatctcgctggaaagcttattcctttttctgtgtctacatctcctgttagatggcccctctgctgtggctctgtagattctactaacatgactccttttttttattctttagtctgcaagtggagatggaattctgttgctattttctgagtttgtctccttacctctagggacctagctaggtaacaggtaaaaatcaac

SEQ ID NO: 198876 - DNA, 405 bp, Homo sapiens
tttccttttttctcccttcctcccgccctccttttcttccttcctccctcccttcctttcctctttttccttccttccttcgcctctttattttctttgtttctttgccttcctcccttttaccattctctcttcctccttttcttcctcccttcctcctttctttctttctctctttctctcttcctttctgtttctttctttcttttctttccttccctctttctttcttgtgttcatgttttcttttctttctctttactacaattcatattatttttaaaaaattaagagagggagacagaaaaataaagaacgctttaatctgcaggtaaatagattatgtctgctgcaggcaaaagaatggcctcccaaaaattttcatgtcctaattcccagagtcta

SEQ ID NO: 198877 - DNA, 561 bp, Homo sapiens
ttgccaaaaagtgtgcttgcagtccctggggattgtggcaatatgtatccacgatgtgctatgggaatgtagtggcaagtgcagtgtcctacccattcaggtgtgtttacatgtatctactgaaaattgctagatgtgagcataattgtgtctacatatcacagtttcaacggataagaccgtgtgtcattccatgtatataagtaacggagcttgtcaatattttagaaggagagcagtgtgttgaggtatttgtgtgccaacactgcagctcactctgaggctgagtaagagacggtgagtcagtatgagtttgtatgtctttttagctgtgaaagtgtctctgggtaacagcaacagacattcatcttttcatattcttcctgtgaaaacataactgtcccattagggatgataagctttaattcataataatggtcaacactgcagagaaaaaaggattggggagggacatttaaggggcttcaacaacaatgtcttattctttcgtttttttttttttttgagacagagtctcgctttgtcgccaggctggagtgc

SEQ ID NO: 198878 - DNA, 412 bp, Homo sapiens
ttttggctagggagaagatgagggactccttcagagctgaaatggagacctctgggtttttcgaacatgttctcagttgtctatttagaactttaaattgccccttttccttaagtccgtcttccagggtagtctgaagaaggtagaggactgcacagtctttacaattactattttttgccatagcaaacaagtcattttgttttcttctctgtaccttactcctcacttgcagttaatctttgtacctcaaatattggcaaattgcatccatacattagctgtgccctcctcgaatacataagaaaaccaatttcagaatcatatttggagggtttctttctgggagacactttaagtaccagttcctcatcagtcgtggttctaataaaaaaaaaaaaagttgaaatgc

SEQ ID NO: 198879 - DNA, 372 bp, Homo sapiens
tgatctagtcatttgtcaatgtatcatcctaggactttctaggggatttgaatcaattggcacatgaatattttgtattagctactgcctgctctaaccatatcttgcccattcttcctattttttaatactagaacaatgatttctaatgcctagtaaatgcaatgttttactcagaatggatgtgggtgagatattttgaaattttaaatcatttataaagagaagatttttatgtttatcagaaatgggcacagattttttaaaagatggacaaacaggactagaacctagagactggatagaattattcacatttttgacaatttgtagaggtttcttccagtattattgaaacaaattcatagagta

SEQ ID NO: 198880 - DNA, 103 bp, Homo sapiens
catgctgacagggcccaactcttctctgtccaccggcgaaatccctttaacaaaggagggcttctgtgcttcctcctggagggtcagctcatagtccaagggg

SEQ ID NO: 198881 - DNA, 737 bp, Homo sapiens
caagctcctttaggttattagcagagtgcatttccttgtggttatatgaccgggccttggtctcttattggccatttaatggaggctgccctcagttcctagaggccactccagttatctgccatgtggccctctccagaggcagttcacagtgtggcaatttgctgcttcttcaaggctttcaaggccagcaggagtctctctctagtctgctaagatggtgtcatatatgtcatataacataatcatgggagtgaccttccatcacctttaccctgtgacagagtttagatatatgtccctgccaaatctcatgttgaaatgtaatccccagtgttggaggtggggcctggtgagaggtgcttggggcaggagggcagatcccttatggcttagtgctgtcctggcaatagtcagtgagttctcgttaaaagtgtgtggcacttccctgccactctctctctcttgctcctgctctcaccatgtgacctgcctgctcctgcttcaccttccaccttgagtaaaagcttcctgaggtctcctcagaagctgagcagatgctggtgccatgcctgtacatcctgcagaaacatgagatgaataaacctgttttctttataaattacccagtctcaggtagtcctttatagaaacacaagaacggcctaacacactacataatgtaactaattgagtgagtgacttcctatcacctttaaaaaaaaaaaaaaaattgg

SEQ ID NO: 198882 - DNA, 353 bp, Homo sapiens
tggtcccaaaaggagaaagtacatcagagaggagccactccgtagcatgagagcttgagagctggttggagctcaggtctactcccatcttccccgtttgcctgctaggtgaccttgggcaatgactcactggagttgaagccactatcccctctaccaggagagtggagataataatacttgccacagggagtaactgttttaaatgttacgggcagagcctgtgccaggtatataatacctgcctcctgcgtggctccccagctaaagtagggcctgtggcctaagtcactattaaaaataattaataatgaaaaaagccccagcatttagtaaaatgcctgaaacatttt

SEQ ID NO: 198883 - DNA, 160 bp, Homo sapiens
taactctccattcctccctatccccatcacctgatgataaccactatctactttttgtctcatgaatttgcctattctaggtaaatttatataattataataagtggagtccacttatatggcatcccactatttgtccttttgtgtgtggcttatttta

SEQ ID NO: 198884 - DNA, 225 bp, Homo sapiens
ctgcccatgccccactgataccccacagtacttcctgttctgcttagtactcctgcttctttctacaaacaactgtgattctctacctgggagcttcctctggccacaggagcctgctcacctgattgggacaccctagcagtactggtgagttatagcttccaggagcagctctcttccagcaaaggaaagggttggctgaacagtacttcagctgcctctgct

SEQ ID NO: 198885 - DNA, 207 bp, Homo sapiens
agtagagatgggattttgccacgttggtgaggctggtctgattttcctggcctcaagggatttgcccgccttgacctcccaaagtcctggggttacagacgtgagccaccacacccagcccctattagctttttaagcatgattttagtatgtacaggatcaccacagtccatgttaaaattcttccactagtagtgatgctgttaa

SEQ ID NO: 198886 - DNA, 896 bp, Homo sapiens
aatcagctgggcgtggtgacgggcacctgtaatcccagctactctgggaggctgaggcaggagaatcgcttgaactcgggaggtggaggttgcagtgagcggagatagcaccattgcactccagcctgggccacaagaatgaaactccatctcaatcagtcagtcaatcttgcagatattggagtgtttcagatttcagatttggggtacttaaactgtacgtgaaaattagctgctggggaggagaggaattggaatatgtaacatggactcccacattttaaggatttttctaggactgcatctttctcttaataagtcagatccttatttggttgaaaatgtttactgcatgactatcactgactatgtaagatgctgatgtacaactctatgacttgaagattgagttgcttctatgggaatatgacaccatttgaattaatttgttctcaatattttaaagagttttagtgaattctgttcatataaaaatcaggttcaataatgcgtgctttttacgctatcattgagtatccagtgtttacaaggtgtttctgagggataagattattattgctgtgtaaagaatttggcagatggtgtgtaccttctaagttagcttgaggtttatttaaatctcatctttttagcttgctgaagttgatactatgcagttgcaagtttatattgactatttgatattgctgtgtttttatttgaaatgggactgttaaacacatttttctttatattgagcaatagagctggaatattaaagatgtatgcattaacccttgcatttggaacatttacatgtcataagctgcctttcagtaagtggttaggcatttctacgggtgtgtattatattttgaataaattttatatggctt

SEQ ID NO: 198887 - DNA, 450 bp, Homo sapiens
ggaatgcatttagtgggctgaaagttgcaaatattgtatatgccttttcccctgattgtcattaatttggggttttgaggaggaggaatttacaacttactctttccattttcaaaaccagagtataaaaacatgctctttcgaccttgaaaaattgattttcaatttattatacatcagaggaactatagccaatatttttagagtatataattctttcccatgtaaacaaattcagaattgtttctttaaaaaaaaagctttttaagcttcatttatataactggacttgaggaacagtttttctatgggaactcagaagcaaaacttgcctttgcctgaagtcaccgactggggcccagggaagccaaagctcctttggagttgaggtcagacatggctgtatgtgacatggacattctatggaatacagcagggtagaaaagagtt

SEQ ID NO: 198888 - DNA, 419 bp, Homo sapiens
tcaggctggtctcaaacttctggcctctagcaagccccctgcctctgcttctcaaggtgctgggattactggtgtgagccaccgtgcctgaccctaaacccatatttattaaatgcccactatgtgcaagtcaccattacaggcattggaaaacagcagtgagcaaaagaaatagtctctgctgtcatggagtttacattctactggtggcaatagacacaaagataagtaataaacagagaagagaaataaagcaggatcagggttttgagtatagcccgattgtgtgtgtgcgggtgtaagcatatcttagattccctaaaacacagagcctgagatacaccttatgtcctaaaaaatcttaggagatgtggttccagggcagcaaaggtaggggaaaagggaacataaagcagtga

SEQ ID NO: 198889 - DNA, 338 bp, Homo sapiens
ttacagacgtgaggatttagtgaagtcctaggggaaagttaaactttagccagccggctaacacaaaagacgtggacatcactgagtgagaagttcaaagcctgcaccaccctagtatatatacttacataaagtggcccaacgacatcttcttcctcttttaccccttgagcaccagtggaataagaaggagttcgctgtccctttttgctcttcactgtgatttcaggtgaggaagtgtctcttagccaaacagcacactgacttttaaaatgcattaggacccatatgggcaagacagaggtttccattccatccaagaccccttagaatcatgg

SEQ ID NO: 198890 - DNA, 238 bp, Homo sapiens
acataaggcagatttttttctttaaggctgaatgatacttttaggctgaacacattccattgtatgtttgactatctttttaaggtcctttcccattctaaaatctgggtaatcatgtatttttgaagtttgattttttttccatgcatatgtgattttatttttctaaaatttaaacattacaaaaatggtttaaacttgagaaaataagtttctcatcatctgataatagtttaag

SEQ ID NO: 198891 - DNA, 332 bp, Homo sapiens
taaaaggttacggtatgtagtggaagacaaggtcaaaaagtagcacatatgaagatgagcatgctaggtgaaggaatcggaactttatccaggagagcagtgagaagccaaggaaagattttgactagaggagtcaaagaacagctgtgctttaggaaggttaatctggaaagaagaggaaggccttttaggcaaagatcaattaggaggtgcttatagcaatgaaggtataaatgataaagtctgaagtcggtgatagcaaaggaaagacaaaaggataaatataatgcattttaaaggtacatgacaaatctagtcacagaggacagcca

SEQ ID NO: 198892 - DNA, 647 bp, Homo sapiens
tcatgaaggctctgggggcgagggtgggggagtgtccagggtgtcagagccctcaaaggatgcttccagagtctagtcgggtgctgctgcctaggtgtgcagagggggaacagcctggtgtgcagagagggaaaggaaggatgaggaaagccttcccggccctgcagactcctctggccctccccagcagtgcccccgcctctcctggggctggaaagcccagccatactgggtcttggctccccttgaggctccttaaaaggcaacattggaggtgggagccttggacagcttgcaaggaggcagttcagcatcttgtaataacagagttatgagcttgtaaaagcattatagaattcatagaatgcagcccttcagtcggcacctattattaaagacctactgcgtgacaggcactatgctgagctcaggagatggagcgggaatgcaacagacacagtccttgtcccatttctagtgtaaggtgaagggcatgggaagacaacaaatgagtatattctgacaagctgcccagtgttatagggaaaagagaggataacgggggtcccagtttagagtagggagtgggtgggaaagctactctgaggaagggacatttatgctgagaccagggagaaggataggag

SEQ ID NO: 198893 - DNA, 416 bp, Homo sapiens
ctggaacagcttatcgtgggtcgagggggctgggctatcgtcccagatggtggacacctggctgaggctgtccgccggcaggaagtcgcgcgtgtccacgatgtccggactggagtaaacctgcgaagagaagatggagatgttggagaagtcctcaaaataggaggagtccttgttcagagcctcaaactgcagccacagctgcagctgggacatggtcccggcgctaggggggccaggggtccccctggaagtgctgcaccagcaggcccatctttgtggggaaggagaaagtgtggcgtgaggacagggcaggtggcaaaagcagggtggcctgattgaacggctttgctcaaggaaatggagtcagccattcattttctttctttctggatacaaacaggttgtaccctata

SEQ ID NO: 198894 - DNA, 446 bp, Homo sapiens
tgcaggctcttcctgtagccaaagaccttgacctcatcttacctgctccccgccagtcccccaccgtggcccactggcactgtcctcttctgcccaggagacctggggacctcatctcctcccgctgctccaacaatgcattctcaacccagcaggtagatgggtttctactttaaaatatgtaggatgaaccagtctggtgatccgatgtacaacaggaggaatgtaggtaataaaattgcactgttttgggagttcctgctaaatgactagacttcagctgctcttgccacaaaatcctaaaagtggttgactctgggaggtgatgggaatgttaattgctcccctgtagtgaccattttgctatctgtttgtactttgtaacatcacgttgcataccttaaatatacacaatgaaatttattaaaacaatgaaaataaaaact

SEQ ID NO: 198895 - DNA, 597 bp, Homo sapiens
ctacggaataatgtatgtggcatctttcatgttatccatattatctagcacataaggaagttcaaaacaacttgcatcatttttatctccttccttcttataatctcttgccttcgatggagactgggtcaaattacattgtcctgcataaatgaagatgctgacaaactgttcttcataaaaactgaaaaaaagaggactaaagggattataacagaagtttttactggatctggaaaaaatagtaaaatataatatcagaattgcacaaaggatagaaaacaaaatactttatattcctgaagaacatccagaagacaatttataattgctcagaaacttacacctgcagaccactgaaccaaatggtttttagtccaataattacacaggactaaatattcagtgccttttactggatggccagtagaagaggcctgccattatatttcattagtttctaagggtccacatttttttgctgttatcaactttctcaggttgaaaggtctacatttttaaaacattgtaatgctttgaaatcggaatgtatcttacaaacaatggcaagtcagaattaaattgcaacatttttaa

SEQ ID NO: 198896 - DNA, 434 bp, Homo sapiens
agatgtctgtatctgggtgagagcttttctctctagaggcaaataaaatagataataaccctaagttgccagaatttgacatggtgagccaaaacctatcaggagacagtgaaattaatttatacaagtcagaaagtagtttttgaatgtatggcaaacgctttggttttgactttaaatgcctattctgatcactttcagattgtttctggcacactctagatagaaattgttccagctaatcagaccattagcaactgggtcaaccttctgaatcatacatctttggaactgcttgtattcatttagtttgtcacatgcattctgtttgtgatttattgagcatttttttggtaagagctcgatagtttttaagaggcactgtgtcatttctcaaaagaattatacttcatgagcactagcacaagcttccc

SEQ ID NO: 198897 - DNA, 488 bp, Homo sapiens
  misc_feature (400)..(400): n is a, c, g, or t
tgtaattttcagataatagttaaagttaaatgtgtttttagcatattccaaatattgcaccaagaattttgcctgaattttcataacaaccctgtgagacagttgctatgattattccacttcaaggttgagaaaattgaggcatagagaagttacgtatttgtttgaagttgcatatgtagtagataatggaacctgaatttgagtccagatttgtctaactttaatttttattcatgcttttaactaccactacataggaaaatgtttatagtatcatatgaatatggcaaaaatgaaataaggaactcaaaagtatgattccaattttatgtaaagaaactatacaccaagatatatatttaagcctggggcgacagagtgagactcttgtctccanagataaaaataataaaaatgagtttgccagcctgcatggtgatgcccggggattgcagcagctgccttcaggttcccgggggcagagg

SEQ ID NO: 198898 - DNA, 669 bp, Homo sapiens
ttttttgtctctcacattactagttctgtattttgcacagtgtcaaaaaatatttggtgatttacaaagtaaatggaatctgcttaaagtaatggtaataatacagtggattattgtcattctacacctaatacctactaaatgttaacattattttatgtgcattttcctctttatttttcttaaatactcaaacatattatgggagggggagtggaaaacaaaagatgttaagtgagaatcccctttcacagccgtgttctttgtttcctccaagattcttgaagaatggtatatacctgccttttagcttccaaccctctctgctacactgaaattgcagttgtcaaggtcaccagtcacctcctaattgccaaatccaatggtaaattttcagctctgatcttacttgacctttctgtggtacttgacactatgaaacactccattctccttaaaagtttctccttccctaaccttttgtgattttatcctctcctgattttctttcttcctcattttcgtatttatcttccctttgttcacctttaaagaaagatactttctaggattttgtccttggcactctacatagttttcatgagtgatcttatttgtactcatggcttcaactgctgtggtgactctgggccagttttctcttccgag

SEQ ID NO: 198899 - DNA, 189 bp, Homo sapiens
agtctctgtttccttatctatcaaatgggaatgatcataccctaggaatttgttgggaggatcagctgatacaatggaacttgatacagaaaagggttaacgcatagggttttaagccagatattcattgactcattcagtacataattattgagtgtattctatggggaggtccagtgctaagccttg

SEQ ID NO: 198900 - DNA, 320 bp, Homo sapiens
gcggccgccgcgcccgagcacatggcgtccatcttactgaggagctgccgcggccgggcgcccgcccgcctcccgccgccgcctcggtacaccgtcccgcggggtagtccaggggatcctgctcatctcagctgtgccagcaccctggggttgaggaactgcctgaatggatgttgaatttgtcaagcaactttttagcatttaaatttcatactaaaacataaatgctggccgggcacggtggctcacacctgtaatcccaacacttttggaggctgagtcgggcagatcacgaggtcaagagttcaagaccagcctag

SEQ ID NO: 198901 - DNA, 740 bp, Homo sapiens
tggcctcccaaagtgctgggaatacaggtgtgagcccctgcgcccggctcacagcagggttcttgataggccaccagtgaatcccatgccaccgaatctggcattcatttcacagcctcatctcagttctcactcagcagagccctcttgcctgtcctgccacccaggctactaatgttctggttcattctctgctgacagttagctgtggctgtcctcagcctcagtcctgggtctccccaagcagtcattagcatcaccttgactgatttccagggaacacttcaaccaccccttacctctgagctccagccccgagacactgccttctctctgcatttgttgatctctgtgcagcagtgcccacatcctcatcccagcttactgccgtctcaccaccttcaggttgtgaggtgcccataaactctgctgttaccattgccacttccctgtcttagcagctgtccctttcagtctgccctccactagtggccatgaagggggctgtgaccgtggtccaggtgagaaaggaaggcctgaactaagatgggaggtgggtggccagaatggagaggggagaagtggatggccagaatggagagatgcttagagggctgtgttgggaagtggtgactggatacaggggagggaggagagatacaagagggcacctgggctcatttgtggactacgtgattttgagactccaaataagcactgggtatttgggttggagatac

SEQ ID NO: 198902 - DNA, 606 bp, Homo sapiens
acaaaaggccgtgtattgtatgattccatttatatgaaatgtttagaatagacaaatccatcaagacagaaagtatattagtggttgccaggggctggtgagatgtgtggaccaggcagtgactgctgatgggtcagagtttatttggggcataacaaacatgttctgaaattagacagaggtggccaggcgcagtggctcacacctgtaatcccagcactttgggaggccgaggcgggcagatcatttgaggtcaggagtttgagactagcctggccaacgtggcaaaaccctgtctctaccaaaaagtgccaaaaaaataaaataagacagcagtgatggttctgcaaccctgtgaatacactgaacaacactgaaatgtacacatggtgaattgtacaaaagggtaaatctcacatcctgtaaattatctctcaataaagctgttattaaacagagagagagagaaggagagaaaagggggagataagatgaggacggtaatgggagtgacagcgaagagagaaatagagaaaacagcagagaagagagtgcctaagagggagagaaacccctcccccactccccacagttagaggaaggtct

SEQ ID NO: 198903 - DNA, 379 bp, Homo sapiens
ggaggctacaagcaggtaaggtgtgaagggatataaaaattaaaataacctatttattatttttattttcaaaaatcaatttatttagtgagtttgtgttattaaatgatgaaaaaaattacaatgaagggctaagggctttctacttagctttagtttaatagtttcagttttcattttcaaatgaagtgttagtacttcatttaatctataacaaccatggaatgtggtatcattaacatcagttgaaaaagtaaactaagtttaattcatggtaattcatgagacgaattcattgaccagaggaggtcaaagagtcatggttcttaaaatgaatgttgtagtcctctgcctttcgataaccttactatgatcattt

SEQ ID NO: 198904 - DNA, 710 bp, Homo sapiens
gatacctagcgttaattagggaaatgcaaattaaaaccacagtgagataccacttcacacccactagaatgctgtcaccgaaaacacaggaaataaagttggagagctcgtgttttctgacttcaaaacttacactgcaaagcaacagtaaccaagaaggtggaaaaacgaattctcatacattgatagtgggaatgtaaaatggggaagccactgtttggcatgatcttaattaagcagacttgctgcattgactcagcagctgcactcctaggagaaaggaaagcgaacatccactcagagacttggtgtaagttccctggaacctcggtcaacacaaggaaacaatccaggtatccgctagcaggtgactgaacaggtgacgcctgccacgtccacatggtgggtgcttctgcacaggatgagctcagaagcacctgctgagggagggaagtgtggctgtgtggtaggcagtgtccagaaaaggcaaatttgtaaacaaagtagaatgatgactggggctagggctggaaatgggactgactgcagatggacacgggatccctttcaggtgatgggaatgttctagagtagtgaccattttacaactcttcaattttattaaaagccattctgtgcttaaaatgagtgaaacttagggtatgcaaagtatacctaaataaagccgacgggtgttttaaaaagaatag

SEQ ID NO: 198905 - DNA, 421 bp, Homo sapiens
agagggtggtaaactggaagcagttcaatgggacagtgcttgatgggactttggaggtgatgaggtttgatatagtttggatttttgtccctgcccaagtctcatgttgaattgtaatccccagcgctggcagttgggcctggtgggaagtgtttggatcatggtggtggatccctcatggtggatcccagttctcatgagatctggtcatttaaaagtgtgtggcacctccccaccacctctctctctcgctcgcttgctcgctcctgcttttaccatgtgatgtgcctgctccccctttgccttccgccatgattgtaagcttcctgaggcttccctagaagcagatgtcagcattatgcttcctatacagtctgcagaactgtgagccaattaaacttcttttcttataaattaccca

SEQ ID NO: 198906 - DNA, 623 bp, Homo sapiens
gactcacccagataataagaacatgggtagccaggtaattattcagttctgtgtcactcagagcagtacttttccatgttggttgcacaagtaattacaaaaagagcttttaaaacgtaatgcttccatactgacccatcacccctaagtctgagcagggtctgagcaaagataatttttaagtttcctgggagattctatgaggttggtgaatctcctaatcttattctattaggttctattattttgccagtaatggccaaaatcgcaattacttttgcaccaacctaaaaatatggagctgggcttcagaacctctaataaaggcttccagtgtcctgttcaaaaccaggtcggataactccaaatggcagccggtttttctgccagaacaatatgggtatgttgagtgatcggtttgttttgtgtaagatacacatttattcagcacctgtgttctaggtgctgagagtttttcgaggaacaagacagaacctgcttatgccttaagatgctttcttttttagtggatggagacaaaaagtaaatatataaacaggactgcggttaagtgttaggaaggaaataaactaggaaattaggagtcaaagaaggcctctaat

SEQ ID NO: 198907 - DNA, 372 bp, Homo sapiens
tattacggatgtggaaataaaatcaaggctatcttgctggacttttttgacatttaacacaggaagtttttatttcataaatctgagcagaaagaactaaaactttgcagagggcttagtaaagcagtttggaaaataagctgtttttatattttctcttttgactttgcattcataccagtgattgtgcacatgcatatgtgcatatgtaacatatgtaagagaggaagaactagaagtggcaaagatagaaagacctagaagttgctgacaacaaagtacatacaggcttaaataattctatttacaatgttaaccagtagagaaagcccaaagtagagtactaggtctccttcctccataggctcagat

SEQ ID NO: 198908 - DNA, 181 bp, Homo sapiens
cccatccaggaacagaagtcagcaagaactcacttcaaccccctgtaattttatcttcaatccgaccaatcaacactccctacttcctgagcccatacctgccaaataatccttaaaaacgctgatccctgaatgctcagggagactgatttgagtaataataaaactccagtcttccaca

SEQ ID NO: 198909 - DNA, 325 bp, Homo sapiens
tcaaccagtaaccctcctgtatgcaacacaaggtgtgtgggaccttggaagctggtggaagagggcatcttggggaagaaggagtggtacaggtggtcaagtatttgcaagagggaaaattaatgtacatacttagagaagctatgatcatgaaaggccaccataaattcaagaataaattcataccaaaagaacctcattgctttttaaatttattgtgttactgtgtaagactacttagaaaggagagtgcccatcacttctcggccttctggctaagatcaagtgtagaaagcagaaagccctgaatgaagtgtgtcttgat

SEQ ID NO: 198910 - DNA, 598 bp, Homo sapiens
caactatactaactactactaacaatgatgaaatagatgcacttctgtcctcatgcagctcacagaatagtgaggaaacacagaaataaacagtaaaatccagggtcaggatgctactaagaggaacatgcagggtggtgtgggagcccagatttggggtgatctgggagggcttctcaggggaagagtcttcaagcctgacccttggatgactgggtaggagtcatccagtcacaaaaagagggtgaatgcctgctccaggtgagagaaatgacatgtgcaaaggcctcaaggtgaaagggaataggatgacttcaactggaaactcaagacaacttgtctcagtcaaggtctcatttgtaagcaacaaacacggagtctggctcctccaagcagaaaagggatcgattaagtgacattcgttggcccactgaaatctctgagaaactaaaataaattcagaggctacgggccaggagcaacccttgaaataacatgacgaaactggccctgtgaagacacccccgtcttggctgctggcactgatttggtggcttgcatgaccaacatccctgaggctgaattctggatgctgccc

SEQ ID NO: 198911 - DNA, 401 bp, Homo sapiens
aaagagacttccaagcactctgaacccacgggctaggataacatgccctcatcttctaagtcaaaattctcaatctacatcagaaagaggaaattctcaatgtgaaacccctttcccatattctgaaaattaagtccacacccaaacataaggttttatgcacatagatggcttcctgtacttctttatctagaagttttaccccatcctccagaaaatatccagaactagatggagataaagaagaaaaatattagtaaatacagattcttacacatttcatttttctatggattagttctataccagcaagaaggaatttccagaaaggttgatgtaagtgcatccctaggactcaaatgctaacatacttctccctcccacccccactttcaagtgaa

SEQ ID NO: 198912 - DNA, 392 bp, Homo sapiens
tgccttggccttctggtgtgttgggattacaggcgtgagccactgcgcccagtctattataaaggttttccaggtgcattcatgttgtagcgtgtatcagcacttcattaatgtttatgacctaataagtttgtattatattgatacaacacattttgcttgccaattcactgttgggttatcaacatttgggttctgaacaggctactgtgaataatgaaaaatgctatgtattattttaggctattattaataattatggtaatgctgctataacatttaggaccaagcttttgtatgtttcattcataaatttcatttctcttgtgtatgtacctaggaatggaattgctaggtcataagctacctatgtatattcttttcagcaacca

SEQ ID NO: 198913 - DNA, 158 bp, Homo sapiens
ccctaaactatgaactcagctttggaccccaagaggcaggtaccatgcagaatccactcagctgacagtagctgtggcagtgctatgccaatggtgttgtgcctgtgtgcagcctggcatcattgctgaaccagctctagatatgactttggactgca

SEQ ID NO: 198914 - DNA, 383 bp, Homo sapiens
gcaaattctgtactatatatttacaattacctatttattttcttatataaaaaaaaaaaaaaaaaaatagcatgtatgatataataatacttgtcatggatggaaaataatgtaatatatctgtcagtttttattgaaatataacattttataggaataagttcaaaaatagtatatatgatacaatacttgtcatgtatggaaaataatatatatatatctttaagctttttattgaaatataaaactttatagaaataagttcaaaaatcatacgtatataattcaatgaatttttacaacatgaacacacgtataaagaaaagctttagtctgagcacggcggctcatgcctgtaatcccagcactttgggaggccaagg

SEQ ID NO: 198915 - DNA, 335 bp, Homo sapiens
aagtgtcccttccccaagtgagtagtaaagtcaggatggaaaaccaagtcctctgacaccaacagaaatgttcaaacatttaggataaaggctcatttacctctaaaggccattcacatttctattaataggtatttatcaatgttgtcataccagcaaaaatgaggcatttaaaaaaaaatccttctcttttataaaaactgaaaagcaattttcataaaaacttttgactacaagtaatttacttaaagacagccaagttacagaaatgatttttttttttttttttttttttttttttaaagatggaatctcactctgtcacccaggctaga

SEQ ID NO: 198916 - DNA, 281 bp, Homo sapiens
tgaataccccatgctggggacacatcgagaattcccccatcagttcaggcatgacccgctggagggcaagtaaaggacagctcaggccacggggacagtccagaaagagcaggcgaggaagaccaataggaaaggaagtggctggggctgactccagatttctttgcaaggtaaaggcagagaaggacacagagggccctcgggcatcccactctggtctgtcgcactaaaaagctcgcacccagcatgaggggaaagacagggatgaagccgctcataga

SEQ ID NO: 198917 - DNA, 415 bp, Homo sapiens
tctgaggccccaggcagagctgcacgtgcatccgcaccagggagcactgcacaggggccctggcctggcccggccctgctctgcacctcacgggcagctgctgacggctctttgggctcacaggggatccagcaggcgctcctggtccttaggaggcaggcagctcagggctgcttcgctctccctgccacgccctcccagggtgtctgccaaggcttgcttgcgttttagtccctttgattgccagacctttcggttttccttgagtaaacctgagaaattcctgactttatttttttttgccagttggaagcataaactgtttgagatccgcttcctccaccagcacatcttgttctcatggccgctaaggggacgttcaccctgggcctcccacctgcttggccgcccctct

SEQ ID NO: 198918 - DNA, 795 bp, Homo sapiens
ttatttcaaacaacacaaacaaccaaaaaaatcctttaaaaacaacaaaacctttaaagactgagccactgattagtcagtgtatgttttagccaggtcatcggtttattttccttcctcttgtcttctggccatttttccaccacagaatcctagaatattacttttttttataaacacaagtaaaaattagaactagtctttgttcctgctttttaagtgcttgacaaaatatttgataaagagaaaatctggaactactgtgtaaaataatattaacaataatgcttatattatttctgcctcacattagaaaagactcaagagggatttggtactgtgggttcaactcaagcattacctgtcagattctcctttaaccatgattatggtttaggagatcgatgacacttcagcctgagacagttctgaacacctacttggagctctttcatagtaaatcatcagggagtgtcacactttttaattaattccctacatgcatatatgcagttctttactagaggtttttcatgtagcttaagactctcctagcattaaatatttcagttatctcactacatagtacacctggacacaaaaaatgtaacattataaacagctacaaaatcatagacctgcaacaaatcagagtaggtaatatgaacttctttcattgtaacacttgggctaaatttaaatggtcataatcaggttagacctggcagctgaagggggcattaatgccttgtggttaagaacataagctgtgaagtcaagatggggttcaattcc

SEQ ID NO: 198919 - DNA, 553 bp, Homo sapiens
aagggatgatgctaccagcacaacagctttcgttgtcagccaaataagatctatcgagaagaggccgggtgtggtggctagcacctgtttccagctactcgggaggctgagacagaagaattgcttgaacctgggaggcagaggttgcagtgagctcatattgtgccattgcatgccagcctgggtgacagagtaagactgtctcacaacaaaacaaaacaaagaaaaagtttgctgacctctgatctgagctcttgtctcttgcctggacaattgctcctgacttgtttcctaacttcactctcagagtagtcatcatggcctttgaaacattatgcaggtaaggtaattatagtgtgggaaagtacaaattacagaaaaccagaagtcaacagaagaaaaactactggtttacttgagagaaaggagaatggttcaccccgagcagagttacttggtgaacgccgccaccaccgcccacagaacctcattggtgttggccttcagacattccacttcagggtctaagtcgagaagctgccgcactctcttg

SEQ ID NO: 198920 - DNA, 427 bp, Homo sapiens
aaaaatgatgtcccattagaaagctgatggataatatatcacatattactcatttgagtatcaggacccaagaaaacaagatgaatttatttaaattgcaatgtcccttgaagcttgtatgagctctctaaagggaaatacttttaaagttcttataaagagagaaatttatagccaagtgtgaaaaatgaagtgcagttttgaggaccagttcccatcctgtcccttcctggggagcaagaggtgtgatgttgatggagcagtgatgaaagcagggggaatcatggcaaacacccgctgtgtgatgattagatgctaggcagtttccgtgctgggcatcgtatattcctttcatttgagaagtggtattgcatagtggttagaagcctcagtgttggacccagacttctaggttcaaatcctgccc

SEQ ID NO: 198921 - DNA, 467 bp, Homo sapiens
aaattatctgggcgtggtggtgtgtgcctataatcccagctactcaggaggctgaggcaggagaatcgcttgaaaccaggaggtggaggttgcagtgcagtgagccaagatcgcgccattgcactccagcctgagtgacaagagtgaaactccgtctaaaaagaaaatattcggggaacttttgcagggcagtgagggagccgctggaacccggctggcggctggccccaggcacagatccttgatccaggctgctgcttggggcctattaagcaagtccgggtgggcgtggttagtcaggccagcagcttccttccctggaaatgctgattgtggtcaaggaactggaaacaaggaaaactagcaaatagattttggggagcttcttggaggccttggtagcctagagcaggtgagtgtgtggttgggaaaaagcaatgtggccctatggtggttttaggtgttga

SEQ ID NO: 198922 - DNA, 269 bp, Homo sapiens
gggtctgtggtgtctgtaagtctgggggcctaggagggagtctcacacaggagtccggtttgatcacagtggatagggtactctacagtgtgcttaaaggcaagggggctctaagaaagagcagccctggtcagtgtgttctgagaaagcagggcagtgtctgagaggtgagttaaaataggagtgagtagtcaccattttgggatattagacaggaagtgctttctgtacatgcaggctggaaatgcacacaaccctcctgccccacc

SEQ ID NO: 198923 - DNA, 276 bp, Homo sapiens
aaatttgcccaaaaattgctacctgaagtataacccatattcttttgtgttaaaccgtgtttattattcttcagatgtatttctaaaaaacatgacatcaattttgctgtgctaaataagtattgtatattacacttttggaaacacttacagacataaagcatttccaacagacaagacatgtacaaataatttcccccagatttttgtatagtcattttagagctttttaacaagggtaagaactttgttgatgagatgtaagccttttttccc

SEQ ID NO: 198924 - DNA, 364 bp, Homo sapiens
gcctacaggacttatgggacaccatcaagaaagccaaatatgcattatacaagattcagaatgagtagagcaagagaaagggcaaaaagcttatttaaagaaataatgacagaaaacttcccaacctggagaggaaaatgaacatcccaatccatgaagcccaaataatccaaatagattaaacataaagatcttcatggagatacattataatcaagttttcaaaagtcaaagacaattaattgtgaaagtgacaagagaagagtgaattgttacacaaaggaaatctctgtaagacattcagtgcatttttcaacagaaaccttgcaggccaggaaaggagatgtgacatatcaaatgagat

SEQ ID NO: 198925 - DNA, 492 bp, Homo sapiens
gcgactgaatgagaccccttatctcaagaaaaagaaacagaattatttaaatgcatgaatctgaatgccgtgcagagagtatatgccatatagagttatatgagaatgtcatgatagtagtagctttttttttcttcttttcttgagacagagtcttgttctgttggccaggttgggagtgcagtggcgtgattgatcatggctcattgcagcctcaatctcctgggctccagcgatcttcccacatcagcttcccgagtagctgggactacaggcatgtgccaccacactcggctagagtgtgtgtgtttgtgtgtgtgtgtgtgtgtgactacaggcatgtgccaccacactcggctagtgtgtgtgtgtgtcaataggatttttccatgttgccaggctaatctcaaactcctgagctaaagtgatccacccaccttggcctcccaaaatgctgggattacaggtgtcagctactgtgcccagccaaat

SEQ ID NO: 198926 - DNA, 375 bp, Homo sapiens
tactggttaagaatagcgcttagtgatgtgaacagtgtggtcttttctttgtcattctgagttactagattaagctccagtgaaacaatgtagttcatttctgatacagtcccaacacaaatggctgtcctatttagatggcattggtcaagactgatatcaagataggtaactataagactaaccttagttaaccaacccatttttcaatcacgtaaggtataataaaatacactctgattattctgtgaactttgattattgtcattaactctgttatcaaatgatcatttgattccattatgtcacctggaattatgtaatttatatataatgtatacagtggtataaaaagaaaatatgtattttggaaca

SEQ ID NO: 198927 - DNA, 461 bp, Homo sapiens
ccacttgaaaggatgacagaagaaatcacatttctccttcaggaatagcaagaaagttaaaagagctttcagagctcagtgacgtctggaggcagagaacagtgagagaggaggtcaggcctggagatgtgcaaaacaattcaggctgaacacccagtgagggatgggtaggttaaggatagattcactggaactgctgcctctgaagtcttctagaaaaatgagtgtcactgggcgtggtggctcatgcctataatcccagcactttgggagaccaaggcgggtggatcacttgaggtcaggagtttgaaaccagcctggccaacatgatgaaaccccatctctactaaaaatacaaaaattagctggctgctgggtgcatcaaaccaacatggcacatgtatacctatgtaacaaacctgtatgttgtgcacatgtaccctagaacttaaagtataata

SEQ ID NO: 198928 - DNA, 263 bp, Homo sapiens
aggaacctgttctacggccagaagaacaagtaccgagcaccccgagggaagccggccccggcctcaggggacacccagacccctgcaaaggggtccagtgtccgggagcctgggcgcagtggtgttgaggggccacattccagctgagtggccttgctctgtgtgagccccgtgcgagggccctgcttgtagctggaccctggaaccttctgtagctaagagggaatcctggccccctccccagaagccatttgtcaataaac

SEQ ID NO: 198929 - DNA, 382 bp, Homo sapiens
gcttctcaagggagcgctgacaccttcatccccaggctttcccacaacggcgagcatcttctaggcacccacttagagcccctcaacagacatgtgtccattcggtcctcgaccctaacaacctagtgttcaccccacactgtacagatgagcgaacagggaatggacgttgagaagcttaagcttctcaacggctaacagctgttttcatcttttaactaatcaactgtcctgtgtgtagtgcccagttacctattggcttcctgacctttctttccccttgtttattgcatagataataaccatttggttgtggataaatattcatcaccaatttaagtttactgagaaaaggggctgggcacagtggctcacgcctgta

SEQ ID NO: 198930 - DNA, 185 bp, Homo sapiens
gctactgccacctcaactgatcttcctttccttgtttgctaaccatttccctgccatgctcaccccgctctggcctctagaccgtgagcgcgatgatggggatcacatgggcttcatctgctccatgtccagcacccagcacagagcccccactgaactccgccagggccccagcctgacaacct

SEQ ID NO: 198931 - DNA, 193 bp, Homo sapiens
agtagtagtagttggacatgtgggtctggaacgaaaggaaaaagtctgagatgaagatagaatttggattaagcatttagtgattgaagttaaaatgtgatgattttctccagggatattatgtggaataagagggtaagggatagagccctgaagtatgcacattttaccctgatgggaggggctgattgtg

SEQ ID NO: 198932 - DNA, 314 bp, Homo sapiens
ctcatttcctagttcatagcattaaatgactacatcaaaaagtctgaaagagtacagcttagacaacctaatgtcacaccttaaggaaccagagaaacagaacaaactaaatccaaacccagcataagaaaagaaatcacaaagatcagagcaaaaataaatgaaattgaaacaaaaaaaatacaaaagataaatgaaacaaaaagctgattctttgaaaagataaacaaaattcattgaccattagtgagattaaccaagaaaagaagacagatgatccaaatgagctcaattaaaaatgaaactggagattt

SEQ ID NO: 198933 - DNA, 345 bp, Homo sapiens
tgggagacgagagtgaaactccttctcaaaaaaaaaaaaaaaagaaaaagaaaagaaatattgaaatgaatgttagatacttaaaataccagaagagaaagacaattagcatttgtggactactgtgccaggggaacacgtattcctgtttaatccttataataaacaacactttgaggtagataatcttaccctcattttacaaaagagaagcctgaggcccagagaagtccagtaacaatctttagactctagtttgcctgtcttttaaaaaccttacttttttcactataccacattttcttcaaagtaaaatttctcatcagcagcataattgctgtgctt

SEQ ID NO: 198934 - DNA, 366 bp, Homo sapiens
tcttcagttaccatcagtggttagagtggaggggacatatcccgagacatgcttggaggagaaggaaactgtgttggttgatatttttcctcaaagttgcttctcttgactgtcaggtggcatatgactgtggggattaaattgagtactgaatatgggcagtgtgatattcagcagctcacactggttcagtgatatcaattatttaagtcctgcatctggccgagtgcagtggctcatgcctgtaatcccagcattacggaggccgaggtgggagaatcacttgagtctgggaggtcgaggctgtagtgagccatgattgcaccactatactcccgcctgtgtaaaagagcaagtctgtgtctc

SEQ ID NO: 198935 - DNA, 523 bp, Homo sapiens
gagtttgctaggacgaatagtaatgaggatgtaagcccgtgcgccatatatgagaatgactgcgccgttaaagctccagggggtttggatgaaaatgcttccatttgctcctgcattcctcttctttagctctgattcttgctacctacactgttagcaccaaagagctcctcccatcatccagttcacttcttcataccttagtcataggacccagtctttaaatcaaggatgtacatttagaacagcacagtacaaaagaaatataaagaaggacacacatacaattttttaattactaggttagtaggttcatatgaccaagttattccaaagataaacatttcccattaactaaatcaagcacaaatcttaaaatttaaatttaacttaattaaaatcaaaattctgttcctgagccacactagtcgcatttcaattgctcaatagccacatatggatagtggctaccatactggacaccacaattctagaaaacaaactaactttcaagaacaattac

SEQ ID NO: 198936 - DNA, 288 bp, Homo sapiens
atttgggttgtgagtattttcaaaatttcagctcagggatatatctttagatcttctactggtgcatctcctccattctgttctctctctggattcctcacgtgaaaagagtctatttcctgtgactattctcatgttactttattctttcatatttttatttttggatttttttgattgaccttcaaatgaatttcttgagttagttttctaatttattaatttgacttctaactaggtccattcattgtgtcagtacctttttttttttttttttttttttttttt

SEQ ID NO: 198937 - DNA, 145 bp, Homo sapiens
tagagtagggaattattgttgatggactggacgcaaccttgaatatgaagtttcaagatacacattcaatgatcttgagatgaaagaattttgttttgatgtaaaagctctcatagcacatgggcttcagaactcagacgttctt

SEQ ID NO: 198938 - DNA, 554 bp, Homo sapiens
ctctgttaattttcactcaatcagatatctaatttgatcactgtattttcgtgtctgaagtatatttttcaagggaatccatgttaacaatactgaactgttctgttaaacttttaaattattgtcagaattttttccttataggtcattcattgtaatggagtaagaatgaatctaaatctggattaaaagattttggtgaattgggagtgttttttccccagactcagaattaatgacttaatgctccctgaagatttcatatctataggcaacatgcaccatcttgctgagttaaaatcctagtaaggattggattaattctccatttctaatgagaagagaataataccaacaatgattctaattatatctcggacttgaagagttcattccttcctaggagctaaaggaaagtctgcatctgttacgtaatttatgcataaagacaaagtcatttgacaaaggttacactgtatgattagaatccaatgtgatagaaattctgcatttttgattctacatttagttctctttgctttaagttcccaatt

SEQ ID NO: 198939 - DNA, 514 bp, Homo sapiens
atatctcagtggattgaatgcagatggagaggaaactttgatcatttgagagatggagtaccagcaagtcctctcatccttcaagttgtcagaggaaataacatttacctgaatgaaaggtcagttgggatggcaaatactgagaagattagagtccctcactttgccctccatgtgagctacccagctccaatgacaaaagagtttgaagtggagtgctttgggagagagtctcagccttctggctcaactgctgctttctgcttatagaaagtattccaggtgctacctttccttcatgttttgcacggctgtatgttgaaaagcatgacctatgtgtcagtctgggttccagcaggaaagaatcaggtaatttagaagagtttaatgaagcgactctttaaaaagatatgttcaggactacataaaacaacaagagattgtgagacatcctgaggtttgcaacagtggggagctttaaccctatgtaggcctgaaggggccaagagattta

SEQ ID NO: 198940 - DNA, 576 bp, Homo sapiens
aaagttggagtaatgtattggtaaaagtactgccaaacagtatctgtgtttactaagtataaacaataattttctaagaataaaataattatgtgaagctcagaattgcttatacagtttgcccttgaacaacatgggtttgaactctgccagtacactcgtggattttttcaaaacatatatttaaaaaattttttggagattcacaacaatttgaaaaaattcagatgaaccacacagcctacaaatatcaaaattaatgcataaaatacatgtagataccagtctatttatgtgttaaccaactgtttatattgtcggtggggcttgcagtaaacagtaagctattagtagttaagtttgagggagtcaaaagttatcaatggattttcaactgcacagggagtgggtacccttaactcctacactgttcaagggtcaactacattagaatacttcattataatactagaaccaatcagaaaatatatctatctatacatgttctctttaaaatcagagaatattttccaattctatctgaaaatgtctatttcactattttacccttactcc

SEQ ID NO: 198941 - DNA, 137 bp, Homo sapiens
gttcctcagtggggaatatgtctgagtttgttcatgtttgtgcttcccataatgactaacatcgtaattggaatagaactgcagtgctgtaagtggtcagttagtaaaggtaatggcagaggggaaagtaagccaaa

SEQ ID NO: 198942 - DNA, 487 bp, Homo sapiens
aaaagagaaacactgtgcctgcttattccagtctttattgcctaactctggctgtcttgagttacatgacttttagttacaagagaaagcatgtgtaacacatgactgtttttgtttttgtttttttgtgatggagtcttgctctgtcgcccaggctggagtgcagtggcacctgcatgatctcggctcactgcaaactccgcctcccgggttcacgccgttctcctgcctcagcctcccgagtagctgggactacaggcgcctgccgccacacctggctaattttttgtatttttagtagagacggggtttcactgtgttagtcaggatggtcttgatctcctgacctcgtgatccgcccgcctcagcctcccaaagtgctgggatgacaggcgtgagccactgcccccggccaacacatgactgttttagcacatagcactatatacataactcattgcattttatcgaatgataatttggaatt

SEQ ID NO: 198943 - DNA, 386 bp, Homo sapiens
cagctccatcaggtcattcatgttcttctctgaactggttattttagttagcaattcctctaaccttttttcgaggttcttagcttccttgcattgagttagaaaatcctcctttagctcggaggagtttgttattacccaccttctgaagcctacttctgtcaattcgtcaaactcattgtccatccagtgttgttcccttgctggcgaggagttgtgatcctttggagaagaaaagtcattctggtttttgaaattttcagcctttttgtgctggtttctccccatcttcgtggatttatctacctttggtctttgatgttggtgacatctgtacggggtctctgagtgaacgtgctactcctttctgtttgttagttttcctt

SEQ ID NO: 198944 - DNA, 358 bp, Homo sapiens
atgttgaaggggatggtaatactcagtctggcatctgttactaagatctgtccccagaccatttgtcttctagagggggttacaattaaaacttgatggactgtctctgattcccatgacaccaactaggtgtacaacaatccgatcctattctgacatcgactaaccagaattagtgtcagactccataggtttaagggctcagtgccacaagacagccctcacttgggacgccagccataagtcctgggtttctgggctacctgcacttttgtccaatttggctacaaattcagaaatccccatggcccatgcctgcttcaggtactataatttgctagaatgactcacagaactc

SEQ ID NO: 198945 - DNA, 1928 bp, Homo sapiens
  misc_feature (17)..(17): n is a, c, g, or t
  misc_feature (386)..(386): n is a, c, g, or t
  misc_feature (761)..(761): n is a, c, g, or t
ggcgggagggacacgcngatgggaacatcccagctggtccaggcctctgctccccccagctcctcctccctggcgggcagctcttctgggctcctgaggtgctgcgcagccccttccctggccctgggacccccagtgcctgagatgaaagaggagttgcttccatggacggtcccagtgcaagctggggggcgctggcctcaggacaccaggcatccaagacatagggacaccagaagccccggctctgcctctgaggtccagcagccccaaagcccctgctcagaagccagcgatgggagggcagggcctgcctgtgggacccatcatgggcgcagcaatcgccaggccctgggcagacagcagcacagcctgtgagtccaggnctggggagcaggcaggtgacaaccagtgtcctactttcctgcattaaaacacccaaatcaacaggacggagaaggcccggaagaggggacctgagggagccagccgggcgctcagcctgcttcgctgggatgcttgtcgaggtcgggacggcaccaccaaactcacctctgtgcgccctgcggggcccaggagactcggtcctccctgggctcccccaggcctggggtggacgttggaataaagtggggacaacacgatgagagaccccagccctggaggtgccctcggcaaagcccgagatcaaagctgggagattcgtggctggacagcaccacctggtggacacgttggagattaccaaagccgaacagtcnattcgttcttggttctgggattttcttaattgggtcttagctggggcttcctttccctttccccagtagcaggggctttgtgactatcagaaacacctgccaggcctgggcaacatggtgagaccctcgtctcttaaaaaaaaaaaaaaaattgcctcccaagacacatgcctgtagtcccagctacttgggaggcctaggagagaggattgcttgaggctggaacgttgaggctgcagtgggctatgatcaacccactgcactccagcccgggtgacagagcaagactctgtctcaaaaaataaataaacaaaaataaagaaagacatagcctttctcttacagacatggtcaggcatcatggaaatcttattgcagaagttgctcgcccttcacccctaagcctcacctctctgtttcaggggatccgagtttggggaaggaaagtctatggggccatcatttctcccttgtggctcctgcgcccgcagccatgggcccctcacactggggctgggtgcctgagcagagtccctgtccagcccccaccaagctccagcatcctggacacctcatgccatccctcctggactttgtgctggggatgaggtcaatttgagagcctccctgaggtctggtcactcctgcacaccctccacagtgggcagaatggtgccccccaaaaggcccacatcctaatcccgggactgtgaatgggctacttttcatggcaaaagggacattgccagtgtgaccgagggtcctgcgatgggaggctccccggcatcatgcaggtgaacccagtggcatgacaagggcccctgtgagacgagaggcgggggtcagagcagacctggtgcaaaagcagtgggtgtggtgatgccccagcctgggactgaggcccagaacgtggtggccttcagaagccgggaaaggccaggagatgcatctgcccccagcctccagaaggagccagccctgctgacaccgtggctttagcccagtgcggccccgtgggacttctgacccccagaactctaaaataataaattggcattgttttgatccttctgtggctgatatgtgtgatgagggggttttcacactcttgcgtgggacgtgcaacctctttagaacagtggcacattacctgtcctacatggggga

SEQ ID NO: 198946 - DNA, 526 bp, Homo sapiens
atttaggcaagatgatgtgtgcctgtagtttcagctactcaggagactgagacaggaggattgcttgaacccagaagttcaaggttgcagtgaggtgagattgtggcactgcattccagcctagatgatggagcgagatcctgtctctaaaaaaaaaaaaaaaaagcaaactataaacaacccatgcaattttagctaagtttccacaacaataaacacgcatctaaaataggaaagatgggtgatgtatgtaaataataaaattaagatgaatttccctttagatattgcagaactctttaagataatagagtgatctgactgacattaaatgctggaccaatggtgaattttagactggattttaacatgattcttgggaagaaaaaccttttaaatattagggatgtggtagctcatggctgtcatcccagtcctttgggaggctgaggtaggaagactgtttgaggccaggagttcaagaccagcctgggcaatatagcaagactctcggctctacaaaaat

SEQ ID NO: 198947 - DNA, 764 bp, Homo sapiens
agcgtggtgcactgagtgacaagggccatacatttcttgcatataacatcacccactctaatatgctctatgaaataacactctatggaaaacagtgaagaaagcagaaaaacacgaaagtaaaataacaaaaaaattaaaaactcctgcattccaaaggcaaccaccagtaacaatttcatatatgattttctagtctattcaataagcaaaccgtttgtagcctactttttagcttagcagatctagagcatattcagaggtcgatatttattcctctgtaacagattatgtaatggctgcataatccttctatcatctaaagttaccataatgaatttgaccaatccctattggaggacatgaggttgtttccatttgccaattgtcacagtttactgtggttaaagttgttatgctcaataataacaataagtaatatttacaagctatttactaagcaatgagcactgagtaaataaagcacttttcatgaattatgtcatttaacctctcaaagaactaaatgagacaagtactattattatccttgctctgtctgtgaggaaactgagccttagcagcataagtagtgtgcccaagccatgcaactctatatcgagttctacaaataacagctattacaactatggtcaactctgcacagtaacagggatatcaggggaaacatcactgagtagatgtcactagaacctggtctctgttgcaaaataatgcctgacctgttctcttttgaaaatggc

SEQ ID NO: 198948 - DNA, 733 bp, Homo sapiens
atgacacagaaaataaatgttgctaaggaggtggagaagttggagccctcatgatctggctgctaggaatagaaaatgatgcccttgctgcggaaaacaatttggttgttcctcacagaatgagcattgggtgaaaaatgaaatcaagatggaaatgtaaaaaatgtcttcgaactggatgacacaacctatcaagacctctgggatacagcaaaggcactgctaagagcaaagtttgtagtcctaaaaacctacatcaaaaagtctgaaaaagcacaaacagacaatctaagttcacatctcagggaactagagaaacaggaacaagccaaacccaatcccagcaaacacaggaaataacaaagatcagagcagaactaaatgaaattgacacaacaacaacaacaacaaatacaaaacataaataaaacaataagttggttatttgaaaagataaataaaattgatagaccattagcaagattaaccaagaaaagaagagagaaaatccaaataacctcactaagaaatgaaacaggggatattacaactgacaccactgaaatattaaagattattcaagggtactatgaataccttttggcacataaactacaaaacctagaagagttggataaattcctggaaaaatacaactctcctagcttaaatcaggaagaattagataccccaagcagaccaataaagcaagcagcaagattgaaatggtaat

SEQ ID NO: 198949 - DNA, 666 bp, Homo sapiens
  misc_feature (660)..(660): n is a, c, g, or t
gtgcatgcctgtagtcccagctacttgggaagctgagacaggagaatcacttgaacccaggaggcggagatttgcagtgagccgagatcacgccactgcactccagcctgggcaacagagcaagactctgactgaaaaaaaagaatggcattcatggcctgctatataacttttctagaatataggttggcaatgtctgtcaagagtcctaacctaagtaaataatcaacaaatatattcaacactggagaaacagctaaataaaatttggtatgtcatcatgatggaatgctatggagtggtttttcttttcttgacttttaataacttaggggaaaggtgtaagacatcagaaaataaagtaaaatgaaataatataatctcaactagatataaatgcacagaggaaagattggaagacactatcaaattgtaagtagagatttttgtggtggccttatgggccataggtttctttctttctttttaattgtgggggaaagtccacacaacataaaatttacttaaaaatggttaagatggtacacagttgagtagtgtcaagtacattcacatgatcataccagcctatctttagaactttttcgtcttgtaaaactgaaactccataccctataaacactaatccctccttcccantacacc

SEQ ID NO: 198950 - DNA, 193 bp, Homo sapiens
catccccaccggcagtatgcaagagttgctttacatccttactaaccctttaatgtcagattttaatttttgtcaactaataaatacgatgtggcatcccactgttttaatttgtattgccctgattacctttaaaatattcttttaggactattggccgatgaattgttcatttattttgcttgtttttttt

SEQ ID NO: 198951 - DNA, 158 bp, Homo sapiens
gctgatcctcttgccttggcctcccaaagtgctggaattacagccgtgagccactgcacctgaccaacaacactttcatgtaaaacccatattgacaatcacaagggtagacacattggatttgaagttttggtttgtaattagttactattcatgta

SEQ ID NO: 198952 - DNA, 634 bp, Homo sapiens
aggctggagtgcagtggctcaatctcactcactgcaacctcctcctcccaggttcaaacgattctcctacctcagcctcccgagtagctgggattacaggtgcccacaccatgcccagctaatttttgtatttttttcagtagagatggggtttcgccatgttggccaggctggtcttgaactcctgacctcaggtgatccacccgcctctgccttccaaagtgctgggattataggtgtgaggcaccgcacccagcctattttgaataggtaataacatttcatttggttcaaaattccaaaggcacaaaggttgttgtatagtgaagtttgcttcctatttctgtcctccagccacccaattctgctacccagggcaactgtgtgttcttccagggaaattctattggtattcaagcaagtaagactatactcccccaccttttttacataaatggtggcatactttagacatggtcctgcttttacttatcttaatccaaattgctttttggcatatggagtacagttggccctctgtatccgtgggttctgcttctgcagattcaaccaaccatcggttgaaaatattcaaggagagtgggcacagtggctcatgcctgtaatcccagca

SEQ ID NO: 198953 - DNA, 389 bp, Homo sapiens
caggctattatattataaggttaaggacttaataaaaagttttaggccggatgcaatagctcagctttaatcccagcattctgggaggctgaggcatggggattacttgagttcaggagttcgagaccaaactgggcaacatagtgagactttgtctctactaaaaaacaaaaaatgaggctggaggaggtcaagactgcaataagctgtgatcataccactatactcccacctgggcaacagagtaagaccgtgcctcaaaaaaaaaaagccaggcgccgtgcctcacatctgtaatcccagcggtttgggaggctgaggtggacaaatcacttgaggccaggagtttgaaaccagccaggccaacatggcaaaaccctgtctctact

SEQ ID NO: 198954 - DNA, 510 bp, Homo sapiens
tttaatttggcagcttggaaaatcttttcaaagaaatggcttttaagtgtatttctaagaatggttaggagtttgttaaatgggaaatggcaggaagagaattccaggaaggagctctcgaattgcataaagttgaacaacattgaacaaggtgtgagccttggtgaaactgaaggagggctagtggggtaggaatatagtaagttgaggtaaaggtagaaggaagcagtagccaggtcatggaggaaacacaatgcctttgagaagattttaggccttttggaggaaccaaaatatccattagtagttttagacatacttcattaacctgccctctgcctccaatgtggatacactcctcactccactcaagctacagtaccttctactgctctggccctaccataaggacatcctcctcatccatttcctactccagcaccctgtgctaggccacctccctcactcttgggctgtgaggccatcactgtagcatcgtcctataaaaat

SEQ ID NO: 198955 - DNA, 485 bp, Homo sapiens
ttccactagctaacattttttccataatatctgcatttagcacctctgacccacacatacttagatatatactcctacccttcattgaaaactgttaactcctctgccaatattttattttattagcaactaagaaaagcctcattgactttagaatactaaaaagatattatatactaaaaagctttctagccaattagtttatttctgatttccccatatgtgtatattccacttggttgtggaactttctcagcaaatattttatcactgattatcccactattgtgtgtactcttacttttggaactttttattcttttttttgtgccctggaattcacatttttaatcctgaataatatctaaaagactaatactgtcaagcttatgtgactaacaaagctctattgtggtttggatctgatgggaatctgtaaagtagacagaaaagttgtcaaacatagtagttgggtgttttcacta

SEQ ID NO: 198956 - DNA, 423 bp, Homo sapiens
gcataatccacaataacataacatttaaaagcaaaggctctgtatcgattattaacatgaacaatttcctttgctaccatactccatccagataaagaactgaatgttcctctgaaccttccaattaatttcctccattgtgatgaatcctccatagatttattggcaaaacattatttctaagtgttctccaccctactataaattgtctcaaaatagtttgtgtctaccaacaaggtagtatagactataaacttaataaatagtaattattgataattatgagataccaggatgctaatgaaactttattgcttgtattgagaaatgagagtataaattgagtataaaatgaaaagacttgaatgcttagtaaagcatataatgtagctaaagttattaaacagatatatgtatatgcca

SEQ ID NO: 198957 - DNA, 166 bp, Homo sapiens
tcccatttagaggaacggggtaggaaagagagtcctctagcaaacaagggtgtcccattgctggtggcgggtgcagcggtggtagataaagaatcttggctcagttaatccaagatgcaagggaggagtcctgagtgactggcagctttgtctccagtaacagccc

SEQ ID NO: 198958 - DNA, 495 bp, Homo sapiens
gagccctatgtgctctgcccctgtctacagacctgcctctcaccgcatgcccacagtcaccacatgtcagccatggcaaactacctggggacccccaagcgacctgcttgtggggctctgcaccctggtgccagttcttcttttagcctggggtcctccacctgccctctgcctcaatggctcagtagagccttcagagctcacatatcagctcctccaaaaagtggtgccggaccctgcctcccgtccctgaaaaccgagcttgcactgtcacatttaacatgttgtgcctgacctattcttctacacttctgtcctcgtgacgtggggtctgctggaggccagtgaatgtgaattttatctttgtacttgcagggcacaacacgacactaggtatggattagatgctcagtaacaattttaaactggtttaaaagtaattccaacattgcagaagggtctaaggcaaaaaatgaataaaagtttcctgccact

SEQ ID NO: 198959 - DNA, 375 bp, Homo sapiens
tcctccatgaaggcttctttgctctccccagccctgggaagagataatcccacctccctccatgcaaccattgctccccttgaacttacttacgtgaatgcatctagcacacctcattagctctcagagactgggactaggtcttctctgcctttgtgtcccacgcttccaacacaagcctggtacacagaatgccttgaatacccgcctgtcaaatgaagaagataaaattgagacacattgagccatccaggggcatgcagggcaggtccagtgcagcaggctgtggaaagacataaacccgcctgcagcctctctctcacccccacctcctgccctagagagatgaaaatacaaaattacataaaaaatcaa

SEQ ID NO: 198960 - DNA, 1397 bp, Homo sapiens
atacaaaccaagcactcggtcaagggctactgagggaatgactgcaataaaaagcaatctctgtgtagacttcatccttgtcaattgttagcgactttggtcaagaagatattttggaaaataccattcactactctacattttctatggtgctgttgaaaaataaaaaataaagctttgatctggaaagctctgattctcattctcattatctttgtgatcgtggaaaggatgtttattctttccgagtatgttttctttcctctaaaatcagagactacattatctcttatatcttgtcccatgctaaaattctatacatcttattctaagatttcaacaatatctatagaaaaagacaaaaagactaggaattatgagaagagagagagattataaattctatatgaggaagtttcatctaaaacttatcttctcctatcaaaagcaagttgtagatactcttagttaagccacacctgccttgtaaatgccaaacaggtccattttaaagtgtagtaaaaactacattccattctatttttaaacagctttattgagaatccacatgctatgcaatttacccacttaaagtgcacacaattgagtgatttttagtatattctcagtttgcagctatcaccactattaattttagatcatttttatcactcccctcaaaaacctcacactcattaacacttgctcctcattccctcctccagctctgggcaacaactaatctactttctgtctgtatgaattatgaattttcctattctggacatctcatgtatatggaataatacaatatgtttgactttttgtgactgatttctttcactaagcataatgttttcaaaggttatccatgtcataccatgtatcgataaaattcatttctttatattgcttaataatattccagatcctttgcctgtttttaaattatcttgcctttttactattgagttttttgtatattcaagatacaagtttcttatcagagatatgatttgcaaaatttttatttcgttttatatttcctcctggaatgcatttttttattgccatgaaagtagagagcgggtgctaagataaacacattgaggatttgatgaagctgtcttgagggcgaggagaacactgcaggcagagggagcagcatgtgcaaaggccatgagacaggaatgaatttgctgggtttaaagatgagcaggaaggccagtggaatagaaagatggtaaggtagagaagggtaggagacaaagtctgggaagagggaaggggccggtttacatacaccttagagaccacattaaggagtttgaatttcattcagaaagtagttgagtggttttgtggattttagcagcggaaatggcgtgatccaatat

SEQ ID NO: 198961 - DNA, 765 bp, Homo sapiens
ttattctactaacaatatctaatttatatctatgataactccccttcgtaatattctaaatcattaacacttgctcctcattccctcctccagctctgggcaacaactaatctactttctgtctgtatgaattatgaattttcctattctggacatctcatgtatatggaataatacaatatgtttgactttttgtgactgatttctttcactaagcataatgttttcaaaggttatccatgtcataccatgtatcgataaaattcatttctttatattgcttaataatattccagatcctttgcctgtttttaaattatcttgcctttttactattgagttttttgtatattcaagatacaagtttcttatcagagatatgatttgcaaaatttttatttcgttttatatttcctcctggaatgcatttttttattgccatgaaagtagagagcgggtgctaagataaacacattgaggatttgatgaagctgtcttgagggcgaggagaacactgcaggcagagggagcagcatgtgcaaaggccatgagacaggaatgaatttgctgggtttaaagatgagcaggaaggccagtggaatagaaagatggtaaggtagagaagggtaggagacaaagtctgggaagagggaaggggccggtttacatacaccttagagaccacattaaggagtttgaatttcattcagaaagtagttgagtggttttgtggattttagcagcggaaatggcgtgatccaatat

SEQ ID NO: 198962 - DNA, 431 bp, Homo sapiens
tcctattctggacatctcatgtatatggaataatacaatatgtttgactttttgtgactgatttctttcactaagcataatgttttcaaaggttatccatgtcataccatgtatcgataaaattcatttctttatattgcttaataatattccagatcctttgcctgtttttaaattatcttgcctttttactattgagttttttgtatattcaagatacaagtttcttatcagagatatgatttgcaaaatttttatttcgttttatatttcctcctggaatgcatttttttattgccatgaaagtagagagcgggtgctaagataaaataatacagaggttattttagtttggggaacggggtcaagaaagtaccctgagacacattgaggatttgatgaagctgtcttgagggcgaggagaacactgc

SEQ ID NO: 198963 - DNA, 872 bp, Homo sapiens
cgggagcaccggcctacatttcaatggggcctctggaattcagcggaatctaccaacatacgggactcagggaagagttcagcaaggataggggcccaggtgtatggtcaccaagcccacccagagagaaggaatgctggagtgggcaagggtgcctgtcccccagcaggccactcctggcaacaggccaacgccacgccctgaggatgaacagagggcaccaacaggaacctccacttctcactccagccccatgtgcccaggcaaaccctctcccggggtaccagctcttctgagagttgagtccggatgcctgtggttattcttccttctctggaagtttcctcgttccaggaccgcctctattctgaaccacatgaggatccacttaataggttgtggcttctcgatgaaggtctcactcttcatcccaccccatcagtttaattgaggaaattactcagactctcccaatgggaaattcagcttcaaatatgtccttgttatgccctttacctcagggcagacacggaatgtgctgttatctgggttgtgatcccacttctctctcaagtcctaaaaccgaaatattaacatgcacattgataatatgcacaggattaaagaacaaaaatgtcagcagaagcagcacattccacgggcattccaaatttcttgctattataaaatatcaccctgattaagacatgccaatcactccaagccaagtagagcctccacccctaaaagccacctcacctgatcatccaacactcagtgagaacacactctcttgtgatgacaccatcctcgcctctccaatatcagagtgaccttcacactccgcatcatctcattttggctggactccc

SEQ ID NO: 198964 - DNA, 240 bp, Homo sapiens
agtaactgagactacaggcacccaccaccgtggttggctatcagtgctaataactttctgaagctccatgcctttaactccagcgttctttacttagtgttttgaaatatctgctgcccacaaatcctagcacatttctgaagttaccaagactttaagacctcccatactgctttttctcccatcttcccttctcagtgttattagcctcatagtttcaagggcccagcccagtatcca

SEQ ID NO: 198965 - DNA, 312 bp, Homo sapiens
ttagctcattgatctctacatctgtggcacagctattagaaccgggaacttccctgggaattctcttcacttctctcctgttttggatactctaatttctggatgttgttttgctggagtgcattttccaataattttttgagagaggatacatgggaggtatatgttatacccagaccttgaatatcttcagtgatgtctttatacttgccggtttgactgggtatagaattagaattgtaggttggaaataatttttccactgggtattgaaagcacttcatcttctagcttttggaattgctgttgaga

SEQ ID NO: 198966 - DNA, 276 bp, Homo sapiens
aaagtactaaacactcagaataaagtatgtctactagcctaagcagcaaacagctctggttaatagattattagaggaacaaagttactctattttgcctatattatgccaaataatactttatcttagcttatattttccacttaaagaaataactttgccaaatacaggactcctattttctcaaaattcttctaagagtgctacaattaacccatactgaaatgcaccacacatagggtgaccatggccagaacaatccccgttctgtgctgt

SEQ ID NO: 198967 - DNA, 139 bp, Homo sapiens
gtatatcattcgttaaatcggccaccccctactttgaaatgggaaattggaattttggggaattatttaccaatttacttaataaatgtaagataatattaatacaaaataaatatgcaaggctgtctgtacatggata

SEQ ID NO: 198968 - DNA, 477 bp, Homo sapiens
gactattgatgctccactgtaccagacacctcaaatacagaataactccattttatttaagtgacttcagcatctgaggattttaatatccacaggggtcttgaaaccagtccccaacagatactgtgggtcagctatacacaatcttatttaaacctcttgccaactctaaagagtaatggagagccaagtcatagatagctcagagaggtcaagtcgcttatccccaaagtcctgcactttttgttcctgctgtctcctttatgatgaaggaaaacggatcttaggtagctaacttgcagccattgactttgcattcagttgtatggttaaatccacttgtgatgggaaaatggctctaatttagctaacttgaatgaatagatcttcattgctagttgtctaatactccataatttcgataccctacgcctccaaaaaaacacaaactctcttgctgccataactcatgaaaac

SEQ ID NO: 198969 - DNA, 776 bp, Homo sapiens
gtgttggacaaaagcatgaactggaaaacacctatcaggtttagtggcagacctctgccaaaggagttccaggatagcagtgagccaagaaactagattgcagtgcattgaggagggaatgagcagctacgaagaggagggtgtctgtctctttaaacccttgcctgtgaaaggctgacagtacagaacactggctggagtgaggctgacattgacaggaagctgccgaaagagagagggatgctggagaaataaaactcaacttatggcactcacatcaaggaagtgggaagggatggatccagagggacaagccaatggagacgggcgagcagggtaaggagatggtatcctcctccttgatggagaagctttttccaagaacaatggaataggtgtgcggggcatagggagacttggaaggacccccaaagggaatagaaaaggagagcctcttggccactaggatggtgttagggagccaggggaggttggagcctctctggaagtgccctgtggctgcccaagtgaggggagacaatgagtacacatgtgaagaaaggatttcctgtgggaaaaccagattcatgtccttcctgcccagagttatgttcttcaaggagttcagtcctgcacacactagtgaataatccttataaatgtccacatatgccccccaagtacgtctaccaaacatagctcagtcttacgtaaaacagtgtacacatgttactaatcagatgctctcataaggaatcatgccattttgagagggc

SEQ ID NO: 198970 - DNA, 404 bp, Homo sapiens
gggactccgggccgcagcgccgccgagcgcgattgcccgctgagattcggcgccccggggtgcggcaagcttgcggtttcaggtgctggctaggcgtcttggtgcgctcgctggagtgccgagagcatttgggaaacttaacttctcgcccccactccttgctcccgactttcgggtagaaaagcagttgccgagttgttttatttcctcccccatcggactctgtaaaaatagccgtgcgccggggcggcagagcccatctctgccgcaccgctgccccgggtcggcagagcccatctctgccgcaccgctgccccgggtcgggtgtggacctaaaaatacccggcggtcccaagcctgcgctgggggtgcgggcgggtccggccgggccgcagagggcgtca

SEQ ID NO: 198971 - DNA, 381 bp, Homo sapiens
agtgattaaaaaaatgtgatacatagcaaactacagaccattctgaataattagtggtgcaggaataatgccatcagatgtacagatattacaaaagggaagagattttgttgttgaaatgtttctattgatatgaacaacaaactgtgtctcttgcatccagaggtatgctaagaaaaagcatgagctgatgcattactatatttcttgaagaaaatttgtttgcagcaagtcaaaatttctgtccaatttccaatttgtaaaataaaatgtcttgaattatctatgcacatctcaagtttgttgaggtctttaaaacttgaaaagcacaaaaaaagtttgttttaataccaccaggatgaagatgatctccacttttcc

SEQ ID NO: 198972 - DNA, 573 bp, Homo sapiens
catataaatgactaccccactgtatactacccaagattgatgattgtcatattgaaaatctttatgaattcaacagatttttaaaaatcatgttttgttactttaatttgctttttttttattaccactgaagtcatgattttaattttttattagccatttgcactatacctcttcagtgcaataagttaaattagaacctggaaaacaatcaagatgtttatcagagcaggaagagtgaacaaattaaggcacatctcgactgtggagtactctgcagatgggtatgaggtagacctctgtaatattgtacagaaagacctactattaatttactcatttataataaggacccatacatctataaaatactacttttgatattttaaatcctaaaaaatacataaaagcaaaaattattcataatttgactccattttgaattaaatggaattttcttttttatttttctatgtaaacaaattatacccaatttaataaacatcagcaaactctatttacttgaggaatttcttttttcagaaaacatgaagtttaatcaaaaaggttgtt

SEQ ID NO: 198973 - DNA, 290 bp, Homo sapiens
ccattcttatcagggaatagtggcaactctcttgaaatccaggttctcagatgccagctaagggccatccttgaaggcaggcctttttaagtataacagtcttgggcctcaaatgtaaactctatatcaccttctcaaggcatttttctgttacttgctttttggtttcttatatgaatctcactttttttaaaaaatacctcatactttttgctgaaacctacaaattttagataatatattgcagtgatttctggatactgctaccccctcctctactgtggggctca

SEQ ID NO: 198974 - DNA, 651 bp, Homo sapiens
gttgccaaaattataaaactttacactaggtaaatgtagcagaaaaaccatgcccttcctctatcattacacactgcagatccagaagcatttatgagtcctacaattacctgacattataatgaaaaaccaagattaataagtaaaagtgaggctgggcgcagtggctcatgactgtaatatcccagcactttgggaggccgaggcgggcggatcacctgagatcaggagttggagaccagcttggccaacatggtgaaatcccgtctctactaaaaatacaaaaattagcctggcgtggtggtgcatgcctgtactcccagctactcgggaggctaaggcaggagaatcacttgcaccggggaggtagagcttgcaagtgagccaagatcgcgccactgcactccagcctgggctacagagccagaccctgtctcgataaaaacaaaaacaaacaaacaaacagaagaattaaaactgaatttaatctatttcctcctacaaaagatttagtgattaagcacttaagagctctagttcaggggtccactaatttttttctgtaaaggaccagacaatactctaggctttgggagccatacggtctctatcacaactactcaaaaacaaaacatgcacagccataacgaa

SEQ ID NO: 198975 - DNA, 390 bp, Homo sapiens
ttggattcactacaggagtttgaaagtacagtttttatgttcactttaaaaaattataaaaattatatataatataaatttaaaaggttgttacaaattaccatttaacaagcaccacgtttataccaatgaactcaataataaataagtgttgatagaaatcttttaagaccagactaggctgggcatggtggttcacacctgtaatcccagcactttcggaggccaaggcgggtgaatcacgaggtcaggagatcgagaccatcctggctaacacggtgaaaccccgtctctactaaaaatacaaaaaattagccgggcgtggtagcgggcgcctgtagtcccagctactcgggaggctgaggcaggagaatggcgtgaacccgggag

SEQ ID NO: 198976 - DNA, 416 bp, Homo sapiens
gtagccagttgttgttatggaaaattataaaactattttagatttaaaattacccaaactttgccttgtttcattctgtttttttttttaagagaagtttgaattatttaaaattacttctcaagataagtaaaaacaaaagagactcctacttattgcttaattggtgatgcacatttgctttaacttagttaattttcacgaagtagcaattacaaaacagaccaaactggcgctgattaactaggatcaaaatctaggtcttttttctcttggcatcattgtctagacttccaggcttttggagctatattcacagtaattaagtgagaagacatgctcaaaatgatgccaaagaagtgaggtaataggtgttatctgcctgctgtttctggatttcatttggctctctgttt

SEQ ID NO: 198977 - DNA, 460 bp, Homo sapiens
gcttttcatcttaggagactgaaatggatctaatgagcccagcacttccttgatttcctcgaataagttttccacaaaaggcaaagacaagtgagactcagccccatttctaaggcaagcccagtggagtcactgcctttaaatgctatccacaaggtatggtcagcttcatttgtacaatgcccagggcatccaatgaagaggagaaaccttcatctctgcttcacaggctgaaccgacattctgtggacattgattccacctggcctccactggaaaacaaatgtaccctacatccttacccagaaaaaagtcctctgcatgcttctcctgtgcaagaggggttgttcgggattacccaggaatggggtgtcctggcatgacagaagaattggatgcagcaattgcagattcagaaagaatactgcttaaacaataaagaaaagtcatcaattgtaca

SEQ ID NO: 198978 - DNA, 550 bp, Homo sapiens
aacagatgcaggcctattcagattttctatttcatgtcagtcttggtaaattgtaattttcaagatatttgtccatttcatctaatttttctaatttcttggcatgaagttgttcgtattttatccttttcacgcctctaggatctgtagtgatgtctttcctcatgttgctcaaagaaccaactcttttggctttgttgaagttatctgtttgttttcatggatttctgttccttatgatttccttgcttgcatttatgttgggtttatcctgttactttgtagcttcctgaggcggagccttaggccttgattaacgtgttgtactagtcagcattctgcagaggaacgttgccattatctgtgtctctttctaaaggagatttgttatgaggaattggcccacgtcattatggagacggaatctcatgctctgccatttgctgaagattgaggaaagcagtgggataataacagtccaaggacaggaggagacacgtggccccgctcaggctggcaggcgagaaggaaaacccaggccaactcctcc

SEQ ID NO: 198979 - DNA, 574 bp, Homo sapiens
tttgattaataccgtgtcaattgagaattttctccttagctttttctcccattgtttttcccaaagactagcttctctggccacctgccactgattgagttttaggagttcaatggcatttgtttgtttaattcacttgatgtattccaaatgcccagaccaatgcatggtacatggtagatgctcaataaaaaatcatcgaatgaatgaaaaagaaaccataacccagaatattcagaggggttaatacacattaccaatgactagtactcatgtttacaaataattcatagggtatatcttacttgtagtaccaaaggtagattttgttttatcaatactgggcttaagaacatccttcagtagaaatagcaagtagacatatataaaagcagaaactcttttccttcccactttgatgcagatttcatttctactctagcttttccaccatcactgctgaccaactttaccaaccactaacccaggtgatgccatacggatccagcagacccctcctaccagctcttcctcttcattttcctcctggatctctccaaaggcctcctaactg

SEQ ID NO: 198980 - DNA, 148 bp, Homo sapiens
cctatatatgtgtgcgtgtgtgtgtatataggatactatatatcctattcgttctgtccctctgagagaaccctaatacagattttggtcccaggagtggttctagaatattaaggatggagttatttccttggttttggagtctaat

SEQ ID NO: 198981 - DNA, 571 bp, Homo sapiens
actacggatccttaaaggcgagttgagtaactactacaagagactgtatggcccaagaattgtaaaatatttactatctgatgctttcaagaaagtttgcaaagcctgctcttgaaaaggaatggaaggaagaggcgaggaggaaggcaggaaggagcagagagggacacggggctgtattcaaacatctgttgttaagaaagagaaattcaatttatttggcatggcccaagttatcaaactaggagcactccattgaagtttcagaacaaacactgtgctgaatataaggatgaccccatctgtaatgcctaaccttgtttttactaattttgttggtagactttccttttcttttaatcacttagccttgtttctacctgaattgactttcttttagctaagagagctagatagactttgtcttggctttttcactggcagccccttcctcaaggacttaacttgtgcaagctgactcttagcacctctaagaatgcaattaagtgataagatactgtgggacgagcaatatccgcagttactaggaatttgtctgattgataacgcc

SEQ ID NO: 198982 - DNA, 425 bp, Homo sapiens
tcaaaaataaaaaagtcagcttctgcagataagaaggaaccagtgtaagaacaccatgaatatgaaaaaaacccagtgtttcaacacttccaaaagatcacactagttcttcaacaatggatccaaaccaaaatgaaaattctgaaatgacaggtaaataattaaaatgtgaattgtaagttcaatgaggtcccagagaaatttgaaaaccaacacaaagaattcagtaaaacaattaaagatatgaatgaaaaaatgtatgtaagagatactttttaaaagatcatgcagaatttctgaaaataaaaaattcactgaagaattacaaaatacagttgaaagcttaacaataaactaaaccattctgaagaaggaatttcagaacttgatgacaattctttcaaattaacccagtcaaacaaaaa

SEQ ID NO: 198983 - DNA, 406 bp, Homo sapiens
cccccaggttcaagcaattatctacctcagcctcccaagtagctaggattacaggtgcctgtgaccacacccggttaatttttctatttttagtagagatggggtttcaccatcttggccaggctggtcttgaactcctggaaaggtctttatttttaatatcctggatgctaattcttacttgtatatatgcaattatttttttctagtttataacttccttttctttttgttgttatacaaaatatttaatatgatttttaattttaatgtgagatttgtaatcttttcctctgtgctttttattcttttgcatgaaaaatccttccatatcccattatcataaaaatattctcttctcatctagtagttttgtggtttgttttttacccttatgtctttcatc

SEQ ID NO: 198984 - DNA, 369 bp, Homo sapiens
gctgaatggtgtgtggagagtggaaaggggcaacactttgagttccttaacaaactttagaatataaggtcaggcgcggcggctgacgcctgtgatcccagcactcccggaccccaagacaggatcacctgaggtcaggagtttgagaccagactggccagcatggtgaaaccccgtctttactaaaaatacaaaaaaattatccaggcatggtggcatgtgcctgtaatcccagctacttgagagactgaggtaggagaatcacttgaacctgggaggcagaggttgcagtgagccgagatcgtgccactgtactccagcctgtgcaacagaacgagactctgtctcaaacaacaacaacaacagcaa

SEQ ID NO: 198985 - DNA, 275 bp, Homo sapiens
cagaggatcgcttgagcccaggagttcaggaccagcctaggcaacatagcgagaccccatctctacaaaaaatagaaacagtgagccaggtatgattcatgcgcacgtagtcccagttatgcaggagactgacgcaggaggattgctagagccccggaagttgaggctagagttaagccatgatcccgccactgcactccagcttgggcgacagcgtgagaccttatctcaaaaaaaaaaaaaaaaaaaaaagttacatggatgtaagctaggga

SEQ ID NO: 198986 - DNA, 447 bp, Homo sapiens
gcatacatctccttatgctcatccctccttatgctcatcctccttatgctcatcctccttatgctcatcctccttatgcccatcctccttatgctcatcctccttatgctcatcctccttatgctcatccctccttatgctcatccctccttatgctcatccctccttatgctcatccctccttatgctcatccctccttatgctcatccctccttatgctcatccctccttatgctcatccctccttgtaatgggtgctctctgggtccagccagtccccagtttgtgggtcaagccaggagatggggaagcgagactagaatgagctgtgtccctgagatgctctgtaggacaacactggaaactgtgctgcttcaaggatccaagacggtgtggctgaacacaggctgaagtgcaccctccatctctgggctcagagtgaggag

SEQ ID NO: 198987 - DNA, 558 bp, Homo sapiens
ctagaggaccccccgctgtcagtggaactttttcttcatgaaacatttgaaagtaaattaccaacctgatgctctgtcacgttaaacactttaggatttattttctacaaagacattctcctgcataacaacaaaatactcatcaaaatcaagaaattagccagtgccagtagtcccagctactcaggaggctgagccaggaggatcctttgaggcttggagttcaaggctacagtatactatgatgatgcctgtgaagagtcccatactaaagactggacaacaaatgagattctgtctctaaaaaactaataattacaaaaaataaaatttcttttcttccccctaaaccacagaattttttaaatcaggaaattatcattggtacattaataaccacctaatccctaaaaccccattagaattttgccagctgtccccataaatcttttttccaatttgttttgctgtgttaaaatacacataacatttattatcttaagcattttatatatacagtttagtgatattaaatatattcatactgttgcacatcca

SEQ ID NO: 198988 - DNA, 361 bp, Homo sapiens
catcgatctgctaaaattttagcctatttttttccagatatgagtaaaggtttgcataaactttatttgggagagaatttgtgtatatgtcatttgtcgtgatgtaatgtaagaaatcaatcatttgtatactcttacccttggtataaataaagtcagtgtttacacttggacttggtagacgaatgagtacaaggagaaacctgatattttactttggattttgaatctctagttaaagagaaagcaaggaaacctatttttgtgtcttttatggttaagttctgatttccatttgaactcactgcaaacactaattattctgtatgatgggggaatgctgccacttgttaagttatta

SEQ ID NO: 198989 - DNA, 751 bp, Homo sapiens
aagtcccaatttagctttggaatgtagccagcaaaggcctgggaaggcagcaaggccccaaggcctgactcagccagcctctgtctcaaccactgccctgtggccactcttcccttcactgggggaagggcaagctcatcagcacagctagctgtttactgctgatgagctcactagacaaacagcatcttccatctggcccagggctgggctctggggaccaaacaagctccactgcaggtgtatgagagggatgaggggtaaggccattgggagagtgtcatttgaggggagtcaaaaccccagtggcatacaagtatgagcccacacacaggcactcacttttgcaccagctgaaattcccatgactaaggggatgtcttaaggaccttctttagaagacatatattttggaatcagaaaactcaagctgggagggttcttctggactatctagatcaagactaaaactgacttagccagtttttacccacacagtattttaaatatcaggaggtatcacataaacatcaaaattctcagcatctcttaaagagtcaagtgccctggatgctctaccagcagttctacctggcaacagttgcccatttagagggagtctacacgttacagccaatacaaactcactctattgagctcactaatttactttaattgcctgaccctgtaggcatctgattgcaacttctagtctaaattctcccttttcatagatgagaaaactgcggcc

SEQ ID NO: 198990 - DNA, 504 bp, Homo sapiens
agttatgactataggaggaggtactagatgaagaaagcgcacaaagaagttccgtaatgcagcatggtttcatgattactgtgtaattgtggtcgcagtggtagatgtattgttgggaatcttctcgttgcaaataacagaagacataactcaaactgctaaggtaacaaaggttgcgtgactcaggaaaatatattgaatagatagctgggttctatcaatgcaggatggctgtcaattcttctggaggctctaagtgttcacacttaaagagtatgtcaatggaagagcaagggatcttctttttagtggtctccatctaattatctccttacttattattgctctgcattgggtaccagtcccatgtctaactcaatcactatggacattggagtaggctctcttgtttagctgaagccatccaaagtccattgccaaagcagagagagatccgtttcctcttgaagcacattgactgaatgaggaagcagcttatatttg

SEQ ID NO: 198991 - DNA, 516 bp, Homo sapiens
tgacacctcctcggatcggggagaaatgaggcagcctgcagccagcagagcacgtttgtttcttgattgggcactgtttgccaagacagcggactgaacgacagaactccactgaggacttgtgtgtccagtgttagaggctgggttaaaatctaaaacaccccagagagaagagggcaggcggggaagaggggatggtcccacagaaaaagtgcagaacctgaaaaggtaaaatgtcgaaacatggcagcatgatgtttcacttgatgaggccagcccaggccggggacaatgctgcccaactgtgggccaaagcaggaaggagcttcacctgtctcacatcaaatgacagctgtcaacacagaagacttaaatacaaaaacaaaatgaaaggccaggaaaataagaggtaccataaatctgattagcatagttccagtaggctctggaaaactctttttacctgctctcaaagtaatatattgagaagtaatataatgaagttatcaaattaac

SEQ ID NO: 198992 - DNA, 607 bp, Homo sapiens
ttttttccccacttcccctccagtattatggtgtattccaaagccaaatataattttttggtggctcgttgtgattaatttctgttccactgagcctatccatagaacaggcaatgcaactttggaaaaaacggtagtctaacttatttttgcatcatatagactgtacagcaaaggtgaagggaccaatatgagtattactggggcaccgagggaaaacattttcagaagagatcaagaaaaatgtgactcaacatgaatgaaccctgaaaacattatgctaagtgaaagaaagcaaacgtgaaagaccatacgttgtatgattccatttacatgaaatgtcaagaataggcaaatccaaagaaactaaagtagatgagtgattgccaggggataagggaagagagaaaggggagtcactgctaatggacatgggctctctttttggggtaatgaaaatgttttgaaattagatagtggtagtggtgtacaactctgtgactgtaccaaaaaccactgagttgtacaattttaaaggctgaattttatcatatatgaaatatatctcagtttttaaaaagaagaaaaaagatgttattcaaaaagg

SEQ ID NO: 198993 - DNA, 234 bp, Homo sapiens
ctccagcgtggttggcaaaagcgagactccgtctaaaaaaaaaaacaaaaaacaaaaaaactatacttttaatagtagaccaccccaaaacacaataggtttattataaagaaatattttatagcaaataatagcaagtacacaataaactatagcatttgggtacaattatgaaaatctatgtgtggtaggtatatacatgtgaatggcaaggcaagttaagaagaaaatcta

SEQ ID NO: 198994 - DNA, 483 bp, Homo sapiens
ccggtgccggtaggctcctctctgcagggcagctggctttgggaccggatgagatttgaggcagcagcgagcctgggacccgggcttgtcgtgactctggctcgcgtgctgccccggcagcctttgtgacacggagccctccggctgcctgctcctcgcgcctcgcatggctctgcaacattgtgcaattccagacgcttttattgtttgaaaacagatacgcacaattgctttgccgtgcaggaatttaaaaatttcagctcaactctgcccactcatctctctgccttgtcttctgcaaactcagtcctcaaaatgagttcctgatgtctttcaagcaggcgttatttattaagaatttttccaacgtaaataaaggaaggaagaaaatggagggatttttaaaaagtatgagaatggtaggaaaacacgtgtgttcagttaattttttatttgtcttttaaaaaataaagcgaaagaact

SEQ ID NO: 198995 - DNA, 251 bp, Homo sapiens
ccccttccttaatatagttggaaatgcattactgtttactctccctgaatcagcactggcatcagctgagacctcagtagaaatacagaatctcagtatcagctccagacccaatgagtcaggatctgcatttcaaaaagatacccaagtgatttgtaagcacattacagtttgctatgtactgcttcagataattcaattaaaaaatttaaatttaaaatgttttgatatcttctatattttatagaaga

SEQ ID NO: 198996 - DNA, 429 bp, Homo sapiens
caaactacatttagcatttcatgtctaacatctttcaaatgcaatgtgctcatgagggtttttctgaagtcctgcctggtccctgcctaaagagagacgtagaacctccatatacaaagaaacttgattcaaggtgcttttttttttttttttttttttttttttgagacagagtttcgctctccttgccccgactggagtgcaatggcacaatctcagcccaccacaacctccgcctccagggttcaagcaattctcctgcctcagcctcccgagtagctggaattacaggcatgtgccacaacacctggctaattttgtatttgttttagtagagacggggtttctccattttggtcaggctggtctcgaactcccgacctcaggtgatccgcctgcctcggcctcttagagtgctgggattacagg

SEQ ID NO: 198997 - DNA, 748 bp, Homo sapiens
ttcctgtttggatgctttcttacttgtcctgtttgatccttttaactcttataaggtagacagagagagttgttcctgtattcatgatgagacagttaagacacagcaaattaagtgaccagtgctatttgtttgaagaacttagtttattcttctgtgtacttattttccacatctgcagaactgtgaccatcctccacataatttatagtccataccaagtagtggatcaaacgagctcctgccaggcagtcaccagcttctgatgagaacagcagcatgcagcctgcacttcaatgctgcactcccaagaccagctgtggcccccacactgccagtgctgtgtgtaacgggtgctctgtagttcagtattattgatttcctatagattctttattttttaaatagcccatgtcagtttctttcttttaagtgtgggaagggtcctaagctttagtttcctgttctgtaaagagggatgatactctttgccttgtttatctaccatgcaattattatgatcaagtgagattatttttgtgaagccatgtaaactataaagtgctttccaagcatgaggaattactgtggatgatcttgagtttcacatggaggtcaggagcagttaaaattgttggttgtgataccatccataatctcttctctcaacaccctctgcaagctctaagggggggggattgtaggggtcacacaggtgttattgctagaaaatgaaagagcagaaagg

SEQ ID NO: 198998 - DNA, 769 bp, Homo sapiens
atagagaaattggcatattgtttttgccatgtgctttttacatattcctccccatggctagactaatcagggaagaaatatcttcatgtcccagctcctagctaggtcaggtgaatacaagtgacatcatgtgtatcctcttcaccaagttagcattaagttgccttgccaaacccttgaagcttcttatgtgagacatctgtgcccaatgttatttatgaataggagcaaaatgtataaatatccatgggacttcctgttaaatgtaccacattgaatgcaaatatttatctctgctgcttctgaaactttattaaaatgagagtagaaaaaatagaaggatacaaatcaacaaggaggaagagaacaagaaagatgatcccaccaaataagaaatgccaacaaaattttggaatctggaaatagacgaatgactggtaattatttatcagagcccagaaagaatattgaggagggaggcacaagaaatgagttaatgtcaatttcagaaccctgtaaacatttagaaatttggaggcagtaggtactctgaagttagaggaagtatggggcttaaaataggattcgttaaaaaatctgtgtaaagaagagttagatttccaatcctctttctatctctgaccaccagtcaattaacccttcttcacctaggcaggagaatggaggctcttcttcggggaaatttaacctggaaggctctacttgagcacctagtcacggaagatagtgggggaaatgccaggctgga

SEQ ID NO: 198999 - DNA, 662 bp, Homo sapiens
acaatttgacataaaaatattctgtgatctgaatgttcattttaagaacccctcttggccaggcgcagtggcttacgcctgtaatctcaccacttagggaggccaaagcgggcggatcacctgaggtcgggagtttgagaccagcctgaccaacatggagaaaccccatctctactgaaaatccaaaatagccaggtgtggtggcgcatgcctgtaatcccagctacttgggaggctgaggcaggagaatcgcttgaacccgggaggcggaagttgccatgagctgagattgcgccagtgcactccagcctgggcaacaagagcaaaactccctctcaaaaaaaaaaaaaaaaaaaaaagaacccctcttacaagttcccatggtcccccagccagctcttttcacagaaagagatagaagtcctctcaagaccactgtatagttctctcattgtaaacgaaatgtgttgagaacagtttagtcctgtagcaaagtattccttgtgaacacaaaaaatatggattcctgttttaaaaattagccagtctcaaattgttatagattgagtcagcgaagcttagggactgaatacaaggggagaaataaataccatgaggaacagggtttatatgcttaatgccaatgacatagaatcttgttt

SEQ ID NO: 199000 - DNA, 200 bp, Homo sapiens
acgcgtccgatgaaattgaattactatttcactgacaaataatctgactgtacagcctatttcactgagaaaggtaacagagagctgaagcaaatgaacagctacaaaacacaatgaaattccagttttagggaagttagcctggtcagccacatttggcttcatttggggaagagagaacctaaaggtacagagaacag

SEQ ID NO: 199001 - DNA, 249 bp, Homo sapiens
atttttccctcttcgtctgatatcacggataagtgagacttgtaggtctgtcagatagtacctacttaacatgctattgaatcaacaggcatgccgacaatttcatctacagaaaaaagggatatgcaaagctttagcacgccgttcatcacgttcaagtttctatctgtgtcttcaaggtacctactccttatcttctgtgacttcccaggccacgaaaagggttcagaagtagattctggtgcactt

SEQ ID NO: 199002 - DNA, 817 bp, Homo sapiens
tggagggctgtgagtgatccaacatcccctgctcttgagagtggtgttttggcatgggagtgttaatgaatgtcacaagtttcttgataccaaatagagttcctaccatttgcaggtcataccggtcactgccaagagatggcttatttagtgggaattgtctggcactcctagtataagtcacctaagtggggcaagtgggccttgaaacatccctgggagacactcactcaggctgcctgtgggagctgggctttttgtgtcactctcccatgcagcagtgacggctggggtttctaagtggtcagaggagctggaaaatggcttctgaagtaacagtcccttgtcatagtggtacaaagatgtcttcattcatctgttggcacatgtctctgggtaaactgccggcaaggccaaagtgatgggggttattattagtttttaatagaaaagttagactggcttcactttccaaccagcttccctagttccagcccatttgcagacttttgggtggtctgtgggatgaaaatttcttgtgaggaggtgagctgaagatggccatccctcctggttgctcttggattgtctgggcttcatttctaaggtggtcccagagcccatgtgggggttgggggaagcagcattgtctagcccctttggtttgtacccatgttcaccccacccccacagccacctgccttttctgtgggacttgaaaagcatcaggaatatcttcctacctgaaattcttccattagaccctgattaattggattaatctaggaaaccagattaaatgaccatttaacgaccc

SEQ ID NO: 199003 - DNA, 579 bp, Homo sapiens
cctgggacatatttgtaccccatctctatttaatgcctttatacaattctttacttaattctaccagcctttattgagcctgctttctttgtctagctgagtgccacgtgctgacgtcactaagatcaatacagcaaactctgaaagatggacagagagacaggagatggtcctttataatgcagtgtgatctgtgctgcaatagagatggaagagtgttctgatcggctggaaaacaacgcacatgggaagctgtacagaaatgagtggggaaagttttggaagctagaagttcaaaacgaggtgttggcagcaccatgctctctccgaagatgctaggaagaatctgctccatgcctttccattcgctcctggggtttcctgcaagccctgacattccttggcttgtagatgcatcaccccagtttccgcccccatcatcacatggcctcctctctgtgtgtgcctctgcgttccctctattcttcttctaaggacaccgacaccagtcatagtggattaagtgtccactcctaaccaattacatctgcaacaaccctatttccaaataaagtcaca

SEQ ID NO: 199004 - DNA, 436 bp, Homo sapiens
tcaacaaaaaaaaaaaaaaaaaaaaggctggctgtggtggctcatgtctgtaatctgagcactttgggaggccgaggcgggtggattacctgagatcatgaatttgagaccagcctggcaaacatggtgaaacctcgtctctactaaaaatacaaaaattagccggcgtgctggtgggcacctgtaatccgagctacttgggaggctgaggcaggagaatcgcttgaacccaggaggcggaggttgcagtgagccaagacggcaccactgcactccagcctgggtgacagagtgagactctgtctcagaaaaaaaaaaaaaaagaaaaaaattatgatacagagaacaatgagatgttttataaatttatagttcaaaagaaacattttattttggtaaaagccaagaagtgaaagataaatagttttgcagccat

SEQ ID NO: 199005 - DNA, 562 bp, Homo sapiens
cctgtgacacaacacgactaaattactaaggatgctatttactgtaacagttccaaaactttctaaaattttcatttaaacgctttgtttttatatctttaggtcctgatcagttttcactatgactgaactgccagtcaggatatatacataagactgtttccttaactaacttgtctaaggtcagattgctaaaaagtagcaaaatcagaattcaaaaccacatctatctccaaagaccaaactctatggcatgcttcttcctcaaatcttcttcctgactcacctcctgtaactagcagcttgccttagcaaagtaaatggaagtcatcaggagtgcagtcagaagtcatggaacagagtcaagttaccttagttgaggcttgaacttctaacacagtactctaaccaacttaattagacatttcagctacttaaaaggaggctgggatacaaacaaaagaaaagaaagacagaaagaaagacaaaaaggaagaaagaaaaagagcaaggtgcagtggctcatgcctgtaatcccagcactttgggaggctgaggcagg

SEQ ID NO: 199006 - DNA, 257 bp, Homo sapiens
cagggggtcctcctcacttcatcctggatgatataagcagatttgacatccaacaaggaggcgcaggtaagagtgcaacatcttccctccgtgccctggataggaagtggtggagggtggtgcttacccacagagtcctgccccacttctgagggagaaaggccagttcccttggtgctgccgtggacaaactgctcacgcccagtcctgcagcctgcaatgagcaggggaaaaggagacaggaaaaatgaaagcaa

SEQ ID NO: 199007 - DNA, 261 bp, Homo sapiens
caaatttcagttaccacaagatattatagtagtaactgaatgaagtatgctcttcagcccacactacaaaaatgacagatgcatagcacaaccagtggccaatcacatcacttctttcaaagactgtcagtgactggcctggtcactgcacatctgagcagtagagtgatacttggccctggggcttggggagataaaggaaggacagcaagaaagcagggcacactagccagagggtggttatggatgacctccttgact

SEQ ID NO: 199008 - DNA, 471 bp, Homo sapiens
aaaggttaggatgagccaaatatttattaaatgagtctttcccttattgaagtaatttcagaaatgcaccattggaatgttgtttaatttcaacaggtacaaactcacactcaaggaaaaacccagccattcactcaaaggaacattattttgatagtattcagatatcgtatacaaatcttttgagcaggttagttttttcatgtaaatcataacatatggtattggtcaagtagtaaagttcatattaaccttaaacatttactaagatactgttttcaagtaactcaggcaatgtatgcagagggtgtcatagtttctgtaagtatataagttttggatcaagatcacattaatgccagggccccactacagatcttctgaatcagagattctgaatctgaggtgaagactcatagctccttaaaattccatggagaaaatatatatatacctactattttcccacga

SEQ ID NO: 199009 - DNA, 196 bp, Homo sapiens
taaaggcacattcttccagaatagtaaactaagagggccacttcctagacacagtcatcactgacaagaacactaattaatttacgtttagatttgccataaaaagaaagcaatgactctctctgcctgacaagacacttaaccgtgattgggagccaaagacggctgccccttgcttgtaatgtcagcatctctc

SEQ ID NO: 199010 - DNA, 458 bp, Homo sapiens
actgcatccccttaccctggctgagacagcgtctctcgtagccattgaagtcactgcaatgagcagagcatccatgagcaagatcatcatggcatttacttagcttttggggtttcttgtggtctgttttcacagcacagggtggcctatcctgaggagcataggaggataggatccacttctactcggcactcattggtgcatcattgtccagatggggaccccatgctatagattagggtcttggttgccactcaggcatccatgctgggggtgatgctcacagttttccaaaaacaaatgcaaagacacagtgggttcaactaccgcctccaggctgagacataaaaccgccactcagatgtaaatctcccaggtttacccttgtatccagctttaagctcagctaaaaaagaaagtaattagtctttcttgatttcttccaactcaatggcaaa

SEQ ID NO: 199011 - DNA, 548 bp, Homo sapiens
ccataagaaggtttataaaaaattattacaaaatgttacagataacatgaatgaaagaaaataacataatcatggatagaaactcatatcaaaaaagtaagaattgcctccaaatgattaataaattcaactcaatttcaatcaaactctccaaatggtttttcatggaattgaataaaataattctaaaatatactctatatggaagaataaagggtcaagaataacctggacagttttaaagagcacggagtggggaacatgcccttccagatatcaggacttactatgacgctatagtaattattatagtgtggtattgggactggaataggaaaactgcctagtggaatggaagaaagagttcagaaattgtgcacatagcaaactttggtatgtgacagtgattgcatgtcaaaggaaaaggcagaacgaactgttcaataagaacagcagggaaaaaaatggttatctgtatgagattggatcactaaatacagtatatacaaaaggcaagcccagatgtgttaaagatgtaaatgctaaaa

SEQ ID NO: 199012 - DNA, 446 bp, Homo sapiens
aatagattttgaagtcagatggataaaaatgccatgtggacaagtgcttactttggcattatgaaaattttataatttaacacaaacaaaagtgaaataataattcttgagtttcatgccctttgaggtgcctttttaaaaataatcaaaatgttgttgggagaccccatccaatttaatcgggtgttatttaattatactactataattgttgtatttgcaggtttgactgttctcagggaacgctgaaggttcataacagtagtgatttgtaattgtgaggcttgagtgtggaattgaattacttcattagagagtaaccagttactgagaatccatgtttcattgagactggtgtttctctactttatccttttttttttttttttgagacggagtcttgctcttttgccgaggctggagtgcagtggcgctctctcggctca

SEQ ID NO: 199013 - DNA, 479 bp, Homo sapiens
gggtaggggtgtcaaggaagtcttcaggaagagggagaagtctttaaaggataggtgagtttaattattagataaggttaattttttagcatggtggcatgggcctgtaatcccagcttcttgggaggctgaggcacaagaattgtttgaacctgggagttggaggttgcagtgagccaagatcgtgccactgcactccggcctgggtgacagagcaagattctgtctcaaaaaaataataataataagattaattgtctcagattggagactgagtaaagttacacttgtatagtacctttgttgccaagtaaattgtgaaggtctcattgcccaagtacacaaaaggtatcttagtacagcgcccagcattgtgggaacctaatgtgtgtgtgtgtgtgtgtgtgtgtgtgtattagatatatataatggagtctttgttgtcagagttcagttatggttgaatctaaatgaaaatt

SEQ ID NO: 199014 - DNA, 361 bp, Homo sapiens
tttattttaaactgtcatataataattcaaaatttgccttaggatagaaatctagtaacctttcagataaggaaagggttgaatttccatattttagaatagaccattatgaaagttttagatgtagaagtaataagcacagtattaaagttttctggttttacctaaatcatgatatgaaaatattcatttggagtaaaaaaatagtttttaaaaataaaataaatcctttcagctaaggaatgaattttcatattttagaatagactatcataaaagttttagaaatagaactaattaactacactattaaattttctagttttatctaaatcatgacatgaaaatatctatttagaga

SEQ ID NO: 199015 - DNA, 419 bp, Homo sapiens
gtgagtctagtgggacatgagccttctgtatcttagagcttaatttattatattattcatatgctaaccagtggagttctctattggcatctggcataagattctctacacagtagatgatgcatggtagggaagtgaacttactgaatccccaatagcagagtcactgaccaatgttgcaaagcatgttttacataagtgtaagaacatgccacatatgtcatgtcacctcttataagtaatcctataagattgcatgacattgctctagaaatcacatagttactccattattacgtagcttgtggtatcactgccagggcaaattccaatgtaaaccacattcagattatctgcaaacctgggcaagaaaatgtagcactgtaatggcatagaacactgggttggaatcaggaaat

SEQ ID NO: 199016 - DNA, 454 bp, Homo sapiens
ccaacatggcaaaaccccatctctactaaaaatacaaaaaaataacggggtgtggtggtgggtgtggtcccagctactggggatgtaatgcaggaattaggtactcataaaattgttggaagggagaagagcaggctctaggccaagctttcagggtaacttcccaaacaaccaaacaaccctacagaagtggtccaatgaggaagttactgccctttccaggaagctggggaagcaagaacctgctcccacagaatcacactgcttttgtcaagatccacaccaggaagattcttgatacctgtgaagctgagaagtagccactgagctatttgctgctgtcctccttccaccctcccatactctcaccaactgtggggcatggcctctgcctcttgtggaggctaagtggtgtgcagaggctgcactgcagggagtctgagtaacgcggtct

SEQ ID NO: 199017 - DNA, 1181 bp, Homo sapiens
agcggtccacctcctgtcctccggaaaggtgcccgcctcttgccttccggcccggcgcccgatttccgccttccgacccagctgtgggctgcgccccacgccagcccgcgccccgcatggctgccgccggggccaggcctgtggagctgggcttcgccgagtcggcgccggcccgctctccttcctgctgcaggtgtatgcgccgctgcctggccgcccggacgccttccaccgctgcatcttcctcttctgctgccgcgagcagccgtgctgtgccggcctgcgagtttttaggaatcaactacccaggaaaaacgatttttactcatatgagccaccttctgagaatcctcccccagaaacaggagaatcagtgtgtctccagcttaagtctggtgctcatctctgcagggtttgtggctgtttaggccccaaaacgtgctccagatgccacaaagcatattactgcagcaaggagcatcagaccctagactggagattgggacataagcaggcttgtgcacaaccagatcatctggaccatataattccagaccacaacttcctttttccagaatttgaaattgtaatagaaacagaagatgagattatgcctgaggttgtggaaaaggaagattactcagagattatagggagcatggggatataatgggaagcaacactccagtggtcagatgctcacagtcttatggaggagcccaaataatatctggggaagttaaagtccatataatgactgataagagtacaatacaggtgccatgggaacacgtgacatcactgaagactgcctggaaggggccgcgcgtgtgttcatgcctatacgataaacatgatacataatgaaaatgcttatctttaggagaaaggagagcctagagtagcaggatcaaggatgaaagctggacttcaaatatgccttgttagtgtaaatgtgactgtggaactgtatgagtattttaagattatggagtaaagtaagttttaaaaagcagtccctaatcatcaaaagtaaaaaactcttgatgtagtcatataaccacactaagaactcttccaggtgacttcaaaacataggacagtacatctctagtagaatatgccctgagaatgaaaagaatgtaacagtgttagtattttgaataaacatgttattacta

SEQ ID NO: 199018 - DNA, 1348 bp, Homo sapiens
agcggtccacctcctgtcctccggaaaggtgcccgcctcttgccttccggcccggcgcccgatttccgccttccgacccagctgtgggctgcgccccacgccagcccgcgccccgcatggctgccgccggggccaggcctgtggagctgggcttcgccgagtcggcgccggcgtggcgactgcgcagcgagcagttccccagcaaggtgggcgggcggccggcatggctgggcgcggccgggctgccggggccccaggccctggcctgcgagctgtgcggccgcccgctctccttcctgctgcaggtgtatgcgccgctgcctggccgcccggacgccttccaccgctgcatcttcctcttctgctgccgcgagcagccgtgctgtgccggcctgcgagtttttaggaatcaactacccaggaaaaacgatttttactcatatgagccaccttctgagaatcctcccccagaaacaggagaatcagtgtgtctccagcttaagtctggtgctcatctctgcagggtttgtggctgtttaggccccaaaacgtgctccagatgccacaaagcatattactgcagcaaggagcatcagaccctagactggagattgggacataagcaggcttgtgcacaaccagatcatctggaccatataattccagaccacaacttcctttttccagaatttgaaattgtaatagaaacagaagatgagattatgcctgaggttgtggaaaaggaagattactcagagattatagggagcatgggtgaagcacttgaggaagaactggattccatggcaaaacatgaatccagggaagataaaatttttcagaagtttaaaactcagatagcccttgaaccagaacagattcttagatatggcagaggtattgcccccatctggatttctggtgaaaatattcctcaagaaaaggatattccagattgcccctgtggtgccaagagaatattggaattccaggtcatgcctcagctcctaaactacctgaaggctgacagactgggcaagagcattgactggggcatcctggctgtcttcacctgtgctgagagctgcagcttgggtactggctatacagaagaatttgtgtggaagcaggatgtaacagatacaccgtaaaggcatcttaaagccttgaaaaatgttaataatcttttataccttgcaattccatttctgggattttatcctaaggaaatacttataccaaaaatagaggtgcagagatgttgacggattgcttacacagtgtctacttattagtgaaacaaaagtgtccagtgacagggaattaaataaattttggtacatccaca

SEQ ID NO: 199019 - DNA, 1159 bp, Homo sapiens
agcggtccacctcctgtcctccggaaaggtgcccgcctcttgccttccggcccggcgcccgatttccgccttccgacccagctgtgggctgcgccccacgccagcccgcgccccgcatggctgccgccggggccaggcctgtggagctgggcttcgccgagtcggcgccggcgtggcgactgcgcagcgagcagttcccgctctccttcctgctgcaggtgtatgcgccgctgcctggccgcccggacgccttccaccgctgcatcttcctcttctgctgccgcgagcagccgtgctgtgccggcctgcgagtttttaggaatcaactacccaggaaaaacgatttttactcatatgagccaccttctgagaatcctcccccagaaacaggagaatcagtgtgtctccagcttaagtctggtgctcatctctgcagggtttgtggctgtttaggccccaaaacgtgctccagatgccacaaagcatattactgcagcaaggagcatcagaccctagactggagattgggacataagcaggcttgtgcacaaccagatcatctggaccatataattccagaccacaacttcctttttccagaatttgaaattgtaatagaaacagaagatgagattatgcctgaggttgtggaaaaggaagattactcagagattatagggagcatgggtaagcagtttcaggacttcattcattaagtggttaaacataatgcttggaagaaagggctccatgtgcctagaagagaggtactgagaggaagactcactttggaggctgtagcatacaattttcagatattgcctcaggtaaaaatatacttcctggactttgttttctgacacataagaggtgtgttctgctccctgtaaagacaagggtgggtatccagatggtcccatgagtagggctgcacaagatgctggaggcttggtaagttcctctgggtcgcagatcggtttctcgggtcgggatagtgtgagtgcctagcacagtgtcgggcacgcagaagggccccttaaaagtttctctttcatctggccagttttagatacacaattttgtcagtttacttacagtgcatactcttgggtagtacttgtgctgaccaagtatcttagaggcttattttattatagta

SEQ ID NO: 199020 - DNA, 770 bp, Homo sapiens
agcagaccaatgagtgagaaactgccccattttgaaggtgaggaaattgaggttctgggtataactttctttggtcacataatattaaattttacaatttgagccttgagccatacacaaaaccaccacaaaattagatttatagactcaaaatgaaaacatcagcttactggtttgtagttcataccagtcatacattccaaaacatgttttgagtcttactctgtgcctgaccttgtgcttgataacagggatataatgggaagcaacactccagtggtcagatgctcacagtcttatggaggagcccaaataatatctggggaagttaaagtccatataatgactgataagagtacaatacaggtgccatgggaacacgtgacatcactgaagactgcctggaaggggccgcgcgtgtgttcatgcctatacgataaacatgatacataatgaaaatgcttatctttaggagaaaggagagcctagagtagcaggatcaaggatgaaagctggacttcaaatatgccttgttagtgtaaatgtgactgtggaactgtatgagtattttaagattatggagtaaagtaagttttaaaaagcagtccctaatcatcaaaagtaaaaaactcttgatgtagtcatataaccacactaagaactcttccaggtgacttcaaaacataggacagtacatctctagtagaatatgccctgagaatgaaaagaatgtaacagtgttagtattttgaataaacatgttattacta

SEQ ID NO: 199021 - DNA, 562 bp, Homo sapiens
atagcatgttaccattggcaacttataggtaaggtattgattatttgaacatgatcttcattgattttagattcttagatatggcagaggtattgcccccatctggatttctggtgaaaatattcctcaagaaaaggatattccagattgcccctgtggtgccaagagaatattggaattccaggtatgaccttaaataaggaccatttagtgtgtaatcaccatgattgtttttaaacattaaaaacttcaccaaggtaatttgtgcacatgggtcaacatggcagtatggaagggtaccctataatgaaaatcatcagtttcctgcctcaccttggggctagttccctggaaggaactgtcttgtttttttctgtttcctagttttcagacacggtctattgactgacttctgtgacaatgaggatatctacactgctctccacctccagtgtggttatgtcattattattagtgcctctgttaacttttgttattttaaataatgtataccttcctttcttgttctagtaattaaagtctttgactatatactttatga

SEQ ID NO: 199022 - DNA, 928 bp, Homo sapiens
tggatcccccgggctgcaggctgctccgggtcacatactcgtcctgagtcggcttcagcctctccgcgcagaagtctcccggagccgacttctgagagtcgagtactcctatgtgaagactaccaagctcgtgttcaagggaaccaaggcgaagaggcgagatggaaagaaagtatcaaggagtgagctgaagccactgcccttgagaaccctctcgaggagtctgggctcatgaggatgccagaataagtggcagtaagaagaaaaaaaaaaaaaaaaaaaaagactggagattgggacataagcaggcttgtgcacaaccagatcatctggaccatataattccagaccacaacttcctttttccagaatttgaaattgtaatagaaacagaagatgagattatgcctgaggttgtggaaaaggaagattactcagagattatagggagcatgggtaagcagtttcaggacttcattcattaagtggttaaacataatgcttggaagaaagggctccatgtgcctagaagagaggtactgagaggaagactcactttggaggctgtagcatacaattttcagatattgcctcaggtaaaaatatacttcctggactttgttttctgacacataagaggtgtgttctgctccctgtaaagacaagggtgggtatccagatggtcccatgagtagggctgcacaagatgctggaggcttggtaagttcctctgggtcgcagatcggtttctcgggtcgggatagtgtgagtgcctagcacagtgtcgggcacgcagaagggccccttaaaagtttctctttcatctggccagttttagatacacaattttgtcagtttacttacagtgcatactcttgggtagtacttgtgctgaccaagtatcttagaggcttattttattatagta

SEQ ID NO: 199023 - DNA, 493 bp, Homo sapiens
gggattacaggcgtgagccactgctccaggccagaaatgaacacttgatgactgagtgagtgagcctaccagctgaggatactaatgataagggctcacatttgttgggtgtcctgtgatgtgctgggcagtcctaagcccttgaccattctgttattttgaagctttaaggagatgcactaaatggaagtccatataatagagttggatggagtacctggaaattcagatggtccaacttgaatgagtgaataaatagggaaagctatctgattaaaagtgggtcccctctccatgtgtgaattgtcaagttgtggggattactcctgtttttcataatagttacgttgatttttcaggtgaagcacttgaggaagaactggattccatggcaaaacatgaatccagggaagataaaatttttcagaagtttaaaactcagatagcccttgaaccagaacaggtaaagtggagctcatagctcctcatcgtg

SEQ ID NO: 199024 - DNA, 359 bp, Homo sapiens
agcggtccacctcctgtcctccggaaaggtgcccgcctcttgccttccggcccggcgcccgatttccgccttccgacccagctgtgggctgcgccccacgccagcccgcgccccgcatggctgccgccggggccaggcctgtggagctgggcttcgccgagtcggcgccggcgtggcgactgcgcagcgagcagttccccagcaaggtgggcgggcgtcaacattcattgtcgcgggcgcattattgagctccatatttctggcgctttcccaatcattttcgggtcgactaaatttcactattcatccgacacgtgtgctccctacatatcgtaaactcctaatgcggctagttgtgt

SEQ ID NO: 199025 - DNA, 3295 bp, Homo sapiens
agcggtccacctcctgtcctccggaaaggtgcccgcctcttgccttccggcccggcgcccgatttccgccttccgacccagctgtgggctgcgccccacgccagcccgcgccccgcatggctgccgccggggccaggcctgtggagctgggcttcgccgagtcggcgccggcgtggcgactgcgcagcgagcagttcccgctctccttcctgctgcaggtgtatgcgccgctgcctggccgcccggacgccttccaccgctgcatcttcctcttctgctgccgcgagcagccgtgctgtgccggcctgcgagtttttaggaatcaactacccaggaaaaacgatttttactcatatgagccaccttctgagaatcctcccccagaaacaggagaatcagtgtgtctccagcttaagtctggtgctcatctctgcagggtttgtggctgtttaggccccaaaacgtgctccagatgccacaaagcatattactgcagcaaggagcatcagaccctagactggagattgggacataagcaggcttgtgcacaaccagatcatctggaccatataattccagaccacaacttcctttttccagaatttgaaattgtaatagaaacagaagatgagattatgcctgaggttgtggaaaaggaagattactcagagattatagggagcatgggtgaagcacttgaggaagaactggattccatggcaaaacatgaatccagggaagataaaatttttcagaagtttaaaactcagatagcccttgaaccagaacagattcttagatatggcagaggtattgcccccatctggatttctggtgaaaatattcctcaagaaaaggatattccagattgcccctgtggtgccaagagaatattggaattccaggtcatgcctcagctcctaaactacctgaaggctgacagactgggcaagagcattgactggggcatcctggctgtcttcacctgtgctgagagctgcagcttgggtactggctatacagaagaatttgtgtggaagcaggatgtaacagatacaccgtaaaggcatcttaaagccttgaaaaatgttaataatcttttataccttgcaattccatttctgggattttatcctaaggaaatacttataccaaaaatagaggtgcagagatgttgacggattgcttacacagtgtctacttattagtgaaacaaaagtgtccagtgacagggaattaaataaattttggtacatccacagaggaaggctacacagtcttaattataacacctatattgacaacagacataccattataggtggtattcatggtatgatcctattcttgtaaaaatatttgtatgtatgcacagaaatctgcaaagatgtacacttagtgaactggttaccaacgaatggtgggactaactaaaatggtctttttacttatatgtgcatttctttttataataaaaatgggttatatgcctaatgaagtcaaaccatctcactctgagcatttcccaccctaggtttttaaaacacaaaaatacttaggtaaaactcccaacaaacttgtctgatcattagctgattatcacaggctctagtatgtactggaagcccagaatatttgagaaataccaaacctcaggttggtgagtatgatgaacaggaaacccagtaattctgaagcagcagtatcacagttggcaggatgaggaacaacagtggctttgtgatcacagaactggaatttaaagaggctggaccttcagaactgatcttggtcagccagcggccctgcttacagatgagacactgaaaggcaaaaggcgatggtcttccctttccgtgtcagcattgtatacaggttccctatcgcacatacaagggttatggaatgtaagccaaaataagggtctggcctaggaggcagcagcctgaggaaaggaaggccctgaagtcagttttcaaagggctgacccttggcctattatgtttctgatacatctgtttaagcaagcggctcctaagactacactaaggtttcttccatcccctagcagctcacagttgacaattcccagttctctcagcaccagtgatgcctgcccttaagacacattgctgttgatcagtgcttgaatactgacggctaattctgataaatttctcaggcttatttccttaatctacattggctcacattgtcccctaacacatccctgttaactgaaatgcattgccaccataaatcctcacgttttcataggtaacatcacttgctaatgtaattgtctacttggctattttatttgtaatttaaaaagttctgtcctagtagtccatattatataagtatacatatgcaatttgtattaattgtataagatagttatacatagcaccatatgggaaactgcagtatggagtttctcccatggggaggttatcagctacttaagagctagaggatactagtttcgaacctgggatggctaaatctatgaaaatcacctataactatggtgtcacagccctgtggctactggagtaagttgtcatcaactagtgacaagagctggtcgcaacacttagtaggaagcacagtggcataaggaaacctggactagtggggcctttatatctaaaattatgtattattccttataggcagaatctgtaagtacgttatgactgctaatgacttttaaagcaaacatgttaacgatctttctatggtaaaaactgttatttggggacatcaccagatgatgtggacattcttgcaggtattttggcatacccaggcaagctgtcattggtgtatattccagttaacctctggagatgatcgtaacagtttacagggcctttccatttgggatggatatatcaagagggagacaaactggtccaaatcaccagaaagaaaatctcacagcaccgacttggcatctgtgttaaaaaatagcaactatatttaaaataaactgtacaacataaaaaatttaaattaaaaaatgcattaagcaagttgcctttagaaatgtgaagacattttaaaacactacaagataatgagcaagtctcacctacataatcatggctccacagacggtgccagtccatgcatccaccatttctcaacacctacaaagttttaagatctgcttggttcagatactgtccagccacagcagctccctctgctgtagagagcagcatattcagctttgcctttttatttcagatactgaatatcctttggcaatttcagatatcacagc

SEQ ID NO: 199026 - DNA, 3024 bp, Homo sapiens
agcggtccacctcctgtcctccggaaaggtgcccgcctcttgccttccggcccggcgcccgatttccgccttccgacccagctgtgggctgcgccccacgccagcccgcgccccgcatggctgccgccggggccaggcctgtggagctgggcttcgccgagtcggcgccggcgtggcgactgcgcagcgagcagttcccgctctccttcctgctgcaggtgtatgcgccgctgcctggccgcccggacgccttccaccgctgcatcttcctcttctgctgccgcgagcagccgtgctgtgccggcctgcgagtttttaggaatcaactacccaggaaaaacgatttttactcatatgagccaccttctgagaatcctcccccagaaacaggagaatcagtgtgtctccagcttaagtctggtgctcatctctgcagggtttgtggctgtttaggccccaaaacgtgctccagatgccacaaagcatattactgcagcaaggagcatcagaccctagactggagattgggacataagcaggcttgtgcacaaccagatcatctggaccatataattccagaccacaacttcctttttccagaatttgaaattgtaatagaaacagaagatgagattatgcctgaggttgtggaaaaggaagattactcagagattatagggagcatgggtgaagcacttgaggaagaactggattccatggcaaaacatgaatccagggaagataaaatttttcagaagtttaaaactcagatagcccttgaaccagaacagattcttagatatggcagaggtattgcccccatctggatttctggtgaaaatattcctcaagaaaaggatattccagattgcccctgtggtgccaagagaatattggaattccaggtcatgcctcagctcctaaactacctgaaggctgacagactgggcaagagcattgactggggcatcctggctgtcttcacctgtgctgagagctgcagcttgggtactggctatacagaagaatttgtgtggaagcaggatgtaacagatacaccgtaaaggcatcttaaagccttgaaaaatgttaataatcttttataccttgcaattccatttctgggattttatcctaaggaaatacttataccaaaaatagaggtgcagagatgttgacggattgcttacacagtgtctacttattagtgaaacaaaagtgtccagtgacagggaattaaataaattttggtacatccacagaggaaggctacacagtcttaattataacacctatattgacaacagacataccattataggtggtattcatggtatgatcctattcttgtaaaaatatttgtatgtatgcacagaaatctgcaaagatgtacacttagtgaactggttaccaacgaatggtgggactaactaaaatggtctttttacttatatgtgcatttctttttataataaaaatgggttatatgcctaatgaagtcaaaccatctcactctgagcatttcccaccctaggtttttaaaacacaaaaatacttaggtaaaactcccaacaaacttgtctgatcattagctgattatcacaggctctagtatgtactggaagcccagaatatttgagaaataccaaacctcaggttggtgagtatgatgaacaggaaacccagtaattctgaagcagcagtatcacagttggcaggatgaggaacaacagtggctttgtgatcacagaactggaatttaaagaggctggaccttcagaactgatcttggtcagccagcggccctgcttacagatgagacactgaaaggcaaaaggcgatggtcttccctttccgtgtcagcattgtatacaggttccctatcgcacatacaagggttatggaatgtaagccaaaataagggtctggcctaggaggcagcagcctgaggaaaggaaggccctgaagtcagttttcaaagggctgacccttggcctattatgtttctgatacatctgtttaagcaagcggctcctaagactacactaaggtttcttccatcccctagcagctcacagttgacaattcccagttctctcagcaccagtgatgcctgcccttaagacacattgctgttgatcagtgcttgaatactgacggctaattctgataaatttctcaggcttatttccttaatctacattggctcacattgtcccctaacacatccctgttaactgaaatgcattgccaccataaatcctcacgttttcataggtaacatcacttgctaatgtaattgtctacttggctattttatttgtaatttaaaaagttctgtcctagtagtccatattatataagtatacatatgcaatttgtattaattgtataagatagttatacatagcaccatatgggaaactgcagtatggagtttctcccatggggaggttatcagctacttaagagctagaggatactagtttcgaacctgggatggctaaatctatgaaaatcacctataactatggtgtcacagccctgtggctactggagtaagttgtcatcaactagtgacaagagctggtcgcaacacttagtaggaagcacagtggcataaggaaacctggactagtggggcctttatatctaaaattatgtattattccttataggcagaatctgtaagtacgttatgactgctaatgacttttaaagcaaacatgttaacgatctttctatggtaaaaactgttatttggggacatcaccagatgatgtggacattcttgcaggtattttggcatacccaggcaagctgtcattggtgtatattccagttaacctctggagatgatcgtaacagtttacagggcctttccatttgggatggatatatcaagagggagacaaactggtccaaatcaccagaaagaaaatctcacagcaccgacttggcatctgtgttaaaaaatagcaactatatttaaaataaactgtacaacataaaaaatttaaatta

SEQ ID NO: 199027 - DNA, 1083 bp, Homo sapiens
agcggtccacctcctgtcctccggaaaggtgcccgcctcttgccttccggcccggcgcccgatttccgccttccgacccagctgtgggctgcgccccacgccagcccgcgccccgcatggctgccgccggggccaggcctgtggagctgggcttcgccgagtcggcgccggcgtggcgactgcgcagcgagcagttcccgctctccttcctgctgcaggtgtatgcgccgctgcctggccgcccggacgccttccaccgctgcatcttcctcttctgctgccgcgagcagccgtgctgtgccggcctgcgagtttttaggaatcaactacccaggaaaaacgatttttactcatatgagccaccttctgagaatcctcccccagaaacaggagaatcagtgtgtctccagcttaagtctggtgctcatctctgcagggtttgtggctgtttaggccccaaaacgtgctccagatgccacaaagcatattactgcagcaaggagcatcagaccctagactggagattgggacataagcaggcttgtgcacaaccagatcatctggaccatataattccagaccacaacttcctttttccagaatttgaaattgtaatagaaacagaagatgagattatgcctgaggttgtggaaaaggaagattactcagagattatagggagcatgggtgaagcacttgaggaagaactggattccatggcaaaacatgaatccagggaagataaaatttttcagaagtttaaaactcagatagcccttgaaccagaacagattcttagatatggcagaggtattgcccccatctggatttctggtgaaaatattcctcaagaaaaggatattccagattgcccctgtggtgccaagagaatattggaattccagttttcagacacggtctattgactgacttctgtgacaatgaggatatctacactgctctccacctccagtgtggttatgtcattattattagtgcctctgttaacttttgttattttaaataatgtataccttcctttcttgttctagtaattaaagtctttgactatatactttatga

SEQ ID NO: 199028 - DNA, 1283 bp, Homo sapiens
agcggtccacctcctgtcctccggaaaggtgcccgcctcttgccttccggcccggcgcccgatttccgccttccgacccagctgtgggctgcgccccacgccagcccgcgccccgcatggctgccgccggggccaggcctgtggagctgggcttcgccgagtcggcgccggcgtggcgactgcgcagcgagcagttcccgctctccttcctgctgcaggtgtatgcgccgctgcctggccgcccggacgccttccaccgctgcatcttcctcttctgctgccgcgagcagccgtgctgtgccggcctgcgagtttttaggaatcaactacccaggaaaaacgatttttactcatatgagccaccttctgagaatcctcccccagaaacaggagaatcagtgtgtctccagcttaagtctggtgctcatctctgcagggtttgtggctgtttaggccccaaaacgtgctccagatgccacaaagcatattactgcagcaaggagcatcagaccctagactggagattgggacataagcaggcttgtgcacaaccagatcatctggaccatataattccagaccacaacttcctttttccagaatttgaaattgtaatagaaacagaagatgagattatgcctgaggttgtggaaaaggaagattactcagagattatagggagcatgggtgaagcacttgaggaagaactggattccatggcaaaacatgaatccagggaagataaaatttttcagaagtttaaaactcagatagcccttgaaccagaacagattcttagatatggcagaggtattgcccccatctggatttctggtgaaaatattcctcaagaaaaggatattccagattgcccctgtggtgccaagagaatattggaattccaggtatgaccttaaataaggaccatttagtgtgtaatcaccatgattgtttttaaacattaaaaacttcaccaaggtaatttgtgcacatgggtcaacatggcagtatggaagggtaccctataatgaaaatcatcagtttcctgcctcaccttggggctagttccctggaaggaactgtcttgtttttttctgtttcctagttttcagacacggtctattgactgacttctgtgacaatgaggatatctacactgctctccacctccagtgtggttatgtcattattattagtgcctctgttaacttttgttattttaaataatgtataccttcctttcttgttctagtaattaaagtctttgactatatactttatga

SEQ ID NO: 199029 - DNA, 3171 bp, Homo sapiens
agcggtccacctcctgtcctccggaaaggtgcccgcctcttgccttccggcccggcgcccgatttccgccttccgacccagctgtgggctgcgccccacgccagcccgcgccccgcatggctgccgccggggccaggcctgtggagctgggcttcgccgagtcggcgccggcgtggcgactgcgcagcgagcagttcccgctctccttcctgctgcaggtgtatgcgccgctgcctggccgcccggacgccttccaccgctgcatcttcctcttctgctgccgcgagcagccgtgctgtgccggcctgcgagggtttgtggctgtttaggccccaaaacgtgctccagatgccacaaagcatattactgcagcaaggagcatcagaccctagactggagattgggacataagcaggcttgtgcacaaccagatcatctggaccatataattccagaccacaacttcctttttccagaatttgaaattgtaatagaaacagaagatgagattatgcctgaggttgtggaaaaggaagattactcagagattatagggagcatgggtgaagcacttgaggaagaactggattccatggcaaaacatgaatccagggaagataaaatttttcagaagtttaaaactcagatagcccttgaaccagaacagattcttagatatggcagaggtattgcccccatctggatttctggtgaaaatattcctcaagaaaaggatattccagattgcccctgtggtgccaagagaatattggaattccaggtcatgcctcagctcctaaactacctgaaggctgacagactgggcaagagcattgactggggcatcctggctgtcttcacctgtgctgagagctgcagcttgggtactggctatacagaagaatttgtgtggaagcaggatgtaacagatacaccgtaaaggcatcttaaagccttgaaaaatgttaataatcttttataccttgcaattccatttctgggattttatcctaaggaaatacttataccaaaaatagaggtgcagagatgttgacggattgcttacacagtgtctacttattagtgaaacaaaagtgtccagtgacagggaattaaataaattttggtacatccacagaggaaggctacacagtcttaattataacacctatattgacaacagacataccattataggtggtattcatggtatgatcctattcttgtaaaaatatttgtatgtatgcacagaaatctgcaaagatgtacacttagtgaactggttaccaacgaatggtgggactaactaaaatggtctttttacttatatgtgcatttctttttataataaaaatgggttatatgcctaatgaagtcaaaccatctcactctgagcatttcccaccctaggtttttaaaacacaaaaatacttaggtaaaactcccaacaaacttgtctgatcattagctgattatcacaggctctagtatgtactggaagcccagaatatttgagaaataccaaacctcaggttggtgagtatgatgaacaggaaacccagtaattctgaagcagcagtatcacagttggcaggatgaggaacaacagtggctttgtgatcacagaactggaatttaaagaggctggaccttcagaactgatcttggtcagccagcggccctgcttacagatgagacactgaaaggcaaaaggcgatggtcttccctttccgtgtcagcattgtatacaggttccctatcgcacatacaagggttatggaatgtaagccaaaataagggtctggcctaggaggcagcagcctgaggaaaggaaggccctgaagtcagttttcaaagggctgacccttggcctattatgtttctgatacatctgtttaagcaagcggctcctaagactacactaaggtttcttccatcccctagcagctcacagttgacaattcccagttctctcagcaccagtgatgcctgcccttaagacacattgctgttgatcagtgcttgaatactgacggctaattctgataaatttctcaggcttatttccttaatctacattggctcacattgtcccctaacacatccctgttaactgaaatgcattgccaccataaatcctcacgttttcataggtaacatcacttgctaatgtaattgtctacttggctattttatttgtaatttaaaaagttctgtcctagtagtccatattatataagtatacatatgcaatttgtattaattgtataagatagttatacatagcaccatatgggaaactgcagtatggagtttctcccatggggaggttatcagctacttaagagctagaggatactagtttcgaacctgggatggctaaatctatgaaaatcacctataactatggtgtcacagccctgtggctactggagtaagttgtcatcaactagtgacaagagctggtcgcaacacttagtaggaagcacagtggcataaggaaacctggactagtggggcctttatatctaaaattatgtattattccttataggcagaatctgtaagtacgttatgactgctaatgacttttaaagcaaacatgttaacgatctttctatggtaaaaactgttatttggggacatcaccagatgatgtggacattcttgcaggtattttggcatacccaggcaagctgtcattggtgtatattccagttaacctctggagatgatcgtaacagtttacagggcctttccatttgggatggatatatcaagagggagacaaactggtccaaatcaccagaaagaaaatctcacagcaccgacttggcatctgtgttaaaaaatagcaactatatttaaaataaactgtacaacataaaaaatttaaattaaaaaatgcattaagcaagttgcctttagaaatgtgaagacattttaaaacactacaagataatgagcaagtctcacctacataatcatggctccacagacggtgccagtccatgcatccaccatttctcaacacctacaaagttttaagatctgcttggttcagatactgtccagccacagcagctccctctgctgtagagagcagcatattcagctttgcctttttatttcagatactgaatatcctttggcaatttcagatatcacagc

SEQ ID NO: 199030 - DNA, 3191 bp, Homo sapiens
agcggtccacctcctgtcctccggaaaggtgcccgcctcttgccttccggcccggcgcccgatttccgccttccgacccagctgtgggctgcgccccacgccagcccgcgccccgcatggctgccgccggggccaggcctgtggagctgggcttcgccgagtcggcgccggcgtggcgactgcgcagcgagcagttcccgctctccttcctgctgcaggtgtatgcgccgctgcctggccgcccggacgccttccaccgctgcatcttcctcttctgctgccgcgagcagccgtgctgtgccggcctgcgagtttttaggaatcaactacccaggaaaaacgatttttactcatatgagccaccttctgagaatcctcccccagaaacaggagaatcagtgtgtctccagcttaagtctggtgctcatctctgcagggtttgtggctgtttaggccccaaaacgtgctccagatgccacaaagcatattactgcagcaaggagcatcagaccctagactggagattgggacataagcaggcttgtgcacaaccagatcatctggaccatataattccagaccacaacttcctttttccagaatttgaaattgtaatagaaacagaagatgagattatgcctgaggttgtggaaaaggaagattactcagagattatagggagcatggattcttagatatggcagaggtattgcccccatctggatttctggtgaaaatattcctcaagaaaaggatattccagattgcccctgtggtgccaagagaatattggaattccaggtcatgcctcagctcctaaactacctgaaggctgacagactgggcaagagcattgactggggcatcctggctgtcttcacctgtgctgagagctgcagcttgggtactggctatacagaagaatttgtgtggaagcaggatgtaacagatacaccgtaaaggcatcttaaagccttgaaaaatgttaataatcttttataccttgcaattccatttctgggattttatcctaaggaaatacttataccaaaaatagaggtgcagagatgttgacggattgcttacacagtgtctacttattagtgaaacaaaagtgtccagtgacagggaattaaataaattttggtacatccacagaggaaggctacacagtcttaattataacacctatattgacaacagacataccattataggtggtattcatggtatgatcctattcttgtaaaaatatttgtatgtatgcacagaaatctgcaaagatgtacacttagtgaactggttaccaacgaatggtgggactaactaaaatggtctttttacttatatgtgcatttctttttataataaaaatgggttatatgcctaatgaagtcaaaccatctcactctgagcatttcccaccctaggtttttaaaacacaaaaatacttaggtaaaactcccaacaaacttgtctgatcattagctgattatcacaggctctagtatgtactggaagcccagaatatttgagaaataccaaacctcaggttggtgagtatgatgaacaggaaacccagtaattctgaagcagcagtatcacagttggcaggatgaggaacaacagtggctttgtgatcacagaactggaatttaaagaggctggaccttcagaactgatcttggtcagccagcggccctgcttacagatgagacactgaaaggcaaaaggcgatggtcttccctttccgtgtcagcattgtatacaggttccctatcgcacatacaagggttatggaatgtaagccaaaataagggtctggcctaggaggcagcagcctgaggaaaggaaggccctgaagtcagttttcaaagggctgacccttggcctattatgtttctgatacatctgtttaagcaagcggctcctaagactacactaaggtttcttccatcccctagcagctcacagttgacaattcccagttctctcagcaccagtgatgcctgcccttaagacacattgctgttgatcagtgcttgaatactgacggctaattctgataaatttctcaggcttatttccttaatctacattggctcacattgtcccctaacacatccctgttaactgaaatgcattgccaccataaatcctcacgttttcataggtaacatcacttgctaatgtaattgtctacttggctattttatttgtaatttaaaaagttctgtcctagtagtccatattatataagtatacatatgcaatttgtattaattgtataagatagttatacatagcaccatatgggaaactgcagtatggagtttctcccatggggaggttatcagctacttaagagctagaggatactagtttcgaacctgggatggctaaatctatgaaaatcacctataactatggtgtcacagccctgtggctactggagtaagttgtcatcaactagtgacaagagctggtcgcaacacttagtaggaagcacagtggcataaggaaacctggactagtggggcctttatatctaaaattatgtattattccttataggcagaatctgtaagtacgttatgactgctaatgacttttaaagcaaacatgttaacgatctttctatggtaaaaactgttatttggggacatcaccagatgatgtggacattcttgcaggtattttggcatacccaggcaagctgtcattggtgtatattccagttaacctctggagatgatcgtaacagtttacagggcctttccatttgggatggatatatcaagagggagacaaactggtccaaatcaccagaaagaaaatctcacagcaccgacttggcatctgtgttaaaaaatagcaactatatttaaaataaactgtacaacataaaaaatttaaattaaaaaatgcattaagcaagttgcctttagaaatgtgaagacattttaaaacactacaagataatgagcaagtctcacctacataatcatggctccacagacggtgccagtccatgcatccaccatttctcaacacctacaaagttttaagatctgcttggttcagatactgtccagccacagcagctccctctgctgtagagagcagcatattcagctttgcctttttatttcagatactgaatatcctttggcaatttcagatatcacagc

SEQ ID NO: 199031 - DNA, 3258 bp, Homo sapiens
agcggtccacctcctgtcctccggaaaggtgcccgcctcttgccttccggcccggcgcccgatttccgccttccgacccagctgtgggctgcgccccacgccagcccgcgccccgcatggctgccgccggggccaggcctgtggagctgggcttcgccgagtcggcgccggcgtggcgactgcgcagcgagcagttccccagcaaggtgggcgggcggccggcatggctgggcgcggccgggctgccggggccccaggccctggcctgcgagctgtgcggccgcccgctctccttcctgctgcaggtgtatgcgccgctgcctggccgcccggacgccttccaccgctgcatcttcctcttctgctgccgcgagcagccgtgctgtgccggcctgcgagggtttgtggctgtttaggccccaaaacgtgctccagatgccacaaagcatattactgcagcaaggagcatcagaccctagactggagattgggacataagcaggcttgtgcacaaccagatcatctggaccatataattccagaccacaacttcctttttccagaatttgaaattgtaatagaaacagaagatgagattatgcctgaggttgtggaaaaggaagattactcagagattatagggagcatgggtgaagcacttgaggaagaactggattccatggcaaaacatgaatccagggaagataaaatttttcagaagtttaaaactcagatagcccttgaaccagaacagattcttagatatggcagaggtattgcccccatctggatttctggtgaaaatattcctcaagaaaaggatattccagattgcccctgtggtgccaagagaatattggaattccaggtcatgcctcagctcctaaactacctgaaggctgacagactgggcaagagcattgactggggcatcctggctgtcttcacctgtgctgagagctgcagcttgggtactggctatacagaagaatttgtgtggaagcaggatgtaacagatacaccgtaaaggcatcttaaagccttgaaaaatgttaataatcttttataccttgcaattccatttctgggattttatcctaaggaaatacttataccaaaaatagaggtgcagagatgttgacggattgcttacacagtgtctacttattagtgaaacaaaagtgtccagtgacagggaattaaataaattttggtacatccacagaggaaggctacacagtcttaattataacacctatattgacaacagacataccattataggtggtattcatggtatgatcctattcttgtaaaaatatttgtatgtatgcacagaaatctgcaaagatgtacacttagtgaactggttaccaacgaatggtgggactaactaaaatggtctttttacttatatgtgcatttctttttataataaaaatgggttatatgcctaatgaagtcaaaccatctcactctgagcatttcccaccctaggtttttaaaacacaaaaatacttaggtaaaactcccaacaaacttgtctgatcattagctgattatcacaggctctagtatgtactggaagcccagaatatttgagaaataccaaacctcaggttggtgagtatgatgaacaggaaacccagtaattctgaagcagcagtatcacagttggcaggatgaggaacaacagtggctttgtgatcacagaactggaatttaaagaggctggaccttcagaactgatcttggtcagccagcggccctgcttacagatgagacactgaaaggcaaaaggcgatggtcttccctttccgtgtcagcattgtatacaggttccctatcgcacatacaagggttatggaatgtaagccaaaataagggtctggcctaggaggcagcagcctgaggaaaggaaggccctgaagtcagttttcaaagggctgacccttggcctattatgtttctgatacatctgtttaagcaagcggctcctaagactacactaaggtttcttccatcccctagcagctcacagttgacaattcccagttctctcagcaccagtgatgcctgcccttaagacacattgctgttgatcagtgcttgaatactgacggctaattctgataaatttctcaggcttatttccttaatctacattggctcacattgtcccctaacacatccctgttaactgaaatgcattgccaccataaatcctcacgttttcataggtaacatcacttgctaatgtaattgtctacttggctattttatttgtaatttaaaaagttctgtcctagtagtccatattatataagtatacatatgcaatttgtattaattgtataagatagttatacatagcaccatatgggaaactgcagtatggagtttctcccatggggaggttatcagctacttaagagctagaggatactagtttcgaacctgggatggctaaatctatgaaaatcacctataactatggtgtcacagccctgtggctactggagtaagttgtcatcaactagtgacaagagctggtcgcaacacttagtaggaagcacagtggcataaggaaacctggactagtggggcctttatatctaaaattatgtattattccttataggcagaatctgtaagtacgttatgactgctaatgacttttaaagcaaacatgttaacgatctttctatggtaaaaactgttatttggggacatcaccagatgatgtggacattcttgcaggtattttggcatacccaggcaagctgtcattggtgtatattccagttaacctctggagatgatcgtaacagtttacagggcctttccatttgggatggatatatcaagagggagacaaactggtccaaatcaccagaaagaaaatctcacagcaccgacttggcatctgtgttaaaaaatagcaactatatttaaaataaactgtacaacataaaaaatttaaattaaaaaatgcattaagcaagttgcctttagaaatgtgaagacattttaaaacactacaagataatgagcaagtctcacctacataatcatggctccacagacggtgccagtccatgcatccaccatttctcaacacctacaaagttttaagatctgcttggttcagatactgtccagccacagcagctccctctgctgtagagagcagcatattcagctttgcctttttatttcagatactgaatatcctttggcaatttcagatatcacagc

SEQ ID NO: 199032 - DNA, 1240 bp, Homo sapiens
agcggtccacctcctgtcctccggaaaggtgcccgcctcttgccttccggcccggcgcccgatttccgccttccgacccagctgtgggctgcgccccacgccagcccgcgccccgcatggctgccgccggggccaggcctgtggagctgggcttcgccgagtcggcgccggcgtggcgactgcgcagcgagcagttcccgctctccttcctgctgcaggtgtatgcgccgctgcctggccgcccggacgccttccaccgctgcatcttcctcttctgctgccgcgagcagccgtgctgtgccggcctgcgagtttttaggaatcaactacccaggaaaaacgatttttactcatatgagccaccttctgagaatcctcccccagaaacaggagaatcagtgtgtctccagcttaagtctggtgctcatctctgcagggtttgtggctgtttaggccccaaaacgtgctccagatgccacaaagcatattactgcagcaaggagcatcagaccctagactggagattgggacataagcaggcttgtgcacaaccagatcatctggaccatataattccagaccacaacttcctttttccagaatttgaaattgtaatagaaacagaagatgagattatgcctgaggttgtggaaaaggaagattactcagagattatagggagcatggggatataatgggaagcaacactccagtggtcagatgctcacagtcttatggaggagcccaaataatatctggggaagttaaagtccatataatgactgataagagtacaatacaggtgccatgggaacacgtgacatcactgaagactgcctggaaggggccgcgcgtgtgttcatgcctatacgataaacatgatacataatgaaaatgcttatctttaggagaaaggagagcctagagtagcaggatcaaggatgaaagctggacttcaaatatgccttgttagtgtaaatgtgactgtggaactgtatgagtattttaagattatggagtaaagtaagttttaaaaagcagtccctaatcatcaaaagtaaaaaactcttgatgtagtcatataaccacactaagaactcttccaggtgacttcaaaacataggacagtacatctctagtagaatatgccctgagaatgaaaagaatgtaacagtgttagtattttcattctcagggcatattctactagagaatgaaaatactaaccctgttatcccta

SEQ ID NO: 199033 - DNA, 1169 bp, Homo sapiens
agcggtccacctcctgtcctccggaaaggtgcccgcctcttgccttccggcccggcgcccgatttccgccttccgacccagctgtgggctgcgccccacgccagcccgcgccccgcatggctgccgccggggccaggcctgtggagctgggcttcgccgagtcggcgccggcgtggcgactgcgcagcgagcagttccccagcaaggtgggcgggcggccggcatggctgggcgcggccgggctgccggggccccaggccctggcctgcgagctgtgcggccgcccgctctccttcctgctgcaggtgtatgcgccgctgcctggccgcccggacgccttccaccgctgcatcttcctcttctgctgccgcgagcagccgtgctgtgccggcctgcgagggtttgtggctgtttaggccccaaaacgtgctccagatgccacaaagcatattactgcagcaaggagcatcagaccctagactggagattgggacataagcaggcttgtgcacaaccagatcatctggaccatataattccagaccacaacttcctttttccagaatttgaaattgtaatagaaacagaagatgagattatgcctgaggttgtggaaaaggaagattactcagagattatagggagcatggggatataatgggaagcaacactccagtggtcagatgctcacagtcttatggaggagcccaaataatatctggggaagttaaagtccatataatgactgataagagtacaatacaggtgccatgggaacacgtgacatcactgaagactgcctggaaggggccgcgcgtgtgttcatgcctatacgataaacatgatacataatgaaaatgcttatctttaggagaaaggagagcctagagtagcaggatcaaggatgaaagctggacttcaaatatgccttgttagtgtaaatgtgactgtggaactgtatgagtattttaagattatggagtaaagtaagttttaaaaagcagtccctaatcatcaaaagtaaaaaactcttgatgtagtcatataaccacactaagaactcttccaggtgacttcaaaacataggacagtacatctctagtagaatatgccctgagaatgaaaagaatgtaacagtgttagtattttgaataaacatgttattacta

SEQ ID NO: 199034 - DNA, 1247 bp, Homo sapiens
agcggtccacctcctgtcctccggaaaggtgcccgcctcttgccttccggcccggcgcccgatttccgccttccgacccagctgtgggctgcgccccacgccagcccgcgccccgcatggctgccgccggggccaggcctgtggagctgggcttcgccgagtcggcgccggcgtggcgactgcgcagcgagcagttcccgctctccttcctgctgcaggtgtatgcgccgctgcctggccgcccggacgccttccaccgctgcatcttcctcttctgctgccgcgagcagccgtgctgtgccggcctgcgaggtgagccgccaaacggggtcgggacggggccatgcctccgacgcgtgcgcggcgttaattccgggagcgaccagggggacggcggcaagcaccgctgccgccccagcctcagagctccctctccgcgctgccccaggagcaccttctcccgggcccttccaggatgtgctcatttttgctacataagcttctaactgtgcccacgcgcattggtaacccccagcttttaatcagtgggtaccaggtatggtgttaattcagataatagaaattgtcttggaaagatggatcccagtagctttttcgtatttttggcagtcgttcttaacgatcagtcttattaatttgattaactcaaaccacctctaggaggcaactcagttgcgtgtaccggacgaaatctagtttctggattttaaaagcttattcctgaaagcaaaaactttcatttcttttttgtgtgttgagtattttcagttttacgtgcagaggataaaatatgtgaattgctgttttgtttgaagataaaacttttctctgcattcttttttagtttttaggaatcaactacccaggaaaaacgatttttactcatatgagccaccttctgagaatcctcccccagaaacaggagaatcagtgtgtctccagcttaagtctggtgctcatctctgcagggtttgtggctgtttaggccccaaaacgtgctccagatgccacaaagcatattactgcagcaaggagcatcagaccctagactggagattgggacataagcaggcttgtgcacaaccaggtgggtaatcttttttttaagtctcagttcagtttcatcgcctttgtcaacccagatatttccaggacaactttaaaggtaaaattaggaaaggtatagtactttaaaaatttttcatgcctggaacacctttgtaaaa

SEQ ID NO: 199035 - DNA, 1122 bp, Homo sapiens
agcggtccacctcctgtcctccggaaaggtgcccgcctcttgccttccggcccggcgcccgatttccgccttccgacccagctgtgggctgcgccccacgccagcccgcgccccgcatggctgccgccggggccaggcctgtggagctgggcttcgccgagtcggcgccggcgtggcgactgcgcagcgagcagttccccagcaaggtgggcgggcggccggcatggctgggcgcggccgggctgccggggccccaggccctggcctgcgagctgtgcggccgcccgctctccttcctgctgcaggtgtatgcgccgctgcctggccgcccggacgccttccaccgctgcatcttcctcttctgctgccgcgagcagccgtgctgtgccggcctgcgagggtttgtggctgtttaggccccaaaacgtgctccagatgccacaaagcatattactgcagcaaggagcatcagaccctagactggagattgggacataagcaggcttgtgcacaaccagatcatctggaccatataattccagaccacaacttcctttttccagaatttgaaattgtaatagaaacagaagatgagattatgcctgaggttgtggaaaaggaagattactcagagattatagggagcatgggtaagcagtttcaggacttcattcattaagtggttaaacataatgcttggaagaaagggctccatgtgcctagaagagaggtactgagaggaagactcactttggaggctgtagcatacaattttcagatattgcctcaggtaaaaatatacttcctggactttgttttctgacacataagaggtgtgttctgctccctgtaaagacaagggtgggtatccagatggtcccatgagtagggctgcacaagatgctggaggcttggtaagttcctctgggtcgcagatcggtttctcgggtcgggatagtgtgagtgcctagcacagtgtcgggcacgcagaagggccccttaaaagtttctctttcatctggccagttttagatacacaattttgtcagtttacttacagtgcatactcttgggtagtacttgtgctgaccaagtatcttagaggcttattttattatagta

SEQ ID NO: 199036 - DNA, 1206 bp, Homo sapiens
agcggtccacctcctgtcctccggaaaggtgcccgcctcttgccttccggcccggcgcccgatttccgccttccgacccagctgtgggctgcgccccacgccagcccgcgccccgcatggctgccgccggggccaggcctgtggagctgggcttcgccgagtcggcgccggcgtggcgactgcgcagcgagcagttcccgctctccttcctgctgcaggtgtatgcgccgctgcctggccgcccggacgccttccaccgctgcatcttcctcttctgctgccgcgagcagccgtgctgtgccggcctgcgagtttttaggaatcaactacccaggaaaaacgatttttactcatatgagccaccttctgagaatcctcccccagaaacaggagaatcagtgtgtctccagcttaagtctggtgctcatctctgcagggtttgtggctgtttaggccccaaaacgtgctccagatgccacaaagcatattactgcagcaaggagcatcagaccctagactggagattgggacataagcaggcttgtgcacaaccagatcatctggaccatataattccagaccacaacttcctttttccagaatttgaaattgtaatagaaacagaagatgagattatgcctgaggttgtggaaaaggaagattactcagagattatagggagcatggggatataatgggaagcaacactccagtggtcagatgctcacagtcttatggaggagcccaaataatatctggggaagttaaagtccatataatgactgataagagtacaatacaggtgccatgggaacacgtgacatcactgaagactgcctggaaggggccgcgcgtgtgttcatgcctatacgataaacatgatacataatgaaaatgcttatctttaggagaaaggagagcctagagtagcaggatcaaggatgaaagctggacttcaaatatgccttgttagtgtaaatgtgactgtggaactgtatgagtattttaagattatggagtaaagtaagttttaaaaagcagtccctaatcatcaaaagtaaaaaactcttgatgtagtcatataaccacactaagaactcttccaggtgacttcaaaacataggacagtacatctctagtagaatatgccctgagaatgaaaagaatgtaacagtgttagtattttgaataaacatgttattacta

SEQ ID NO: 199037 - DNA, 1293 bp, Homo sapiens
agcggtccacctcctgtcctccggaaaggtgcccgcctcttgccttccggcccggcgcccgatttccgccttccgacccagctgtgggctgcgccccacgccagcccgcgccccgcatggctgccgccggggccaggcctgtggagctgggcttcgccgagtcggcgccggcgtggcgactgcgcagcgagcagttccccagcaaggtgggcgggcggccggcatggctgggcgcggccgggctgccggggccccaggccctggcctgcgagctgtgcggccgcccgctctccttcctgctgcaggtgtatgcgccgctgcctggccgcccggacgccttccaccgctgcatcttcctcttctgctgccgcgagcagccgtgctgtgccggcctgcgagtttttaggaatcaactacccaggaaaaacgatttttactcatatgagccaccttctgagaatcctcccccagaaacaggagaatcagtgtgtctccagcttaagtctggtgctcatctctgcagggtttgtggctgtttaggccccaaaacgtgctccagatgccacaaagcatattactgcagcaaggagcatcagaccctagactggagattgggacataagcaggcttgtgcacaaccagatcatctggaccatataattccagaccacaacttcctttttccagaatttgaaattgtaatagaaacagaagatgagattatgcctgaggttgtggaaaaggaagattactcagagattatagggagcatggggatataatgggaagcaacactccagtggtcagatgctcacagtcttatggaggagcccaaataatatctggggaagttaaagtccatataatgactgataagagtacaatacaggtgccatgggaacacgtgacatcactgaagactgcctggaaggggccgcgcgtgtgttcatgcctatacgataaacatgatacataatgaaaatgcttatctttaggagaaaggagagcctagagtagcaggatcaaggatgaaagctggacttcaaatatgccttgttagtgtaaatgtgactgtggaactgtatgagtattttaagattatggagtaaagtaagttttaaaaagcagtccctaatcatcaaaagtaaaaaactcttgatgtagtcatataaccacactaagaactcttccaggtgacttcaaaacataggacagtacatctctagtagaatatgccctgagaatgaaaagaatgtaacagtgttagtattttgaataaacatgttattacta

SEQ ID NO: 199038 - DNA, 3848 bp, Homo sapiens
agcggtccacctcctgtcctccggaaaggtgcccgcctcttgccttccggcccggcgcccgatttccgccttccgacccagctgtgggctgcgccccacgccagcccgcgccccgcatggctgccgccggggccaggcctgtggagctgggcttcgccgagtcggcgccggcgtggcgactgcgcagcgagcagttcccgctctccttcctgctgcaggtgtatgcgccgctgcctggccgcccggacgccttccaccgctgcatcttcctcttctgctgccgcgagcagccgtgctgtgccggcctgcgaggtgagccgccaaacggggtcgggacggggccatgcctccgacgcgtgcgcggcgttaattccgggagcgaccagggggacggcggcaagcaccgctgccgccccagcctcagagctccctctccgcgctgccccaggagcaccttctcccgggcccttccaggatgtgctcatttttgctacataagcttctaactgtgcccacgcgcattggtaacccccagcttttaatcagtgggtaccaggtatggtgttaattcagataatagaaattgtcttggaaagatggatcccagtagctttttcgtatttttggcagtcgttcttaacgatcagtcttattaatttgattaactcaaaccacctctaggaggcaactcagttgcgtgtaccggacgaaatctagtttctggattttaaaagcttattcctgaaagcaaaaactttcatttcttttttgtgtgttgagtattttcagttttacgtgcagaggataaaatatgtgaattgctgttttgtttgaagataaaacttttctctgcattcttttttagtttttaggaatcaactacccaggaaaaacgatttttactcatatgagccaccttctgagaatcctcccccagaaacaggagaatcagtgtgtctccagcttaagtctggtgctcatctctgcagggtttgtggctgtttaggccccaaaacgtgctccagatgccacaaagcatattactgcagcaaggagcatcagaccctagactggagattgggacataagcaggcttgtgcacaaccagatcatctggaccatataattccagaccacaacttcctttttccagaatttgaaattgtaatagaaacagaagatgagattatgcctgaggttgtggaaaaggaagattactcagagattatagggagcatgggtgaagcacttgaggaagaactggattccatggcaaaacatgaatccagggaagataaaatttttcagaagtttaaaactcagatagcccttgaaccagaacagattcttagatatggcagaggtattgcccccatctggatttctggtgaaaatattcctcaagaaaaggatattccagattgcccctgtggtgccaagagaatattggaattccaggtcatgcctcagctcctaaactacctgaaggctgacagactgggcaagagcattgactggggcatcctggctgtcttcacctgtgctgagagctgcagcttgggtactggctatacagaagaatttgtgtggaagcaggatgtaacagatacaccgtaaaggcatcttaaagccttgaaaaatgttaataatcttttataccttgcaattccatttctgggattttatcctaaggaaatacttataccaaaaatagaggtgcagagatgttgacggattgcttacacagtgtctacttattagtgaaacaaaagtgtccagtgacagggaattaaataaattttggtacatccacagaggaaggctacacagtcttaattataacacctatattgacaacagacataccattataggtggtattcatggtatgatcctattcttgtaaaaatatttgtatgtatgcacagaaatctgcaaagatgtacacttagtgaactggttaccaacgaatggtgggactaactaaaatggtctttttacttatatgtgcatttctttttataataaaaatgggttatatgcctaatgaagtcaaaccatctcactctgagcatttcccaccctaggtttttaaaacacaaaaatacttaggtaaaactcccaacaaacttgtctgatcattagctgattatcacaggctctagtatgtactggaagcccagaatatttgagaaataccaaacctcaggttggtgagtatgatgaacaggaaacccagtaattctgaagcagcagtatcacagttggcaggatgaggaacaacagtggctttgtgatcacagaactggaatttaaagaggctggaccttcagaactgatcttggtcagccagcggccctgcttacagatgagacactgaaaggcaaaaggcgatggtcttccctttccgtgtcagcattgtatacaggttccctatcgcacatacaagggttatggaatgtaagccaaaataagggtctggcctaggaggcagcagcctgaggaaaggaaggccctgaagtcagttttcaaagggctgacccttggcctattatgtttctgatacatctgtttaagcaagcggctcctaagactacactaaggtttcttccatcccctagcagctcacagttgacaattcccagttctctcagcaccagtgatgcctgcccttaagacacattgctgttgatcagtgcttgaatactgacggctaattctgataaatttctcaggcttatttccttaatctacattggctcacattgtcccctaacacatccctgttaactgaaatgcattgccaccataaatcctcacgttttcataggtaacatcacttgctaatgtaattgtctacttggctattttatttgtaatttaaaaagttctgtcctagtagtccatattatataagtatacatatgcaatttgtattaattgtataagatagttatacatagcaccatatgggaaactgcagtatggagtttctcccatggggaggttatcagctacttaagagctagaggatactagtttcgaacctgggatggctaaatctatgaaaatcacctataactatggtgtcacagccctgtggctactggagtaagttgtcatcaactagtgacaagagctggtcgcaacacttagtaggaagcacagtggcataaggaaacctggactagtggggcctttatatctaaaattatgtattattccttataggcagaatctgtaagtacgttatgactgctaatgacttttaaagcaaacatgttaacgatctttctatggtaaaaactgttatttggggacatcaccagatgatgtggacattcttgcaggtattttggcatacccaggcaagctgtcattggtgtatattccagttaacctctggagatgatcgtaacagtttacagggcctttccatttgggatggatatatcaagagggagacaaactggtccaaatcaccagaaagaaaatctcacagcaccgacttggcatctgtgttaaaaaatagcaactatatttaaaataaactgtacaacataaaaaatttaaattaaaaaatgcattaagcaagttgcctttagaaatgtgaagacattttaaaacactacaagataatgagcaagtctcacctacataatcatggctccacagacggtgccagtccatgcatccaccatttctcaacacctacaaagttttaagatctgcttggttcagatactgtccagccacagcagctccctctgctgtagagagcagcatattcagctttgcctttttatttcagatactgaatatcctttggcaatttcagatatcacagc

SEQ ID NO: 199039 - DNA, 3154 bp, Homo sapiens
agcggtccacctcctgtcctccggaaaggtgcccgcctcttgccttccggcccggcgcccgatttccgccttccgacccagctgtgggctgcgccccacgccagcccgcgccccgcatggctgccgccggggccaggcctgtggagctgggcttcgccgagtcggcgccggcgtggcgactgcgcagcgagcagttccccagcaaggtgggcgggcggccggcatggctgggcgcggccgggctgccggggccccaggccctggcctgcgagctgtgcggccgcccgctctccttcctgctgcaggtgtatgcgccgctgcctggccgcccggacgccttccaccgctgcatcttcctcttctgctgccgcgagcagccgtgctgtgccggcctgcgagggtttgtggctgtttaggccccaaaacgtgctccagatgccacaaagcatattactgcagcaaggagcatcagaccctagactggagattgggacataagcaggcttgtgcacaaccagatcatctggaccatataattccagaccacaacttcctttttccagaatttgaaattgtaatagaaacagaagatgagattatgcctgaggttgtggaaaaggaagattactcagagattatagggagcatggattcttagatatggcagaggtattgcccccatctggatttctggtgaaaatattcctcaagaaaaggatattccagattgcccctgtggtgccaagagaatattggaattccaggtcatgcctcagctcctaaactacctgaaggctgacagactgggcaagagcattgactggggcatcctggctgtcttcacctgtgctgagagctgcagcttgggtactggctatacagaagaatttgtgtggaagcaggatgtaacagatacaccgtaaaggcatcttaaagccttgaaaaatgttaataatcttttataccttgcaattccatttctgggattttatcctaaggaaatacttataccaaaaatagaggtgcagagatgttgacggattgcttacacagtgtctacttattagtgaaacaaaagtgtccagtgacagggaattaaataaattttggtacatccacagaggaaggctacacagtcttaattataacacctatattgacaacagacataccattataggtggtattcatggtatgatcctattcttgtaaaaatatttgtatgtatgcacagaaatctgcaaagatgtacacttagtgaactggttaccaacgaatggtgggactaactaaaatggtctttttacttatatgtgcatttctttttataataaaaatgggttatatgcctaatgaagtcaaaccatctcactctgagcatttcccaccctaggtttttaaaacacaaaaatacttaggtaaaactcccaacaaacttgtctgatcattagctgattatcacaggctctagtatgtactggaagcccagaatatttgagaaataccaaacctcaggttggtgagtatgatgaacaggaaacccagtaattctgaagcagcagtatcacagttggcaggatgaggaacaacagtggctttgtgatcacagaactggaatttaaagaggctggaccttcagaactgatcttggtcagccagcggccctgcttacagatgagacactgaaaggcaaaaggcgatggtcttccctttccgtgtcagcattgtatacaggttccctatcgcacatacaagggttatggaatgtaagccaaaataagggtctggcctaggaggcagcagcctgaggaaaggaaggccctgaagtcagttttcaaagggctgacccttggcctattatgtttctgatacatctgtttaagcaagcggctcctaagactacactaaggtttcttccatcccctagcagctcacagttgacaattcccagttctctcagcaccagtgatgcctgcccttaagacacattgctgttgatcagtgcttgaatactgacggctaattctgataaatttctcaggcttatttccttaatctacattggctcacattgtcccctaacacatccctgttaactgaaatgcattgccaccataaatcctcacgttttcataggtaacatcacttgctaatgtaattgtctacttggctattttatttgtaatttaaaaagttctgtcctagtagtccatattatataagtatacatatgcaatttgtattaattgtataagatagttatacatagcaccatatgggaaactgcagtatggagtttctcccatggggaggttatcagctacttaagagctagaggatactagtttcgaacctgggatggctaaatctatgaaaatcacctataactatggtgtcacagccctgtggctactggagtaagttgtcatcaactagtgacaagagctggtcgcaacacttagtaggaagcacagtggcataaggaaacctggactagtggggcctttatatctaaaattatgtattattccttataggcagaatctgtaagtacgttatgactgctaatgacttttaaagcaaacatgttaacgatctttctatggtaaaaactgttatttggggacatcaccagatgatgtggacattcttgcaggtattttggcatacccaggcaagctgtcattggtgtatattccagttaacctctggagatgatcgtaacagtttacagggcctttccatttgggatggatatatcaagagggagacaaactggtccaaatcaccagaaagaaaatctcacagcaccgacttggcatctgtgttaaaaaatagcaactatatttaaaataaactgtacaacataaaaaatttaaattaaaaaatgcattaagcaagttgcctttagaaatgtgaagacattttaaaacactacaagataatgagcaagtctcacctacataatcatggctccacagacggtgccagtccatgcatccaccatttctcaacacctacaaagttttaagatctgcttggttcagatactgtccagccacagcagctccctctgctgtagagagcagcatattcagctttgcctttttatttcagatactgaatatcctttggcaatttcagatatcacagc

SEQ ID NO: 199040 - DNA, 222 bp, Homo sapiens
tgaggagaaccagataactgttggaaataacttcgcatccctaaaaagcaggctcttgcgaaattcctgtagagagaggtgagactattgggcctgttgcggttatgctgagtcagtcatacttctttctactgtcgctgtccagaggtcactgatggagatttgtttctctatataaagcttactgatttacagaaaaactattttagtcattgtttaaat

SEQ ID NO: 199041 - DNA, 412 bp, Homo sapiens
tctagccttactgcactgactagaacttccagtacaatgtggactagaagtggtaagggtaggcattttcctcgtccccagttgtaaggggacagtttacagttttccaccaagattgatatgagctgttggttttcagatatcctttatcagaatgatgaagtctccttcgattcccagttgcaagaagtttttataatgaagggatgctgaattttgacatttttcctgtatatattgaaatgatcatctagtttttcagtttcggtctgttaatatgctgaattatattgatgaatatccaaatattaaaccaaccttatacatctgagataaaacctaattggttacaatgtattactttttatatattgttggatttgacctgctaacattatgtgaagaatttttg

SEQ ID NO: 199042 - DNA, 233 bp, Homo sapiens
tttcttagcagagtcatattaagatatattattaaaacactctcaattagtaaaaatgagatctttttatggctaatttactggagttatctttttcttagatatcagagcttattttaaagtgtacttcttaataatttaataacccatctttaactttgaacatgttaattttctgctaccttaatgactctaatggcataaaaaataaatagtacatttatgcaccatta

SEQ ID NO: 199043 - DNA, 815 bp, Homo sapiens
aaggatgagttctgtcagacagcactactgtcaacgttcacaagtatattgattaaattagcccacatacatattcatcccagcaaagaggtttattgtgtagtggaatatctggagcaagatgcgcacatataatcatgaattggcttcacaatgaacactcttgctatgaaaaattctaatttgcccacattttcagccctattgcctaaataatttgctctctcatgcaccctgtgtaattcaagcaggctctccacacctgcagaggcaaatgcagtttcaaggagctgacaacaagtggcagcgggcatcaggaaatcctggaatgcaagggtgctaattaaccaagtggtccttggggctaggctgtcatttagcactgcacttctagaagaagtttgctttgaatttttaattataaaaggaacaagaacttgggcactagcattcttaagatgacatttattcctcaggacctatcttaggagataacatggtccagagaacaatgcccattttcccaaagaattaaaaaaataaaaattgtatgacaggcacccagtacttcattctgtgggtgagtagtgatctctcaataataatctaatttataataataatatctacatgtatttgtgctaataatgtgtcacgcattatatctcactcactcctccaataccctatgcggtaggcatcacttacttaattgttactgtcatcattgtcatcatcatcattgcactcttattaagcaatcactaaccagggctcaaaagacatcccctaagtagtttgtttaaacttaacac

SEQ ID NO: 199044 - DNA, 363 bp, Homo sapiens
tgaatctcaaactgtggatgtaggcagaggaatcacctggagataatttcaaaaacgcagattccctagaccccatactcatggaggcagattcaggaggcctgggtgggcagcagacactggagtactgactctgagtaggtggcctaggaccagcttcaagaaaaaatgattttgaaaccatccctacagggctgacaagaattgcacgccagattctggacagaaatacagttgtaattaaggactaattgggctgcactctggcccatttccttgttgctaaaagtcacctagcactagatattgactatttgcaatcccattgttcctagaggtagatttctggcaacagggtcatat

SEQ ID NO: 199045 - DNA, 316 bp, Homo sapiens
ccttcagaaagttccaggcccctgcctctttgtttcctccttcccttgctcctttccttcttgccactcctggcatcatgcagagagtgaagccagtatggatatcaccttgacagccgtcttgctaggggaagctaagacaagaacagtgctacgatgaactgagcgcaacatgccccaggcacatgctaggtactctcacatggcacacctcaacaggctgaacagccaggcaagataagtggtacccatcttgctgttggggaaactgtggcttaaagagaccaagagctcagttacccagctaggaagtggc

SEQ ID NO: 199046 - DNA, 404 bp, Homo sapiens
tggctgggggaagggctaggtatgggaaagtaccaaatcaaagggaagaaaagtacctcctccaggccccccagtaagaaggcggctgaatggaggtgcctggacaaggaaggaacatatgtgtatgagcatgactggcccaggggtcagggaagcctgagtcctcaactgcaactccttccagaaaactgcagtgcactgactgtgcaccaagcatgttgtgtggtggggtcagcttttctccatgagggctgccaggcacaactttgtaactgcctctattggacctgaaagatcacacagacgatttgggcctggagcctcatgtacctcatgtgtaggagcctcatggctccttgacgttgacaatcgagtagaactcccgattgaagcccccattcgta

SEQ ID NO: 199047 - DNA, 508 bp, Homo sapiens
  misc_feature (420)..(420): n is a, c, g, or t
  misc_feature (450)..(450): n is a, c, g, or t
gtgatggctgactctagagggtccccattcatgcacaaaaagtgtaggaaatgacataatgtagccatgaactatttgatagtggagttgtccgtgactcttacacaccattttatgcaagaaaaaacagcacagcagggattcggatttcattcgaattcggggataaatgattatcttttaagtggagatcgcatgccttggcttagaacttaatatgccttgcacacattaatatcgctcacacttggaactaatctatcaataagctattcccatatttgtttacttacactagcgtggattgcattcttagttcagtttcctccaggataaatcctaaaccatgtattgcagcagaagtgcctaaaggtgaatagtttatgctgtaatagtttatgctgtaatagtttatgctgnaatagtttatgctgtaatagtttatgctgnaatagtttatgctgtaatagtttatgctgtaatagtttatgctgtaatagtttatgct

SEQ ID NO: 199048 - DNA, 370 bp, Homo sapiens
agctccagctcatttgcaccagctgcacacctctgaggtctggctatcatactctttccttacttatgtggaacttaggttgttagcaccatcactgaggtgctaagtcctggcatccttctcctgcttttcatttggagcctatctggactgactcagctcactgccaatgtgctcatcgagctggcactgggattggcaaataaatggatttgaaattggttggggagtttcttacatatatcaagcttttggctacagatatcatcctatttttgtttattaatctttaaacctagcctatgtggtgtcttgttagtacaggatggtgcttttgtgatttatatagacaatactgtcagatattcgg

SEQ ID NO: 199049 - DNA, 420 bp, Homo sapiens
aaattttgcaagttcgaagcctaaaaagttactccaattaccagtgatatggtctcctccaagttacttaacctctttatacatcaaattctccatctgtaaaacggagataacaatactacctacctcacagggtttttcaaggatcagatgagtccatgtaaaatcttaggaaaagtgtgccaggcacatagtaagcaatcaataaatttaactacttacattcttccctggcttagtgcccagtcccacagttgaaatatcgaaaatgctcaaaaaatggttactcaatgaatacaatgccttgatttcctggagagagcactatgggtaaagacagatacattcttttttgtgaaaaaggaaacacagctagagatggagatgaaggaagcatctgcccacctaatcacctctctc

SEQ ID NO: 199050 - DNA, 1985 bp, Homo sapiens
aagcagggaggggccgatcagcgacttaggcctgttggctgtggtggggtccacctgcgtttctggggagcccacggaccctggggtgtacctgggtttcattcccagtgacctctcctattggtccccatttggggcgctgagatgtgatcgtttctttcctgagaatgagctgaggtaaaaacatgctggggaggaagatgggccctgggggcagcgagctgcgcctctgcaccaggagaaaggccgtgtccccagagctgaggcggtggtgggcagggctcctgagaagccggggcagggcagggtgtctctgaggtcaatgaggaacagctgaggtccagggacgcaggaaggatggggtgaactccgggatggggccggcagggagcctcacgcttacagagcctggtgttggcactctcctggcttcctccgcaaacctagccacgtggtcagggagcccgggcctagcagacggcccccaccttgacagaatccccagggtcgtgcgtggcggtgggggcgacttcacagccgagaccgggcctaacgctgctgtctcgcagtcacccctgcaggccgctcagggcagggctctggcctgacgggggttcctggacacgcctctgagccggcagcccctacccgcacccgtgcaccttccacgcccgtctcaagacagacacctgacgcgagaccgcaaacaataccaacactgcaacgcacagtatcacagaacaacaaagcaaaaacgagaagcacgaagaggagagaacacggacaagcgcagaagcaagacaacacgcgacgaaaaaccatacatgagagacaggaacagcaccaagaagcacacaggggaagcgcggccgaaaagacgcggcacaacacacgaagcgagaacacaaagcagaaagaagaacacacacgagaaaaaccaaacaggccaaaacgatactggtacgacggaagaaagcaaagaacacgaacacaaagaaagaagagaaacgtaacgccgcctccggcgcttacacaaaagagaacaaaaacgaagcgaacacaacaagacgaagcaccacagacgacacaaaagaaacacacaacacaaccaagcagaacacaggaacgacaacagacagcagacagatagaacaagagaacacgggagcggaggcagaaaagaaccaggacgcaaagaggagcgacgaggagaaagacacgagcaaagagccgaaaaacagagagaggagacaggggagcagacgaggagggggagagggcaggagaagagggaggaaggggagaggaggaggaggagagaggaagagagaaggagggggaagagagagagaaaagaggcaggcagcacgaggagacaagggagggagagagggaacaggacgccaagagggagagggagaagggagaagccgagcgcaagaggagcgagagcaggagaagaggagaggagaagggaagggaggagggaggcgcgagcaggaacagcgcgagccgcaagacaggagagacgcgcgcgaaggcgcgaggcggcacaaagcagaggaaggagacgagagcgaccaggagcaggacgacgaggccagaggacgcggcacagccagagacacgaagaccacaacaacagacagagggccacgagagacagacgaagaagagagagagggcggaacgaagaggcaagggcgacgacagacacgagagcagcacagagcgaaggagacagaagcggccaacgaagacgagcgagcagaacaggcaacggacgaagacgaacgcacagcgagagcacaaagacggaaggggagagcggggcaaccggccagaaaggaaagccgagcacaacaggcaagccgacacgagcgcgcagaggacgcagcacaacaggagcaggagcaaagaggaaggacgaagaagcaagagagaaggcaaacacgaagaaggagagaatagacagcaggagaagg

SEQ ID NO: 199051 - DNA, 317 bp, Homo sapiens
caaccagctaggaaagatgaaacaggaattctgatgctaaagctcattcctctaccaccatcatcatcatcctcaccgtggctggtgccaagtgctcctccttccctcaggggtcttcagtcaccagcccctctttgggtccacccactgaagtccaccaacctctggacaccttcacactttacatttgctgccttgaacctgttttccactttgtttcctgttagctgagtcttctcttctgacagtgtgcaccttacccagaagcgtgtggtatgacagtaataataaaagtgggcggagctgacattcagagg

SEQ ID NO: 199052 - DNA, 604 bp, Homo sapiens
  misc_feature (19)..(19): n is a, c, g, or t
  misc_feature (34)..(34): n is a, c, g, or t
  misc_feature (41)..(42): n is a, c, g, or t
  misc_feature (44)..(44): n is a, c, g, or t
  misc_feature (72)..(72): n is a, c, g, or t
  misc_feature (86)..(86): n is a, c, g, or t
  misc_feature (165)..(165): n is a, c, g, or t
ctagaggatcccgtgtggntcttgtgctggggtntgcggannangggacagagactgaggatgtgcggtgtnagcagtgtgctcgntggtaccttctcagatgtgccttctagtgtgatgaaatgcaaagcatacacagactgtctgagtcagaacctggtggtnatcaagccggggaccgaggagacagacaaagtctgtggcacactcccgtccttctccagatccacctcaccttcccctgccactctaaaattaatttccggaatacggagtcaaacctgacacacttggtgttaaaataattgtgctgacattcgagctaaaaagtgaacaatctggttgtttctagtgatcccccagccatggggtaaagagcattatcatgttagttgccatgacagttctcgaaatgagccctgaaaatatcaaggagtgtcactgcactaatcccaccaggagagcaccagacacaaaggtaacacccgagcacatggctggggtgttagttttggagtatgactgatgccctgtgcaatagggcagccagggagtcctttctcacccactaatagggctcgtggtgaggtcttgtcccacagca

SEQ ID NO: 199053 - DNA, 299 bp, Homo sapiens
tccccctaaacgtttaaaatatatttctaaacagaatgggccaattcagtcacagtaactgttgatctccatagcagagcaacccacaaagacagaactgatttttttcccataatcaggggtgaaaaatatacaacttgtttctgaaccaaaaccacaatttctgcagtttaaaatgtttcactgctaatatggccctggtagaaattatgtagtttcttttcttctttaaaaaaaaaaaaaattaaaaaaatttcctaagacactaaatgctccatctggaatgtagattctgatca

SEQ ID NO: 199054 - DNA, 443 bp, Homo sapiens
tccccctaaacgtttaaaatatatttctaaacagaatgggccaattcagtcacagtaactgttgatctccatagcagagcaacccacaaagacagaactgatttttttcccataatcaggggtgaaaaatatacaacttgtttctgaaccaaaaccacaatttctgcagtttaaaatgtttcactgctaatatggccctggtagaaattatgtagtttcttttcttctttaaaaaaaaaaaaaattaaaaaacaaatttaaacaataaaagtgggcatgcataagttgggaagattcagacagtaagtcagatggacaagttaggctttagagatattaggaaaatatttcctaatatggaaagaaaaagtttcacgaagattaaagactaccccaacagaattaatacaacagaatatcaaagatggtagaccgctggtccg

SEQ ID NO: 199055 - DNA, 400 bp, Homo sapiens
ttacaggcatgagccaccacacctggccttttgtttttttttaaatagaggggtcttgccatgttgcctaggctggtctcaaacccctgcctcaagagatccttctgccatggcctcccaaactgctgggagcaaggccactatgctcagccttgagttatcagaattttaaaaatgcttaatgcttttttttttcccttgtagagtgaaatatttatttctatactctgatttttttattgaaggtttttttttcaccatttttttaaaccgttaattttgtttcccttgattatcttactcttaaaaccattttctgtacttttctttctttcttttctccctgatgcttcttactgtctttggcatcctggaatagtgtggagccactcatccaagc

SEQ ID NO: 199056 - DNA, 361 bp, Homo sapiens
catggacaagatcatgcaaaggaatcgcacaaatagagcatgatccatggataacatgataaatgtatcacgggcatgggtctcgtgtgcaactcgaccgtatgtttcttgctggggcaagcccctatcttcacattcagatgtgcatttacctgaataatgtgattgagaagattttaagttacagatttcaattcaggtgtttcactgaggctatgacaggtaaactgtttggggttcttctttgaaaaagtcaaattaaaatatttaaattgtgcagaggaaaaaatgcttacatcattgtcatcaatatcaatgtaatttatttaacccttttaggattagccattctttttttttt

SEQ ID NO: 199057 - DNA, 397 bp, Homo sapiens
gggcttaccagtggcgttagtaggtagaaagcaagttcctttaaagcacagaaaggaaaggaggaaactgattggtgtgcttaaaaggctgtgactaggatgcttcagtgaaaagcactcctatagcttgtctcttctagttgctttgatacttttggggggaaaaatctgcactcaacaccatatgaggcctcccttctgcctattagtcttagagaaaacatatctgcccatctattcgtctttcttttggtctatccatttactgtctggacacagttggaaagttgctttttttcgataagaggaaaatgggtacatgatgaaattgatgcttttggattaaatagagggtgcacgtcttatcttccattcctttgtgtgtctacaaagactt

SEQ ID NO: 199058 - DNA, 400 bp, Homo sapiens
tccagaatcatttcctcaagtttatataattttaaaaggtaatttaatgagctagaaattttctatagttgatatttgaggcagtattaaatattgctttaccttcaagtagaaaccatactaaagagaagtaaagtttgcagtcaaatcagcttacacagaaggcaaactatgtaactgtttagaacaatagacaatgaatttttagaattttgtattatttttagttgagaaactataattgtcaatgaattttaaaataattgaaagtacaagtgtgagtgcttcaaacatattaatcttcaagggaagactaatatttcaaacctaagcatttctaaatagatcatatttattcaaacctaagagtttctaaatagatcatatttacactaagact

SEQ ID NO: 199059 - DNA, 219 bp, Homo sapiens
tcaaagcacatgcctgtctcataaaaagatatcagcattagtgctgtcaggacccttcacatcactgcaattaatgaaccccacagtctcaaacatcctgtttccaacattttgataatagtaccctgttttcttttggaaggaaacccaggttggattgattaacaaatacaatcattatttaacctcagaacttggttttgaaattaatttacaata

SEQ ID NO: 199060 - DNA, 438 bp, Homo sapiens
gattcattgcaggtatgcaaggctggttcaatatttgaaaatcaaataatgtaaaccatcacattagcaagctaaagaagaaaaatcacatgattatatcaatagatgcaaaaaagcatgtgacgaaatcccacacccattcataattaaaaattatcagtaaggtggaagtggagagaatgccttcaacttagtaaagaatatcttcaaaaacctacagatagcatcatacttaatggaaagaaacgacaagctttcccactaaggttagaaaccagactagaatttcccctcttgtcactacttttcaatattgcactggaagtactaaatgcaataagacaagagaaagaaataaaaaatacttggattgggcaggaagagataaaactgtttttgtttgcaaatgggatgatggtctatgtaaaaaatctaaaa

SEQ ID NO: 199061 - DNA, 1138 bp, Homo sapiens
  misc_feature (968)..(968): n is a, c, g, or t
acatggtcagagcaagaagatgagagagaggtggggaggtgctactcacttttaaacaagcagagctcatgataaccttctaccatgaaaacagtacggaggggatggtgccagcccattcatgagaaatccgccccgtgatttaatcacctcctaccaggccccacctccaacactggggattacaatttgacatgaaacctctttttttttctttttttgtttttttttttttttgagacacaggcaagacttctcgtgttcaataacaaaaaacaaaaagaaaaaaaaacttccggagaaatatgttcctctctctcccggggagagaggaggcccggggacaactccaaagaggaggcgtattggcgcgacgaacgccgttggtaatatgggcgcccgagcaaatattggccgccaaaatttgggggggataattcgtttccccagggaggtggtatattaaacagcccctcccgtgattttggggtttttggggcgccaaaaaagacaacacgtggtgtggaacattgggacaagatcaacccggcgaagatacagaagacatgctggtggctccacacgagggggaagaacaacaagcaggcgtccataatgttgggcacacatctaatgccccccccccgaggaggatctctaactggagccaagaagaaccacaggggcccccaaaagagattgggtgggccctacacacttgcgcgaagcaggtcggtgtcgaccactttagcaaaaactacaaaggagctatccggggctggcaagagaaacagtttcccctataagacccaagggccctcggctcgggggcccttctcattttcgtggctgtgcccccttccctagggggacaggggcattcaggagtccggaagacacctgtaggacgtacaaggcgtctccagctggccagcggttttggagggtcccgtcgacccccagtgtgnatgtccctccttcttggccctgagtttcgagttccctccggtggcaatacttttcctcggagccaaagagagatgcctctctttgacaactttgctgtcgtcggggcgtcttgggcacatcgtgtcagtgcccgcgcgggaaagacgccccccctgtgcttttggttcaa

SEQ ID NO: 199062 - DNA, 1009 bp, Homo sapiens
ccgggcgcggtggcgcgtgcctgtcctcccaagtagctggcactacaggagtgtgccaccacgcccagctaatttttgtatttttaatagagatggggtttcgtcatgttggccaggctggtctggaattcctgatgtcaggtcatcctggcctcggcctctcaaattgctgggattccaggcataagccacctcacccattcactttttttttttcctgaaaacagatttttcaggattctttattggctgctaaataattctcatacggattagattttatagtgatcatatgagtaatatcttcacaaaacaatccaatcactcattatttatcagccgtctggtgggactgattcagtatgtacagatccatgatgtgaataggtttcaccttatgaaatgcaatgactcatgtactaatttggtatttatgaagaaatattggacctggtaacagcttttaaaaagctgagtatgactgagtcaataaaaacaattttacacaataataaaacaccagatattggtaaatgttgatattaatatatattagtatgatattagtaaactttttttttgcatagaaaagtccatttataaaaaggcccaatttcctcacttccaccctgagaggtaggtagatagatgaggcaattaagtgtcagagtttgtgacttactcagtgccacagaactagaaagcaggaaatctgggagcacagcttaggaattctgcctgatctcgggttctctccaggatatcatgctgcataagacttagggtacagtaaatcctctgagctgtaggaagaaaaaagtgcagcccaagatgtaactattattgttttcctgacaagatgtaaccgtattgtttttagatgtggaatataataaaaatacaaagcatcatcattatttttatcagtattagggaatgtgcaaattgggttggacagaacatttcagtgtaatagaaattttctctgtttttatggggaacgagggtg

SEQ ID NO: 199063 - DNA, 199 bp, Homo sapiens
ccaccctcccaaagaaatagctgaagttgtgaatggtaggaggctacaaagctaagtggaaagtctctgaaaagggcagagatgtttctggcagtctcgtgaggagactagaattagatctcaggatatgctaagaggaaaggaggctgggcacagtggctcacacctgtaatcccagcactttgggaggctgaggcgg

SEQ ID NO: 199064 - DNA, 623 bp, Homo sapiens
agaaaatgacatcatggctgggcactgtggctcacgcctgtaattccagtactttgggaggccgaggtggtcagaagttcaagatcagcctggccaacatggtgaaaccctatctttaaaaatacaaaacttagccaggtgtgatggcgggcgcctgtaatcccagctactcaagaggctgaggcaggacgtttgaacccgggaagcggaggttgcagtgagccaagatcgcaacattgcactccagcctgggtaacaaaaacaagactccatctcaagaaaacaaaaaaaaaaacaaagaaaatgacatcatatgacgaggcaacataaatctgaattagaacaactcaaaaggggtgataaaactcagaaatttcagaaatgaacactaaactaaaagaaacacaagaatgaacaaccaacgggtaacagataatgccttaaagaaactagaaagtaaataggatggaaaagttaagaaagggataaaaagattagagagcggcaatctatagaaaaacaggcaaagaagatccaaaatgtatacaataggagtccccaaagaagaaaatcaaagcaaggaagcataacaaaaactaaaaacaataactaaagagaatatc

SEQ ID NO: 199065 - DNA, 499 bp, Homo sapiens
tacttaattatttaacaattcatatagtattcacaaagtataccaagaaaaaagcacacatatgtcagtggttataatcagattgtaaatatggacatatctatatatatctcttcccttacctttctttctgccccttagcaatccagtacgtactgatgtatactgctcataggtggtttaacattgccatttccaagatgcttcttttctaatgaaattaatttactatctagttaattcactagctctattttatacattgtcacctcataacatctagaaagcttagtgttgtgaagtaaggactgataaacagaggcactttactaaaaaatcacttcctagaactgtggctacaatatgaaactatcttctagatatgaacatacttgcaaagaaccttccttttgcctttcttcttccttcttcagctcaatgaataagtacagaaatgcatatagctctacgagatgggttaacaacagtcactcccaga

SEQ ID NO: 199066 - DNA, 106 bp, Homo sapiens
tacaaaataatattaacactaaatgttaacattattaacattacttaggtccttacccctctacagataagtaacagggctaagcagatgctttccccactaattg

SEQ ID NO: 199067 - DNA, 470 bp, Homo sapiens
gatatgacaccaaaagcataggcagcagaagcaaaagtggacaaatggggctacactaagcttaaaaactttgtgcatcaaaggacacaatcaacagtgtgaaaaggcagttttcaaaatgggagaaaatatttgcaaatcatgtatctgatatgggattaatatccagaatatataaagaattcctgcaactcaataacaacaacaaaaaatcaaccctatttaaaatgagcaaaggacttaagtagacatttcttcaaggatgatatacagatgaccaaaaagaacatgaaaagatgcttaacatcactaatcatcagagtgatgcaaaccaaagcataatgaaatgttacacctattagaaatggctactataaaaaaaaaaaagtatcaggatatggtgaggatgtggagaattataaacttttgtgcattgttggtgggatgataagatggtacagccattaagg

SEQ ID NO: 199068 - DNA, 712 bp, Homo sapiens
actgtgaggcttttatttcttcttttacctaagtaaagacccgctaatagccaccttgccttggccattatgttgggatataaggagctttaattttcttacaggcatttttatattcctttcatattctcagtttcccttcactcattgctcaaaccatataactgatcttctgagatgatggtaaattgtcggtaaacagaaattccctgaagcagacatcatcaaaactaaaagttgtggcccttggtactatcaacagaaaaatatggaaatttgtatgatttggaaagcttacattcctttgttcatatgtgcatttgtgactactgagcatgtcctccatgatcggtacattctacattatcatactagggagagatgcccttgtgcacaggtagcgcaaacctgagataaggggtctgacactgtgatgtctgattccaggtagggacaaagacatggtggctctgggagcccagtgaggggactgggcttcctagaggtgagccttcaacaagagtcggtttttgctaacatctattgcatgcctactgtgtgccaggttgtgcccggtgcccagggtacagagatgagtaacagacatccttgccctcaaaactcacaatcttgtggcaggggaagggaagagacattactacagaatttcattcaaaggaagaatggaagttcagtcaaagccctgaagttg

SEQ ID NO: 199069 - DNA, 429 bp, Homo sapiens
cattactaatactctctgtgtaactatgcacttctaattaaagcctctttaaatctgatattgttcatcaatgaacagtttggtttagtaatactaattaaggatggttctaaaatttaaaactttgaaaattaggattgtttcatttagtctaatgcttttgatttgtaattcttacagtggttgttcataggatattaacttttccagttaccagataaaggttttttgttttccagatgatctgtcttgagattaattttttaaaacaacaaaatatacatttgtctcatttgagtatcaggtcataattccattattcacagaagtttcatcatgtgattgattactttttaaaaggtaaatttttgatagaattaattaaaataactactttagaatagctttttattgcataacaataattct

SEQ ID NO: 199070 - DNA, 248 bp, Homo sapiens
tgacattagatggactaaatctttaatttttaatactttgtgaatactgcttctctcagttagcaatgcaaagcctttaactcttaaaatgctgctttctgaaccactttttagtcataagaagagcacatgcttgttctttaggcttcagcgtctaaggaatgagaagcaagtcagaaaacagcagcatggggcagacagttcataaataaatctgctttacattttcagcaagaaaacctaattct

SEQ ID NO: 199071 - DNA, 602 bp, Homo sapiens
ttctttcttaagaaaaaattgctgttattttttcagaaatcctccacctactttacttcatccagaaaaatggtgtgaagaattcaaccactttatttcacagtgtcttattaaggattttgaaaggcgaccttccgtcacacatctccttgaccacccatttattaaaggagtacatggaaaagttctgtttctgcaaaaacagctggccaaggttctccaagaccagaagcatcaaaatcctgttgctaaaaccaggcatgagaggatgcataccagaagaccttatcatgtggaagatgctgaaaaatactgccttgaggatgatttggtcaacctagaggttctggatgaggtactaaatatttagtagacaattctcattgaagacatttgtttcatgtgaatggtctgaactttctgttgtagaccatgtcctcctaaggtcatttgaaaatttaattgtttgtgtagctatgggatgaagttcagggagcattcagttgctgtgactatgatcctgtgctgtgtttatttagatagcccctagaatgatgaagagaaaaggatttggatttttgcaataaagctctttatattgt

SEQ ID NO: 199072 - DNA, 277 bp, Homo sapiens
gaatttccattttaaccaaggagaaagggaactaagaaaatcatcagatgttcaacaaacgtaaagaaaggagaataaaggaaataagaccgcataataaccagaaaaatacttaacacacatatagtgacaaacaccaatggttcgctttccctattaaaaggaaccttttttccctataaaaaggttcagtccctaaaaatgaacccagtggttcacttcccttggcagatgaaggaggcggtggcagtggtggaagaaggggtggtggcggcag

SEQ ID NO: 199073 - DNA, 1155 bp, Homo sapiens
tttttaaaaagacaaagcaggttcaaaaaatatccaaatagaacttcaggaggtgaaataaaaaatgtgactgatgagtttcaagtctcattgaattacccaccatttctgtctctcttctcttctcctcttttacaatggtatacgctgttcaatgtgtttctttcccatgctgtgtatgtgtgtgtgtgcatgtgtgcatccataaaaactagtattgtttgttttctttagttttagtgctattagtccatatgtattctgaaaattgatttttgtcattcaacattagtttttggagatctagtcatattgcatatgaatctagctttttttttttttaatttgtatgcacagtataaatacaccagcttacttagacatttttttcctaatggaccctagttggctaatatatttttttgttataaaccatgtagcaagggataccctacatatatctctctgggcataattgtgaatgtttctctaggataaataccacaaagtagagttgctcagttagaaattatgcacatctttattttaacatatacttccagattggccttcaaaacatcttgacagttggcccctttccctgacccacgtactaggcttatattttattttttgaattaatttaaatgaggtaggcataaattttggatactgaatttttactttttatagaagttgcgaatattttttcccactttaaactttaaacttttatgtggtgttttttagttgtgaagaagtttcattatatttcctcctattatttgcatacttttccacctttcactttttaacccatttatgatatagttttatgttttgtgtgtgagaaggaactaattttatggttattattttgtactgttagccagcgtctcaactttcttaactgaatagttctccttttcctgatagctttgaaatagcactctaatcatatttcagttcccaaactctgttctgtttctctactgttacattgttttacaaagttattaaagtacttcccaaagtaagaagtacattttactttgcaacctgatgcaccaactgcatgttcacacacatatgaaacagaatattcatcgaataacacctacacctaataggcttgttatactctgataatttctc

SEQ ID NO: 199074 - DNA, 184 bp, Homo sapiens
tactgcttgatctcttataagtggaatctaaaatagactcacagaagcagagaatagaatagtggttgctaggagctaggggtaggaggaaatgggaagacattggtcaaggagtacaaagttttgttaagagttgagggtgtccaggttcttggcatcttgaaaaaattggacaaaacgtaca

SEQ ID NO: 199075 - DNA, 394 bp, Homo sapiens
cggtaggactcacacaattttgcaagataagtaaccaaagcaaaagtcatcttaggctcaccaaaagggctacatagattagttacagaaaacaaggcaaggctaagcacactacctaacaatattactttttacttttcattaagcagtggaaagtcttttataaatgaaattttacttgagaaaggcaatagataatacataagagcagaactgctttgtctgaaacagggttgcgggtgtgaggtggtacgcagcgttctgctgattttacttccgtcttattttcctgcttccatacctacccggggggattctctggagtcctgaggattatctataatcttttccatatgataaaaaggcacttgggggatagggccatgtcttctgt

SEQ ID NO: 199076 - DNA, 899 bp, Homo sapiens
gagggacccggtccccgccccgcgtgctcaggctgaacagcttttcttccctgatctctcggaggcgccggctgctggccaacgcagggcagcctcctgcgtgcgtgctgtgggtttctccttcagtttcctctcattgcctgaggttgggcccgaacacggcggtacatttccttgagagtcttctacattcatgctgtagaagctatgaaagtcgtgggaaactatagagtcaacactgcaaactcaagcactgatacgtccggagagcacttgacctgccttagaagatttgaaaacaatttgtagccaacttcagtatgaatcaaagcattgttttaaaaggaaagattccttctgacattaaattgcattttccaagaaccagcaacatcaaccatccagactttaattatggaatcacaggtgcaactgcgtatctcctcagtagaggacaggaagatttgtgtgactgggactttatggatttggcatctcctgcaagatgtgtgtccaactcctgggaatactgtagcatgattatagaattggtttctattgtctgttttctgtttgttgctctctcataagttaagaatcttggatttcaagtctatagtgtaacactcttgttcataatttcttatttaaaaaaatgtttaaatatttctatattaagtattttttcaaactatttgggcttgctattgaacaaatgttctctttgtattgtatattttgaaggtgctaaaaagcatcactaaaacattttggaatataacagaaagatggttaatacattatactgactacttttttctcaattaagatatacaaatcttttatatttagtaatcagaaaggcaataaagcatatgtaccttacctcttcaccatcc

SEQ ID NO: 199077 - DNA, 1026 bp, Homo sapiens
  misc_feature (51)..(51): n is a, c, g, or t
  misc_feature (53)..(53): n is a, c, g, or t
  misc_feature (69)..(69): n is a, c, g, or t
  misc_feature (71)..(71): n is a, c, g, or t
aaggacgatgatgtagagcatataatggtgaggcggccgggggctttagcngngacgactctcttaatntnccccgctacagtcttctacattcatgctgtagaagctatgaaagtcgtgggaaactatagagtcaacactgcaaactcaagcactgatacgtccggagagcacttgacctgccttagaagtcagctctttgtagcctacagaaatggaagagtggatgaagcagtctctctgggttttctggattgctggataggtggagacctgacaaatttcaaaggctgctacctgactaaccaactgcctattcagatttttacagccatcttcgacatgaacacggatgtaatcatactctcacaattcatgtactacaggttaaagaatcagaagaaaaaaatttctgaagaagatctacggaaggaacttcatttctgctgtttgcattggccatgattgggaacttcacgtatggacttggtgtggttttaaaggcaccagctgctacgtgtcacaagaatacttactttgtgcatcatcttccttggcttattgcaagttttggaatcttattccttaactcttttgtgtcttttgccatcagattgccattagagaataaacatgtatagctacttaatatatcacccaaaaagtacatatatatatatatatatatattctaagaagtgtaaatagctaatgctatagtcatttcattattatatttgaaatgttcatttataaggaaagtcttctctttcccaaagtctcctaattattattattctagcaaacgatcaaattcagatgaagatttcttggtttctttggttcttctgataaaaaaaaaaaagtggggccaagtttagaagcattgaaattaacacatcttagatattaaattttattaaaattataatagcagatattaagaaaaaaccataccatctctgaaaatctctacagagaacactttgaattaataaatgataactgatgccttgccttttgttg

SEQ ID NO: 199078 - DNA, 915 bp, Homo sapiens
  misc_feature (909)..(909): n is a, c, g, or t
  misc_feature (915)..(915): n is a, c, g, or t
gagggacccggtccccgccccgcgtgctcaggctgaacagcttttcttccctgatctctcggaggcgccggctgctggccaacgcagggcagcctcctgcgtgcgtgctgtgggtttctccttcagtttcctctcattgcctgaggttgggcccgaacacggcggtacatttccttgagagtcttctacattcatgctgtagaagctatgaaagtcgtgggaaactatagagtcaacactgcaaactcaagcactgatacgtccggagagcacttgacctgccttagaagatttgaaaacaatttgtagccaacttcagtatgaatcaaagcattgttttaaaaggaaagattccttctgacattaaattgcattttccaagaaccagcaacatcaaccatccagactttaattatggaatcacaggtgcaactgcgtatctcctcagtagaggacaggaagatttgtgtgactgggactttatggatttggcatctcctgcaagatgtgtgtccaactcctgggaatactgtagcatgattatagaattggtttctattgtctgttttctgtttgttgctctctcataagttaagaatcttggatttcaagtctatagtgtaacactcttgttcataatttcttatttaaaaaaatgtttaaatatttctatattaagtattttttcaaactatttgggcttgctattgaacaaatgttctctttgtattgtatattttgaaggtgctaaaaagcatcactaaaacattttggaatataacagaaagatggttaatacattatactgactacttttttctcaattaagatatacaaatcttttatatttagtaatcagaaaggcaataaagctttggcctcgttggcctcagcggtggagctctgcgnccggan

SEQ ID NO: 199079 - DNA, 804 bp, Homo sapiens
  misc_feature (798)..(798): n is a, c, g, or t
  misc_feature (804)..(804): n is a, c, g, or t
gagggacccggtccccgccccgcgtgctcaggctgaacagcttttcttccctgatctctcggaggcgccggctgctggccaacgcagggcagcctcctgcgtgcgtgctgtgggtttctccttcagtttcctctcattgcctgaggttgggcccgaacacggcggtacatttccttgagatttgaaaacaatttgtagccaacttcagtatgaatcaaagcattgttttaaaaggaaagattccttctgacattaaattgcattttccaagaaccagcaacatcaaccatccagactttaattatggaatcacaggtgcaactgcgtatctcctcagtagaggacaggaagatttgtgtgactgggactttatggatttggcatctcctgcaagatgtgtgtccaactcctgggaatactgtagcatgattatagaattggtttctattgtctgttttctgtttgttgctctctcataagttaagaatcttggatttcaagtctatagtgtaacactcttgttcataatttcttatttaaaaaaatgtttaaatatttctatattaagtattttttcaaactatttgggcttgctattgaacaaatgttctctttgtattgtatattttgaaggtgctaaaaagcatcactaaaacattttggaatataacagaaagatggttaatacattatactgactacttttttctcaattaagatatacaaatcttttatatttagtaatcagaaaggcaataaagctttggcctcgttggcctcagcggtggagctctgcgnccggan

SEQ ID NO: 199080 - DNA, 1307 bp, Homo sapiens
gagggacccggtccccgccccgcgtgctcaggctgaacagcttttcttccctgatctctcggaggcgccggctgctggccaacgcagggcagcctcctgcgtgcgtgctgtgggtttctccttcagtttcctctcattgcctgaggttgggcccgaacacggcggtacatttccttgagagtcttctacattcatgctgtagaagctatgaaagtcgtgggaaactatagagtcaacactgcaaactcaagcactgatacgtccggagagcacttgacctgccttagaagtcagctctttgtagcctacagaaatggaagagtggatgaagcagtctctctgggttttctggattgctggataggtggagacctgacaaatttcaaaggctgctacctgactaaccaactgcctattcagatattccaacctcagttattcaaagactccatcaccagagagaaagtcagattgtcactttggggagtcctctgccctgtatatatcccatattctttcagataagtgaaattagcatgcctgggtattacagttgtttatgccatactactataaatacttctaagagaagatttatcttgacttaagacttggaattttgttaaattaatgcacaaatgtatatgaccataacttaacgatgatttgtatattagctgagtcaagtggcatatataaaagcaatgaaggtttcttggacattctacactgaaatgtttagaatgtttaaaaaatttatctttctattttccaatagtgtggtaaatgtaaagtgcttagcactttgcgtgacacatggtagggcctcaaaaaatattagctattatcattataaaccagaggccctgttatgtggcagtttgtatctctctcttgactaatagaagcactttgcagatgatatgtcacacaatctagaaaggtagtgcttaaaggaatagacttatctccttattttacaaatgaggacattgaggccctaggaagttaaatgacttagacaaaatcacaaaggtaaagtggaaagcccaggagaaatcccctggccttcagcctgctgtgatttctaccaactatagattagaacttttcagacaagtggcacctgcaagtgtcttcgagcaaggcctcaacctccagcacagctcttgccacctgcaaacaccagggaagagcaagattgagttacatggcttggaagaagagtgaaacacctcgcaagacccagagaaaactccacatccatttgcagctaattttaaagcccaaataaaagcacaatcttt

SEQ ID NO: 199081 - DNA, 1125 bp, Homo sapiens
gagggacccggtccccgccccgcgtgctcaggctgaacagcttttcttccctgatctctcggaggcgccggctgctggccaacgcagggcagcctcctgcgtgcgtgctgtgggtttctccttcagtttcctctcattgcctgaggttgggcccgaacacggcggtacatttccttgagagtcttctacattcatgctgtagaagctatgaaagtcgtgggaaactatagagtcaacactgcaaactcaagcactgatacgtccggagagcacttgacctgccttagaagtcagctctttgtagcctacagaaatggaagagtggatgaagcagtctctctgggttttctggattgctggataggtggagacctgacaaatttcaaaggctgctacctgactaaccaactgcctattcagatttttacagccatcttcgacatgaacacggatgtaatcatactctcacaattcatgtactacaggttaaagaatcagaagaaaaaaatttctgaagaagatctacggaaggaacttcatttctgctgtttgcattggccatgattgggaacttcacgtatggacttggtgtggttttaaaggcaccagctgctacgtgtcacaagaatacttactttgtgcatcatcttccttggcttattgcaagttttggaatcttattccttaactcttttgtgtcttttgccatcagattgccattagagaataaacatgtatagctacttaatatatcacccaaaaagtacatatatatatatatatatatattctaagaagtgtaaatagctaatgctatagtcatttcattattatatttgaaatgttcatttataaggaaagtcttctctttcccaaagtctcctaattattattattctagcaaacgatcaaattcagatgaagatttcttggtttctttggttcttctgataaaaaaaaaaaagtggggccaagtttagaagcattgaaattaacacatcttagatattaaattttattaaaattataatagcagatattaagaaaaaaccataccatctctgaaaatctctacagagaacactttgaattaataaatgataactgatgccttgccttttgttg

SEQ ID NO: 199082 - DNA, 937 bp, Homo sapiens
  misc_feature (51)..(51): n is a, c, g, or t
  misc_feature (53)..(53): n is a, c, g, or t
  misc_feature (69)..(69): n is a, c, g, or t
  misc_feature (71)..(71): n is a, c, g, or t
aaggacgatgatgtagagcatataatggtgaggcggccgggggctttagcngngacgactctcttaatntnccccgctacagtcttctacattcatgctgtagaagctatgaaagtcgtgggaaactatagagtcaacactgcaaactcaagcactgatacgtccggagagcacttgacctgccttagaagtcagctctttgtagcctacagaaatggaagagtggatgaagcagtctctctgggttttctggattgctggataggtggagacctgacaaatttcaaaggctgctacctgactaaccaactgcctattcagttctgaagaagatctacggaaggaacttcatttctgctgtttgcattggccatgattgggaacttcacgtatggacttggtgtggttttaaaggcaccagctgctacgtgtcacaagaatacttactttgtgcatcatcttccttggcttattgcaagttttggaatcttattccttaactcttttgtgtcttttgccatcagattgccattagagaataaacatgtatagctacttaatatatcacccaaaaagtacatatatatatatatatatatattctaagaagtgtaaatagctaatgctatagtcatttcattattatatttgaaatgttcatttataaggaaagtcttctctttcccaaagtctcctaattattattattctagcaaacgatcaaattcagatgaagatttcttggtttctttggttcttctgataaaaaaaaaaaagtggggccaagtttagaagcattgaaattaacacatcttagatattaaattttattaaaattataatagcagatattaagaaaaaaccataccatctctgaaaatctctacagagaacactttgaattaataaatgataactgatgccttgccttttgttg

SEQ ID NO: 199083 - DNA, 1396 bp, Homo sapiens
gagggacccggtccccgccccgcgtgctcaggctgaacagcttttcttccctgatctctcggaggcgccggctgctggccaacgcagggcagcctcctgcgtgcgtgctgtgggtttctccttcagtttcctctcattgcctgaggttgggcccgaacacggcggtacatttccttgagagtcttctacattcatgctgtagaagctatgaaagtcgtgggaaactatagagtcaacactgcaaactcaagcactgatacgtccggagagcacttgacctgccttagaagtcagctctttgtagcctacagaaatggaagagtggatgaagcagtctctctgggttttctggattgctggataggtggagacctgacaaatttcaaaggctgctacctgactaaccaactgcctattcagatttttacagccatcttcgacatgaacacggatgtaatcatactctcacaattcatgtactacaggttaaagaatcagaagaaaaaaatatattccaacctcagttattcaaagactccatcaccagagagaaagtcagattgtcactttggggagtcctctgccctgtatatatcccatattctttcagataagtgaaattagcatgcctgggtattacagttgtttatgccatactactataaatacttctaagagaagatttatcttgacttaagacttggaattttgttaaattaatgcacaaatgtatatgaccataacttaacgatgatttgtatattagctgagtcaagtggcatatataaaagcaatgaaggtttcttggacattctacactgaaatgtttagaatgtttaaaaaatttatctttctattttccaatagtgtggtaaatgtaaagtgcttagcactttgcgtgacacatggtagggcctcaaaaaatattagctattatcattataaaccagaggccctgttatgtggcagtttgtatctctctcttgactaatagaagcactttgcagatgatatgtcacacaatctagaaaggtagtgcttaaaggaatagacttatctccttattttacaaatgaggacattgaggccctaggaagttaaatgacttagacaaaatcacaaaggtaaagtggaaagcccaggagaaatcccctggccttcagcctgctgtgatttctaccaactatagattagaacttttcagacaagtggcacctgcaagtgtcttcgagcaaggcctcaacctccagcacagctcttgccacctgcaaacaccagggaagagcaagattgagttacatggcttggaagaagagtgaaacacctcgcaagacccagagaaaactccacatccatttgcagctaattttaaagcccaaataaaagcacaatcttt

SEQ ID NO: 199084 - DNA, 494 bp, Homo sapiens
ccaggaccaagctcagtatccagcattatgagatgacaattccaacagcaagccaaaaccaagctcagtatccggtatcacccagtgtcacatttcaacatttacacctggagcttaccataactccagaacccactatggaggctgagcattctataatgctgaggatgactacagctcctccaaaacaccctgaggtgacccttccaccttcagaccatgtgcaggctcagcacacaaacctgaggccacagtgcaacctttggatctgaaatttaccacgaatcaacaacctactacagagagtatattttctccaaccatggagaattcaactcagcttccagagccacctatggaggttgtaactcaacctccagctcattatgaggtgacagttccaatacaagatcaggatcaagctccgcattcaatactggccagtgtcacacttcaacctttggacctggggcttaccatcgctccagaatcca

SEQ ID NO: 199085 - DNA, 761 bp, Homo sapiens
cgtgtacatatttactgtttctctcaactttaagaactctagtctcacttcagatatattatacaaatcctaatcaagaaaaaaaaaaatcaatggattttccacttttaaaaatctttcttccctctccttttaggaaacgcagaaaaactaagctttctttcaataccaacaccaacaatgggctttcaataccataagcacatcaggggaattaaactcttccatggcagaaagaggagataatttaaaatgaaacctcagcctactcttcatagtctaccttaaatagttatactatgtttttaaaaagcaagttattactttagtaaccatttaaaagaaagtaactagaactattttgttataaagcatagctaagaaaacaaaatgtcccaatcattatattaacttacaaaagcatactaaattcaacttttgtatgtatctaatctgttcctttaagaattagtctaggccaggcgcggtggctcacacctgtaatcctagcactttgggaggctgaggcgggcagatcacaaggtcaggagttcaagaccagcctggtcaacatagtgaaaccccgtctctactaaaaataaaaaataaataaataaaaaataaaaaaaaattagccgggcgtggcagtgtgtgcctgtaatcccagctactcgggaggctgaggcaggagaatcacgtgaacccaggaggtggaggtttcagtgagccaaggtcacaccattgcactccaggccgggtga

SEQ ID NO: 199086 - DNA, 449 bp, Homo sapiens
ggtgacgtgtttcatggcatcagcaaggaggaccacagacactcggccccagccgccccgaggaatagccccacgcttggcccccctcccagcgctctcgcctgctgcgctgtcacctgctgcgctctcacctgcctccacacctcaccttgcaaatcttgcagccccatcattccccaaaacagcaaccacaactcctgggtttgtggacacacgcaagagtttctgtcctgcacccctacccccggccacagatggctccattagcgcccctccaagtgtctgcagtgaccctgactgcgaagggcaccgctgcgagaatggtgtctacgacccacagcaggatgatggggacgagagtgcagatgaggacagctgctctgagcacagctccagcacctcgacctccaccaaccagaaggagggcaagtactgcgactgctgctact

SEQ ID NO: 199087 - DNA, 2018 bp, Homo sapiens
aatggctggatgcatgtcagtgcataggatttgagtcattagtgtgccacaaaacattttaccaagaaatggtgcgtcatcaaatagttgaattacaatggtagctgtaaacgggacccaatttacaaaagtaaatagtgtccccttttacaagaaagaaaattaaccatgctcattcagattctgaagtttaattagctttaacttgctaaaagaaagaaattgaacaagtaaatagcatgtacttcaccatatatagcaaatcctgaatcactgccattttttatataactgacccacatgggttctttgctttttcttttatctgtttacctcagattttttttttttaataaaggactataatttgattggcttgtaaattcttcccatttctaacatgctataagactttaagcctaatttcctttgagccttaatcctcttgctaattgatgtgactgagttgtctggaatcaacctccttggtgcaaatgactgagactgtgacgttctatggaagcagtttggtccgggaatgaatcctttcattcagcaaacaaatgccatgccagctgagtcctgaaagagcccatgggcacgtaaaggaatatagttgttttacaacatgtcccccaaaattatttgacactcttctcattagcaagtgggactctgccccttccacttggatctgagctctgtaactgcctgccaatagaatatggcagaaatgacgcattgtatcagtttctgggcccagaccttaagaacctagcagcgtccacttcctgtctccttgtatgctcactcttggaacccagctaccatgctgtgatgaagcctaaagacccaagcagagaggaaccaacttgtcagctgtatgaatgagccatcttggaggtggattctccagttccaggagagctgccccagttaatgctacatgaaacagagacaagtcatcagtcatccatccccactgtgccctttccaagtttgtgagcaaaataaatgactgttgagttaagccatagagtttaggaatgatttgttgctggaacaaggaggtagacacataaacaattttgaagcaatgtagattacaatgacagtgatatttactacgtatcacaggaacactgagtcgagacacctaatccttccttcatcatcaaggaagactccctcaatgaatgagatggcaactgaactgaatctcaggttaaccaggttggagaataaagggtggcgtgttctaggcagaggggacaacagtgtgatcacaagcagagaggaaggaaacaacatggtgtgcagaaggaattatgagcacttaggtgttgctggagcttaaagctggaataggaagtactaattatgtagccagagataattggcaaaggttgaatcatgaaggcccgtgtttgccaggtgaagacatattgtgtacacacagcttgttattttcattattgttgtattgcattttggattgaagctgtctgatcaggtttgtgttttagacaaatccttctatcagcagtggggaaggtggatttcagggtatgaattctgaagcatgaagaccagtcagatggccgttgcagcagttcaggcaaggacaatgaggcctaaattaagactgcgagggtgaggatggggaagagaaactagagtcaagaaataggtggttttaaaaagaagtatttagagggtaaaaagaatactaactggccggatgtggtggctcacgcctgtaatcccagcactttgggaggctgaggcaggtggatcacaaggtcaagagatcaagaccatcctggccaacatggtgaaatccctgtctctactaaaaatacaaaaattagctgggcatggtggcgtgcacctgtagtcccagctactcaggaggctgaggcaagagaatcacttgaacctgggaggcggaggttgcagtgagctgagattgcaccactgcactccagcttggggacagagtgagactccgtctcaaa

SEQ ID NO: 199088 - DNA, 159 bp, Homo sapiens
gggccgggcgggcacccggcgggctgtggcggcgctaacaggtgcacctctctgcccgcagtgaccagctccgctgcacgacctggctgcacccgcgcaccggggagcccgtcaactcgggccacatgatccgctcaggtgggcgccgggccggcgggt

SEQ ID NO: 199089 - DNA, 165 bp, Homo sapiens
ggcgggacactttacctgagcattggtcctacggggtgtgccgggatggccgcgtcttcttcatcaatgaccagctccgctgcacgacctggctgcacccgcgcaccggggagcccgtcaactcgggccacatgatccgctcaggtgggcgccgggccggcgggt

SEQ ID NO: 199090 - DNA, 375 bp, Homo sapiens
atgtgataccaaacacaagaagccacacacaaatgactgcttattttatgattcccaaagctgataacattaattaatgatgttagaagtgagagtgatcgcccaggcatggtggctcatgcttgtaatcccagcactttgggaagccgaggcaggtggatcacctgaggtcaggagttcaagaccatcctggccaacatggtgaaaccccatctctactaaatatacgaaaattagccgggcatggttgtgggggcctgtaatcccagatactcaggaggagctactgtgaacctgggaggcagtggttgcagtgagctgagattgcgccactgtactccagcctgggcaaaaagagcaaaactccgtctcaga

SEQ ID NO: 199091 - DNA, 300 bp, Homo sapiens
aagataagaaaagttaagtgtattgagtgcacagaatactgttgattgtctctttcaattgccattccaatattctcctagcatatccctctaaactatcatggctggaaagctaaaaactccatttatcagacgccctttaagttatccagggttgtagatgggacttcggttctgccaattaggcgtgactgcaagatctgatatgggaaggaaatactcgagaagacaggctggctgtgggcatgcattttattggcttagttggtactgcgggcagcaagaccctccagtcagcag

SEQ ID NO: 199092 - DNA, 415 bp, Homo sapiens
ggaacagcaatagtgtgtaaacattagatgccattagaaccaaaattgaccataagaaccagagttcagaaaaatgactaactgctgtccttcattatgtatttccactcaacattagcatttatgaaacattttgcacattatcctgtcctcacccttgcaatgttacatttatataatctgtgtaagtgctccactgccccacagagtcataagtccctgggacttggtgatgtgcacagtgactggcacagagggtgagctctgtcgtgcttgggaagaaaaatggtcttcaaatgaatcttgccttgtcttgaaatgtataaactgccttttctagcaaaagcatagacactctttcccttggtgacatgtgctacgaattcagctgggttgaggatctgggctaaatgaa

SEQ ID NO: 199093 - DNA, 655 bp, Homo sapiens
tatcgaggtcactctaaggatcccgatcattgaggcagaaaactgacaaagatattaatgacctgaactcaatacttgaccatatggacccaattgacatctacagaacactccaccccaaaacaacagaatatacattcttctcagctgcacatggcacatattctaaagtcaaccacacaatcagatatagaacaatcctcagtacaatttaaaaaaaaaatgaaatcatactaaccacactcttggagcacagcaccataaaatttaaaccctaagaacattgctacattaacaagcaaagataatatcaaaacatttgtcaattaagttaaattaggaaaaacctataaagtttccaagagattataaaggacaaaagagcaaaaattttgccctactgaaaagttacatgatttatagtcatcataagccatccaaaccagtcttatttgctttagcttagtattgacaaaactgaagatgtttaacaaaaacagatataaaagtaagaggagaaaatctttaagaaatgctttgaggccaggaaggtggatcacctgaagttaggagtttgagaccagcctggccaacatggtgaaatcctctctctactaaaaatacaaaaaattagccaggactggtggcaggcacc

SEQ ID NO: 199094 - DNA, 273 bp, Homo sapiens
aatggtgtgttggactcccatgtaccctcaacccagccttatcagttttcaaaccatggccaagtaagaggcacttttgaaagagaacataggaggagttaccaaacagtaaaggcagaaattaaaagcaactgtgcctgctttgtttagaatacccaaaacctggaaacaatccagatgcccaccaataggtgaatgcatcaaccaattgtggtatatcttttcactggaatactattcagcagtgaaaaggaaatgaactatttatacata

SEQ ID NO: 199095 - DNA, 837 bp, Homo sapiens
ctcgctggttgctcagagctgggcagcagcgtaggtttagaatcaaaagacagcacagaccaccggggctgaggactctgtttttcttgtgggctgagttgttaataagtatggccgggtgcagtggctcacgcctgtaatcccagctctttgggaggccgaggtgggtggatcacgtgaggtcaggagttccggaccagcctaaccaacatgacaaaaccccgtctctactaaaaatacaaaaagaaacaaattagctgggtgtggtggtgcacacctgtggtcccagctactcgagaggctgaggcacgagaatcaattgaacccaggaggtggaggttgcagtgagttgagattgtgccgctgcactccagcctgggtaacagagcgaggcttggtctcagaacaaacaaacaaaaaaggtagtgtgacttctacatcgcataccattgtcttggttcatacaaagcgtctttctgaagaactgatggttttgctttggctcagtgaagtaaaatatggcctacctttaagaagttaagatagtcatttaactatgcttaattaggtttacttggggaaaagtaaaattacaaaacaattccttgcattcctcaccgttcctggttaatgtagtgtttaaatcgcgggagggccaactgcggtgaaagtctgtgaggaaggaggcggatgttcagcgcagtcacggggaacataggaacgatttccgtaaagcgctcagtttggaaaagtcaccctgagactccataccagacttctcctcatctttttcttttccgggtaaactgaactgtggtccctgggctgtgttttgaa

SEQ ID NO: 199096 - DNA, 466 bp, Homo sapiens
aacattgtattaatatataaagaaaagataaaagccactaaagccatgaaagaaagaaggataatgccatagaaaagactggaggtcctaacaccaacaccctaatgggatgttggtgactggagtcagtccagtggccttttgggtaacatcaaagtatagcctcagccagataattgccccagaacttccttccaattccatgcaatggctagacctccatgaagaaaactggattgaagcaaagccaacattcccaacacccaagggcgatgggtgattgacaaacccctccccagcaagcctgtcctctgaagacatgccattcactcttaactggctaacagaggcccaatgcctcatctgtttttggaaaaaaaaaaatctccatacaagaagccttggaatgaaagtgaaagaggtccactcttattcacccttctgccaatcccagatgagcccctgg

SEQ ID NO: 199097 - DNA, 290 bp, Homo sapiens
cattagcagcattaatggcaggctgggtccttactgtctatggttcaaatgtcctaaacacatttctactgactactggccattttatgcccctgaagaaatgtcctctactttttatggtctgaacacaaatcctatctaatatggaactgaaatccatgtctttatggtttccacttacttcctcactttgacttttggggacacagtgaccaagttagaggtttttgatacaggacagtctatcagttatgagaaactggctgccatacccacccaactcctttatt

SEQ ID NO: 199098 - DNA, 166 bp, Homo sapiens
gccgtgggaactgttcagctaacttcctaaggcttgttaaactgtcagcaccaagctgacttaatattccaggaagcatttctgtgattggtttggcttctgcatgaccagtaattgcaaaggtattagcagaaagggaagcttggactttgggattgttgaaatg

SEQ ID NO: 199099 - DNA, 562 bp, Homo sapiens
ggaatggtaacagctaccgcttagaaaaatagggcttatttaatcaatgcacagatgctaaagcagagaatgggcctcttctccaagtgatgttgaaggtacaaatcgtaacggtcaagtctacttggaagacgttttttaaaaaagatcatctctgctgtctcctactacatttggtgggtaaatttcagcaaggaagtttagttcctgacactcagaatgaagttggatttcaatttaaatgaaaaaggacccggtgtgtctttattctgtgctcagtacaactcctgttatgctttgggaaatgtccagagaggaggagatgggggtctttgctttaagaacttagtctttaacttggacgagacaattaatgcactatggataacttagagaacaataactagatccttgagcggaacagtcaagacagttaaggattaaatggtgtgatagaagcactaagcaccatagcattttggaaaaagacttgatttacttcaagtaccaggagattgggattcttggctaagggatctttaaccctacacttttctaccac

SEQ ID NO: 199100 - DNA, 274 bp, Homo sapiens
  misc_feature (32)..(32): n is a, c, g, or t
ggacatgatacgactcgagctcggaccggaanggtagctgtactgacttcattcctcctattttgaagttgaaagagatgcatttactttgttggaacaagatgtgttcttccaccggctggttaattgtcatgataacagtaattttgttagaagaaggtgctctgctaccatttgccaaaagattgtcataatgtacaattttcccaatgcaagggtcagcagattataataaaaatatgaaaatgtttcacagtaacaaaaatgctagtat

SEQ ID NO: 199101 - DNA, 371 bp, Homo sapiens
ggggtgggtaaggagtccttgatgtcctgtaaatgaaggaaccaaatggagttcctccggctttctcagctaagggagagcttattcacatggaaacaaggctaggtgattaagggagaaagggacagtctgaaaacaaggttagtaaaaacaaggttaggtattagaactgcaaagagtattaagtgaaataagtgaaggaaaatatgagctcttatttttaaaaagttgtgttggggcaaatgttaaatatctttctttctctggacattattaagaaagatagagtgatgtgaatgataggaagcccacctgtaaccacttagctgacatgtccaactatgggtgaacaggaaataagcgacattcac

SEQ ID NO: 199102 - DNA, 455 bp, Homo sapiens
aagcattcttatgtgcccagctcagtggtggtcacttggtggaagaatatgatctatcaccaaggagttactacttagtttgggaggaatcttaagtaacatggaataatttggtctatcttagccccccaaaagattgctttcatttatttatttagccacgctttggcataattctttaacttgctattgggagatattttggttacccattgtcaataatggggcatagtgaatcttccccaaactctgtggcatgcaacagtgaacatatatttagctcatgcatctgcgactggggggtggctgaacccagctgggcttgcttatgcaactgcaggtcagcagggggtgtgctgagctaggctgggctcagctgtgtggttctgctgtaggctacaggtctgtgggttaagttgaatgagcttgactccaggtatttttttaccttcttt

SEQ ID NO: 199103 - DNA, 592 bp, Homo sapiens
acagctgcttttacgactctttcatgttctagcagacgccagatgcgaggcttctccttacagggaagggttatgtttgatttatcatacatttctggagtttttgtttagtttttgttaaatgcaaagctctgtgctggacattgtgagaaacaggaagttgaacgcccataaggagtttagaatagaagtggaagaagtcagtaggtgcccaaatgctatttgaggtttgaatagagaatgggtagaggggagtgtcaagggtaggctaagtttggagttacctaacctcaaagttccaaactgggagactggtgttataattgggagctactgcttttacagtcccctcctaagtgccgtgtgttcccgggacattgggaagcaggagaaaatgggtggtgaaagccaggtggcttctaagatccatgtcagttctaacacttttgacatctacgaatgattcagcatggttgtctctgaagcatgctgcaaatcacctctcgtagcctgcaagtacctgtaggggctaagctttgtagatgccacaggtgctcttagaaagcaaggaaagaaagaagagagagaagaa

SEQ ID NO: 199104 - DNA, 744 bp, Homo sapiens
tgatgaaacattggtagtcagttaaaggtacccattaagaggacccatggaagaaattgctgtctagtcttaatattagaatagttgggtttctccagagcagatgcagtgtatattatacagacagtgaagcgtatagccagtggtgttgtttatgcaatggctgtcagaacgctgaggatcagatttttgacccacttctaacaaatgtgaaagacctatgccatgcatgttatgtatttacagtactcatagtttcatcttctctaccttcattttcctctggtcatatcaccacccatttttccataagcatcttttaatgggaaaaaagtgatgcataaataaggttttaaataaaaatcaactctttaatacttgaacaaatatgttctaagtagttaattgtggaagtgtggcagaccagtctctttcttgttcactttgtctttttgctgctttgcccatcgaaggtgctcaatacatattgattgtgttgcatggagttgctgtaagaatctaattttgatgctatagttctctctcaaagaaagatggtagtactgaagttactactctcctcactcacttatggaagtggattcctcttttcttcctgctgccctcacctgctctaaatcttcctatttccttgctaccccatccccacctgagttaaagtatagtttgcatcaactaccaagccctgtaaccatttgttctgagagtttcctgtgtcataaa

SEQ ID NO: 199105 - DNA, 209 bp, Homo sapiens
tgacatccactcaggctacagcagcaagtgtagttgctcacacagagtactaataatgtcattttacacttaaacagtattttcatgcacagaccactttcatataaatcaaaactgagctaaatcgttccaagctcctgagaaaacttgaggcttggaggggtgaagtacttcactcaaggctgtggctaggaccagtgacagtacaa

SEQ ID NO: 199106 - DNA, 292 bp, Homo sapiens
aggctcttcttccccagtcaccttactctcaagccagaggggttgaggaagccccatcatagaacctagtcatctcttaggtggaatggcctctgagacaaaacattaaagaggatggggagtacatcttgcttcttaataatgttattgataccagagctgtattttgacattatgcaaaattgatactgagatgccagcaaggtcattttatctcagttttgcaacagctaatttgaaaccatgggcacggtgagcagactgcatgctgtcactggtcctgaggacattg

SEQ ID NO: 199107 - DNA, 319 bp, Homo sapiens
agaaaatgtctgccaaattactcaggtgtgaatacccattgtttgaccatcagtaatgctttgaagtaaaaacggtgttctgtgaaaaatgaagctagcttctgtcttctcttgggactccaatcatttatgttagaccttactggccatgttctactgatttatcatgctttttctgcattttccagccttttatctctctgtgcttcattctggatattttctactgtccaatctttcagttcactaatcatttctttagctggtctactactgcaaactcaccaactgagtttcttgatttcagtgattttttgtt

SEQ ID NO: 199108 - DNA, 532 bp, Homo sapiens
atgatatgtttccttttgttcattttgtactgggttgaatatcgtcccccataatttcatgtccgcccaaaacctcagaacgtgaccttatttggaaatagggtcatgtagacatgattagctcaggtgaggtcatattagatagagtgagccctaattccaatgactggcgtcctcaccagaaggccacgcaaagactcagagacaggaagggaggccacgtggccacacaggcagagactggtgtgatgcagccaccagccaagaacagcggcagcagcaggagctggaagaggcaaggaagggtctgtccccggagcctgcagaggaagtgtggccctgctgacactttgactttggacttctgacctccagggatgtgagagggtaaattcctgttgtttcaagacacccagcttgtggtaccatgttacagcagccccaggaggctaatataatcctttcatttttgttttgtgttatgtttagacttatgaatataaaacaaatacaataaaaaaataaatgatct

SEQ ID NO: 199109 - DNA, 258 bp, Homo sapiens
tgtttaaagtatgtttccaaccactggtcttggcctggtcagagggtgttttgtttaagtggccaattcctaaacaatagtggattccagaatgggttgactttcttacagagtgtgtgcacttgaagatttcagctagtctctcaaaatgttagtaaaaggccggcctctcaccaaatgctccacgcagagccagtggtcccagaacttgctgagtggcaagaggagacttgtcttcaagtaagggacagccttgaa

SEQ ID NO: 199110 - DNA, 499 bp, Homo sapiens
caaacactttctgattgaaaaattatcagagactttaaagtataacagtattgatttaagagcaaccaggtctgcacatttgtaagatgacaagcaagttgtaggctgacaacttgctgcagtgatttgaatgatacagacaaggtagctgattaacatttgctgaggatttactctacgtcaggcatgatgttaaagatttcacatgtaggccaggcacggtggctcacccctgtaatcccagcactttgggaggccgaggcgggcggatcgcaaggtcaggagatcgagactatcctggctaacacagtgaaaccccgtctctactaaaaatacaaaaaaattagccaggagtgttggcgggcgcctgtagtcccagctactcgggaggctgaggcaggagaatggcgtgaacccaggaggcggagcttgcagtgagccgagatcgcgccactgcactccagcctgggcgacagagcgggactccatctcaaaaaaa

SEQ ID NO: 199111 - DNA, 526 bp, Homo sapiens
gattagacagactacatagataaacagataggtagattagactagatagatagatagatagacggatagataggtaaaaacagacagatagcacctgcaaaagactggatcataagaactgcaaaggtactgtagctttcacagaaagaaacatctatgcttggcaattgaatttactttctgaaatcttggagaagtatgatgaaggaaggaagtatctagtttgagtcataaatgggagcagaaaaagaacccaacgatctccaagtcctccaaatgctgtgcagcggataacagactgtcctcatctggattaactggaaatttggcacacgttcgggggtcaacagctacggctggaaacgaagccagggttcatacgagggctcactcacgtcagtcaaagagaccttttcttgcacctcttcctaatcctattagggctactcatgttttaaaatgttcatcccgtctcagtttcgctggaagggggacactccaatgcttctgacacgaaaacatctca

SEQ ID NO: 199112 - DNA, 268 bp, Homo sapiens
gaacaccaagtctgagatgctcgggactgaatatgcctcttacatatttatacattagtgattttctcctttccaaatcgggccatctatctttagctgtgacactgaacgagccaccaccgcctcccttccccagtgggattgaacatgcacttcctcttacacaaagcacaacagtcctgaccaggcaggacgggggctgtgtgcagagacgctccaggctggaagttggaagtggtactgcacagctttcctatgtgattttctc

SEQ ID NO: 199113 - DNA, 403 bp, Homo sapiens
agttttcaacccatgatactaattttgttgaatataattaattgtcattcatacagaacatttggggaaaggagtattttgatttactggatattctcagagtcagtaaagaatgacagtgggtaatatgtgtggatcacagattctgatcaagtagaatcaatcgcataagacactgaaatgtggctggttgtgctggatgctccatttgggatggtccatcacaggctcgctgagcatccaacgagggccggtgctgtgttgggcacgctggggaggccagaaacgcatctctggttcttcccaagtcatgtcccgctgttctgatgtcagctgaggagctttcacttgcctttcttggaagagcatgacacatattcagtaaaaccagctgttgagcccc

SEQ ID NO: 199114 - DNA, 377 bp, Homo sapiens
ctctgtggtcagaattccaatatctcatgtcattgtcaatgctaacttggacttcagcattatcccaccatcatgggtttttccttattgacctgtccagctcttttttttcttgtcatttcaaccttggcactggaagccagtcacggacacacacacatacacatacacagctattcctggaaacacagggctgagattggagtctgctgggactagggagggagaaactatgcaaattagataactgtaaagcaaatactgtaataacttgaagtttgtgctaacacacatttccaagacccggacagtccccatggaaacaggactttgctgttgcagttacatcagaattctcttaggtaagtatcagtaac

SEQ ID NO: 199115 - DNA, 399 bp, Homo sapiens
tagtaacaaaaataagaatctaaagtatcattaaccataataatctaagaaataagtaaaaatgcaaagtcctaattacgcctagaagctaaaaaacacaatctgacataaatatctaatcagcaatatgctcgctgtataaagctcttgatgtcgtcccatgaagttgaaggaaaggcaggttcagataaccactgaaagtcattatccttgtcacagcaataaaaataatcaaatgaaggcttatttagctatatttttatatcgcagttaaacattgaacaagataagattgaactgcacagatccctttatacacagatttttcttttgcctctgccacccctgagacagcatgatcaacctctcctcctcctcaacctacatatataaagacga

SEQ ID NO: 199116 - DNA, 541 bp, Homo sapiens
  misc_feature (40)..(40): n is a, c, g, or t
  misc_feature (194)..(194): n is a, c, g, or t
  misc_feature (494)..(494): n is a, c, g, or t
caagtatttactgaatgccttctacttcaggtatttcccntaaatgctgggagtgcttcaaaacagatttgattcttgctttcatggagttcacgatctatgagtgagacagacattaatcaagtaaaaaagtgataatacaattataaattgtgaacagaacaaggtgctgtaaagtagaatgacagggtganggggtgttcagtctataaattagatgatcagaaatggcctttctggtgaacatgacattttcatttgatcagattaagaagtcaaccttgtgaaagtagggaacaagttctccagccagagtgagctgtttcttactaatgtgactggcttgttttatcaaaatgaatcataatgtttagttggtacttcatcagtactcaatacatatttacttattgaatctaatgattagattctgcatgctcttccatctctcttataaaagggcttcgtgttggactatggtacaattaggcacntttaagaaacaacaaaatatttttgaagtaagttctacgtatttatt

SEQ ID NO: 199117 - DNA, 155 bp, Homo sapiens
aattataatcgccgatcactttttccattttaacataatgccactttgcagaaataattccaaaaacactaggatttatggggtaagaagagggacagaactgctagttccaaacagccttgccatgcacactcactgacgcacactcacacaca

SEQ ID NO: 199118 - DNA, 672 bp, Homo sapiens
cttgtaatcatctataaaaaattaactaaaaaatggatcatggacctaaatgtaaagcctaaaactataaaatttctagaagaaaacacagaaaaaaatatttggccttgaatatcatatcaaagatttttttatatctgacaccaaaagcatgatccataaaagaacaaagttcttgtacatgagttccttatgtattctggatctcaataaataaattggacttcatcaaaattacatacttctgcactttgaaagacactttaaaaaataaaatgacaagccacagacagggagaaaatattcgtgaagaatatatctgattaaacatttatattcagaataaacaaagaactttcaaaactcaacaataagaaaacaagcaagctaataagaaaataagcaaagatctgaacagacacatcaccaaagaagatatacagatggcaaataagcatgtgagaaaatgttcaacatcatttatcattagggaactgcaaattaaaacaacattgaaataccactacatacctaatagttaatgtccaaagcatagtaccaaatgctgatgaggatatggagcagcaacagaagttctcattcattgctggtggaaacgcaaaagggtaaagcaactttggaagacagtttggcagtttcctaccaaattaa

SEQ ID NO: 199119 - DNA, 360 bp, Homo sapiens
tgataatattctggggttctttaagtatggattacacaggtacacccacttgttaaaattcattgtgctgaacactgaagatactatgctttatatgtgttatacttcaagaaaaagtatacccaagggaaaaaaagtaattctaaatacagaaaaactctatactaaaactttcatttcaacactaaagggagcatgctttaaaattagtatgtgcatatatattatatgtaattatacatatacataaataaaacattagacagtcaaaattatatctacactaaacactttataacaatgtgttgtccagctgttaccctctccctcatctgttatattgtcttggacttaatctcc

SEQ ID NO: 199120 - DNA, 379 bp, Homo sapiens
atacctcttcccctctctgggtaaccaggatgaaaaaccctatagttggcatggaaaagggcttccaatctaccagtcctctgcctatggcagacattaccaatccatcaccattttctaattccacacaggtggcaggcagacattgctaatcaatctgtgtttccagtcctgtggccaaggcagacattactaattgatcactgtttttccagtctacactgaggcaggcatcatcagttgatcagttttccctcccactgagcctctgaatcctccataacacagaggtaccaacagcacacacagcagtgtcacctcagtttgcctgtctgagttaccatttctcatctgggcaacatagtgagaccccatctca

SEQ ID NO: 199121 - DNA, 202 bp, Homo sapiens
atgttccttcaccatttgggagggcaccctctagaatagtattgggaattacatatttgtaagggatttgaatgtgtttttaaaatcttctcagagcttataatattagataatattattagataaattatcacaagggtccatcagcaatacaatgggggcaaatattcaagcccatcctgatcaacgggtgtaagtgttc

SEQ ID NO: 199122 - DNA, 360 bp, Homo sapiens
aaaaaatattaacactatgtgtaatagttatcccagtctgtcatttctctttaacttagattatggtatcttttgtggtgcatattattttatttttttatgtagtcaatactaatattattttcctttcttgtcatgcttccccacacctagaatttttatggcataactttgagaatacaatgagaatttattgttaggggtgatacaaggattctagttatatttttcataactagaatttattgttaggagtaatacaagaattctacttatatttttcataaaatgccttggtagttgttcctaaatggaataaattcaccttttccccactctttgaaatgtggcctttatcat

SEQ ID NO: 199123 - DNA, 673 bp, Homo sapiens
ctttaaattaattcttccccacttttgattccaaaaccaaagattgtcttttcttaatctctaatccagtacttggttctggtttttgaatacatgacagttcttccattttctcaatgcactgaccactaagaagctcattttgctatgatgagccaattcacacagagctcagagcaatagaaaacattgttttcatttaggttcacttaggtgtttatgtcagcttgcatgatatgtttatatgaaaggctgccttttggtgaatgtaattcccttgaaatatcctattgaggatctataactattatttttataatgttatcgccttgaattctgagaaagaaaaattcagattggcagaattctaaccatataggaagttacccatggtaatatattgttatttaatatacattaaatattgatacaataacatattaaatgaaaggtctataggaatctggaacttttttgttccatatctatcttaccacctacctccttccctgaaaattttccatctgtcattcaatattagaaaataatataaaatgttctgaggctgggtcagccaatgcgcaaaaagttaactctccttctttgctctaaccttagcagagagagatctactagttcagtcataatatggtgttgggaaggtagccaagtg

SEQ ID NO: 199124 - DNA, 442 bp, Homo sapiens
gggccgggtgtggtggctcacgcctgtaatcccagcactttgggaggccgaggcagatggatcacgaggtcaggagatcgagaccatcctggctaacacggtgaaaccccatctctactaaaaatacaaaaaattagccaggcgtggtggtgggtgcctgtagtcccagctactcaggaggctgagggtggagaatggcatgaacccaggaggcagagcttgcagtgagccaagatcacgccactgcacttcagcctgggggacagagcaagactctgtctcaaaaaaaaaaaaaaatatgcccacactggaaaacagttttttaaaggagatacaacactatgaaccagcaactccactcctaagactgtacccaagaaaaatgaaacgtgtgtccaaagacttgcacacaaatagagtagcatttttcacagtaacccca

SEQ ID NO: 199125 - DNA, 252 bp, Homo sapiens
aaggtctaggatccgcctattagacatcttctctgatccttgagaaattttaaaaggggctatttatgacttggcaggatatcgaagaggagactgaactactgggggaaggatgggcggaatgaacttaaaggtgccgttgaccttaggaatctgtgactctaagagtttggtgctcctgtaatcagggacgttggtcagagggtagcagatttgctggctggcctgatgtctgatagggaggtggatgcc

SEQ ID NO: 199126 - DNA, 497 bp, Homo sapiens
tgatccttccatctcagcctgctgagtaagtggactacaagcacacaccaccgcacccggattattattttttttaaatttatttttattattttttgagatagtctaactccatcacccagggtggaatgcaatggtgagatcttggctcactacaacctctacttcccgagttcaagcagttcttgtgcctgcaattacaggtgctcgctaccacggccaggtaagtttttgcatttttagtagagacggggtttcaccatgttggccaggctggtctcaaactcctgacctcaagtgatccacccaacttgccctcccaaagtgctgagattacagacatgagtcaccgtgcccagccatacccagcttactttttaaatttttcatagacatgggacttcaccatgttgcccagtctcgtcttgaactcctgaacctcaagtgatccacccgccttggcctcctaaagtgctgggattacagacgtaagccat

SEQ ID NO: 199127 - DNA, 419 bp, Homo sapiens
gggatggccagtcacttgtgacctactttcagagctggcagttctgacttctagaacaaactcggaacaagcccatctacagctggttgactgagtttcctttgggctcctggcaccagaaagaattgctcactggaaggatcataggtggcactcatgtctcactgccccactcagcttgcctgtgtggactcctgcctgctctctgtgccaggatcccgtgacatgaaacagaataagtgcttcataaacgggagtgacactaggcgtggtggcatgcatctggagtcctagctacgcgggaggctgaggcaggaggattgcctgagcctaggagttggaggctctaatgcacttggatagcacctatgaatagccagtgccctccaacctgggcaacatagtgagctcttgtcaca

SEQ ID NO: 199128 - DNA, 478 bp, Homo sapiens
agcaggacagagaagaagctaggttcactacccacacccactttaacaggagtaagccagcttttgttggttttatattaatatgacaaattcacttaaggcttagtccccgaaaccagaggcttgtttcaaccacttttaaaagtttaaaaacttattttacagataagaagccaaatccaaagataaaaaaactggctaggcatggcggttcacacctgcaatcccagcactttaggaggctgaggcaggaggattgcttaagcccaacagtcgagaccagcctgggcaacacagcaaggccctgtctctacaaaacacatgaaaattagccagcatggtggtgggtgtctatggtcccagctactggggaagctgaggtggcaggaccacttgagcccagtaggtcaagggtgcagtgagctatgatggcgccactgcactccagcctgagcgacaaagtgaggctctgtctcca

SEQ ID NO: 199129 - DNA, 444 bp, Homo sapiens
ctggtagcttgaatgtgggatatgacgggcagaaggagggcgtagcaggggaaggaaataaagtggcttgttctgtatgtgactggagcccagctccttgcaccaacccgggctcctgcacccctcagcaggcccagggatccccaccgccaggccggagccaaccccatggaacccaaagtgctcaagctccccagtgaatgaggctcttaatgtatcaccgcccgtcaggcctggcctggcatccgggtttctccacctgcggggtgcaggggccacattggtgggttccagattccaagttccagtatttggaggaggtggcagaggagggcccccaccccaccgttttcatctttcacccaagatttgcacaggtttcattttaatgacagtccactgtctgtttgttagttagctttgagatagagtctcactctgttg

SEQ ID NO: 199130 - DNA, 473 bp, Homo sapiens
gtgagtggatcctgtaagatcctagtttttgtagctgggattacaggtatgcgccaccttgtccggctaatttttgtagttttaatagagatagggtttcgccatattgcccagactgctctcgaactcctgatctcaaatgatccgccgttctcagcctcccaaagtgctgggattacagatatgagccaccgagcccggcccaaagggttattttctgagtgcacccatgatgtgagaaaagttgttaagccctgactttcaaatttctcttcctggaaactgacctggattttactaatgtcctatctatggcagagtctggagtgaaccgaagactaagcataaatgctgcaggtcaggggctgtttcttatgcctgaacatcgcggggccttggacaccgtctttccaaatcaagacagcatagagcacaagtgctcagagggaatgagcgaggatgcagctggctgc

SEQ ID NO: 199131 - DNA, 446 bp, Homo sapiens
tcatggtgctttattttcctgcgaactttgtaccttgaaaccgtcaactcatatttctcgaaactttaactttttttctttgagtaaagatgaacgcccaaggaaagatatgcttttttttttcttctgaaaagtaacataaattaaggctacttgtgatcataatttgttagaaaaaatttttttggcttttccactcagcacccaaggtttgacactggcaattttccatgcagtccctggggtgatagatttattttcaccttacagaaaggtgtagtccatggggttccagctttatgatgaagtttcctaattaggcatcccatatcaggtggaccctgggttttgtctactataactcaaagcaataccaattacagtatcatcataacatttaagcattaacgataattatgacattatgatgagtgaaagaagcagtt

SEQ ID NO: 199132 - DNA, 728 bp, Homo sapiens
ttctcagtcctggcaatcaatcaatctccccactcaggacaggaccccctctgtcctcttctaccttctactgcactgtcgagacaagcttctgtgacttcatcagtgctgagaaatgtgaaagacgtgccacggcacaggtctactgagaacagggaaaggccaatgttctcaacagaatgtggctgggagaataagcaccatcaacaggttaggtccttaaagctaccaggtgccatcccccaagtccctggaagaggggctctcacatccccccgcgccactcaatgacgagtcactgccccctacttattcccacaggcagatgggaccaccaggtgctggtcctgttgctactttccacagcaggcactcaggtttcagccagccccagcccgagcccccaaccacacctctgataggaaaacaaaccctgagttttaaacaaattggaacttgtaaaaatgtagcccatgggtaaactgggcattttctgagaattttgtttcataaaatatgtatataagaacttagagtttcaatttctttaacttgtctgggtatgaagttcagcagtctccatctcttagaagtagaaaccaggcagggtgcagtggctcatgcctgtaatcccagcacttccagaggccgaagtgggaggatggcttgagtccaggagtccaagaccagtctgtgcaatatagtgaaaccccatctctacaaaaaaa

SEQ ID NO: 199133 - DNA, 1071 bp, Homo sapiens
aggagtcggcggcggcagggatgtgggaaatgtagttgggagactccgccctcctcgccattcctgtaatggctgcttcctagaaggtcgtgtcacgtggaacctcttaatctcagcatccggagctccaggaagggaaaatttcaagtcagatagaattctatatataccatttctttggaaccttcagccctcaagattccaacatcatgacctcagtttcaacacagttgtccttagtcctcatgtcactgcttttggtgctgcctgttgtggaagcagtagaagccggtgatgcaatcgcccttttgttaggtgtggttctcagcattacaggcatttgtgcctgcttgggggtatatgcacgaaaaagaaatggacagatgtgactttgaaaggcctactgagtcaaacctcaccctgaaaacctttgcgctttagaggctaaacctgagatttggtgtgtgaaaggttccaagaatcagtaaataagggagtttcacatttttcattgtttccatgaaatggcaacaaacatacatttataaattgaaaaaaaaatgttttctttacaacaaataatgcacagaaaaatgcagcctataatttgctagttaggtagtcaaagaagtaagatggctgaaatttacataagtaatatttcataatcttagaattctctcaaagcatgtgaaataggaagaaggaagttcttgcccagaatcttaggaaatcaccactgttcggttataatcactgcctcctgaatcgttgaggagtcttttaaattagatttttgttttgttgtctcccaagttaatattatatttagatatcagagagtcaggcaaaaaggaaaacttttatctctagggaaaaaacatttagaaaaatgtattcagtgtatctaatactgaaatgcggaaaaaaatttaatgttaaaaaaaaaactatagacattgacatggaaaagagatttaatgttttgaaaaaaaactttatattaactgagtaacatcctcctgatgagaagtactatattaaatataaacccattatgttataagttaa

SEQ ID NO: 199134 - DNA, 441 bp, Homo sapiens
aggagtcggcggcggcagggatgtgggaaatgtagttgggagactccgccctcctcgccattcctgtaatggctgcttcctagaaggtcgtgtcacgtggaacctcttaatctcagcatccggagctccaggaagggaaaatttcaagtcagatagaattctatatataccatttctttggaaccttcagccctcaagattccaacatcatgacctcagtttcaacacagttgtccttagtcctcatgtcactgcttttggtgctgcctgttgtggaagcagtagaagccggtgatgcaatcgcccttttgttaggtgtggttctcagcattacaggcatttgtgcctgcttgggggtatatgcacgaaaaagaaatgggaccagaaaatggggtttttgggggaaaaaccccccctttttttttttttttttgggggggg

SEQ ID NO: 199135 - DNA, 1030 bp, Homo sapiens
  misc_feature (1030)..(1030): n is a, c, g, or t
aggagtcggcggcggcagggatgtgggaaatgtagttgggagactccgccctcctcgccattcctgtaatggctgcttcctagaaggtcgtgtcacgtggaacctcttaatctcagcatccggagctccaggaagggaaaatttcaagtcagatagaattctatatataccatttctttggaaccttcagccctcaagattccaacatcatgacctcagtttcaacacagttgtccttagtcctcatgtcactgcttttggtgctgcctgttgtggaagcagtagaagccggtgatgcaatcgcccttttgttaggtgtggttctcagcattacaggcatttgtgcctgcttgggggtatatgcacgaaaaagaaatggacagatgtgactttgaaaggcctactgagtcaaacctcaccctgaaaacctttgcgctttagaggctaaacctgagatttggtgtgtgaaaggttccaagaatcagtaaataagggagtttcacatttttcattgtttccatgaaatggcaacaaacatacatttataaattgaaaaaaaaatgttttctttacaacaaataatgcacagaaaaatgcagcctataatttgctagttaggtagtcaaagaagtaagatggctgaaatttacataagtaatatttcataatcttagaattctctcaaagcatgtgaaataggaagaaggaagttcttgcccagaatcttaggaaatcaccactgttcggttataatcactgcctcctgaatcgttgaggagtcttttaaattagatttttgttttgttgtctcccaagttaatattatatttagatatcagagagtcaggcaaaaaggaaaacttttatctctagggaaaaaacatttagaaaaatgtattcagtgtatctaatactgaaatgcggaagtatgtagtcgactacatactccgaattctaagtataattaaattggaaataccatttataattatattaggtaatcagagacaaatactttggaatacatttn

SEQ ID NO: 199136 - DNA, 1159 bp, Homo sapiens
aggagtcggcggcggcagggatgtgggaaatgtagttgggagactccgccctcctcgccattcctgtaatggctgcttcctagaaggtaatgtacgaactcgtctccaaaggatacttaggttgcaccagtgtatttgtaaaacaggagcaaatttggaccttgccgggccaaagtcgtgtcacgtggaacctcttaatctcagcatccggagctccaggaagggaaaatttcaagtcagatagaattctatatataccatttctttggaaccttcagccctcaagattccaacatcatgacctcagtttcaacacagttgtccttagtcctcatgtcactgcttttggtgctgcctgttgtggaagcagtagaagccggtgatgcaatcgcccttttgttaggtgtggttctcagcattacaggcatttgtgcctgcttgggggtatatgcacgaaaaagaaatggacagatgtgactttgaaaggcctactgagtcaaacctcaccctgaaaacctttgcgctttagaggctaaacctgagatttggtgtgtgaaaggttccaagaatcagtaaataagggagtttcacatttttcattgtttccatgaaatggcaacaaacatacatttataaattgaaaaaaaaatgttttctttacaacaaataatgcacagaaaaatgcagcctataatttgctagttaggtagtcaaagaagtaagatggctgaaatttacataagtaatatttcataatcttagaattctctcaaagcatgtgaaataggaagaaggaagttcttgcccagaatcttaggaaatcaccactgttcggttataatcactgcctcctgaatcgttgaggagtcttttaaattagatttttgttttgttgtctcccaagttaatattatatttagatatcagagagtcaggcaaaaaggaaaacttttatctctagggaaaaaacatttagaaaaatgtattcagtgtatctaatactgaaatgcggaaaaaaatttaatgttaaaaaaaaaactatagacattgacatggaaaagagatttaatgttttgaaaaaaaactttatattaactgagtaacatcctcctgatgagaagtactatattaaatataaacccattatgttataagttaa

SEQ ID NO: 199137 - DNA, 1437 bp, Homo sapiens
aggagtcggcggcggcagggatgtgggaaatgtagttgggagactccgccctcctcgccattcctgtaatggctgcttcctagaaggtaatgtacgaactcgtctccaaaggatacttaggttgcaccagtgtatttgtaaaacaggagcaaatttggaccttgccgggccaaagtacgaattctttttcaaatcttaatatcaagtcctgaaatgaaattatctctgttctgtttctttttaccttttcttgtgtgggtgaactgaccaacttttaagtctagttccctgttggacagacttttctcaactcattacctatccccctaccgtccatatggcctccacgctctgcactgactctagctgcctctttaaaataataatagtaataataattaatttttaaatccttctctccgccccctccccaccccccatgctaataataggtcgtgtcacgtggaacctcttaatctcagcatccggagctccaggaagggaaaatttcaagtcagatagaattctatatataccatttctttggaaccttcagccctcaagattccaacatcatgacctcagtttcaacacagttgtccttagtcctcatgtcactgcttttggtgctgcctgttgtggaagcagtagaagccggtgatgcaatcgcccttttgttaggtgtggttctcagcattacaggcatttgtgcctgcttgggggtatatgcacgaaaaagaaatggacagatgtgactttgaaaggcctactgagtcaaacctcaccctgaaaacctttgcgctttagaggctaaacctgagatttggtgtgtgaaaggttccaagaatcagtaaataagggagtttcacatttttcattgtttccatgaaatggcaacaaacatacatttataaattgaaaaaaaaatgttttctttacaacaaataatgcacagaaaaatgcagcctataatttgctagttaggtagtcaaagaagtaagatggctgaaatttacataagtaatatttcataatcttagaattctctcaaagcatgtgaaataggaagaaggaagttcttgcccagaatcttaggaaatcaccactgttcggttataatcactgcctcctgaatcgttgaggagtcttttaaattagatttttgttttgttgtctcccaagttaatattatatttagatatcagagagtcaggcaaaaaggaaaacttttatctctagggaaaaaacatttagaaaaatgtattcagtgtatctaatactgaaatgcggaaaaaaatttaatgttaaaaaaaaaactatagacattgacatggaaaagagatttaatgttttgaaaaaaaactttatattaactgagtaacatcctcctgatgagaagtactatattaaatataaacccattatgttataagttaa

SEQ ID NO: 199138 - DNA, 1041 bp, Homo sapiens
aggagtcggcggcggcagggatgtgggaaatgtagttgggagactccgccctcctcgccattcctgtaatggctgcttcctagaagcatccggagctccaggaagggaaaatttcaagtcagatagaattctatatataccatttctttggaaccttcagccctcaagattccaacatcatgacctcagtttcaacacagttgtccttagtcctcatgtcactgcttttggtgctgcctgttgtggaagcagtagaagccggtgatgcaatcgcccttttgttaggtgtggttctcagcattacaggcatttgtgcctgcttgggggtatatgcacgaaaaagaaatggacagatgtgactttgaaaggcctactgagtcaaacctcaccctgaaaacctttgcgctttagaggctaaacctgagatttggtgtgtgaaaggttccaagaatcagtaaataagggagtttcacatttttcattgtttccatgaaatggcaacaaacatacatttataaattgaaaaaaaaatgttttctttacaacaaataatgcacagaaaaatgcagcctataatttgctagttaggtagtcaaagaagtaagatggctgaaatttacataagtaatatttcataatcttagaattctctcaaagcatgtgaaataggaagaaggaagttcttgcccagaatcttaggaaatcaccactgttcggttataatcactgcctcctgaatcgttgaggagtcttttaaattagatttttgttttgttgtctcccaagttaatattatatttagatatcagagagtcaggcaaaaaggaaaacttttatctctagggaaaaaacatttagaaaaatgtattcagtgtatctaatactgaaatgcggaaaaaaatttaatgttaaaaaaaaaactatagacattgacatggaaaagagatttaatgttttgaaaaaaaactttatattaactgagtaacatcctcctgatgagaagtactatattaaatataaacccattatgttataagttaa

SEQ ID NO: 199139 - DNA, 1531 bp, Homo sapiens
aggagtcggcggcggcagggatgtgggaaatgtagttgggagactccgccctcctcgccattcctgtaatggctgcttcctagaaggtcgtgtcacgtggaacctcttaatctcagcatccggagctccaggaagggaaaatttcaagtcagatagaattctatatataccatttctttggtaagtcttattaattccccacaacttcgcagagttatatgttgtgtgacttttgccaaatttgtctgcatttcttggatgggagagaccctaagaaaatgtacaatttttacccactaggatattttaagtttccaagttagtggctcgtgctttttttctgtttgttcttaattatgaactcctgttcaatttttgtttggttgatgcacgaggtgttggcattatcgtggaaaattcctgggtttagagtgttatcacgagatagggagatgaacctcaaattactgtctttaacgtccctctgtttttccacctataagatgaggagatggattggaaatgattcataaagtatccaaaagattggctggcctgttatttgtcatgtgttcattttgtcatttgaaaagggaggaatttttaatggttcctttttgtttccatgtttaatttctaggaaccttcagccctcaagattccaacatcatgacctcagtttcaacacagttgtccttagtcctcatgtcactgcttttggtgctgcctgttgtggaagcagtagaagccggtgatgcaatcgcccttttgttaggtgtggttctcagcattacaggcatttgtgcctgcttgggggtatatgcacgaaaaagaaatggacagatgtgactttgaaaggcctactgagtcaaacctcaccctgaaaacctttgcgctttagaggctaaacctgagatttggtgtgtgaaaggttccaagaatcagtaaataagggagtttcacatttttcattgtttccatgaaatggcaacaaacatacatttataaattgaaaaaaaaatgttttctttacaacaaataatgcacagaaaaatgcagcctataatttgctagttaggtagtcaaagaagtaagatggctgaaatttacataagtaatatttcataatcttagaattctctcaaagcatgtgaaataggaagaaggaagttcttgcccagaatcttaggaaatcaccactgttcggttataatcactgcctcctgaatcgttgaggagtcttttaaattagatttttgttttgttgtctcccaagttaatattatatttagatatcagagagtcaggcaaaaaggaaaacttttatctctagggaaaaaacatttagaaaaatgtattcagtgtatctaatactgaaatgcggaaaaaaatttaatgttaaaaaaaaaactatagacattgacatggaaaagagatttaatgttttgaaaaaaaactttatattaactgagtaacatcctcctgatgagaagtactatattaaatataaacccattatgttataagttaa

SEQ ID NO: 199140 - DNA, 1897 bp, Homo sapiens
aggagtcggcggcggcagggatgtgggaaatgtagttgggagactccgccctcctcgccattcctgtaatggctgcttcctagaaggtaatgtacgaactcgtctccaaaggatacttaggttgcaccagtgtatttgtaaaacaggagcaaatttggaccttgccgggccaaagtacgaattctttttcaaatcttaatatcaagtcctgaaatgaaattatctctgttctgtttctttttaccttttcttgtgtgggtgaactgaccaacttttaagtctagttccctgttggacagacttttctcaactcattacctatccccctaccgtccatatggcctccacgctctgcactgactctagctgcctctttaaaataataatagtaataataattaatttttaaatccttctctccgccccctccccaccccccatgctaataataggtcgtgtcacgtggaacctcttaatctcagcatccggagctccaggaagggaaaatttcaagtcagatagaattctatatataccatttctttggtaagtcttattaattccccacaacttcgcagagttatatgttgtgtgacttttgccaaatttgtctgcatttcttggatgggagagaccctaagaaaatgtacaatttttacccactaggatattttaagtttccaagttagtggctcgtgctttttttctgtttgttcttaattatgaactcctgttcaatttttgtttggttgatgcacgaggtgttggcattatcgtggaaaattcctgggtttagagtgttatcacgagatagggagatgaacctcaaattactgtctttaacgtccctctgtttttccacctataagatgaggagatggattggaaatgattcataaagtatccaaaagattggctggcctgttatttgtcatgtgttcattttgtcatttgaaaagggaggaatttttaatggttcctttttgtttccatgtttaatttctaggaaccttcagccctcaagattccaacatcatgacctcagtttcaacacagttgtccttagtcctcatgtcactgcttttggtgctgcctgttgtggaagcagtagaagccggtgatgcaatcgcccttttgttaggtgtggttctcagcattacaggcatttgtgcctgcttgggggtatatgcacgaaaaagaaatggacagatgtgactttgaaaggcctactgagtcaaacctcaccctgaaaacctttgcgctttagaggctaaacctgagatttggtgtgtgaaaggttccaagaatcagtaaataagggagtttcacatttttcattgtttccatgaaatggcaacaaacatacatttataaattgaaaaaaaaatgttttctttacaacaaataatgcacagaaaaatgcagcctataatttgctagttaggtagtcaaagaagtaagatggctgaaatttacataagtaatatttcataatcttagaattctctcaaagcatgtgaaataggaagaaggaagttcttgcccagaatcttaggaaatcaccactgttcggttataatcactgcctcctgaatcgttgaggagtcttttaaattagatttttgttttgttgtctcccaagttaatattatatttagatatcagagagtcaggcaaaaaggaaaacttttatctctagggaaaaaacatttagaaaaatgtattcagtgtatctaatactgaaatgcggaaaaaaatttaatgttaaaaaaaaaactatagacattgacatggaaaagagatttaatgttttgaaaaaaaactttatattaactgagtaacatcctcctgatgagaagtactatattaaatataaacccattatgttataagttaa

SEQ ID NO: 199141 - DNA, 1034 bp, Homo sapiens
tcctagaaggtcgagtcacgtggaacctctgtaagtctcaggcatccgggagctccatggaacgggagaaattgtcaatgtctacgatcacgaaatttctgagtatgtataccaatttcatttgtggaaaacccttttccaggcccccgttgcgaaagggaattccaacatcatgacctcagtttcaacacagttgtccttagtcctcatgtcactgcttttggtgctgcctgttgtggaagcagtagaagccggtgatgcaatcgcccttttgttaggtgtggttctcagcattacaggcatttgtgcctgcttgggggtatatgcacgaaaaagaaatggacagatgtgactttgaaaggcctactgagtcaaacctcaccctgaaaacctttgcgctttagaggctaaacctgagatttggtgtgtgaaaggttccaagaatcagtaaataagggagtttcacatttttcattgtttccatgaaatggcaacaaacatacatttataaattgaaaaaaaaatgttttctttacaacaaataatgcacagaaaaatgcagcctataatttgctagttaggtagtcaaagaagtaagatggctgaaatttacataagtaatatttcataatcttagaattctctcaaagcatgtgaaataggaagaaggaagttcttgcccagaatcttaggaaatcaccactgttcggttataatcactgcctcctgaatcgttgaggagtcttttaaattagatttttgttttgttgtctcccaagttaatattatatttagatatcagagagtcaggcaaaaaggaaaacttttatctctagggaaaaaacatttagaaaaatgtattcagtgtatctaatactgaaatgcggaaaaaaatttaatgttaaaaaaaaaactatagacattgacatggaaaagagatttaatgttttgaaaaaaaactttatattaactgagtaacatcctcctgatgagaagtactatattaaatataaacccattatgttataagttaa

SEQ ID NO: 199142 - DNA, 1017 bp, Homo sapiens
aggagtcggcggcggcagggatgtgggaaatgtagttgggagactccgccctcctcgccattcctgtaatggctgcttcctagaaggtcgtgtcacgtggaacctcttaatctcagcatccggagctccaggaagggaaaatttcaagtcagatagaattctatatataccatttctttggaaccttcagccctcaagattccaacatcatgacctcagtttcaacacagttgtccttagtcctcatgtcactgcttttggtgctgcctgttgtggaagcagtagaagccggtgatgcaatcgcccttttgttaggtgtggttctcagcattacaggcatttgtgcctgcttgggggtatatgcacgaaaaagaaatggacagatgtgactttgaaaggcctactgagtcaaacctcaccctgaaaatcagtaaataagggagtttcacatttttcattgtttccatgaaatggcaacaaacatacatttataaattgaaaaaaaaatgttttctttacaacaaataatgcacagaaaaatgcagcctataatttgctagttaggtagtcaaagaagtaagatggctgaaatttacataagtaatatttcataatcttagaattctctcaaagcatgtgaaataggaagaaggaagttcttgcccagaatcttaggaaatcaccactgttcggttataatcactgcctcctgaatcgttgaggagtcttttaaattagatttttgttttgttgtctcccaagttaatattatatttagatatcagagagtcaggcaaaaaggaaaacttttatctctagggaaaaaacatttagaaaaatgtattcagtgtatctaatactgaaatgcggaaaaaaatttaatgttaaaaaaaaaactatagacattgacatggaaaagagatttaatgttttgaaaaaaaactttatattaactgagtaacatcctcctgatgagaagtactatattaaatataaacccattatgttataagttaa

SEQ ID NO: 199143 - DNA, 979 bp, Homo sapiens
tagcatggactgtttcactctctctcatcccaactccaatttattcataagcatctctatacccgtatgggttccattgctttcatacatatggtgaccagttatccaaactcaaattgtgtagaaggtctgatgaaggaatttagttgtaaaattattaatatgaaaaagaatgcaacaaataagtaattatgcagttaaataaccattattgaaaagaaaaacatgaaatcatatgtctcaaaattgggggcacctggccacaaaatctactttgtatgactcttgtctttatccttaccatgttcaacttctctgctacgttcaaattttcccagaaagcatttcatgatcaacttcattctacctggatttttttctgttctttggttccagtacttgctatttattgctgataggttgtctgtaagtgcgtaccttctctgtcattctagaatggaagcatcatgtcacaacagactgtcccatcgcaaaagacggtgaagtgtcacccttgtggatgctgaaccccagtggggctccaggtgttctgggtcccctagcatagtccaggagatttgaacctttgtagtttatgcaggatttgtttgggtctgagggatagtggattaaccagaaatctctggcgatcactgataggtctcaaaaaaaaaaaaaaaaaagagaatggctcttaaagctgcagtatgaaactattttaaattttcaggttactaaagagcactaatggcattttatttgaggggtgtggtattcccttatttattcaaatctttttttgagacagggttttcactcctatctcccaggttggagtgcagtggtgcgatctcagctcactgcaacctctgcctgctggattcaagtgattttcccacctcagcctcccaagtagctgggactataggtgtgcaccaccacttctggctaatttttgtatttttggtagagatgggat

SEQ ID NO: 199144 - DNA, 727 bp, Homo sapiens
ccttgggaatatttggggatatttactttttcaagtaattgagttatacgtactttgcctgccactttttacattgcattgccaatttaagttaacatcaccgacctaatgtcagcaatgttccactcttaaagctggaaactggattcgagggtgagcaaggaaggatgaggagagggaagtttaccttaaatgatccttgaagtcaacattaggtaccttgagaatgccttgctgcttgattttaagatcttcaattacagcactttgattcttaaccttaaaaaaattctccttcagccatttcaagccatgtggaatatctcttactgcttaggaatttgctgtggtttttcattgaccgtggccccagactctggaatatgtattaatttatctgggcagagaatacagaaatccacatgcagaataaagtgaactttatgctgaagcagaatattgaagctgggaatggttaattcttaaaaaataaagcatcagcgttaataaatattgaattctaagaaggtattttgcagtttgcttcttaaagtactgagataatctgactgggttcccatttaaaagagagaagttttttccctccatgaataatattcgtttacagtcattggtaaattattaatctgcattccagtgtttcatgtttgaaatggtcgccaatccgcggattggcgaccatttcaggagccacaggtaagggtct

SEQ ID NO: 199145 - DNA, 648 bp, Homo sapiens
gggctttttaaataaaaacacaaatgaggttaccctataagtaccattttgtcagcgtgctcttttatttaatataatagttcatcttggattttaaaaaaatatcagtaccaaaaatactcctaaaactagaataagagagtaagtaaggctaattatagcttattggccatgggaattaaatatattttgaaagataatttgtattttcctttgattttaaaagttatattctactcctttactaatgcaacagtcatgctcaccaaaataaataaggagtgtatttattatagtcatccatatcatactttatgacagagaggcagagtttgtttaatctttggaaattaaagattaaacaagttttggaacaatattgtgttttattttaaaatttaatttgaaaataataaattaaaatactgggcctggcatggtggctcatgtctataatcccagcactttgggaggcccaagcgagagaattgctttagtccaggaggtgatgtggtgaaaccctgtctttacaaaaaaatacaaaaattaactgggtgtggtggcgcatacctgtagtcccagctactagggaggctgaagtagaaggattgcatgagcctgggaggtcaaggctgcagtgagccatga

SEQ ID NO: 199146 - DNA, 498 bp, Homo sapiens
ggaaagagacaagtagaaatgaagggctgagggaggagaaaaagtgaaaaaagggagcacagaagaaaggtgaatctatgtggaaagagaatctacaccacgggagagagactatgaggtaaggcgagggggaggtagaggaaaggaaataaaatgggaaatgagaaaaagaaatggccaactgattgttaacagtaagagaataacatatagggagaaagagggaagaaaagaaggaagcaagcaagcatattttgtgagcaggaaaagacatagatgtacattgtgctatttcagtttctttactgcttaagggccatatgagcaggaaaatcctggctgagtagagtaagaactgcagaatgtcacacatggaagtatgaaaaggagatggagcaactatagagatcttagagataggaaaataacagatgtggtgccacttgagagacggttggagttctgtcagctctccaccttattctccgtctgtcctct

SEQ ID NO: 199147 - DNA, 514 bp, Homo sapiens
cagagtgagactcttgtctcaaagataaaataataaaatgagtttgcagcctgcatgtgatgcctgggattgcagcagctgccttcaggttcctggggcagagctggagagtgcagcaaaagccagggcatgccagccagcaccccagtccatgaggggcttcccctcagtgcagccacgctccctgccacctgcttgtttagcaaggtatgcattgtgcggctgcatgctctgttaggaagcattaagtcctgcctctgtagtgtgactatcatgttttgcctcctccttcactactcaagttccacatcaacagataatctctctggacaggatgttcctgcatttgtttctatgtcaattgcttcacaacatctgagtgtccacatgttggacagggtttgaggcttataagaccacagttttgaaacagacaagttgtcttcaaagagtttctgttgtagtttgggtaaaagacagacattaaacatcaataaataggaatttaaaacgg

SEQ ID NO: 199148 - DNA, 487 bp, Homo sapiens
ccttcctcttaaagggacatagtggtggccacaggtacccccctacctggtcctcctgggtctgtacctcagggcaaataactctccctctctgggtttcagtggcctcatcatgtggaaagggttgttatgagaatttacggagagactgtaggaaagggatttgtaagcagcagcccatttgttaaggggccaagggtgcttatctctgtttttagaaaagtagatccagtccataggagacaaacacccctcctgcccagtgggccaccttccagatgttctggatccaagcactacgggtagggcccaggaattcgcacttcatctgtttctaggaattcttcagtcatggaacaggaaaatgaagatacctggtcaagtgtcctgtgtggtggtcagcccatagtaaaggaataagcatcagtttggtttttttgttttgttttgttttggtttttttgacacagagtcttgctctgtcacc

SEQ ID NO: 199149 - DNA, 543 bp, Homo sapiens
agccatggggtaggaattaaataaccagtgtgatggttaagaaacccatttaatgggtaagtaaccaatgagttgaaatgaatgtgagtgccttgctcaagcaatgcaaacttagatgaattcctgataaagagatgtaacagcttgggccaagcaagactttcagctgctaattcctgtctgataaaaatctgaacggcttagaaatgattgggtaatctctaaaactggcacactgaaactgttttagagataccagagctccctctctcctgccggggtattaaccccgatttgtgctctctgtcgctgtgttttccacattcttcaagagtgaaacgagtgggtcatttgagagtgcttttgcagcctggggtttctgtatggaaaatcttgtgattgagctgttgagctgtaaatgttgatagctgaaggggatagacaagcttcatcgaagttactcaaattcaaagcagagtgagtatgtaggtgtgcaatttgggaactaatctgtaattataaagatgttattttcctctttgg

SEQ ID NO: 199150 - DNA, 447 bp, Homo sapiens
aactttctcagagtcagtggtggagtcagtcttcaagcccttgatgtccagcttcagagtccatgcagatagtctcagttgacttagtcctaaaggcagctgtgggttgaggttccaacagcctctggtctgcttcattcctcaaagtaatctccaagcccgaatcctagcatggtggtagaggtgaggctccataaaccttagaaatagctctcccagatatgacaacatttgggccttggaccagtggtcgtgcatccactctacagtaacaggggcttctatagttaatttgattctcagttttaagattactagagaatcaaatgttgagtatgcacttttgtatgttagtgggatatctgaagcaacattactgataaaaagtaattgcacatttctggatagtgataactggaataatactctcttgtgataaaaggaaaa

SEQ ID NO: 199151 - DNA, 235 bp, Homo sapiens
agatctcgccactgcactccagcctgggagaaaaaaaaaaaaaaaactgatgaggccgggtgcaatggctcacacctgtaatcccaacactttgggaggctgagatgggtggattgcttgagttccagatcagcctaagcaacatagtgaaaccccatctctacaaaaaaaaaaattaatttaaaaataaaaatgggtggtctgaaatatgaactgccccctccactgaagaccg

SEQ ID NO: 199152 - DNA, 179 bp, Homo sapiens
gttctgctgagttaaggaccccccttccccacagtgagcattggtgcccctcagagaaggaagccttcctctgggaggtgaatgccagcctcggaagggcaggaaggagggtgcacatcttgaacaccagcagcatccacacgtaccagctagtttaagctgctgcacggcccctgtgc

SEQ ID NO: 199153 - DNA, 346 bp, Homo sapiens
tatataaagcagataaaaatgtagctgacatgcttggtgcaggtgtggagatctagctgacttgcaatggtagtgccaagagatgtgtggactcccacaatttaatggaaaacattcataagattcttcccattgtttgatgtaaaagtagtgttaggtaaaacattatgtaaaataaagattcaagctttctcttccagccagatagatgtctctcagtgactttactgcagttctcccacgctcactgcaactcatcttttccctctgctcccctcccagttctagacctgaggctctggcccttgcactccagattgggcaataggagtgaaactccatctca

SEQ ID NO: 199154 - DNA, 629 bp, Homo sapiens
cgccaccccagcccaccccagggaaccctccccaagttccactgttcaaacaaggccctgatgcaccagcctgacatttgtggccattccagagtgactaggcctctgacaggatgctaatctcatgatctgagactgctgcacagcaatgagtcacttggccatcagaaaaaccttacaaacttgcttggcctcaccttggcagcctgaaacctctctgcccatgatgtatttaatggagaaaactatattcagaattggtactcctgaattcaggaaatcgctaaaagtcctatatatatcatacataaagtcctatatatatcctacatgtaacctgaacattcactgccccccaaacagatcctgacaactcctgatctcaatttcccttccttccccacacatttcctgtacatacaaattggaggcaaatataatttacttcaagttttttgaaactgccagtctctcttgaccctggatatttgttcaatgctattatttcttcctaaaacacctcccccactatcttacctgtactttactctttccctattaatcccacctttaaataatttaacttttatccttcaagtcacaacacagatatcatttccttttcatag

SEQ ID NO: 199155 - DNA, 561 bp, Homo sapiens
gaatgatttggtgagaagagagggttacgacatttacctttaaatcatgaagattttgagttgaaaggaatcttgaagatcataatagtctaggcgcctcagttcctagatgagttatggattatgcacagggctatgggagcacagacagcccccatctctggaggaatagggcagatgaccagggaatagctcgcagtaggtggtggtgtcatatcctgaaaccacacaccagtttcattttgtgcaccagtggcaatcagtagggagaggctatcacagtcacttttctgagatggatttttgaggcccagttttggcccagcaggaaagaatgccacagtctcttagcaatatcttccacggataccccttgggggagtggcagtcagctccacgtatgtacagtctctgttttagaggatgaatgttagccaggagaagagtaggaaaaagacaggtttctcgcagaggggccagcgtgagcaaagacacagaggaaataagggcttgacatgggtcgggggcgggctgctacaaatgattgggcgtggctgggac

SEQ ID NO: 199156 - DNA, 1110 bp, Homo sapiens
acttttcatgactcttgacttccctacttcaacagtttactagtctccatcttgaatgtttttattaatctattttgtgttaattctacccaggttttttgtttttccttgctactattatatatatttctgccagatgtcacatggtataaatgcctatatggacttttgtaacagaaaatttacttactagaattaatgtagggggctttttaataagagtgcatgtaacatagtaacagtagcagagctatatcagaaacagttctgataatatttcatgatctatagtttgttgcatgcccattgcttcatactgcttgtgttcttggttgagtcataagtaatttttatggggtgtgtcatgactgtcatattcatagagagttgtctgccttgccccatggtctttgcatggcttaaacaggaccccttttcatacacaagtcattcaattttatgtttttaatagcatcaattttagtgtttaacatgtgtctctggactatgcatcagaatacttgactgttagtgtgaaatgaaaattcatggatatcataatttatgtaacataatttaacatttctttattaataagactttagattgtccctttcacaaaaaaatggtgcggttaaaacttaatccttgtgtctttttgtgagtagttctatgatttctatatgatggcatccttgaaaaagttggtaaaaataagaatagttcttatttattaaagttcttctcaaattgctcttccaaaacattttagtttatactgcaatgttaaccattttacacttgcttaagtaattttcttcaaatacacacgagtccaggctatttaaccttattttaccgctatagcacaaaacaggttttccaaaattgtccttgcacacctgggattttacaaggatattataatcttggttcagtttgacttactgaatttgtagtaagtatattttagcacatagaaaattcaaaatatgtgttaatctgtttatagggtaaatttttatgagggtggatgtcatcctgttttttttttttttaataaatgttttgtttcagaatgttttttatttacagaaaagttacaaacat

SEQ ID NO: 199157 - DNA, 623 bp, Homo sapiens
tgttctcaaagtatcccaccaaagattactattagttgcaaaggggaaaatctacctgaaaagacccggcagtcatcattctaccaagtggtcattatcaggatgggctgatattatgagcctccttacgtgatacactgggaggttacaaaaattcactggtgttcttcctggaaatgtctgaactaaatctgactatacacgacatttggaggacaacttgaaaatggaccatatgtcagataattttttttaattaatgttgatgtttttagaaaataaaatggagctgtggatatgtagaaggccatccttattcttgagagatacatgccaaagtaaaggtgaagtatcatgatgtctccagcctactttcatataacttagcaaaataaaagtgtgtatatgtgtgtgtgtgtgtgtgtgtgtacatgcacacatgtgtcagagaacatatgggcatgccaagatgttaacagctggtgaatacaggtgaaagttatacaggttcatcctccaatttttctgtgggtttgaaaactgtctacatataaaaaaaaaattataactagttcaaaaagaggaatgacattaaaaattatttctaaatggcatggttttta

SEQ ID NO: 199158 - DNA, 555 bp, Homo sapiens
atgctataattttacttttccagcacccttacctcactaacttgaatcttttatcacattgtattttaggggggaaaacaaaccagcctcattagaattgttggcaaaatagaatagcctttgagtgagaggctgaaaagctctcatgtatcagattaaggactctgtttggctcttcattggccttttatggttctcagagtgttgcccttacgtaaattaagtaagatgtctgagttcctaatagatgaagaactattcatcttttatttttgcatatactctttattcctaactagattatcggaagaggtcatctttttgatgttttaaaaaatgttatcttcagtgcctttcccagtgctttgaacatactgattacgattaaagttttttcatgataattatattggtaacctaattttgtgaatacctgaactatgttatcccaaatttacagaaccaatatattaaatcatatagtatatgattttctagaacaagagttggcaaactttttctaaaagggccagatagtaaatatttttggctttg

SEQ ID NO: 199159 - DNA, 1604 bp, Homo sapiens
ggattccgggcccctcctcccgccgccgcgccagttctgcgcacctgcagccgcgggctctcctcgccggcgcccgcgccgtccggcctctcctccaggatcatcgccgcacccgctgcgctgggggtccctcggggtcagccagcccgccgctcgcgcagcgctccgcagccgggctagggccgcccgcaccacctgggccgcgggctcctgagtgcccgcgccggtccccgactgtccctcctgagtgggggcggcccgcggcgcggctgggcggggcacgggtctggcgtgcgaagctggccattgcccaataggcggcaatgccgcttcgacggacagctatatcagccaaccagagttccaggaaggcgggctctggacggccagctccgcccgcccgcgggacggtaacccctggcaaccgcggccggaacgcccgcggctggctggcaggttgtactgcgcatgcgccgcggcggccgctgagcgtgcgggagaagttcgggaaacggagaaaaaaactatacggaacgtcccaagctgagagtcagggcggacctggactcggcgcgcctagctcctcggctccctttgcggggactccaggagtctgcccgctcgcgccgtttcgtcctgtcaccccggcaacgggaccctctaagaggcttgttccaaaaatgttcacaatggggtttttaaaaacggttttgttagggacaagtgcttgtgtgagtcctccgacaatgcctgctttcttctctctgcccgcggagcggaggctccaggcctggccccagtccgaggcgcctctgtcggtgtcgtcctgcttccaaaaccggcctccagaacccgcctccttccagaacctccgtccagaacccgcctccctccagaacctccgtacagaacccacatccttctagcacctgcctctggaacccacgtgctttcagaactacctgtttgtagaacttgtttccagaacgaacctgctttccgaatctctttacttccagagcttgtttcctggactgacctattttcagaacctactttcaaaaccagcttgcctccaggaccacctgcttggagaactggcctgcagccccaggactggacgacctgagactgcacagctccctgcggggctcacccggctgtgtgtgtccttccgggccttccatacttccctaggtgtctggtgactccggagcccgctcggatttcgtgtgggtctcgcctcagctcagaacacaccctttgaagagcaggaaggccagggcacaggcggtaaccacggctcctggtcatcaagttcctctgaagcccaggtcttgtccacgttcactgccccaccacaggcccagcggagccttggagctgagccctgggatcattctggtgcctgtgctcccggctccgcaacaagcacacaggagcctgtcatccccagatctaaatcctgaaggctaagctccgtggtctgccgcagccatctgcagcaggcccctcccagcaacagccttctcataaggcccctgccagccacgcgaaacctcctggctagggcctgtcttccactcctggccttttgagacagg

SEQ ID NO: 199160 - DNA, 377 bp, Homo sapiens
gtagttctctggacttttccccagaatagaagaaaagagataaatgggatctgtgcacagatatttactgcctcaggcctgtgagggaatgccaagttgtttgttgacacaattttggtagtctcgatcagaatcagcaaactgtgactcatagaccaagccctgcctgtcctgtttttttgcatggccctgaacagaagaatgagttttacattttttgatggtttaatggtgatgtgtgaaaataatgtgaaatccaaatttcagggcccatcaatggtcacacgattatgtgaatttactaaaaaccattgcatcatatattttaaagggtggactgtatggtttgtgaattatatctcaataaagtagttctt

SEQ ID NO: 199161 - DNA, 502 bp, Homo sapiens
acaacttatccgtgggagctttctggttacttcagaccatcagtgtcagccacgatccaacaaatatgctaattttcagcttcaataaaggacagagagaagtagaggaatctgaaaaagtaggaaggggatcgctctttcttttaacctccaggtcagtaagtctgattcatgaagttctcgccgattgcacaaagcttccagttgggttttagaaccagaatgcggtttggaccttttccctgggatggctcagtgatgatgaagttttatgttggaactgtctccaggcttctcccctgtgctcaccagagacctggctggcatacacttcagggaattgggtatgttcttgggcttgtgaagacagcgcattaggagggattatgatgtagtggggaggaaggaacgagggatttagagcgagacccagttcataccctgatgctgctgcttccatttctcctgatagtagcctcgcttcttggcatcgtaggaattt

SEQ ID NO: 199162 - DNA, 509 bp, Homo sapiens
tcctgtctttcaatgattaaagtgggctcttaagtttgtaacctggcaatcaggaaatatttgttaaatgcctattgcatgcaaggtcctcacagtgcacccttcctaaaggacttaactagcatcaatttctatttgtttattttctggaaacagcatcctgacttattttggtgatccttctttttttcttggtgtgtatcatttggttcatgtcaaagtcccacagtgaaactgactctactttcacttcctcatcatgcaatttagcctgtcaaattggagcctagcctcccctggcctcagtgatgatgggttaaaaataggcaggttacctgatgaggaccaaccagagcttagaatgaccatgaataaagatctctttcccattggagttattgaaaaatgaattgtaggcctggaatggtgtgtccatctatggggataacctgcctgagaatgaagccacctcagagagaagcagaatcaggaagtggagaagggcatac

SEQ ID NO: 199163 - DNA, 283 bp, Homo sapiens
aaagggtaccacggtggactgccaaatcagacagtgaggagcgaggaaaacaggaccaggtgcatttcaaaagggcgtatgaaaccagcaggcagcatggagcgtgcctgcagttccagttactgggcaggaggattgcttgagtccaggaggtggagcctgccgtgagcggagattgcaccactgcactctagcctgggagacagagcaaggccctgtctcaaaaagaatggtttatgtacaaaggtagccattaaaacaaaaacacacatcttcctaatat

SEQ ID NO: 199164 - DNA, 378 bp, Homo sapiens
gggttgcgttacatggaatggatgggaagggagcgtggcaactttaaaagtgcacactctctttgtcataccttgtgtaatttttattgtggggaaaaaaatgtataaataaatgcatgtaagccagctaagaaaatatccacctatttagagtgcagattgcctaaaagaaggaaacagttgggtggaatattaatcattttcagacagaaaacagttatttttaacccttttcacaaaaaaaaaaatcatcatttccatggatggttccagttagagagtttggtcagagagctctcattttaggaaatcagatatcataaaaaggtatgactttagagaaatgaggaaggtacttcccaaccccgagctgttgta

SEQ ID NO: 199165 - DNA, 110 bp, Homo sapiens
tatcttatttaagaatatgttaacttgtttcctgtctgtctggtttaccatcaggtcgcagcatctaaatctggcagacttacttagtgtactataatgcatgcactctt

SEQ ID NO: 199166 - DNA, 130 bp, Homo sapiens
cttgttaaagggattcattctgacccctccgcaaacacaatcacttcagcgtttcaatttctctttcttgggtgctcccccaccattcttacctccctgttgttcattccatcctgaccccatttgtcta

SEQ ID NO: 199167 - DNA, 412 bp, Homo sapiens
aaatattcataggtgaaaagcaaaaggtttcatttttcttccattgagatcctagaagaaaagaaacacaaaagaaaattcaacagctgtatctctaatccccttaggcaaacaattgatctctccaaatctcaattgcttcatccatttaaagtagattcaaacctttcttctgagaaggaagccctgcatcttttatgattgagaaatctgagttacaagtgtatttgtcatccacattactcaaatgattttggtcagatttaggagacacttccaagatttgggagacacttccaagatatttgtttttctagtaatccttttatatttcataataaatacttgattatgagattttgaagtttgtttctgaaattgaggggaagatgaggataaggaagggagtaga

SEQ ID NO: 199168 - DNA, 500 bp, Homo sapiens
ggccttcctaccttccttacatttatgtagcatgtgtttatccaaggcacaccacctgccaggcacagtgctgggctctgtgttgacacacatgaatgtgatcatctttctgtagcccccaggttacatggcaccacagccaagatacagacatgtgtgagagagtaatcagggtattactcaggatttgctggaggaatccctcttcaaaggatattctaaattggtgtgtgtgtgtgtgtgtgtgcgcgcgcgcatgtgtgtgtgtgtgtgtgttgaggtggactgggagaaaatataccctccttgagatcacctcctggctagatagtctctcccttctctgtttgtgatagaatgcaagtggaatttgacaggtgtacttctcaaactagaaactagagagctgctatctcagtcaccgtaagaagaacgaatcacaccaaacctacatcattgtcttctatgacaggatttctacaagggtgagatagtgagat

SEQ ID NO: 199169 - DNA, 250 bp, Homo sapiens
aaaaccagaagacaaggcattcagtcgggacctcactatgccctcacgccctcacaatgtggctgtgacacttggttcctcctctacaaaagaaagacaactgtttctcttttttttttttttttttttttttttaagacagagtctcactctgttgcccaggctggactgcagtagcatgatctcagctcactgcaacctccacctcccaggttcaagagattctcctgcctcagcctcctgagtagct

SEQ ID NO: 199170 - DNA, 412 bp, Homo sapiens
aaacatcctgtgctcccaaaggcaactaatggcacagcttgctatggattttcccaagttttcaagaacagtgacagccctcttcaacaaagccacttaacataacacaaggttaaagtgggaaccgcaaacacttgcttttcttaatttacacctttcatttacttccccagaaatgtcataaaggaaccatagaatttctgatgtactgtcaatagatggttcctttcaagaacagcatttagaaagaaaatgtgaataatcctacaaggtaatctggagctataacttaaaacaaataataattagcattttgggagaagaaagatgattttggtctgggtctctcactttaacaacaacaacaaaaagactagttcaggtgtggtgtttcacgcatgtaatcccagca

SEQ ID NO: 199171 - DNA, 529 bp, Homo sapiens
acaaacggtccatcatgtgtaaaggtaaaataaacacgtttttcatcatatacagtttcaaaaatgtacatttctaatgctctttcttagggagtccctgaagtatgtgccctaccaaaataaaaaagtaaaagcatggaaagagggaggtccaggatccaggaagtaaggctccaagacagggggaacgtgaaggggatacacaaggtggtgaggaatgtggatcccgtgatgaaagctcttcggagccttagagagtaatcagttcagagtggagcagtcatatatctgggaaagaagcctgcagaaagacagaaatgttagagtaatgatagaatgggtggtgcttcaatgtattgaaaggagggctccacttctggtggtgtaaagtaataaaattaacgagggggacataggatcactaagagttggggggaaagataattattaacaaacagaagacaaatatatacaaatggaagggtattcttagtatactgtgaatagcattacatagatcaataagtaa

SEQ ID NO: 199172 - DNA, 699 bp, Homo sapiens
atgagtgcaaattgtagagaaacagatgtcgattcaacataaagaattttccaacataggggctgtctagagggattgggtggctcagccattttggtatgggacaaattctctgtccactgggggctgggtaaccctgtggcaggtatgcgagctctgcatgtaagacaatgaatgacctgcaaggtcttttcccatctgatgtaaaataaggctccaagatgaactggaacttggccagggtgatcctctactgaggggacaaattcacagctcagtcttccctagttatgtccctcagcccagaacccttggtacaacatgctgctttgtactgagggcaaggcaaattgaagacattatcatcaataaaatcacatcgagcccgctctcaaccaaattaaccaatgtggccgggcgcagtggctcatgcctgtaatcccagcactttgaggctgaagcaggcggatcacttcaggtcaggagttcgagaccagcctggccaacatggtgaaaccccgtctctaccaaaaatacaaaaattagccatgtgtagtggtgtgtgcctgtagtcccagctacttgggaggctgaggcaggagaatagcttgagtcccggaggcagaagttgcagtgagatgagatggcgtcactgcactccagcctgggtgacagagcaagacttcatctcaaaaaaaa

SEQ ID NO: 199173 - DNA, 445 bp, Homo sapiens
aaaatgagggatctttgttgtgatggaactgttcagtatcttgactgtggtggtggatacacaaacttaaacatgataaaatacatataactaaatacactgtgcagaaataactagaagtaaatcaggaaatttgagtgagattggtagattgtgtctatgccaatatcctggttctgatattgttctataacttgtgcaaaatggcaccaccgagacaaacagtgagaaaggtacatacgatctctgaattatttcttacaactgcatgtgaatctaccattacctctataaaactttcaatttaaaaatttctagaagtttctagtttgctttgaaagcagcaacaatcaagttttatcaatgcatgtcttttgtaaatactaaacatttccttttgcctggaaatttaggggagttttcagagctgtcaataaaatttaag

SEQ ID NO: 199174 - DNA, 553 bp, Homo sapiens
cagagccatagactgatagaccagaaagtgggttaatcgaaggtctgtccatgaaactcagactcttccccatttttttttcttgcctggcattacctatctggctgtgggtagcaaaaattaaagtagggaaggagtcatgtgctaaaagattagttcaggggacaagggaatctgatgtattttgctctgcagcaagggctgctttattctggcatttcagaactttttacctgatagctggttctcgccctcttcaccctcgagcaaagcgtactgttaaagcagccccgcctgtctgtggagcttcctgtctgctttctgatagtctcttcaatatgggtgggaggcaaggagcaaaagataaagtctccatcatgagagaaggtatctaagacagcagaaaagacagatattcagaggaaccaaatattctttgttttttgagacggagtctcattctgttgctcaggctgtagtgcagtgagccgaggtctagtgccattgcactccagcctgggcaacaagagcgaaactccgtctcaaaaaaaat

SEQ ID NO: 199175 - DNA, 402 bp, Homo sapiens
cgttggtttgtagtctcggaatataaaagggcaatagaatttaccagcaaatgctgaaaacaaacatttgatgaccagggtttaattttcaaatccttaaggccagagtgtttgccttggtattgtgtgctggcaccctcggagtgctcctcctaatctccaaagccacctgcgcccattcccaaggggccacggtgctgtggtgaagccggaatgagaaggtagggccaagcacccaggaactccaccatcaataatgaactctggaatgcagaagtagagggaaaaggacgggggaagcaccacccctgtttaaatgtagaactaagctgggaagcactgaggtttcagaacagaaggtcagtaccgtcagctttgacaaaataaaaataatacaaacaa

SEQ ID NO: 199176 - DNA, 350 bp, Homo sapiens
accaatgaggaaggtattacagtatttcaggcaagaagtaatgacggtctttgggctagggtggtgaaagagggaagtagaccaaccggtttgggagttttttaggggtagaattgaatggagttggtgatagattaaatattgactaagggagcagaaagcaccaaagatgaacctaggcctctgcctaaatatcaggatggtgatattttcttagatagtgaagacatatttgggagagagaaagaccatgagggtggttgctgacaactagaaagccatttatctttatgcaagctatcaatgataactctcaggcatcttgtagataatgtgaaaaaccattggta

SEQ ID NO: 199177 - DNA, 220 bp, Homo sapiens
ttgttttctttttttggtagagatggggtctcactatgttgcccaggttggtcttgaactcctggggtcaagtagttctcctgcgttggcctcccaaagtgctgggattattgacatgagccactgcacctagccaagtattttttttcttttttatttctatgttctcatctttaaaactttccactgttctttctttaaaaggaaaattgtaatcatg

SEQ ID NO: 199178 - DNA, 403 bp, Homo sapiens
aaggtggtactgggcactggaagtgggagaactggtcaaagaatacaaactttcagttataaggtaaatacattctgaggatctactgtacagcatggtgactgtaattaaaaatgccatattatatactagaagtgtgctaagcattggcaccaaaaagaaaaagaaaaaaaaggtaattatgtggagtgatggatgtgttaatcagcctgattgtgataatcatttcataatatatgcatacatcaaatcgttacattgtatactgtaaaaatatgcaattttgtcaattatgccttaataatgctgacaacaaaacacataaacaaaaaactttccctgctttaacgggtggctaagctagccctggtcacattcagtaacagcatacctttccggtaag

SEQ ID NO: 199179 - DNA, 311 bp, Homo sapiens
caaaattgtggcattctcttctaactatcagggaaaaattgacttattctttgttaagttgtagcttgcagtaaagttttttgggcatgagaattttcagcaaggtggtgagtgccaggaaagtgctgactcagcacaatgctgtctgttagccaggaacaaaaatgaggagcaaccataaatttaatcctttagctccttctccctgcaaaattcagaagatgttttatctgtaacaaaagacttgaaagaggattctcactttttcccttaaaagttgttactcaagtctgtaggtaacttcaggattt

SEQ ID NO: 199180 - DNA, 703 bp, Homo sapiens
attttctaatacatgttttctgctatggggcagggatgacaaccgtgtagcatgtgactaccactccccactccaatacccatggcaggcaccgctaagtactgacaagattccttcctgccaagcccagaccacagcttcagaatccatgacacagtgcacaagaaggccactatcaacttatctgttctgttatgtgaaaggaagcctttcttccctctcaaagggtgaacccacagctatacaggtagggaaccagacctcccttgaagccagaaggcaaaacccaacttcaattattaaagaacaccagaacttgatagataggccttagactgaaattgatttctttctctgagtctccctcttttttagtttacgctcttgattgaagcctcctttgggtgagaggaaaaagtcaacccttcatcacctggatacaggtcctatagctgggcatgcaggcatggattgggtcttttgcagatgccagactgaaggtgagctagatttgccagtttcctagtcctgtctgtgcttccctattgctatccctgagcttttagtagtcatgtttcatgtcccagcctggttatgactggtcagcagaatattaatggagaggtcatgagtccaagcttaatttagagccatttatgggagaagcaccaagccaatatggtggtaacaggattgactacag

SEQ ID NO: 199181 - DNA, 354 bp, Homo sapiens
ctctgtgtatacatgctaactaatgacatctggagaacaagctatgtcatgcagcttcctcagtgataactttttaaacacctggttagagatctttatccaagggtgtaactgagttaccgcactcctcagccctaagccaccttgtcagtttaccccagtgtgccatacaaatattactttctatacatgccatgatatggaaaaggttcggaaggcctgaattaatatttatcaaatatcttactttggcaaagcccatattttcatatggtgtctttgaagaataaaaacatgtttgagctggaaagatcccagataactttttcccaaatgggatgtatatacaagtgt

SEQ ID NO: 199182 - DNA, 155 bp, Homo sapiens
gacgaactgagcattgtcagcatataagtggtgcttctaactttgtgaatacataaaatttaaaaggcaaaatgcaaagacagctaaaaatggaaatctggtgagccccgtattttagatagtggaagacagaaaaggagctcacagaagagata

SEQ ID NO: 199183 - DNA, 466 bp, Homo sapiens
ccacacttctgccttgcttgatagctattcaagagacctggccattttcctctcaaaactacaagtagttcccttcagcagagacactattgagtgaacagattcttaacagtgtagaaacttaccttaatcagatgaatatggtgttgagtctgttctctgaaagcaaaattattttaatcatatgatgcttctctttgatgaattgttgcctttatatttgtgcctgatgtcttagaaatagctttcaaatcaaagtcgtggtgggtagacacaatatgagtgaagctggagctagaacagttttaagatagctgacacctttgtctttttatgctttgagctgatgaaaatctgttccatttttgactgccacagtattttaattctggtaaacttttttttgtggggggtgagaatgtgagagtttatatttttatttgcttatatgaaaaggtaattatac

SEQ ID NO: 199184 - DNA, 492 bp, Homo sapiens
tgctataggcctacataacaaagactgagaacaaaccttgaaataatttgctttattcataggtaacttaactgtctaacacaaacacagcccaatactttttaaagatagataatgaaattcaggtactaaacaagataaaatccacaatgtctagtattaataaaaatattacatatttcaagaagcaggaaaatctgatccataaccaggacaaaaaactgtcaatagaaactgactcagaaatgatagtggggatgatattagcagacatgaacattaaaacagctatttaaaaaatatgcatggtgaggaaaggaattgatgatataaaagtaatcatgtggaacttctagtcatgaaaaaatcacaatatctgaaatgaaaaattctctggatggcattattggcagattagacaatgtagaataaaaaagtggtacatttgaagacatagcagtagacttatccaaaatgacatgcagacattta

SEQ ID NO: 199185 - DNA, 113 bp, Homo sapiens
tattgtaatagagtttctctttgtgtttacctggaaatttttttcatgtcttttctgtgttggtttctcttttctgtgtctttctttttcatagtttacgctaatatcttgat

SEQ ID NO: 199186 - DNA, 320 bp, Homo sapiens
caagtcatgttccctttcttcacctctgtttcctcatctgtatattagagataataactgcatatacctacctctaaggctattggagggttcagtgagttaatccacatgaagtcctcccaaaagagcctgtaagagcaactgctcaacacgtatcaaatattatcatcactggccaggcgcggtggctcatgactgtaatcccagcactttgggaggccgaggcgggagaattgcttggacccgggaggcagaggttggagtaagcagagattgcaccactgcactccagcctgagggacagagcaagactccatctc

SEQ ID NO: 199187 - DNA, 216 bp, Homo sapiens
atgcttttggaaatgatgaagacgttacctaaggcatccaaagtgggattacagaggaaaagacagtgttcaggcaatgatttggaagttttgataactagttggaggtaaagaagaataaagaggataaaaagaagagtcatttatgtcatgggtaactaattatatagagattcaatttaattagaaagagaaaatagaaggaatttggataga

SEQ ID NO: 199188 - DNA, 342 bp, Homo sapiens
agggatttctttttatccctagttgcggttccataataaagagaaaacactctcttcaggcctcaccaaacggaaccaagtgcattctattttattttaattaattaattaatttgagacagagtctcgctctgtctagagtacagcggcatgattttgactcactgcaacctctgccttccaggttcaagtgattctcctgcctcagcctctcaagtagctgggattacaggtgttcgccaccacgcctggctaatttttctatttttagtggaggcagggtttcaccatgttggccaggctggtctcgaactactgacctcaactgacccaccctccttg

SEQ ID NO: 199189 - DNA, 353 bp, Homo sapiens
actgagcgtacaagcagccacatgacatgaggggtctatctgccaccataatgccttggcttttactccaagtgagctgggaagcccttggaaaattttgtgcagagaagttcataatccaagttctattttataaagctcactctgaattgcaggtccttcctcttgttcgcccctctgctgtgcctttactccagagagcatcatggctaagatccagatgtctgcatttgcccaagacagtcctggtttgaatttgtgaacccatatgactattaatagtgtccccttccagtctcagaggtgtcctgtattggatgataaatgacatggccacccttcccacagctcgc

SEQ ID NO: 199190 - DNA, 444 bp, Homo sapiens
gacagagcgagaccctgtctcaaaaaaaagaaaaaaaaaaagtaaattttttaaaaatataaaataatgtatactgatcttagtcttttaatgtgtttgagaccttcatatgattattctgatttttatggataattcttataaattttcattttatttcgctgggtaggagattataggaggaagtattactctgtattttaataaaaccatgattctgaaactaaaatgatagtaaaataagaatatattaaagttcttactaaaagagtaaaagtaataattcctttaatctacagcttagggtgagactaaaggaaaaatcagtccattggaaaaatatacatagtgagaggttttgagaaatgcccgttttgttccgtctggttataagctgcccaggagccattgcttaggtggcttcttgtcacttcttctcttctg

SEQ ID NO: 199191 - DNA, 333 bp, Homo sapiens
ttaaaaattttttttgaagtccagtttatcaacttagtccttgttgcttgtgctctcgatatcatatctaagaaatcattgcctgacccaaggtcacaaagatttacatctatgtttttttctaagagttttggagttttagcacttacattaggcctgtcatctatttttgatttttgtgtatgatatcacataagggtccacattcattcttctgcatgtggatatttggtccaatatcatttgttgaaaaggctattccttgttgaaaatcagttgaccataaatgaaaaggtttatttctggacttccaattatattccattaatctct

SEQ ID NO: 199192 - DNA, 253 bp, Homo sapiens
  misc_feature (2)..(2): n is a, c, g, or t
gncgactttagagtatccccggtgaagtacatagcataatagattgatggtaattaagtagtcgtgtttaataagagtcatcagagttaaaggcattgttggaatgagcagcttgggaaagcaatgagaaggcatgaagaaaggaggtgggaaatatgttaaggaataacttttttgttacactaaaggaaagatcagaagaagaccagtgtgtctctgtgtgtgtgtgtgtgtgtgtatgtgtgtgtgtgtg

SEQ ID NO: 199193 - DNA, 429 bp, Homo sapiens
agaggagaggccatgattggccattaggagcttcatcaagcgtcagcttgcccacagctttggtttccagggagactgggaagtaacaatacaatagttcatcttcattatgagtgtaccatgccaagagctttcctaagtgctttacattcattatcctctttaattctcttaagaattgtatgaggtaggtcctattattacctctatcttacaaggaaactgaggatcagacaaggatatctagcttatccatgattaggtagagctgacaatgggattaaataatcaagtcctgctactgccaggttaagaaaacccagctctttgttgttttataacaactgggggaagctggtgtgcatcattggctgataggaagagaaattgaattccacatctatgtcctacttcatgcatggattgctc

SEQ ID NO: 199194 - DNA, 205 bp, Homo sapiens
taaaggaaatttataatcttaaatgtgtattttacaaaagaaagaatgcaatcatctatatttccatcttgagaaattagataaatccaaagaaactagaatcagggtttgtgaaacaaaagatagagaagggctggatgtgatggctcacacctgtaatcccagcactttgggaggccaagtcaggaggatcgcttgagcccag

SEQ ID NO: 199195 - DNA, 407 bp, Homo sapiens
accacccacgccaatccttgagcctagagtaacgaagagaaaggctgcaacgaccacacacaccacgacgtcagcccaaaggccacgtggctccatccacggcaacaaaatgcaagggagctccgagggacacttccgtttcaggacaggcttacggggaggacaccagctcctcccaccctatctgtagactgggtagaagggcttcttttgagcgctctgtcttcccagagaaggacgtcctggaaacaaggcacgtgcagtattaccattaaacaacatgcacatgccagtggcgctaaataaacagcagagacagaggctgcctcacccacttgctccatagtctgcatcgaatcaaggtcactggagacaaggtaaagtccacagagcccccttgcatttca

SEQ ID NO: 199196 - DNA, 417 bp, Homo sapiens
tcctcttaacctattgataggaataccttaagaggaattgaggcaccaaccatggtagagatttttctcatctcagaaatatgtcatccctcccaacagaggcagggggccattttgtgagtctaatctagatgtttatatggtatatttatttgtcctactccatctacctcccaggattttttccccaggggttcattccaggccctgagtttcaagtgtaatccatgacgagattcactcctcatcacctactgcccccacaatgttccaaacctcgtactgatcatgtcattcttcttcttttgaaaggcaagttttgtttttcttaaaaattgtagttctttcttggctcctcactcagcttaactctttctgtaccactagctggaataaattcttccttcgtcatcctgt

SEQ ID NO: 199197 - DNA, 420 bp, Homo sapiens
atttattatttctctttgtcttcattgaattctttttatttaaattctaggagaataggctttcttcttggtgagaatgccttgagttaattgagtttcctgcagtttgtggtctgccatttattgtactggctccactgtatttataaacagggcaacctttccctttgaatcaatttttcctgtcttcaagtattgctttacagaactacctaatcttttattttatgtatgcctatgtatatatacatatatgtgatatatatatctatatatatatatatacactcatgtatataacactctcctgaattacattgaaaatgccaactaaaaacaacatgcaattttagcttttcacattgcaaatttatttctaagaggatattggtatagagttcaaaacttggtccgcttttt

SEQ ID NO: 199198 - DNA, 193 bp, Homo sapiens
tgacaagcccactactaaaaattatatggaaatgtgaaagacctagaatagtcaattttgaaaaagaacaatgttgacggacttacactgtctaagaaacttagtgtaaactataataaccaagactttgtggtattattataaatatagacatatagatcaatggaacagaaagtccagaatagtttatgct

SEQ ID NO: 199199 - DNA, 399 bp, Homo sapiens
acttaaagcttaattagtaataaatggattattagggcaacttcatttatgtttatggtaaataattctcattttaatgttatatgtctggctatttattacatcatgaatgaaatatttagaaaactcctaaaccagagctgctatggctaaactgtatgatgtcacagtaatgtagctcccataaaatggtgttctaaaatagttagaatgaaagcaaacacttatgaaatattatcctgtaaatctagtttaagactagtttaaaatagttaagtctgccaggcacggtggttcatgcctgtaatcacagcactttgggaagccaaggtaagagggttgcttgaggccaggagtttgagacaagcgtaggcaacatagtgagaaactccatctcca

SEQ ID NO: 199200 - DNA, 506 bp, Homo sapiens
aagggccttcacgtacagcagtacaggctgggcactgcattgtttgagagagaaactacattcacacagtgaggtgctccctggagctgtgcagggtcaccagggcttcggggtcaccagagagacagttagaccattgaaataaatgactttgcccattcttctgggaaatttctcatcagaactacccagaatccccatctgtgagtcagctcgtccaaccccagcttagagccttctgaggcagcctcagcaattgggcatccagtcctagcatgcactcctgcctagacagagctccttgctgcccatacctccacccagcatggctctacctggggaaagctcttgctgaaccaggactggcagcccctctgccccgaccctcctggctcccacatctgtcctctgggcctcaggctcctttggcccaggcaagggcctgttgagacttagggttcaggagcctcgacccctcccccagggctcttctctttctcagcagc

SEQ ID NO: 199201 - DNA, 492 bp, Homo sapiens
  misc_feature (56)..(56): n is a, c, g, or t
  misc_feature (65)..(67): n is a, c, g, or t
  misc_feature (117)..(117): n is a, c, g, or t
gcttccaagcgagttttctcaaatcatgaaaattattaatattactgctgttaganaaatgaatnnncctacagatgataggatgtttcatgtggtgtatgcatctcggcagacaangaaccacttgcatgggagcttccttgaggtctgtagaatcagcagaatttgactgttggttataggaagaaatgttgagagccttccttctgtcagatcaagtaacaaatggagtgggttttaccccttaagttgtgttgcattaaaccttataaacatttgggctgttaagaaagcaaagctgtctctttctctgttcccagttgacgtgcgaaagatgccctcagaagcttggttaaataggtctgtgtggggaatgagcctttcagttgggttttcaagtttcttagttatgagtttttttggtagctgtagaaactgccagtctgagaactattgttccttgcctctcttggattagaagtggttccttgt

SEQ ID NO: 199202 - DNA, 450 bp, Homo sapiens
agtggtttcttttgagaatgtaggtaagaataggtgtccttgagactgaaaagaaattcacctaaaattgttcattgtggttgtatcttaaaatctttggggtcgttgaatgaactttggcttagaaatttgtagagatcgtctttttaactgctgtgagtctgcagatgtgattatctatagtaattccagatgttttctcatctattagttttactgagtaggaagataactgagaacaacataaagtaacttcaaagcagtttgctagcatttaatcctgactaatttaattaattattcatccttgtagtttttcctattttattgattatgaaactgagacaaaggttacgagttgcccaagatgcttggggagtattaaagatagcccaaagcttaaactctaacactgttcagacttttagcttgctttttcttaaaaaaaaa

SEQ ID NO: 199203 - DNA, 746 bp, Homo sapiens
tttctttttatttttccgcaccgcacaggccccgggggccaaaaataatcggggctctggagagaggagggtcccggccgcacggatatcgggccccaagcggggatggaggcgtcgggggcggccgatgcaacggattgcgaggcggcggcggcagcccgggtgctgcggccggcagctgaaaaatggctccaggaagctgctgctgacaatgaatgaagggatacggtttacgcgccaaggtcctcccgcgaaactcggatttcccgccggcttttcaaaccatatttgcatatccccgcccctcaacccgccgaggaccgttcccacagcccattgggccgctacctccttacttcagtcccaatcatggagcagggccgcgacttgctggtttccattggctgccgtgcatcatggttaccggggcgacagggaccctatttgcataggcctccttgattggctggcagaagagcagtttttagggggtggggcaaagaatttccttctctcccacggaagaccacgcctggcctaggctccgcccctgtccccgcccgcccgccgggccggcgctactgacctgggcagggactccgcgccccgcagactcagtgtagatctagtctagagcccaagtttcgcttttggaaattgtcaaggtgactaagggaacactctttcctttgaccagtcagtgcaataaacgaacagcgcaggagatttttccagatacgtgccaa

SEQ ID NO: 199204 - DNA, 682 bp, Homo sapiens
ttttattcaatctggaaaggcacaatgatttggtggaaagatagcctgcttctagttccacctcaggaactagcaagttagttgtaaacctgatgagtagagccatccttacgttttttctgtaccttcttccacatcaaacacatcagaacaacgaactctgcttgagtatttgctttgtgccagacactgccctaaataacagatgagggaactgaggcttagaaagttagtaaatggcacaaagatacccagttaatgcaaacccacaatttaaatccaggctattcaagtctactcttaccaactctcttatatcgtgttgccgagaaacgacttctggatttcttcttcctctcattcctactgtgccattgatgtaagaggtaccatcaatttaatttaataacagttttcaggaaataaagtaagcactaccaaatcaagtgtagttatagtgggcctgccttttaaaattctaaccaagtttttttccttcttggtaattccttttttacttcatgtccctgaagctaaaatcctcagggacagctaatcacaaaaaaacaggcagattcttggctattgacttctaaaattgggtcatgcaactcataaaagatagccaggagccagggttggtttttgatttggtttggtttgaattataagacagaatttg

SEQ ID NO: 199205 - DNA, 340 bp, Homo sapiens
aaaaagattgcaaagggaacacaggtaaacatcttcaacctaattcagtctgaagaaaatgatggcctttgttttggtttcaaattcattccatcctccccagaacacttttctggatggggctgtgttcacccctgtgtttctgtctcaactgtgtctcctatcaacagtgagctttcctgtccttggccttctctcctggaatttgtataaatgtctccttggtttacgaggccctctcaatgtggcaccatcatccgtgggaacctctcaacgtggcaccgtcattcatggggtccaagtgtggcacgaggttggcaatgccccatgagatttttgt

SEQ ID NO: 199206 - DNA, 438 bp, Homo sapiens
agtggagatggggttttaccgcattgtccaggctggccttgaactcctgacctcaggtgatctgcccaccttgccttcccaaagtgctaggattacaggcatgagccactgctcccggcccctggtgcagttctgatacaccttacaactaatacagccttgctgcactgtttatctcactgttagggacaggatcctattatttagcctctgactcatttgtgtttaactaagaagatgatttagatttcttgaacaggggactagctgtcaggtcgatcctgagacagttgtgagcagcacagcccttcactgagttgggccaatctctgtcccatatggacattcctgagttagcggaaaacaaagggcctttcactcctcatatttcattatccaaagtcctctccgtaagtcttacaccgcggtaaaagcttg

SEQ ID NO: 199207 - DNA, 243 bp, Homo sapiens
ggtaatatctattgttcagcacttctgatagtttatcttagagaattattgtacatgaacacaagaaaaatttagaaggatattcatttcagcattgtaacagtgaaaaactaaaacaacctgaataccaacagtaaataaatggggaataaattacagtgtaataagatagactgcagagaatatactagtaaaattgaattaattacctccccctccaccttacttagtttgtattatctt

SEQ ID NO: 199208 - DNA, 456 bp, Homo sapiens
ctttccacctcagcctcccggtaactggtagtcttcttgacaaagggtgtgccaccatgcctggctaatttttctaatttttgtagagatggggtcttactgttgcccaggctggtcttgaactcctgagctcaagcaatcctcccaccactgcctcccaaagtgctgagattacaagtgtgaatcactgcgcttagcctacgaaaatttttttaaaacattaaccggacatggtagcatgcacctgtagtccccattactcagaagcctgaggtaggaggatcacttgagcccaataagctgagtttacagtgagctatgattatgccactgtactccagcctgggtgacagagcaaaaccctgtctctagaaaaataaaaataatttttttggaaaaaaggataaaatttggctctctaaagccaccttatttcttaatgattctagataacgt

SEQ ID NO: 199209 - DNA, 432 bp, Homo sapiens
catgacctgggcacatccctctcctctcttggcctcagtttccccatggaaagctgaaatacaccatccaactgtctcattctttatttgtccccaaattacttaactcattctatagaccttagttgcttcatccaaaaagtggggaccataaccctgccctcatcccagatctgtgcagatgaaagagagggagggagagggaaagagagagatgctttggggtgtatttggccagaggccaccaggctggatcccatgaagaaatctgggtgagagggtcttaaagtcataaactgagatccagttgccaggtggctgcatagttgccaacagtgtaatgtgtcaccttttgatcttcatcagaaatctcaggctggtggccacctggccaaatacactgcagagcatgtctgtctgtctgtctgtctg

SEQ ID NO: 199210 - DNA, 572 bp, Homo sapiens
tctgaagttatctgaaaatgtcgtcatgattaaatccagcctaaacattttgccaggaactctgcagcgtccatgctgtagcttcctacctcagtccatctgcaggcagagaaggcccagtgtgtccatccccaatgcggtgatactaggatggtcacttggttaaggaggggtctaggagctctgtcccttgtaaagacatcttatttgtaagtaatttggaaagtggtgtgaaatagtataaatatcctgtattctaatgatcttcttcagaacattttatcaccaattaatcaccccgcctgtgtcagttattatatttatgtttgcacaatgaaaattttctatctcaaaatattaccttatacttgcttttgctggcattcttcgtaaaaaagattattccctgcccaaattttaactttcatccaaaattaattttaatttctttttgctggcattctgttgtgaaaaagaatattctctgccccaattatcactttcatccaaaattaattttagtccatcagttaaaattttaagttttaaatctgtttaattaaaacatttct

SEQ ID NO: 199211 - DNA, 731 bp, Homo sapiens
ccctcccttccctacacatcaagctcgaggatttgcccccacccaggactggcaaattagctttactcaacatgcccgagtcaggaaactaaaatacctcttagtctaaatagacactttcaactgaataagtaaagacctttcctacagggtctgagaaggccaccgcagtcatttcttcccatctgtcagacataattcctcagtttagccttcccacctctatacagtctgataacagaccagcctttattagtcaaatcagccaagcagtttttcaggctcttagtattcagtgaaacctttatatcccttacagtcctccatcttcaagaaaagtagaacggactaaaggtcttttaaaaacacacctcaccaagctcaaccaccaacttaaaaaggactggacaatgcttttatcactttcgcttctcagaattcaggcctgtcctcagaatgttacacaaggtacagtccatttaagctcctgtatagacgctcctttttattaggccccagtctcattcgacaccagaccaacttagactgtgcccccaaaatcttgtcatccctactatcttttgtctagtcatactcctattcaccattctcaactactcatacacaccctgctcttgtttacactgccggtttacactgtttctccaagccatcacagctgatgtctcttggtgctatccccaaactgccactctaagctcttaaagtaa

SEQ ID NO: 199212 - DNA, 485 bp, Homo sapiens
tgctatcactatacaccagacatcttcatccaactagagtcggaaactcaggttctctcagtgaatatgcgcttcgggactcgcgattccgtccccgatggtgcggggaatttctgctccagttatttcttctaatccggccacgacagaagtgcagaggaagaaaccttctgtggccttcaaaaagcctatcttcactcaccctatgccctccccagaagcagtcattcaaacccgatgccctgctcatgccccctccagctccttcaccgtaatggctctggggcctccaaaggtctctccgaagagaggtgtccccaaaacctctcctcgccaaacacttgggaccccacaaagggacataggattacagactcccaggatctctccttcaacccatgagccactggaaatgacgtcctccaaaagtgtatctccagggagaaaaggacaattgaatgatagcgcctccacaccccccaagc

SEQ ID NO: 199213 - DNA, 1615 bp, Homo sapiens
  misc_feature (1079)..(1080): n is a, c, g, or t
  misc_feature (1106)..(1108): n is a, c, g, or t
  misc_feature (1156)..(1156): n is a, c, g, or t
agaggggcccacagggccaaggccatggccgcatggctctcaacctccagctttcagacactgatgacaatgaaacgtttgatgagctgcacatagagagcagtgatgagaaaagtccttcagacgtgtcattggctgccgacaccgataagtccgtggagaacctggatgtccttgtggggtttggaaaatctctatgtgggtctcctgaagaggaggaaaaacaagtgcccatcccttcagagactaggccaaagacttttagtttcattaagcagcaaagagttgtaaaaaggacttcttcagaagaatgtgtgactgtgatatttgatgcggaagacggtgagcccattgaattcagctctcaccagactggggttgtcactgttaccagaaatgagatttccatcaattcaactcctgctggacccaaggcagaacatactgagcttttacctcagggaattgcttgtttacagccaagagctgctgcaagagactatactttctttaaaaggtctgaagaggacactgagaaaaacattccaaaagataatgtagataatgttcccagggtgtccactgaatctttcagctccaggacagtgacacaaaatcctcagcagcaaaagctggtcaaaccaacacacaatatatcatgccagagtaattccaggtcttcggcacccatgggcatctatcaaaagcaaaatctgacaaaaatacctcccaggggcaagtcttcacctcagaaatcaaaactaatggagcccgaagccaccacactactcccttcatctggcctggtgactcttgaaaaatcaccagccttagctcctgggaaactctcacgattcatgaagactgagagctcagggccctctttgaattacgatcagatccacacattccaaaacattccgcccaacttccgcacagctccaggatgcccagcaggagggactgggtccagtgccccaagagtcagactccagggtcacggtcaaggcctgccattgagtctagtgacagtggagagccccccacgagggatgaacactgtggctctgggccggagnnaggggtgaaatcccttcccctccgcnnnctccaggcaggtccgtctccctgctggccaggcccagctatgactatncaccagcaccttcatccaccaagtcgaaaccagggtccccagtgaacagcaaggacccattcaaatccccgctgctgaaaggaatttctgctccagttatttcttctaatccggccacgacagaagtgcagaggaagaaaccttctgtggccttcaaaaagcctatcttcactcaccctatgccctccccagaagcagtcattcaaacccgatgccctgctcatgccccctccagctccttcaccgtaatggctctggggcctccaaaggtctctccgaagagaggtgtccccaaaacctctcctcgccaaacacttgggaccccacaaagggacataggattacagactcccaggatctctccttcaacccatgagccactggaaatgacgtcctccaaaagtgtatctccagggagaaaaggacaattgaatgatagcgcctccacaccccccaagc

SEQ ID NO: 199214 - DNA, 607 bp, Homo sapiens
  misc_feature (523)..(523): n is a, c, g, or t
gagatgaagtctcgctgtgtcgcccaggctggagtgcagtggcgcgatctcttctcactgcaacctccacttcccgggttcaagcgattctcctgcttcagcctcccgagtagctgggactacaggagtgtgccaccacgcccagctaattttttgtatttttagtagagacggggtctctccacgttggcccttcccactccttgtcagaagcagcaactcatctctcaaagaacaggctcagtttgtttcatcaccgaagttaggcggtagctcggaaaccccttctctttgctcacatctctgctgagcctctcttgatggagacctcctgagcctggcttcactctgccggttccacctgggtggaatgcgtgtgtggaaacaggtgacgggttaagcccttaggaaggtttctggtccgtggcctctgtcccccaccagctcacgaggcattctgggcaataacgcatccactctatccgcctcctcctcattacgcctgtctcattgcttactccangctgtagttcccaacatgtcctcaagagtttgggagcgctctgacactgcacgcaaatcccggtcgaccgaatcctcgagagtc

SEQ ID NO: 199215 - DNA, 191 bp, Homo sapiens
ggtggatggataaatggatggaaagatagattggtagacacatggtagatgggtggatggatgaactgcaagtgtaaggatggtagggcttaggctggccatccagggcctcacacctgggcattcagtagcagcttacactaggaaatcgatgagagagtgtggaatcggttgtccagtgtgggagatat

SEQ ID NO: 199216 - DNA, 467 bp, Homo sapiens
tggcccctccctgcatgccatggcttttcaaaatgtgccatggtgaagaggactcctgatcacctgttactcgagcctgtcaccagctggcttcatcacaaagagaacttaccccttacatgcctggaaagtcctagggctgggcgtggggtcagctcacaatgtccccccaaccccacacccatgagctggaaacagatgagggggtgccgcacaggaaagcccccgggagaggaacggatgctgctcaggcaggagcaggtgctccgagctcttcctgctgggttgggctcctccaacccccaggtccactctcctgggactgcgcacatggcctccggaggcccctgattgctctccttcctgtctcccctgaaaggcaaagctttttctgccagcacttagcatttgtagactttacagcttgccacacattttgtactaagtaaaattatttgttgatttat

SEQ ID NO: 199217 - DNA, 331 bp, Homo sapiens
acggctatgttctgatagtatagcctagagttttctatctagggttattatggttttaggtctaacatttaagtctgtaatccatcttgaattaatattagtatacaggtgtaagaaagggatccagtttcatctttctacatattgctagccagttttcccagcaccatttattacattgagttatgtcccttgtatgccagtttttctgagagttttaatcctaaagggatgctggattttgtcaaatgttttttctgtgtccgttgagatggtcatgtgatttttgatcatggtggattttctttttgataagttgttggattcagtt

SEQ ID NO: 199218 - DNA, 348 bp, Homo sapiens
gattgggtgcaggtgatgctgattggatgcaggtgatgctgattgggtgcaggtgatgctggctgattgggtgcgggtgatgctggctgattgggtgcagatgatgctggctgattgggtgcaagtgatgctgattgattgggtgcaggtgatgctggctgattgggtgcagatgatgctggctgattgggtgtgggtgatgctggctgattgggtgcaggtgatgctggctgactgggtgcaggtgatgctgattgcttgggtgcaggtgatgctggctgatcacgtcgatcttgtccaggaagtactgggcacagtcaatcagctggtactcgtagaagcgtacgt

SEQ ID NO: 199219 - DNA, 487 bp, Homo sapiens
taccgcgcccagcctccttgtccattttttaaggccaaatccacatacaattttttatcttgatacatgttttgagagtaattagtggaatagagctgagtgacttgttttatgtccccagatggattcattgtgtgtttcccactcctcaatcatgtacaacatagaagtgcagttggagagttacagaattcttctctttgttctcagtgccctcttgagaagagtagggttctatcagtgacttcttccttttcacttccaattggtcagaaatttgtactattagatgcactagatctttactattctcatttcattttttagtgtctttctgtcttctccaattctccatttatgtgaaaaataccatcattctgctcttgatccagtacctttgtctgggacactgtcttcattcctttttagccccatactgtatagccatgggtcaggctctgttactggagcgtcagtctaggctgac

SEQ ID NO: 199220 - DNA, 1318 bp, Homo sapiens
accctccccatgagttgttgataattttcaaacctatacagatgtggaaaagagtttaaaaaactgtgttcacccatcgtgcagtccagaagccatcccctccaaagcccccttgcctaatctgttctcccctgccccactctctctgctgaagtaccttcaggcaaaccccgggcgctgtggcatggtatttgcgaccctctctgaagccactgcagtgccatcaagtcagagacacatgcacggtgactccgtggggtcatccgatgccaagtctgcgttggggttgtatctcaagtgtgtctttggatagttgtgaatcagattggactgcatcgcatgagggcttagggttcctaggcctctggtaagccgaatagccccttccctccttcagctgctggcttgtagatctctgtagagagatgtccctcagcctcctcctcagtctactgtcagctcccgagccagatgctggctctgcaggcttggatcccacttattggtgagtgtgccttccacgatgtggcacatcaggagacatggcgtccataggtcctgtcctggtggcttaggtactacagccacgccgcccactcagagttcacatttgccatccatcgataggggtaatgcccaagtccccactggccgcccatccacaggggtcacagctgagtccccactggccctcttccatagaggtcttagccgagtccccactggccaagtcttagccaagttcccattggccctctatccatagaggtcttagccaagtccccactggccaagtcttagccaagtccccattggccttctatccacagaggcatggccaaatccctattggccatctgtccatggggatcttggcctgagtttgtttctttggaggtcattgtcatttatgaggttagattcttctataaagagaccgttccttgatcaccctcagctttttgatgacctgaaccacactttggacagaaatgctaacttctttccctttaattgccagctttcagtgtgctcctttcttaacatctcttaaaaatagaaacggtatttgttgtatgattcttccactcccataggtgcttgagcatccccacagtaagtttaaaaatagagcgtgtcactacctctgtttgttttcttgacatttcaagtgtctgtttttaattggatgatttcagggacagtttctgaaagggacattttacctgacatttgatgaggttcctaacactatgagtttctaggtgaagtgtatagtaaataaaataaataaaataagataatgctttcccaattc

SEQ ID NO: 199221 - DNA, 565 bp, Homo sapiens
aagtggtgcatctcaatctctttttttcttgataatggataatgaggcttcttaattcaagtcaattcagtcatatgagtctaaaacgcagccttttttgggtaacaacaacaaaaagtcaataatttgaggattcttcctttaactcttatttccttctctgagggcgtggtctaagtttctgacaggtttgtcacctctcctgtccctcagggaagggagtctcatcccagctgtccttgttctcactggcctcacttgacacgtggccatccccttctggcctggagtgacagcctctattccagctgccgatacccatggctctgccctggcctctgtccagccccctagcctgccatgctctgtcccctgtctgatgatgtccacagctcttgggggtccctatgttcctgggaggctgatcttagggtccccactgccaaccgttgctgtcctattctattactcagacagattgtagtgtcctagctatatcttggatgccatgcaaaaccttttttgttctggaattcccataaacctaataggatcactctgaaaa

SEQ ID NO: 199222 - DNA, 401 bp, Homo sapiens
atgaaaaatactaaatttatttccataaatgacatatttctgtgaaaagtaactattttttgaaacaaggaaagtgagaaaacgtcattgtttcacatttttgaaaatcttttatgtctggcttaatagaagacaatttcttttatctgcttctgcattcagtctattacaacatgttattttggatgaaacatataaagaaactttggcttcatgcagatctttagatggaagcgggagaaaactgtagggtcttaagaaccgtatttggaaaacgcttctgtttaagagctccataagatttatcatggcagaaaaaataaaaattaagaatgcaaaaagaacatgtaacaaattgtgatgtttttctccccaaagtaggctattcattgtgaatttcc

SEQ ID NO: 199223 - DNA, 660 bp, Homo sapiens
  misc_feature (32)..(33): n is a, c, g, or t
  misc_feature (38)..(38): n is a, c, g, or t
  misc_feature (49)..(50): n is a, c, g, or t
  misc_feature (54)..(54): n is a, c, g, or t
  misc_feature (77)..(77): n is a, c, g, or t
aggctggcgggcgcggggaaaatggcggcggnngcggnggcggctgcanntacnaacgggaccggaggaagcagcgngatggaggtggatgcagcagtagtccccagcgtgatggcctgcggagtgactgggagtgtttccgtcgctctccatccccttgtcattctcaacatctcagaccactggatccgcatgcgctcccaggaggggcggcctgtgcaggtgattggggctctgattggcaagcaggagggccgaaatatcgaggtgatgaactcctttgagctgctgtcccacaccgtggaagagaagattatcattgacaaggaatattattacaccaaggaggagcagtttaaacaggtgttcaaggagctggagtttctgggttggtataccacaggggggccacctgacccctcggacatccacgtccataagcaggtgtgtgagatcatcgagagccccctctttctgaagttgaaccctatgaccaagcacacagatcttcctgtcagcgtttttgagtctgtcattgatataatcaatggagaggccacaatgctgtttgctgagctgacctacactctggccacagaggaagcggaacgcattggtgtagaccacgtagcccgaatgacagcaacaggcagtggagag

SEQ ID NO: 199224 - DNA, 979 bp, Homo sapiens
tcttccccttccccaggggagcttgtcagtaaccacagaaaatcttgctaaatgtcaggaaccagaaatgcagtgctgttactgtaacttcctgaggtcctcggaaaccaggacttggtctcagctcacgtttaacactaagagcgctgatatatcggtcaccgatgtgtgccgaatggtggactaagtgcttgctgtgcattttatcttaatctgtgccgcagccccatttagtggatctgattgtccccattttacagatgaggaaacgggggctccgcaaggttaggcaggttgctcggagtcacatagctagtgagtggaagagctctgacttgatcccagcctgcctgattccagaactcatgtccttagccactctgcaaatctacctctctcaaaagttccagacaggtgaaccctaacaggtgcaactgattgccagggtcagggatgaaaagtctcctgggagagcagaggcagggacccaggtctcctgggacccatcaggatgctttccatcaacgcagactttttctggggggcagcagcagtgaccgtggggctggtggcctgggctggggtgtttgactccagtcagcccatctgccaggcgggcccagtctcaccacgcctattcgctctgattcctgccaaggaccctgcctccctccttgcaggctcaggagcctccatggcccctggatgaatctcccacttgcctagcaatcagagtcctcttccccagcagccaccagaagagaggctgccttgctggtctcagggagggggccggctcaggctgttcatgtgttcattcagcaaacgtttaacatagattcagagccagggagtgtgcaaggtgccaggatccaagcacaccagcaaggcaggcacggtctgttcttcccttgtaaagctcttgtaacgggggctgggaactgtgcatgggactctgggatcacgctggagtatgggg

SEQ ID NO: 199225 - DNA, 406 bp, Homo sapiens
actaaggggttgagccccgatcctatggacagtggaaaccactgtgagttttggtatagggtgtgaggtaggggtcatgtagaggtttggctctcccagcaccaattgttgaaaagactgttccccattgaatgatggtggcccccttgttggaatgaattgaccattaccataaggtatggcaggcttttgagagaggaatcatgtggtcagatatgtattatagaaagatcaggtgagacttgtttggactgggaatggctgggaggaggaggggttggagggaggctcttatgggtggacttgatggcagggggacagaaggggcatctggggagaagagacatccctggatcagcccatggcgggcagcaaggtacagggctatgtcctgagccaaggccag

SEQ ID NO: 199226 - DNA, 445 bp, Homo sapiens
ttccggtgactttgaacaatgtcactctcccgggtcaccatggccggggtggcggtctctccctgcgcaacgctcctcggaagtgaagccatctccccgtccctctgcccttactcacaggccctgctaccgggcctgtccttcccctgcttggaaccctttaggtgtcccctcagccatttggggctgagcccacttggctctcctgccgtctccccaggaggcagcttgttttgaagcgcctgcgtctagtaacctgtcgctgccttgcttctagcgcctcttaggcctttctgatgtcttctctgctgtatctcccctgcctcttagcctttatgttgaaactctcccaggttcaaagggtttttgcaccgggaagccatactcaccactatttgtgttgttttgggctcaatttattaaactcatacatctgataccatct

SEQ ID NO: 199227 - DNA, 302 bp, Homo sapiens
ccgcctcagcctcccaaagtgttgggattacaggcatgagccaccgtgcttggctggttctctctagtttcagtgagaaccgaatggtccctagggtgggtgatggagcagtcttttaaagatgattgtgttaattataatcttggtcctaaattagaaaaatgaaaaaaagtcttcatagaagtcataggcaggccaggcgtggtggcttattcttgtaattccagtactctgggaggctgaggtgggaggatcgcttgaggccaggagagaccagcctgggctctgtctctaaggaaaaa

SEQ ID NO: 199228 - DNA, 463 bp, Homo sapiens
tgtaaagcaaacccaaatcaagatatagaatatttccaacacccccaaaaagttcctgcctgccttctcccttccatcttctctttaatggccatgaaatgcatgtgtgtgcatgtatatgtgcctgtggaggggagggtggcgggcggatgagattactggacagctggcatttctgttccttgcaagcagcaaagtcaacagggagcccccaccagtatgaaactgaaagcatcaagtaattcagaggcatcagcatttctttctgtctaatgatttttatatacaacttaggtaccttatgctctcaaggtagaaaatacagttccgggcaaactgcatttcttttgctggcacacatggagctgtggggcccacctagcagcaaagcataaacccaacagggttgaggcatcaccactcatctttaaggctcctttaagcggtctcgtcaccctggaaa

SEQ ID NO: 199229 - DNA, 445 bp, Homo sapiens
gtctggtgcagtggctcacactttcaagcccagcactttggaaggctgaggcaagaggattgcttgagcttaggagttcaacaccagcctgggcaacatagtgagacctcgcctctatgaaaaataaaaaaattagccaggtgtggtgatgcatacctgtagtcccagctacttaggagactgaggtggatcaaggatcacttgagcctggcagattgaggctgtggcagcctgagttatagagtgagaccctatctcaatgaaaaaaaaaataggctgaacaaactgaattaaataggaaactctcaaatatcttaataactaagacaactatcaaaagactaccggatgacttacatgtgtataaaagggaaactaagaccctcaaaagttcaacatcataacagccatcaccatcaccatcaacagtaaagtctctctctcc

SEQ ID NO: 199230 - DNA, 534 bp, Homo sapiens
tccttctctttctttctctcactcacacactcaccaccaccaccaccagcccccatttaaatacaacaaaatactgctacaggctgctggatattcaaggtggagaggacacctgaactcatctgaaagaccttaggtaagtatttattaccctgtgccttaaatttcttccaaagattgtaattcaggccgggcatggtggctcatgctgtagtcccagctactcgggaggctgaagtgggaagactgcttgaactcaggaggtggtggctgcagtgagctaacttcatgccactgcagtccagcctgagtaacagagtgagaccctgtctccaaaaaataaataaataaaaataattgccgggcttggtggcacacacctgtagtcacagtcgctcaggaggctgaggcccaggagtttgaggctgcagtgagctgttactgaactactgcactgcaagcctgggcaacagagcgattaaaaaaaaaaaaggcgtggagcgtatccttgcgccttccctaaagactttgatt

SEQ ID NO: 199231 - DNA, 465 bp, Homo sapiens
cccaccagggtgtagaagggatcacctgtaagtgactgggaaggtgacccgcaccgtcacattctcactcttggccaaatgtgttggaggttgatggttctctttgcctggtcacaatggattcagtattccagacactcctagcacattgttaatgtttagtaaacatgaactaatggactcagggcctgatccccttcagagtagggtgagtgctttgtctgtatgactgtcctagggtatcaaaagctgtcacagagtagatctcgtgtcctcaatgatagcagcacccattctccaagagctgtgtgttcgtcctgattcacagaaatctctccccttccaattgttcccgtattagtaagaggaaatacatttagtatgagcaagaatgggtgcaggtgatttctgggtggctcttatttacatccatgtgtacctgtaataaaagagtttcctaacttt

SEQ ID NO: 199232 - DNA, 581 bp, Homo sapiens
gtacagagaccaaaggcctgagtgttgtgaggatctgtaaaaatgcagaaccctgagaatattgagacaactgaccatcatttaaagatatatgtgaatatgaacatattctttttttcttttttattgttatagagacagggtcttctattttgcccaggctgctcttgaactcctggcctcaagtgattctccagcctcagcctccccaagtgctgggattacaggcatgagccactgtgcctggcaggacatatttcttaatgtaacatgttaatacttatttagccatgttattgtgggaaaatgaacaccaattaatgtcctcagtagagaagggcaatcagcttcttgtttatccatatacatataactatgatgctgcaaggactaaataaaggcctaataaccacataagccatagaaattcatggggcagcatccagtaggaaaaggaactctcacttgagagttgagaataatagggtttgagttcccaagctgccatgccaaccaagtataaaacacgatggttgaactacttccagaaagttccttccagaaagaatttttttttattc

SEQ ID NO: 199233 - DNA, 219 bp, Homo sapiens
aatcttctcttgctctgtcctcagttgaaaatgaagctgaccatggcacctgtgtcacgctcagcacatgggcttgtttattcaagccattgggagatgctagaactcactccttgtcctacctgtcaaaacctccacaggccttggaaaagagtaagtggtagggccaggcacagtgactcacgcctgtagtcccagcactttgggaggctgaggtgg

SEQ ID NO: 199234 - DNA, 125 bp, Homo sapiens
tattccttaaagtggaactggcctataaaaggattgaaaacgttcatagatctagtggcacattgcctgagtgctcttcagaaagcttgaaacagttaaaagtgccattagcggagactgtctca

SEQ ID NO: 199235 - DNA, 455 bp, Homo sapiens
aacactgagctcctccatgcccttactggcagaacaccagccagacacctagtggcaggtggatgacattggaccacttccatcatggaaggagaatgatttgtcatcactggaattgtcactttttctggatatgtatttgccttccgtctgcactgcttcttccaaacccatcatctgtggtctacagaatgctcaacccattgtccacagtattctacacagcactgcatatggccaggagagctcattttacagtgcattaagtgcagcaacaggcttgtgtttgtggaattaactggtcttttcatctccccatctccctgaagcagctggcctgatggaactgtggaatggttgctttaagactcccaactgcatgacaacaatttgtggggctgaaggaatgtcctacaggatgtggcatgtgctctaacacagtgacaaatatatct

SEQ ID NO: 199236 - DNA, 581 bp, Homo sapiens
ggaaggatggcaggatctgctggtagactagattggaggtggggagtgaaagaaagagaaagtcatggatgactgcaatgcgtggcctgacaaccgggaatgaggaagaattaagtaacagcgagagaagagcaagtgtggtgggcaatggagattaggagtcccatcaggcatgtgcaaagcttgaagtgcctcttacgtaaataaacagagatggtcaagagagcttcatagtaggtcactggatgctggtcttgaatttccagagctgagcataactttggaagttaccagttttgattatttccatattattgtgagaattattttagtcttattatctccattgtatgtggaaaaatctgttttcccactatattaaaaactcggtggagagagaacatcatcggcagagtggtttgcctcgtgacagataaatgcaagtagatagtataaaatgaaggctcaataaatactgatagaacttgtgataatacatttttctttatgggtaatttacttgatataataatttttgttataagaacagttttaaagacttttaaacatgtttaatgttg

SEQ ID NO: 199237 - DNA, 491 bp, Homo sapiens
agggacttccagtcctggctataatagaataacttgtagctcacacagaggacaactgctggtgaatggattgacaaagtatagcatattcatacagtagaacacaattcaacaataaatgccaatgaaacaagaatccatcatgaatgagtgtcacagatactacactgagtgagagaagccagactcaaaagagtacttagggctgggtgcagtggctcacgcttgtaatcctagcactttgggaggccaaggcaggtggatcacttgaggccaggagttcgagaccagcctggccaacattgtgaaaccctgtctccacgaaaaatacaaaaattagcagggcatcgtggtgcacacctgtaatcccagctactagggaggctgaggcaggagaattggttgaatccgggaggcggaggttgcagcgagccaagatcgtaccattgcactccagcctgggtgacagagtgagactccatctcaaaaaa

SEQ ID NO: 199238 - DNA, 451 bp, Homo sapiens
tccctccctccctccctccctccctctccaagatatccagtaactgactgatcagctgggggtgggctctgctggctgccaagatgggccaccagcaaaaagggaaaattggttgtgagtgagaagaagagataagaaattccacagggctgataagaaagaccatgggcttccaggcgcggtgtttcacgcctgtaatcccagcacttgggaggccaggatggtcggatcatgaggtcaggagatcgagaccatcctggctcacatggtgaaaccccatctctactaaaaatacaaaaattagctgggtgtggtggcaggtgcctgtagccccggctaattgggaggctgaggtgggagaatggcgtgaaccccaggaggtggagcttgcagtgagctgagatcgcaccactgcactccagcctgggcgacagagtgagactgcatctca

SEQ ID NO: 199239 - DNA, 218 bp, Homo sapiens
ttttattattcattttataatatttaaagtttatggaccaggtgcagtggcttatgcctgtaatcccagcactttgggtggcttgcttgaggccaggagtttgagaccagcctgggcagcataatgatgtatatgttattaaatgaaaactcatagattttttttcctaaaatacagaatagtttatttcacttttaaattagtgtctcccaaagctc

SEQ ID NO: 199240 - DNA, 486 bp, Homo sapiens
gaatttggacaaatgacttaacctcctcctatcctcagtcttgacatctgaaacatggggataatcaaacccatctttgctgggttgtgaggctaagagatgacacatgtcaaatgtctaccacattgtctgaacacaggagaaactcaacaatggaagctactatattcactaaagtatgtcatatccacctcctgtccttgaaaagaaaaaagaaaggtttaaaaataagcttgctttttaaggtacccatactacagatggaagcaaagcaccatggaagtaaaacaatggatgattctgcctcctggtggtaaagcgcagcagcacaaaacatcacagcaaaaattggtttcatattctattgcttttcttaagaaaaatgcaaaccaagaccagagtttgagttttgcccctaatattttagaagtaaatatattaccacaataacttctgtatttattttaataacattaatacatgtct

SEQ ID NO: 199241 - DNA, 653 bp, Homo sapiens
tttcatagacttctaaaagggtattttactgctttttcaaaaagcctcagatggtttctttgttaagaaaatgttattatgagcattaatctttctatacctggataaacactaatgttaaaagctggtttatattcttaaagtactttctttaaaacctcattaatagatacatcttgaacatttgattactggtactgaaattttatatggttagtattggctaagaaagactataaggtatacatgttataggtaagtgattttcaataaaggtactgttggtatttggggctgggcagttcttttttggggtagaatactgtcccagacattgcagggcatttaaaacttgagacttgtggtgcttggcatggtggctcacatctatcatctcagaactttgggagaccaaggcaggagggtggcttgaggccagaagttcaagaccagcctctgcaacatagtgagagcctatctctacagaaaatttaaaaattagccaggtgtgatggtgtatgcctatagtcctagttattcaggagcctgaggcagaaggatcacttgagctgaggagtttaaggttgcagtgacctgtgattgtgccactgcatttctagcctgggtgacagagtaagactctgtctcaaaaa

SEQ ID NO: 199242 - DNA, 526 bp, Homo sapiens
tctttgatgattggaactatgatcggtaatatattacgtgctaacttttccacctccgtgtctttgttcatgccatttcttctacctggagcccactcccttttcttgagttcatagatttctttcttccatgatttccacttcccacctttcaagctgataagtatctttctttctgaattcccgtaacctattttaacaggaagtataggtagtagtttggcacagttcctctggagtcagatgatctaaattcaaatcccagatctgccacttactatctctgtaacttcggacaagttatttcacctctatgtgtcccagttgccttaactgtgaacatgggaataacaatatccatatcgtgggcttgttgtgaagaccaaatggattaaagcacatggagaaacagcacaatacctgacacaagatgaatgtctatcaaatgttaactattacttacatttactttctgacatttattatatactcccttgtttttaaaactgtacttacataggccata

SEQ ID NO: 199243 - DNA, 631 bp, Homo sapiens
actgagtcttctcaggtgtcaggtgaaagggctgactatatttgggcgaaagatattttcaggtgtaaacttccgtgagttgtgatttggagctgtccatgatcacagcatctgaaagaaaacaaattctagagcctacagtatttccattttgagggaaaaaaattttcacaaaatcagcttaaaaatcaaacatttttcatcatttagagcaaagtaaaaaggactaaaaaaaagaaacaatttagagtatatagcaagtgcaaaaacgctgagagagcaatcggggtgggttgctacaggccaatgtactttcccttatttctttccaaagtctcgggctgcaggcacacagatgtgctgattgtcctgcatacccagctcaatgggccggtcagggtatgggtggcatttcagatatgctttctaagccttttgagaattcaaatgcacagagtcatttctatttttgcagagctacaataaactggagggccgttcaaacactgaatgaaagcgttcattggataaaaaacatcttacttccagacccttagattatattgtgattgaacaggagtctggaaaggcaggcttaaaattaacaatcactcactattctaactcagca

SEQ ID NO: 199244 - DNA, 363 bp, Homo sapiens
aaagaatctattttcttaaaaaaaactactagaagaaatgaatttagcaaagctacatgatataaggtgcatgtaacagttctatgtctacatcctagcagcaaataatgggaaaatgaaattttaaaaatacgatttctaatagcatcaaaaaatacaaaatatttagaaaaatgtttaacagaaaaatgcgtaaaaagagctccatagcaaaatctacaaaaaaaaaggcagaaagaaactaaaaacctaacaaatgaagaaatataccactatcataaattagaatgtgcaatatcactgtgattaatgctcccaaagttggtctacggagtcaatgcaatcctaatcataaaccctagc

SEQ ID NO: 199245 - DNA, 858 bp, Homo sapiens
gagggcggggcaagagggatcactctgagagaacaaaaataggccccaagttgctaagcagtgattgggaaccttcctttccttggcggagatgcatgacattccctaccgatccccagacacagcctgtgggactcttaggagaaatggtgatttactgaataactgacccgttgccgagatgagtacaatgaagtggaggtgatgaactcaaatcgtcttccagggccaggcggctgaccggggtgagcgtagtggcccgctggggaccatggccgccctgacagccacacccacctggagctgacttggttctggctgttgctgccactgtgaaatctgtatctctctccatctctgctctactatccccggccttgccagacagtgttctttttcggaagaagtctagatttttgcatgaaaaaaactcaatctttaaaggtcgactcagaacattttaaggaggcctccacttggtctgatgcagtcttgctaattaagaactaaaggccttctgaccttcttggtgctcatgctgtacggcatctgaatgtctcgaccgagtctgagccgtgcagctgtcctccacctgcgaaagtaatgagaatcctatcacgggacataaggataggtctaaacagggtccatgccaagaaaacagtggggtgctctcccaggcctctcccctgtccactaaccctggccttgccggctgccttccaggctctgggggaagagctcctgcattcttccctggccaccttggctccagggctccccagagagcctcttccctccccaagtacctgagaaagatgagagaggcacgtgctctgctgggaaggtccagtgagc

SEQ ID NO: 199246 - DNA, 489 bp, Homo sapiens
gagggcggggcaagagggatcactctgagagaacaaaaataggccccaagttgctaagcagtgattgggaaccttcctttccttggcggagatgcatgacattccctaccgatccccagacacagcctgtgggactcttaggagaaatggtgatttactgaataactgacccgttgccgagatgagtacaatgaagtggaggtgatgaactcaaatcgtcttccagggccaggcggctgaccggggtgagcgtagtggcccgctggggaccatggccgccctgacagccacacccacctggagctgacttggttctggctgttgctgccactgtgaaatctgtatctctctccatctctgctctactatccccggccgtaccctaagcctggtgcgccgtgaagtggcgctggacggcgagccggtggcgttgacccgcaaggaatacgcgttgctgtcgctgctgcttgcgcaacgcggggcgcgagg

SEQ ID NO: 199247 - DNA, 814 bp, Homo sapiens
gagggcggggcaagagggatcactctgagagaacaaaaataggccccaagttgctaagcagtgattgggaaccttcctttccttggcggagatgcatgacattccctaccgatccccagacacagcctgtgggactcttaggagaaatggtgatttactgaataactgacccgttgccgagatgagtacaatgaagtggaggtgatgaactcaaatcgtcttccagggccaggcggctgacagccacacccacctggagctgacttggttctggctgttgctgccactgtgaaatctgtatctctctccatctctgctctactatccccggccttgccagacagtgttctttttcggaagaagtctagatttttgcatgaaaaaaactcaatctttaaaggtcgactcagaacattttaaggaggcctccacttggtctgatgcagtcttgctaattaagaactaaaggccttctgaccttcttggtgctcatgctgtacggcatctgaatgtctcgaccgagtctgagccgtgcagctgtcctccacctgcgaaagtaatgagaatcctatcacgggacataaggataggtctaaacagggtccatgccaagaaaacagtggggtgctctcccaggcctctcccctgtccactaaccctggccttgccggctgccttccaggctctgggggaagagctcctgcattcttccctggccaccttggctccagggctccccagagagcctcttccctccccaagtacctgagaaagatgagagaggcacgtgctctgctgggaaggtccagtgagc

SEQ ID NO: 199248 - DNA, 489 bp, Homo sapiens
acaaagttcttttcccttcacaatttcacatatagaagatttgttcttactatagatcttagaaacctcaacatatgatttttttctttccttgagtaaagagctttcacttaaaagaacccactttatggcttctctttggcatgtttgaattgccaacattactacttctgggctttggggccattattaagtcacataagggtacttgggcacaagcacaatgatactgcaacagttgataggataaccaagatggctgctagtgactaatgggccaaggttctgggagcatctacagtgtggatatgctggacaaagggatgattcacatcccgggcaggagtgagcaggatgacatgagatttcatcacactactcagaacagcatgcaattttaaatttatgagttgtttacttctggaattttccatttaatattttcagactatggttgacaacaggtagttgaaaccacatgcagaaaga

SEQ ID NO: 199249 - DNA, 470 bp, Homo sapiens
ggagaacagagtcaccctggctgacagccagctcagccaggacattagagacggggtttcaccatgttggccaggctggtctcgaactcttgacctcaggtgatgcaactgccttggcttcctaaagtgctgggattacaggcgtgagtcaccgcgcccggccagtcgaactctttcttctgaggaggcaaggattgagattgctgcagaacataggcattggccgtcagtaatataccgtgtgactcagaacctcccccgcttctccctgcatcaagagctggggagacggcagcgtgggactcgtgggtaatcccctgcagcggcctgccactcctcccccactgcctggtctgggtggggcacaagactcaggcctaagccaatcagagccttccctggctgcagcaatgggtctaagggccctccctctgtgaccctggccttggccaccaggcttgctttggcca

SEQ ID NO: 199250 - DNA, 451 bp, Homo sapiens
gatcctgtgaataaaatggcgcagacgtgcttgtgcggctttcctgctggagtccatgagcgtctcgaggatttggataggttgagcctttattgggctgtcaaggtgtcttcctagacctcatggtgtcactgaattggatccattataaccctccattcatctgcttggctctcgacagactcacaaatgtgctcagaggccaagtcaccctgtgtgctgccagcccggggcatgtgtgttcatgtcatgtcacgatctgttcagagtactgtcatcagcaacagagcatggctcggcacgcgggcaaaactgcaccaaccacgatgcatggacacagcacccatctagccctgacctggtggtttgtttgtgtccccttgctctgccctacccaaggaggatggggggttcagtgtgtaaaaaaataaagtctggactcatagataaa

SEQ ID NO: 199251 - DNA, 290 bp, Homo sapiens
ctagaggaccccaaagatctttgagcatcactcatgatagccaaaaggtgaaagcaggtcgagcacagtagctcttgactgtaatctaaacacttgctgggattacaattgtgagctactgtgcccagccaaatcacagatcttaatgcaaaagctaaaactataaaggttctataagaaaacgtacagaatatcttttttttttttttttttttgagagagagtcttgctctgtcacccaggctggagggcagtggtgtgatctaggcttactgcagtctctgcctccc

SEQ ID NO: 199252 - DNA, 397 bp, Homo sapiens
ttaacctgctttgataatgttaagagaaatggatctatatgcacatccgccattcttaaatggatgtttatggcctcaaacacactggacaaaaaatctaaaagattaaaattttattaaaattgacaggagcatcactcatgatagccaaaaggtgaaagcaggtcgagcacagtagctcttgactgtaatctaaacacttgctgggattacaattgtgagctactgtgcccagccaaatcacagatcttaatgcaaaagctaaaactataaaggttctataagaaaacgtacagaatatcttttttttttttttttttttgagagagagtcttgctctgtcacccaggctggagggcagtggtgtgatctaggcttactgcagtctctgcctccc

SEQ ID NO: 199253 - DNA, 905 bp, Homo sapiens
ctacgaagagagcggtttaaaatgggcaaaaattaaaacactacggtgtaaggtactaaatttttatgcgcaacacagggcgacaggttttaatacaccctatgtttgaatacccctggagatgttgacatcctgaacccagagcaaacatcttggttcagggtcctcaaactttttacttcatgagccttctaaaacaatttcgtaaagctgtgtatgttcttatacagtttagaatgacagctacatttttccggcttataaatatttcatctgtcgcattgtttaaatactgtatagccaatggattctaaataccatagggatttaacacccactaatatccatttttttaaaatacagtttggaaaatacaatttccaaatattgttttctggaactcatattgacgttgcatatctcctctagaattttatcctagtaatatattttatatttgaactattttgatcgtcttacttgtaataaaaatgtgaacataaaaaaaaaagcaaaagacaaaacaaaagagaaaaagagaagaaagaagaagaggagcgagaaaggaagggaggaagagaagaagagagaggagaaagaggagagaggggcagaagacgagtaaaaaaaaaaaaaaagaaagaaaaaaacaaaagaaaggacagagaaaaaagaaaagaaagaagaaggaaaaaaggagaaaaagaagaaaaaaacaaaaaaacaaaaaaagaaaagaacaaagaagaaagaaaagcagagagaagaaggagaaacagaaagaggaaaacagaagcaaacgagagagagaagagagagaagaggagaggaagagaggaggagagagagacagaagacagcaaggagaaagacaagaagagagagagagaagaagaggcagagga

SEQ ID NO: 199254 - DNA, 346 bp, Homo sapiens
aggggaagggcggactggtttggggatgaaactgttccacctcaaatcatcaggcattagttagattctcataaggagcccgcaacctagatccgtcctgtgcacactttactatagggttcgagctcctatgagaatctcaagctgccgctgatctgaccggaggcggagctcaggtggtgatgctcactcgcccactgctcacctcctgctctgcagttcggttccccacaggctgccaaacagtacggtctgtggctccgggttggggatccctgttttagatgatccacttaaaagagacagtatttacttccgactttgtttcctctccctgagagtggtg

SEQ ID NO: 199255 - DNA, 625 bp, Homo sapiens
gtggctcctgcctgtaaccccagcactttgggaggccaagacaggtggatcacctgaggtcaggagttcgagaccagcctggccaacatggtgaaatagccaggcgtggtggcgggcacctgtagtcccagctactccggaggctgaggcaggagaatctcatgaacccaggaggcggtggttacagtgagacgagatcacggcactatactccagcctgggtagcagagcaagactctgtctcaaaaacataaaataataaaaagatagataaattaataaaacttccgagtgctcaggtgttcattggacggtgcacgtagaggacattgcccgtggcagagagttctattggatggtgctgctctggtggttccaggagtgaatggtggccgtgtttgctttactagatttatagcatgaatgagccccagttcgttcccaagttagtgaacaacaggaaagtcaagtaacttataagtggaaaagtatgtttgatttgtattgggtaagttacaaggaagattttttttttcacactggagactaagaaaagagaagaaatagattcttaagagaacttttaagaaaagctttcttaagagaagaaaaagggtttttcttt

SEQ ID NO: 199256 - DNA, 351 bp, Homo sapiens
tatgtatatatatatataaattataggatgcataatactatatttgcaaagatttattcgaactgtgttttacgtttatcagctactagttatatgcagcaagaaaagctagtaaactgttcttggctcttggcctattatttttcagtcttattctgagagagcggaaaactcagagaaaggctgtattccctggatgatgaggggaggagactgttggtgcccagcactgctggtggctttcccgagggtttcacaacttagattttaacctgctctttttatcgttggtaaattcttttagaaaaagtacttagaaagtagaagtgggattcctaccgtcaaagtgca

SEQ ID NO: 199257 - DNA, 536 bp, Homo sapiens
ccgtgcccagctaatttttgcatttttagtagagacagggtttcaccatgttacccaggctggtcttgaactcctgacctcaggtgacccacccgcctcggcctcccaaagtgctgggattacaggtgtgacccaccgcacccagcccaaaccatggcatattattaaaccataaaaagtaatgaagtgctgatacactgcacaatgacatggatggacttagaaaaggagctaagtataagaagccagtcataaaacactatatattgtatgattccatttatatgaaatgtccagaataggcaaattcatagagacagaaagtagattagtggtttccaggggctagaggaagtagcgaatgaggagtgactgctaacaggtatgggttttctttcaagggtgatgaaaattctaaaatcagatcattgctgatggttgctgaagtctgtgaatatactaaaaatgattgatttgtatactttaaaagagtaaatgttatggtgtataaatcatatctcaataaagttgttaca

SEQ ID NO: 199258 - DNA, 208 bp, Homo sapiens
ctaaccccctggagccggaccctgcacgcccagggccttgagggacaccgaggcacttcagccccgggggtgggaggcgtggagctcgtgcgcgagctcagccagatgttccgggcggttgcagatgtgcctcggggccggggacaggactttcctcctccctagcccccagcctggagctcaggtcagtaaacaaactcggttctcc

SEQ ID NO: 199259 - DNA, 522 bp, Homo sapiens
tccccaggaagtaccaaacagagctttaacccccctgctgagttataggctttttttttaggaggtcttaaaaggccaaaattttacctggttttaaggggagggtttgccccaaatgtaaagcccccctaataaatttatcctttcactatttaaaagtagctcaccatcaacacatgaaaaggcaacctatagaactggaaaaatatttgcaaaccatgtatctgataagtggctaatatataaaatatgtaaagaacaactcaatagcaaaacaataaaaaataaaaaacaacaacaacaaataattcagttcaagaaagggcaaaggacccgaacagacatttatccaaagaagacatagaaatggccaaaggtatagaaaaaattgcctagcttcactgacaacagggaaatgcaaattaaatccacaatgagatattacctcacacctgttaaattggctattatcaaaaagacatgagataacaagtgttggcaagggtgtggagaatagggaac

SEQ ID NO: 199260 - DNA, 421 bp, Homo sapiens
aaagcatgctccaaactctccttccagataaccaactttgttcaatctcacaaaggacaactttcctccaagggtccagtagaactggaaagagggacaggagtagaaataatgttagtcacgggcatcgtttatcagaaagagcatctcctgtgtttgagtttcacaagaacaaaccaaggtgaagccgaaggaaacacttgaaataaaggtttcacctcacagagactcaagcactggaagacctgctaaaagctaccgtgaaagagcttgcgaacgaagggaactccacgttggtaaaccagatgttccgggttccaagttacatttttactcccaacccctccatgctttctaacgttattatcttttggacgtgatcaaagtttgtaacatttaacttctgttcctcacaccgtgg

SEQ ID NO: 199261 - DNA, 447 bp, Homo sapiens
tagtagagatgggttttgccatgttggccaggctggtcttgaactcctgaactcaggcaatctgcccacctcggcctcccaaagtgctgggattacaggcatgagccactgtgcctggcccagatgcaatattttaatccgtcttagtaattttatcaagtaatttgcacaccaaacacatccctggcattttcagcaacgagcgattagttgcaggaattttatgcaggaagatatttcttcatgaagccaaatcttctcctgtaaataagacaccagttcagatgaatcactgcacttgagggcagcttagaaactatgctgtagccgttcatctttgtttgaatcaccctgtatgcctttctgaatgtggaggaggaatttaagagaactgactcactatgtcttttattttactttgtaataaaatattttctgtcttgctgt

SEQ ID NO: 199262 - DNA, 342 bp, Homo sapiens
gacttggtttaggaaaaggaagcaaagggatggagaaggaccaagtacagccgtaaaactccacaagtgtgtcaagttccgctttgtgctgatcctacgactacgaaatttaccaaaacagtccaaaaggttctaaagaatgtatgctcagcatatccatactagttttaagaatcctaggaaaagatgtaactaggaggtaagatgtaaggaacaggtcctaccaatccaaagcatcattagcttaaaactttaaagagacaactgggtctcctattttctattttccatttccaaaaacaataaataaaacgaagagtagtgtgcaaagtaaaaaaagtc

SEQ ID NO: 199263 - DNA, 144 bp, Homo sapiens
aaaacaggcattggagctactagacaaagactttacaacaagtgtcttaaatactccaagagtgaaagtaaaacacagagaaagaactagtgaggaaaaggatatatgagcaagatgagagtatcaacaaagagatagaaatta

SEQ ID NO: 199264 - DNA, 243 bp, Homo sapiens
gttgctatgagctactgtattaagaagcacatagaagagcatctttgtagcatgccataaacacttaatgaatgatagctattgctattaagaggaagtattgaggtgttctctagcggttaagaatccaagtcttagcgttacaactttggttaaatgttgattctaccacttactaaaaatgtgaccttaggagtaactaagttttcttatcttgtaaaatggagacaaaataacaggacc

SEQ ID NO: 199265 - DNA, 709 bp, Homo sapiens
ttctttcatcttgtcgcagcggataaggggctgcgcgggggactagggttggtgctcagggggtctcgggggaaccagctgagattaggtgcacacacacggggatgcaagatggcagctccctgttctaagttttttggcatcatgttgcaagttaaaaccacttacactgaaatttctgagatgtctgctcactgctttaggctactcttatcatcatttaaaaaattataggtgtgccttggcagcatataaataggtactgattcattgtttcatccattgaaataattttggcagatttatatacacaatcattaaatcaattcacagataagtttttaaaataggaaatatcaaagataaagttattttcttagtaaaatacctaagtagctacatacaatgtataatttggcttgtaattaatgtatttcactgttaatatttctgatagtattagagattactttaaaaatgaagatgaaagttagttttcttcactgtaaatattaaattattactttataagtgtttaataaatctctacatattgaataataaagggattattattttacatctttaaagagaatttttatttaggaaattaacattcagcctaatgttatatctaacatggtgtccttttgtacaattgtatcaaataaagaatagaaactatattatggtttctagtgatgcccta

SEQ ID NO: 199266 - DNA, 413 bp, Homo sapiens
gtgcagtatatatatatatatatatgacatgcaaaatatatgttgtttatgtaatcaataaggcttccgatcaacagtaggctattagtagttaagttttgggggagtcaaagcttacactcaaattttcaaactcttctcttcacttctttacctatttgaatttcattcaacaattgttggaattaagtttactgtggagcaaaatggtggctgcctgctcgcgcgctctctctctctctctctctgtctctctcacacacacacacacacacgcacacacacacaccatttaataccggtctaagcccaaactggccgggtgcggtggctcacgcctgtaatcccagcacttagggaggccgaggcaggtggatcacctgaggtcaggagttcaagaccagcctggccaa

SEQ ID NO: 199267 - DNA, 249 bp, Homo sapiens
ggacgctcggccggcttatctttgcactaaaattcacatggaattgcagcacgattctttgcactcatggaatttttacactggaagggctcttagaaactgcctaacctagcccccaggtaaacagaatttgagttattcagaagcaacatcttgcagacagaatcatagtttaaatgcaccaggggaggttgctatttaaagtcctattctggaaatcctttgtaaagtcaagaatccttttgtaaa

SEQ ID NO: 199268 - DNA, 306 bp, Homo sapiens
atttttcctcccttacagatatgtctgagtcacagatccactgtgtagggcctttatcccctcctacagtgacatcaattatgctacaagtattctctaaacacttatcatgtacctgtcacagaactaaacccacacctaggctgggatgagacagatggtgtggaagcctctcccatttgtgtaagcatatagcatattcttgggcacacagcctaccccaaaagggcaattgtagtagctttcattgaggctaaaaaataaataaatattcgtgctttaaaaattttacctagcctgtgtttg

SEQ ID NO: 199269 - DNA, 455 bp, Homo sapiens
ataaattactttcctatttgcttcatttgctattgcagactatgcccaacagatgtcacataagaaattcaaattatatcttcaaatggaacataactttagtaatgaataattcaacagaataactaaaaaccagaagaaactaggaaaaaattccgctccaacacaacaaagcaaaaagtaggtcctgccctcaagacacagggtcatggaggccatatgccacgtgtgctgtgtgcgccgcgggtgctgtgtggtgcgtgcactgtgtgtgccacatgtgctctgtgtggtgcgtgcggtgtgtgctgtgtgtgccgcaggtgctctgtgtggtgcacgcgctgtgtgtggtgtgtgtgctgcatgcagtgtgcgcgctacgtgtggtgcatgtgctgtgtgtgctctgtgttgtgcatgcgctgtgtgtggtgtgtgtgccgcgtgtactc

SEQ ID NO: 199270 - DNA, 257 bp, Homo sapiens
aagtccctgttcattctggtttcatttgttttgttctggggaaaattcatgaacatacactagattcctctgatgtggaaggtttatcctggatctctcccttagatctctttgatagtctctgatattctcaacagctggatctattgcaattcattaaatttgaggaaaactaaaatagattacactgacatttacatttgcattgtctataacaaaagaaatagagtgaggaattatcaaaaaataatcagtag

SEQ ID NO: 199271 - DNA, 129 bp, Homo sapiens
gatgtaacaaatactttgcttgtaccccatatatttgtaaaatattttaattcaataaaaataatacgtttttattcttagttaaaaacagacacctacttttttccaaattctgtcatagattactga

SEQ ID NO: 199272 - DNA, 480 bp, Homo sapiens
cttgtattagatattgtaagtaatctaaagatgatttaaagtatataagaggaagtacataggttatatgtgattactataccattttatatcagggacttgagcattgtggattttggtatctataggggtcctggaaccagtcccccaatggatactgaaggatgactactacttgcctctgttcttttgtttatttttagctaactccctctggaacagcattttaagagcaacgtctgatatttttggataaaaatgctaactctgtgatgttgattcataaaatgttcccaagaattggtatattaaaattattctgggccaggtgcggtgctcatgcctgtaatcccaaagttgtgagattacaggcatgagccactgtgcccagccaagaagtttttaattttctctttttttgtttttgttttgagacagggtctccctccagcctgggcaatagaggaagactctctcaaa

SEQ ID NO: 199273 - DNA, 436 bp, Homo sapiens
gggctctctatccagtagtgctcagagcttgtctataaactttaaatagtaggtctaaataagtacattaatcaggaaaaagaggatcaagatccaggtaacaatgacgcttggctctaaataggctggcggtaaaatgagacaggtgttcctggggtgggagagggggctgctaattattattcataagcagatggcatatgatcagtttgtagaatacttttataatattgcgtgtgacattgtaaatccagattcctgaatatgaataggtgatagcaaaatggatagatttttatgtgatgaagcttttgaaagagaatatctcaaaattcaagagaagtataaatttcctcatatatttgaatggaggcacaagttccattttagtggatacatgaggttgacgaccttaaatctgaaatgaatgtaaaag

SEQ ID NO: 199274 - DNA, 442 bp, Homo sapiens
ataattttattcttttcaattgtttagtgagtaattattacttattgcatagactgtggggaagtaatagaaaaatgttcttccctcatcgagcttacattctagtgggagtgaaaacagcaggtagaatttctctgaagaatatatactgtatccatgaatatgtaatcagtctcctgaccagtgacttatatttgatttagatcaaatctactctgacactggccttgtgagattggtttactgggtaacctagtaacccttgtcttttggaatagcttgacagcctgtttgctgttttattcttttattaggtccagtctttttttctcgtgtagtttgatctagtggtgttttgccaagttaaaccaactgcattttttttaagatggtgtctcactctgtcacccagactggagtgcagtggtacgatcttggctta

SEQ ID NO: 199275 - DNA, 402 bp, Homo sapiens
agcctggcctgttccagatactcacgccagggtcacccctagctgcatagacaaccagaatgtgactctcagaagacgcacccagagcagacttgccccagctctcacagccagttagtggcagagcagggacgggaacccaggtatcctgactcccagcctaggagctgccaaatacgcaaatgaacacgggagcctccttttgtgaatctccggctccccttctcccagcaaagcattttccacaacaatcccacgtttgctgcgaaagcctagtaacagcaaatccagcaaagagtcgttaatagaaaaaagaccagaaggatgcacatccgactgctcaccacagatcctcccaggagaggggaggccgggcagccaccttcctacttctacatttga

SEQ ID NO: 199276 - DNA, 660 bp, Homo sapiens
tacattcatgtaaatagatttattataaggaactggctcacatgatggcagaggctgtgtggttccacagatctgctgatctgattttgcagacctgctgtctgcaagctggaggcccaggaaaggtccacagatggtgtagattccagtctgtgtctgaggcctgagaaccagaagtgccaagaggaggaggagatcaatgttcagctcaagcaatcaggcagaggggacaaattctcccttccttcttcttggcttctggtccgggcctcaaaggattggatgatacccaactgcattggtcagggcaatcttgactcagtctatcaattcaaatgctaatctctctggaaacagcctcacagacacacccaaaataatgtttagctaaacatctgggcatcctgtgatccagttaagttaatgcataaaattaaccatcacacccctgtatagtcagaaggaacactacagatctgtttttataggttggctcttatagaacttactatttaaacttcacctcctcgatcttgtaggtttaagtttgcacttatcattcatttcactggcaaaccaatgagaacgtgttttattttcttaccttgggattcccttgatttacaaccgttcatcctgagccagaatcaaaaaaaaaaa

SEQ ID NO: 199277 - DNA, 469 bp, Homo sapiens
tcttaaccctgtccagaaaatctgctgagtcaccgagtatcaatcaagagaaaaataatgcagagctgcaaaatgctaatctccttcctcctgctctccttcctaacagcaagccgactcacagggtactcaaagcccagcggtgcctacctgctgttcttctccacttcgtagaggaaaagctcgctgctgccactgcaaaccctgatgtcaactctactctcacaagctggggaccctatccccagaaatttcacaggaccacacaccagctccacagcctccaccttctcctgctctgcaagccatccttgggtttttttctgcattgcttcaagactaatctaagataaaaatctactctcaaacatcgtagccattagggaactgcaaattaaaaccacaatcagataccaggcacatctataggaatggctaaaataaacattataacattgagtactggcaa

SEQ ID NO: 199278 - DNA, 438 bp, Homo sapiens
tttgtcccctcccccacagtgaggacatcagtgtatttacttgtttgcttcattttatgatacagaccttagaatttcagaattgccaaacccatgccctcccaaacaccaaaattaagtagaatttgacatttctttgtagttcttttatgtctttagactgaaagtatttattcaaaaagtattgtattcaaaagttgggtacatttcttttttcttcctgtgtagttattttaataagataaaatagaattcagtttatttgctttgtgtccaattttagtttttctcctacttctatttgattttactttatttcatgcataatatttaagttcccaaaagtcaaaacctctaaccctataaagaggtatactctgaatctcactccatcgcccaggctggagtgtggtggcacaatctcagctcactgcaagc

SEQ ID NO: 199279 - DNA, 225 bp, Homo sapiens
  misc_feature (111)..(111): n is a, c, g, or t
  misc_feature (211)..(211): n is a, c, g, or t
ccatgagaaaattcctggatatacacttctatctgcccagctaccaggggccgggaagagtcctgtggggcagcccttgggcctctcctggaaggaacagtttactttggngaggaggccagggctgggcggggacccccaagcactcagcctagggggaagtgattgtgtttatttatgtggcaggttggcagggcccaggcctgggggnatgggggaagttgg

SEQ ID NO: 199280 - DNA, 362 bp, Homo sapiens
atgctgccagctaacactagtaagtccttactatgtgccaggtacctcaatccaggcactatacacatcttaacttaatccttacaagaactgcttgaggcaggtccaattattttcctcattttacagatgaagaaaatgtggtcacttgagttgcctgaaggttacgcaatgattagatgctagggctagcatgtgaacctagtccatgacctttgaccactttgccattctacttctattaaaaggttccactttgataatagcagtaatacttagtatccattcaccctgacagtgaaacaagttccagtagaaaacatgttttcagataaaaataaaatgaactttccctaactgat

SEQ ID NO: 199281 - DNA, 684 bp, Homo sapiens
tacacaaaattagcctggtgtggtggcgtgcgcctgtactttcagctactgtggaggatgaggtggaaggatcacttgaccccaaaagattgaggctacaatgagcccagattgcgcccctacactccagcctgggtgacacagtgagacccttgtcaaaaaacccccaaccaacaagtacagtactagagactgtaaggagtaaaactactttggcagattttggggaattagagaaattaactcctaagattaacagtttaggatgtatgcttaaagtgttaaacagcagtatacaacttgatatcatatacctctaagatatttagtgaaaaagtttcatttaacagctgtaggactcaggttacagaatcacaataccttcttcaaatgttgagatagcaatatgatacatttactgaaatttaatagcatagacattcaggtaagctttaggaaggtatctatgtcaaagagcatttttaatactgagagtgcttactgtttactatgatgcctttttttctgttatgaaataatttgtgatctcaaaataattgaaaaaaggtatttatgtttgtttacattttgaaattgtgatggctacaaagctgttaattttattaaatggctttaatgttttctgtttacagatttttctggttacaataatgctagtaagaa

SEQ ID NO: 199282 - DNA, 558 bp, Homo sapiens
gtcgcagtgcaggctctcccgagggccaggacgccctgtctgagcagggctccaggaacaatgaggctggccccggccacacttatgcccagccaacctcagcaccgacagtggcctgccctgtgcctgcccctgcccatggctcctgcctgctctcctcatgggaactgctgcgcactcactgagcatctgcctccttgagaaaaaactttgttttcttcttaaaaacattgtggtcccggcgcagtggctcacgcttgtaatctccacactttggggggctgaggtgggcggacctcaagtgtgaggtcagaagttcgagaccagtttggccaacatggtgaaaccccatctctactaaaaatacagaaattagcccggcatggtggtgggggcctctaatcccagctactcaggaggctgaggcaggagaatcgcttgaacccaggagaaggaggttgccgtgagccaagatcacgccactgcactccagcctgggtgacaaagcaaggctcgaaaaaaaaaaaaaaagtagtaaaataaacgtaacatacaatg

SEQ ID NO: 199283 - DNA, 431 bp, Homo sapiens
gtacactggcgcaatctcggctcactgcaacctctgcctcctgggttcaagcaattctcctgcctcagcctcccaagtaactgggattacaggcgcctgccaccacacccagctaatttttgtatttttagtagaggtggggtttcagtgtgttggccagactagtcttgaattcctaacttcaagtgatccacccacctcggcctcccgaagtgctgggattacagacatcatccaccagcccaacaattcactcctgacccaatgattaaaaaaaaaaaacttgtaggccggttgtggtggctcacaatgtactacatttgtagacattttggtgccttaatgtgagcaagggttgcacaagttttgataggcatgtattccagagatgtatagaaattctagttactggctgggcacggtggctcatg

SEQ ID NO: 199284 - DNA, 374 bp, Homo sapiens
ttaatcacatagccacacaaccataccccttactcacattctccttatccattacaacagataatcaaaagagcagaaaggaaacagtgatatttactgagtgtctaccaggtcagctacaacacctctagagggaatatcctgaaggagaacctccctaatattgacccatcaattaagctctcttctcctcaagagaaacagtagtttttttttctacccccctttcctaattagtgagcttgagaaaaggaagtcagcataaatacttgaaccccttctgcgctttctctttttgcataggatacacacatactctgcttttccagaaaataaaggtctacaccctcagagtggatgcgaggagaatgagt

SEQ ID NO: 199285 - DNA, 251 bp, Homo sapiens
agatgattaatgtttttgctatatacttttatacattattttcttatcaaactagttaacaaatatttttatatgtttgtaagcagatacgctttcatagcataccttgtgtatatgtaaagataagtatttaattctcactgttcacttttaactgacaaagaaaaacaagtggaaactacagaaactgtggtagaacttttacttgctggtctggtcttggttgtacccatctttggccagtcacatat

SEQ ID NO: 199286 - DNA, 348 bp, Homo sapiens
aacagacggccaggattactaaggacgagtcagctagttaaatgacagtacccttgaaaaacgtcgagcagaggtctaaaatgaatgtttttattttagtaatgagtttatgtcaagatttttatggtgtttgctggtgctatttgaatgagcttcttttttccagatgttgaatctgaagttgaatttagatatttctttttaaaacatctagtacagaacacaacacttcctcaactaagaagaagccactgggaaaaaagaactgctgcatgaagaagaaactactgagagggatggtaaaagatgtaaacagtctaaataatatgcaaactgaacagtctaagc

SEQ ID NO: 199287 - DNA, 454 bp, Homo sapiens
taatctttctgaaggaatacaaatatattctgaatcacacgcaaacccctcaatacagaatgtgtggtaggcagtattctaaaatgcccgcataccaccgaccccaccaaatttcctaccctaatacagaggctgtaaatatgatgaaatatcatggcaaggataatgccattaatatattatatggcaaaggaattctgcagatgtgattaaagccaccaatcaactgcctttgaattaatcaaaagggagatttgcctaatctaatcaaataacctctttgaaagcggagttttctccagctagtagcaaaagggaaattcatagcaagggaacatttcaatacactgttgctatctttgaagataaaaagagccacgaggaaaaaccaaagagtggcctctaggaactgagagtgacccaagccaataggcagtaagaaaatggtgagctc

SEQ ID NO: 199288 - DNA, 287 bp, Homo sapiens
taatctttctgaaggaatacaaatatattctgaatcacacgcaaacccctcaatacagaatgtgtggtaggcagtattctaaaatgcccgcataccaccgaccccaccaaatttcctaccctaatacagaggctgtaaatatgatgaaatatcatggcaaggataatgccattaatatattatatggcaaaggaattctgcagatgtgattaaagccaccaatcaactgcctttgaattaatcaaaagggagatttgattggtggcatcgataaacaccgggtaccg

SEQ ID NO: 199289 - DNA, 1073 bp, Homo sapiens
aagatatacagacaatggcattatggtggcctgtgaatctaataacttcatgaaaatacaaagaaaatgaagagagctttacatgtcttattctgtaaaaaacctatgtatttttttacctcacctacaaaaactcaaaatcttcatatttacagaatatcctgagctcctacatgcttgagtagtagaaatcccgtcctttttcaagttcctcctctgtgctgcgtcttcaggtcccatgaaggtctcacagatgaccaggtgttgcctccctctgcatctttgcatttgtgccccagcttgtcctgttgttctcaggtgaatttccacactgccactggcaacttttcttttggatctctgccaccagtacctttttcctcctcagaaagcagaaaaggccaggcatggtggtcatgcctataatcttagcactttgggaggttgaggcatgaggatcacttgagcccagggttttgagaccggcctgggcaacatagtgagaacccatctctaaaaagaaaaataaattagccagacatggtggtacgtgtatctgtagttctagctacatgggaggctgaggcaggaggatcacttgagcccaggaggttgaggctgcagtgagccatgatggtgccacagcactccagcctgggagacaaagtgagaacctgtctcaaaaacaaacacaaacacaaaacaaaaaacaaacacagaaaagggtcaagtgctcctagagaacagttcattcagggagatccactagagaacagctctttcagaggactaccctagagaacagctcatcaagaggaatgtctcaaattagtcttctaggtccctaatcactcagttctttcctttctacttcctggagaacacaaataccctaacatggcgctgggccaggtaaaagtacagtcttgaactgacacacaacccttactccctattgtatttttgccttgttttcagactgatccacattgtcagcctcttccctcaatgtgagtttatttcaggggcacctgtgtctcactacttcattacctcggttaactcaatgtcca

SEQ ID NO: 199290 - DNA, 787 bp, Homo sapiens
tctgccttggccccgcctcgcactttggaagagactggagcaggagcgggcagcgttgccttcgcagcatggtaacttctctcagcgctgtttgtaaagcagaatgggagaggaaactccccagagggaaactgggaccctgttaggtagggctagcaagaggtggttaaaacgtaagcatccgctgcaccagactgtattctccacgactgtatattttttgttgttcataagagccccgaattgcaatgagtacgattttccctggacgctgcagtgtatggagaagctgtcacttgtcacatgacagctcagtcattcgatccctgggtgctgcagagagggaagaattggcctcgcagtggggagtgagtgccagcccgtggcctgtcccctgccacgtgtcaccatactgaacgtttgtgtgtgctctgtgtgttttcaaaacaccttcatgtcacctgccccggactcctccctgtgagcaaggcagggtgggcgttaccatccctctggaccaacaaggacagaacagcttgagacgcacagggtggcttccccatggctgcggaggcatagaaagtgagggcacgggacgtgaatccgtgtgctgggattctggccgcctgtgcctgccgatcaccctcagtgcctccctggatttgattttgtggctcttctgggtgtgcgtgtgagtgtgttgtgggtaagtctgttgtctaggggaaggaacgggaaatcatccggccaggaatctctgtggggtggtcggcttgagttggccata

SEQ ID NO: 199291 - DNA, 473 bp, Homo sapiens
tgctgggattacaggcgtgagccactgagcccagcctagaattgtttttatggaaaatcttgtttccataattgagaactcactatgtgtatccatgtatataaagaagttttatttaaaaaaatatttggaacttatttattaactacatatgtgccaggcacctaaataaacagtttatgtgtatcttatcttttaaatattttaacagtgtaccctatgcagtaggtagtaataatatcctcaatttatgggttaggtaactgaggctgagaggttaggcaacttgcctaaggtcatataggctattatgcacttgacccaagagacaagggttttaattactatgtttaagtgtatcctttaacatcactgtaattttatctgtcacataaaataatcctgacttttaaaatattataattagaatattcatggagaataaagttccaattctgagaactggaaattta

SEQ ID NO: 199292 - DNA, 413 bp, Homo sapiens
cactgctgctgtgactgaatgtggatgtagaaaccccatggactctgcacatagatgatttatcaagattcatatgggattttgtcaggcagttggatataaagttagaaaatgtaaaaaatcaattatagttctatgtgccagcaataaccagaaaatgagattaaagacactatttacgatagtgtgaaaaaaaccaagtacctaagagtaactctaacaaaagatgtgcaaaacttctctgcactcgattctgaaaccttactgaaaatgttaaagtcaactaagtaaatccagaaatatgccaggttcctagattgcacgactcaatatggtaaaggtatcagttttcctcacattgatctgtatagtcaatgcaatcccaataaatatcacaacaggtgtgtgtatac

SEQ ID NO: 199293 - DNA, 526 bp, Homo sapiens
gggattaagttaaggatgttgagatgggaagactgccttcatttttcagatgtgctctaaatgcagtcacaagcatcctaataaaagagaggcagagggagacgtgacacacacggagggaaaggtgatatgaagatagaacacagagagatttgaaggttctgaccttgaaaattggactgatgtggccacaagccaggtaatgctggcagccactagacaccagaaaaggcaagaaaaagattctctcctagagccttggagggagcaccgccttgccaacgccttgatttcagcccagacattctgatgtcagacttctgaacctccagatctatgagaaaatatgttctgttattttaaggcactaaatttgtggtaattagttatgacagccaaaggaaactaattcagcaggttagcaacagccactgtagtcctactggcctctgctaaagtcttcaaaaggcctcagtgttacctccaagactttgcacttgctttttctctacctgtagcactcttt

SEQ ID NO: 199294 - DNA, 355 bp, Homo sapiens
ctcggtccctcttgtatatacatcttttcagaaatccagagaagtacctgtgacaaaggtcctttttctttgtcaaccttaggacctgagtcccgtgaactcagccagcattctcatgatatctctgtgacactttccagcccacaaaaacattctcactcacattctccttgcagtatccttaaaagagccctgggagggatgtattacaaaccccactttatagaaactctatttggctggtgaacgttgaattcaagctagaaattctccatgttttttattcttctgagcgtctggtgaaagcattgggttcgtttatcccagatgaagcacataaatgtatatacaagag

SEQ ID NO: 199295 - DNA, 829 bp, Homo sapiens
aggtggaggttgcagtgagctgagatcatgccattgcactccagcctgggcaacaagagcaaaactctgtctcgaaaaaaaaaaaaaaaagcaaggaggttgaatgaaataggttgatttcaatgctatattagtttcctcttgctgctataacaagttactatgaaaataatgacttgaaacagcacagattgatgctgctacagttcttgaggtcggaaatttgcaatgagctgatggaactaaaatgaagaaggggttgggtcaggagggctgggtcaggaggtctggtccttctgggggctcttgggagatccatgtccttgccttttccagcttccagaagctgcctcctcccttggctcatggctatgtcgcatctccctttctctctggcacccttcatcacgtgaccttttcctcctttgcttccttccttcccacttataaaggcttttgtgattacattctgggaccatacaagaatccaggattatctcccatcttgagatccttaacttaacaacatctgcaaagtcctttatttgggaaaaagtgaaatgggagtgttcccttatcccctttgcggggcatatgacaggggtgtggcttgcttcttcagtgccccactgctcaaacccctagggggatcatgcagatgggtaggttgcggggagcattttggggctccgaccccatggcggtctccaggattgagtgtttacagctcccgaagccccagtgggcatgtgttacagtgtgctctttcatctttgccatctgcagggagcttgtgttaatcagcttacttagaccctctgccttatca

SEQ ID NO: 199296 - DNA, 686 bp, Homo sapiens
tacagcagtccttcactggttggaggttaaaagctgttgaaaaataacccggatgcatttcatgaaagaatcttagacaaatacaattacttggaatatcagctaattgcttgctctataccatgattttcatgtcttacttcctccagcctgacttcctccatgtaccttcttggtctgagtgaaatctatggtaataaccaaatcgtagactaaaattaatcataatggtgagggctaaaaggaggggttaggaaaggacttgaccctggatggtattttcttatttttcttagtacatttaacatgtgtattagtccattttcacgctgctgataaagacatacctgaaactgggcaatttacaaaagaaagaggtttaatggacttacagttccacatggctggggaggcctcataatcatggcataaggcaaggaggagcaagtcacatcttatgtggaatggcagcgggcaaaaagagcttgtgcaggaaaacgccccctcttaataacaactacaacagcatgggaaaatcctgcctccatgattcaattacctcccatcggccccctcccacaacacctgggaattcaaaatgagatttggttggggacacagccaaaccatatcaacatgtaactttacaagttgattgtattgtagaccactaattgaaaatgcta

SEQ ID NO: 199297 - DNA, 588 bp, Homo sapiens
atacctaacgcacagtcaggtctccttaagcttgaacctgcatcgccatgacctctacatcacagggcagaaaggctcacagccagtgtctgagttcccagtgaaaagtggatcccagatcaggctgaacagcaggatccctaggggatacccagccctactgggtcagaatcaccagaggtagagcctgggtatgtatgtatgtgtatgtgtgtgtgtgtgtgtgtgtgtgtgtgtgtgtgtgcatgtatgtaggtatgtatgtataagagacagggtcttgctctgcagtccaggctggagtgcagtgtcacaatcatacttcactgcagcctcaaattactcctggcctcaagccatcctcccacctcagccttcagagtagctgagactacagacgcatgccaccaagccccggtacttttcttttttcttttttctttttggagagagtctcactctgttgcccaggctggagtgcaatggtgcattcttggctcactgcaacctctgtctcccgggttcaagtgattctcgtgcctcagcctcctgagtagctaggattacaggcatgtgccaccacaccag

SEQ ID NO: 199298 - DNA, 423 bp, Homo sapiens
gaaggtaaaaggcatgtctcacatagtgacagacaagagaagagagattgtgcaggaaaactctcccttataataaccatcagatcttgtgagacttactcactatcacgagaatagcacaggaaaaacctgcccccatgattcaattacctcccaccggtccctcccacaacacgtgggaattcaagatgaaatttgggtggggacacagccaaaccatatcagtccccttcttaaaactctcctctctagctcctatgactgtacatttgtagttctcccacctctctgaagaatcctctgtgagggtctctggggactttgttttgatttgttattgtttttatattcagtctttaacctatgtgaagccacctttgtaatactgccttaagtaaagatccagtattatttttctccata

SEQ ID NO: 199299 - DNA, 582 bp, Homo sapiens
cctttcaacatctcatttctgaaacttcaaaaagtgtaaactctgctcagtataaagtgtaaactctgctcagtatagttagattaagaaagcaatgtaacatgcatttagaacactttaaaaagtgatcactttgggaggccaaggcaggcagatcacttgagcctaggagttccagaccagcctgggtaacatggtgaaaccccatctcttctaaaattaccaaaattagccaggtatggtggcatatgcctgtggtcccagctactcaggagcctgaggtgggaagatcacttgagcctgagaggccaagattgtagtgagccaagatcacggcagtgcactccagcctggggaatagagcgagactcaagtctcaaaataaataaataaaaataaataaaataacaatagcttacacttattgagcacttaacatgtttgatcacagtaataaatactttaaataattataaaagctaacatttattgagtactcactatgtgcagagaattaccttttttaatcctcccaattctatgaaactatccacattttacagatgaggaaaccgagggtta

SEQ ID NO: 199300 - DNA, 637 bp, Homo sapiens
cctccataagaaattctgatttcatttgtctgaagtgaggcctgataatccacatcttaacatgcatcccaataatcactttcatttccccacatgaattctttttcttcaccaccatgaaaatacacaattgttcttaaaactgatataatacatttttgagcatttgtctatatttggtgagagagaatagatactaatgaaacaagattcctgctctcaaaaagctcccagacttggagttttctgaaatgtatgacgtaaatccaggctctgtagctatttatgctgtgtgagcctggacaggttgctcaatctctctgatccttggcaattaaactgcaaagggagaaagcaaatatttttcttcataaggttactagaagcattaaatgagataaagtgctcagtagaaagtaatgttgttcctattattcagtatttattatcaatttaatgtgcataacatacaattatatgcgatatatgcagtgcatgtacatatacatagttatgtatacataattgttgtgtgtatgtgtgtatacatacacacatacacattaaatatttgttactttcacacagagaaacatatgtgctggagtgacaagtagatttattccggaaaaaaaag

SEQ ID NO: 199301 - DNA, 507 bp, Homo sapiens
gccctcagcatgtcaccaacttctcactgttatattatatcattaatgctttggggatgagggcagggaaatgaaatgaaaagatcagggaattgagctggggtaacccagggctgcacagccccctttcccacatagtcgtgtacctgggccatgagcctctgtaatggaaactagctgtcctgaatcttccagccaggagcccagagaaatcacccgtggggccccttatcttcatttctcaagctccttaagggtggatccaaaattcaacaggaatgtttgaacagctatgctgtcactttgcctgcatgaccagcccccattaaaggagaaaccagaatgtcagtaataaaccaaactgcctttcttttaaattactgtagttaagcaactaaactactccaggagagaaaaaaaggggtaaagaagttgatttgtaccactgagaacactcccgggaacttaataaatattgtaattttctaaataatacttgatgataga

SEQ ID NO: 199302 - DNA, 1807 bp, Homo sapiens
agcatcatagatgctcctacactaagctggccctgcttcctatgttaaatatgacacatctgaggccctgggagaggaagtgatttgcccagtctcacacaatgagttagagccagagtgaagtcaaaacccagtctctggatgtacaagcaaggtctttttctagtcccaaatggccttttgtggtggtccagggactgccgggagcagtcgtggaactgcatcatttacagaaggtctgatctttgagtcagagtcacagaagaattgagaatagctgttgggccttgggctgctggactgagatgacatgtggacatcaggatgacaaggcttctgaagcagaggctgggggaaccagaactgctggaccagcacctgggggggggttctggtttcaaacagccctcttagtacagagtctggaggccacctctgaccagctaggtcaccttacactgttccctacagtaggggataatgtaacctttgggttttcccttttgggggaaacttaggaaaccttaggaaccttatgcgaggactcaacctgaggctggaatagctgggaaaacagaactttaggtggaggaagtggcataaaaaagttgaaaagtctggctgggcatgatagctcacacctgtaatcccagcactttgggaggctgaggtgggcagatcacctgaggtcaggagttcgagaccagcctggccaacatagcaaaaccccatctctactaaaaatataaaaaaattagcaggcatagtggcaggtacctgtagtcccagctactcaggaagctgaggcaggagaatcccttgaacccgggaggcggaggttgcagtgaaccgagatcacaccactgcactccagcctgggcaacagagggagactccgactcaaaaaaaaaaaaaaaaaaaaaaaagttgaaaagtgcagaggaatttgagaaaggtatgacctgaaaaggacacagagggaagggaaggaaggggagaacagagagggttataagcaggccagagccggattgtgaagtgcctgtatgcaaggtaggcatttggattctgctctggggagctattgaagtattttgacagagattgtgccactgtactccagcccaggcgatggagtgagactgtctcaaaaaaacaaaacaaaaaaataaactagctgaggtctaccagttgcctgggactgaggtagtggaagagttggggtggagtaggccaagaaaatttttcgttttttcgcttttttgaaaagaatttcagaattacaaaaatattaaagaaatagtacagagttcttctatattctatccagcttccccttcttgcataaccatagtacaattatcaaaaccaggacattcacactgatacaaattacttacttattcaaatttttgattattcaaaattcaaaagtagatttaaatttcaccaattgtcccactaatgctgagtgggttctcaacaactgctgtgatgagccctggttcaagctgttctttcttggtctgtctgtgaagtcctatgatgctcccttacgataggtcttgtttttggtgtttttttttagaaagagtatcactctgtcaccaaggctggactgcagtggcgcaatcttggctcactgcaagctccgcgtcctgggttcacgccattcttctgcctcagcctcccagctactcaggaagctgaggcaggagaatcccttgaacccgggaggcggaggttgcagtgaaccgagatcacaccactgcactccagcctgggcaacagagggagactccgactc

SEQ ID NO: 199303 - DNA, 756 bp, Homo sapiens
tgcgacaggagaattacttgaaccggggaggtgaaggttgcagtgagcagagattgtgccactgtactccagcccaggcgatggagtgagactgtctcaaaaaaacaaaacaaaaaaataaactagctgaggtctaccagttgcctgggactgaggtagtggaagagttggggtggagtaggccaagaaaatttttcgttttttcgcttttttgaaaagaatttcagaattacaaaaatattaaagaaatagtacagagttcttctatattctatccagcttccccttcttgcataaccatagtacaattatcaaaaccaggacattcacactgatacaaattacttacttattcaaatttttgattattcaaaattcaaaagtagatttaaatttcaccaattgtcccactaatgctgagtgggttctcaacaactgctgtgatgagccctggttcaagctgttctttcttggtctgtctgtgaagtcctatgatgctcccttacgataggtcttgtttttggtgtttttttttagaaagagtatcactctgtcaccaaggctggactgcagtggcgcaatcttggctcactgcaagctccgcgtcctgggttcacgccattcttctgcctcagcctcccagctactcaggaagctgaggcaggagaatcccttgaacccgggaggcggaggttgcagtgaaccgagatcacaccactgcactccagcctgggcaacagagggagactccgactc

SEQ ID NO: 199304 - DNA, 383 bp, Homo sapiens
tgatccgcccgcctcggactcccaaagtgctgggattacaggtgtgagccaccgtgcccggccagtacgtggatgttttcatgtgttcattctggtgtgtgtgtgcagacttgtgggccatgttgcatacacgtgaacatgtgatattttcctgtgctcatctgtgtttggattaaaacagtcctatcccagctccatttatctgcttgaaaaaacccccagaactgcaggaagctttttatgagcataatcttaattgaactcctgattgcaagactgaggttagctttatcatctccattttgcaaatgagttagataagttcccccaaagccggtcataagtgacttgcttctgcatttcacagctaatgagtgtagagt

SEQ ID NO: 199305 - DNA, 444 bp, Homo sapiens
cagcctgggcaacagagtgagactccatctcaaaaaaagaaaaagaaaaaggataaatacattctaaccaaataatgtttatctcatgattgtagctgattcaacattcaaaaattggcctggtgcagtagctcaggcctgtaatcccaacattttaggaggctgaggcaggaagatctcttgagcccaggatttcaagaccagcctgggcaacatagtcagactggtctttactggggggaaaaaaatcagtctgtgtaattcaccacattaacaaagggaaacataaaaaccctatgatcatttcaacagatgtagcaaaagcagttaatgatattcaacacatatgcatgattacaaaccaaccaacctcctagcaaactagggaaaggaaacttaacctagtttgataacagggcgtccacagtcggagttccactagca

SEQ ID NO: 199306 - DNA, 393 bp, Homo sapiens
ttgtttgtttgtttgttttaacaagttgaaagtttgtggcaactccgcactggggaaatgctcacttaatgttactgtgtcacattttggtaattctcccaatattttcaactttttcattatgattatacctgttttggtgatctgtgatcaatgatctttgatgttactattgtaactgttttgggggttccacgaactatgcccatataagacgatgaacttaataaatgttgcgtgtgttctgactgttccaccaacaactgattaccccatctctctcccattccttggggctccctattccctgaatcacaacaatattgaaattacgtcaattaataatcttaccatggtctcaaatgaaaggaagacttgcatgtctctcactct

SEQ ID NO: 199307 - DNA, 205 bp, Homo sapiens
ttaattcaagaaagggaagttaagtaatcagtgagtgtggttgtgttacatcgtattacatgtttattgtataaggattttacttgtattggtatttctagttttatagaaaaaagtgtgtgtgtgtggtgtgtgtctgtgtgtctgtgtctgtgtgtgtgtgtttaatagagatggggtctcactatgttgcccaagctggtct

SEQ ID NO: 199308 - DNA, 436 bp, Homo sapiens
tctgccccttctttcgtaacaccgttcttccctagtgaagtccacacacatccttacatggcagctgtgggtatatcaactggtctgaccccttttagtcacagagcctgaagtctgctagtacctgctgagcacagtgtcatgggtgagaatgggcaaggctttttctttctctggttcctgaacttcccaggctctctcacttctggatcctgaatacccaaatcccaagcttccttcccagaaccaacacctcctcctcattagaaagatacctttgttctgtgcttactttataaagtcttgctctttccctgtccactgccttgtgtcactatgtgtgtgtcttggggccggtggaaaggtgaacagaagccagtagagagtaacaagcaccagcttcacaggaatggcatgaccttaatacgatagtggc

SEQ ID NO: 199309 - DNA, 502 bp, Homo sapiens
aaagaaaaaaggaaagaaagttagtttataaaatagaaccaagtagaaattttagagttgcaaagtacaaaaatgcaaatgaaagatttacttgagaagtttaaaaaatgtgtgaactggtaaaagaagtaatcagcaaattagaagtcatttgagattatccagtctgtggaacagaaaaaaaaaatcagcaaagaaaaatgatcagtgcttcagacacccgtcagacaccatcaaacataccaacatacacataataggagtcctagaatagataagtgagagagagggaaggggataaaacatatactggaagaaatagtggccaaaacctttcccactttgaggaaaaacattaaagtgaatccaagaagctcaacaaattctaagcaggaaagactcaaagagtccacctcaagacacaccagccactaagtaaataattttaaatatatagtaaaaaatgacaaggaaacagaaatgttacactagaaaatatata

SEQ ID NO: 199310 - DNA, 106 bp, Homo sapiens
actagagattggttgcattttctagaattttatataaatggaataacaacagtgtatactcttgtgtatgttttccagcataaatgattttgaaatgcatcacata

SEQ ID NO: 199311 - DNA, 406 bp, Homo sapiens
atttgtctttctgtgcttggcttatttcacttaacataatgacctccaattccatccatgttgctgcaaataacaggatttcattgtttttttatggctgaataatattccattgtgtatatacaccacattttctttatccattcatctgttgatgagcacctaggttgattccatagtttggctattgggaatcatgctgcaataaacatggagtgcaggtgtcttttcaatatattgatttcctttttttttttttcatatatacccagtagtggaattaccgaatcatatggtagtcctatttttagttttgtgaggaacttctatccttgaaccatgcactgtaaatgggcaaattgtatgacatgtaaattttgtctcaataaagctgttagaagatgca

SEQ ID NO: 199312 - DNA, 283 bp, Homo sapiens
ttgtccaaaatcagtgctcaacagagaataaagacaacattaataccctggcagaatcaaatgcttaaatgccctagtccaaaaattatcagatgagggagggatggataaagccaacaagcaaaggccagaggaaaggctcagatgttttcttgccttctataaaaggatgcattttgaccaccaaaacaaaatattagcaaggaaatgagagaccgttcttcaaaataatctacaataaaacacatgaacatataaacagcaggcttttgcacttgaagaa

SEQ ID NO: 199313 - DNA, 1221 bp, Homo sapiens
gctcaaactcccaaagtgcagggattacaggtctatatctatcatttatttatctaatctctctctctctatccatcctccctctctctctacctatctacctactttgatagacaggttcttgctatgttgtccaggccagtctcaaactcctggctttatgtgatcctctcacctcagcctcccgagtagttgggatcgcagttgtgagtcactgaacctgacctttttgttttattagttaggtaaactatgtaatttttgcttaaaggccaatcctctcaatattaggaaaaatacaatgttaatgaaagcaagatcacttaaatacataaggtttactcttttataacactgtattatgaaaaaactgtagaaaaatggaatttgaattttaaaatttgtagtaatgagttatcacaaaccccaatatttagttttctctgaatttaccaattatgtagagctgagtgattttttcctgttttttaaaaggtcatgatgattatgtgaatgttacagactaatcaattatgacaggagttttggtttttgttttctttagacaattctgtcactgttttcatataaagcctgaaataagctaatctatgtgtcttccattattttgctttgtataaatggaagaaaatcgttatagctgtcttgacttttaaaaatagcaatttttattttcacaagaatataaatattctgaaagactcctgtacacattagaatctttcgtggtataaacggaaaaggtaaatatgcttaaaattatgatttaagaataaattccactgataaacagagataatgaatttaaggaggctgtacattttttttctccaattatgatgcaatgataggttttacaggattgtaagacagatgattcataatatgaaatcttgtatcaaaccaaagaaaaagcaatatagaaatggcactaacctaatttcttatcacatacaaatggtatggcaaaatgttcatgttttacagtttttcgctatgtggcactagattaccgagagtgaaaagggaagaattatggggaagctgtgacatgtactataataacattcctatgctaaaagcgacagattttagaaaactgccaaaggttttattttaaatggcattattaataatgcatattcaaagaaacaccagatataattgtgaccaatacataatatttcaagaccctgactt

SEQ ID NO: 199314 - DNA, 406 bp, Homo sapiens
taaataagtgtttactaataagagaatgattaagtaaattatggcacatagttattagtatggcctatagtttcaaaagagtgtgacagtatttcttgataaaaattttgaatgaaaatagaataagtagaaaaatataaagtgtaattgtctgatcccattgctctttgtaaatatgtgtatatatatgtttgctttatcacgtatatgtgtatttgtaacttgtcagtgtgtttctacgtgttttgtgtttgcatatgaatgcctagaggtagagggatttcttttgagagttgaattgggctgttgataaagaagaggcatttactcttatctatgtgtttgcatttttcccccaagagtgtgtattactttgtaatttaaaaaataaacatcctcaaattta

SEQ ID NO: 199315 - DNA, 235 bp, Homo sapiens
tcagtcatcttggccagcttttcctctcatgctcaaactttagaatgtcagagttacccagggatcagtcctaggccatctactgttttttccctaatcaaccttggaaccactttggaatcacctgaggaatttctttataaaagtattccaaccaatacatgaagaaagtgatagaatatcagtattttgtaaccactaatgaaataaaggttctagacagtgaacatcgatg

SEQ ID NO: 199316 - DNA, 301 bp, Homo sapiens
ttctgaaagacaagggtcatgtctgagttttttctgcatcccccattcttaagacagtacagtgcacagtaggcactcagcacagggagatggggataaaggttgaggggctaagggtgaacagagggtagatggactgatcgatggattaagggctacatggatgaatggatgcatcagtgggcaaagaaatgaagtggacaaagagaggaatggatgaatggatgggtggatgagtgggtagatggatgcgtgagtgtgggtgagtgggtggatggatggatggatggatagatgagta

SEQ ID NO: 199317 - DNA, 467 bp, Homo sapiens
aatttcggattatctccagttaaggatggcgtttgatcctcacaacttgaaggtaattactttcaggggatgtatgttgctcctttccccctgcagaggtagagtgagaaatgctgcttttcaaagacgggtgcttcttaaagaaattgggctcccatcccctttaggtttgaggtccctgagtcttttgagcagttggggtttttaggccacaggtccctgtggaagcttcccaatggccctgcatcctcctgatccctatggggaggcatttcatccattgaccctgcaggtagctgattgagtctgaaatagcagcctcccagcccagcagggaccagagtaaaggaacatttgctgtaatttctttcctcctccctctctgaaagattgttaatcaggaaccttttggaaacaaaaaataaaaggaaagcaagaaaaaagagacctagtttggtgaacccagt

SEQ ID NO: 199318 - DNA, 721 bp, Homo sapiens
acgatgtgttcggtattctccatggtgaaagctttgtctgaaggcattcccagattcattgagggcacgaaacgttgccaatgctggttgacatgctagtaggaaaacaatatgagaaaaaaaatcagaactggacactgcaacatacatcaagttaattaggaaagcgagggaaagaagagtgcagtgactggagactttagaggggtaggatgagaagtaggagtttgtggaggtggagaggcagagaattgtttctccacgtacaagaatgatttaagtgatcaacagtggccattgaatttttttctatttctttaaacttgaaataattatacttgtgattgtaaaaatggctgaatgaaattttaataaccaaaacagaaaagcttaaagaacctaaaaagaatcacgtgaaatcctaagcatggattaaagttttgtttccattaaggccctttaaaatatttctgtgtggtatagcaatttgtgaaagtgattacactttaaatattttcctttgaacatcagaattggggatacttatgagtaaatacacatctgtcttatcaatttgatattgaatgttttactgtgcgacagggtcattattgattgggccgatgctctatttggatatttgagttgtacttatttttgttgttgctaagaacattaagaacaatcttaaatctacatctttgttaatttgaaatatatt

SEQ ID NO: 199319 - DNA, 334 bp, Homo sapiens
gctgtgggggcgctgtcctggacagtgtcagatgtttagcggtgtccctggcttctactcactaagaggctgtgacaaagaaaattgcctccagagattgccagatattcccaagggacaaaatcactcttggactgagaatcactggtttcaactaaatatcaggaaaagcaaaatgttcactgggtaaagatcgccgtcccctgtaaagagcatatagcatttttggcaaatgttgacaaacccaaataacctgccttggcaaaagaatcgtgcctggggtgaaataatatcttattatattttagatttgcatttatccagtgatcactga

SEQ ID NO: 199320 - DNA, 286 bp, Homo sapiens
tagatagatgggactacagatgtgtgctgccatgcccagctaatttttaagatttatctcagagacagggtcttgctatgttgcccaggctaactagtacttttctgaaaggcacagaaaggtcagcaggtataaggacaccaccagaacaagggtttggagtcctgcactggaaatccactctaatgaatgattctatcaaagatttcatgaaaaataatccagtatctatgttgtcctgaaattttcaacaaggaccactgtggagacccatacctacacacat

SEQ ID NO: 199321 - DNA, 450 bp, Homo sapiens
gatgccaaaaatgctttcccaagtggctaacattctgtattcccaccagcaatatatgagagattaagttgcttttcaaacccatttatgctcagtattgtcaggttttgttttgttctgggttctttatttgttggttttcttttttatttcagccatgctaataggtgtgattgtggttttaatttgcaattccctaacttcataaattagggaacacagaacacacatagacacagaaaatgcatttgactgattttacttcctactattaagaaacagataaaattcatatgtccctgaacaccttttttgttgcttatttgtcatacatttatcttttttagtgaaatgtctcttcagatatttttttccattttaaatcaggttgttgacctatacattgttgttttgagagttctatatgtatcctgtattcaaatcttcatt

SEQ ID NO: 199322 - DNA, 653 bp, Homo sapiens
ttagccaggcatgatgtcaagcacctgtaatcccagctacttgggaggctgaggcaggagaattacttgaacccgggaggcggaggttgcagtgagccgagatcacgccattgcactccagcctgggtgacaagagtgaaacttcatctcaaataaataagtaagtaagtaagttatttccctttttctgtatttccaagttgtactttatagatttgttactgtctgagcctccagattcagttcaacaagtatttatgggatcctagggatagaaaaatgacaaagacacaggatcttccctcaagttgtccatagtctaagaaagaaagattttataaacaaacacaatacagtatatgtgcattaatagaattctgcacaaggtagagatgtagtacaaaaaagagagtagttcacatcaaaagatagggaaaatggattggtggtgcagttgagagggaagatgtatttgtatatgagttttccagacagataagaaggggttgggaatctcaggtagagaacatattcaaaagcagaggcatgaaatagggtgatgtcttctaggaacagtttgttattacttcaatgtaacatacaggctagggattagagagatgaaatcagagaggtagccagtggccaggtga

SEQ ID NO: 199323 - DNA, 420 bp, Homo sapiens
gggtggaaggcaacagctacgagcagaacgaacaaagcctgccgaacaacctgcgcgatgcattgcgtgagttggacgacagcgaggtgatggccaagtacatcgatcctaagtacatcgatatcttcgtcgcctgttaggaaagtgagctggaagagtttgaacactccatctccgaccttgagtacaactggtacttgcataccgtgtaagcagttgcagttttaaaagaatgctgatatgccattcttgctgcagcaagcatggcattcaaggttttctaaattctgccccggttaacttttccattcgttggtttcattctagtctagcttttccttctgggccgcccctccccacattagaccgctcctctctggaattccaactcaagcccttgcttttctccatctgtcatga

SEQ ID NO: 199324 - DNA, 595 bp, Homo sapiens
ttcctgctctagccatctcgtacctcgtgcgcatttaggtacaggctaaaacctttgaaaagatcattttcctatttgaaataacatttcacatggattagagaaatgctaaaggaaaaatgtgttattttcacacctccatttgtaattattaacacacataccacccttcccttttgcttcctgctgctcttctgatccttgggtaatcatcataacctcaggagtgattatcttgcctgtcccttcattctgacttctttggtaggaggacctgttccagacccctggaatgcaggaagagctccagcagatcattgattgtctggataccagcattcctgagacaatccgtatcctttgcgaccaaagcttaagaagctggatgagtacttgatcaaactcttcttcgcacctatatttgatttttgtggttctatatttattttctttgtaatatcttttattataagataaccactgactatccacttgtttctcatttcctttcaggaacttttgacctctttccatatccagctcttactaaaaggaagcaaggggtagataacaatgacctaaagcatgggacata

SEQ ID NO: 199325 - DNA, 575 bp, Homo sapiens
ttcctgctctagccatctcgtacctcgtgcgcatttaggtacaggctaaaacctttgaaaagatcattttcctatttgaaataacatttcacatggattagagaaatgctaaaggaaaaatgtgttattttcacacctccatttgtaattattaacacacataccacccttcccttttgcttcctgctgctcttctgatccttgggtaatcatcataacctcaggagtgattatcttgcctgtcccttcattctgacttctttggtaggaggacctgttccagacccctggaatgcaggaagagctccagcagatcattgattgtctggataccagcattcctgagacaatccgtatccctgcgtacaccatgccttgaaagtagctggatagagcaggctagcaacaaaatcacactcgcaccaatattggatttttgtgagtcacgagttatcttcatagtgatatcggtcttgattatagagatacaccgactgcatagactcactttcgctgctctcagctcctctcaggaactggacgaccttcatctatctcagagaccagcctcctta

SEQ ID NO: 199326 - DNA, 5213 bp, Homo sapiens
tcagcctgaacatggatgaagttttttgtttttaagagcttccttagtgattgttataggagcctcctagacaattctcagctcccagctccccgctcccggctcccggcgcccggcgcccggcgcggagctgttcctcaaacgacacgcagccgaggtgggtgggtgtggggacgcgggagccagtgtcgtcggatcggcccgcagtccgctgtcctgctgagcccggaggccgcctggatggagccgccgctcccggtcggagcccagccgcttgccactgtcgagggtatggagatgaagggtcctctccgggagccctgcgccctgaccctagcccagaggaacgggcaatatgagttaataatccagttgcatgagaaggaacagcatgttcaagatatcattcctataaatagccacttcagatgtgttcaagaagcagaagaaactcttttgattgacatagcttctaacagtggctgcaaaattcgggttcagggggactggatcagagagcgccgctttgaaatccctgatgaggaacactgtttgaagttcctctcagctgtccttgctgctcagaaagctcagtcacagcttcttgttccagagcaaaaggactcatctagctggtaccagaaattagacactaaggacaaaccttctgttttttcagggcttcttggatttgaagacaatttttcttctatgaatttggacaagaaaataaattcacaaaatcagcctactgggattcatcgggaacccccacctccacccttttcagtgaataaaatgcttccacgtgaaaaagaagcttctaacaaggagcagcccaaagtgaccaacaccatgcggaagctctttgtaccaaatacccaatctgggcagcgggagggtctcatcaaacatatcctggcaaagcgagagaaagaatatgtcaacattcagactttcagattttttgttggaacttggaatgtgaatggccagtctccagatagcgggttagaaccttggctgaactgtgatcccaatcctcctgatatctactgcattggattccaagaactggacttgagcacagaagccttcttctactttgaatctgtgaaggaacaagaatggtccatggctgtagagagaggtttgcattccaaagccaagtataagaaagttcaactggtgcgccttgttgggatgatgcttcttatatttgccagaaaggatcagtgtcgatacattcgtgatattgctacagaaacagttggaactggaatcatggggaaaatgggaaacaaaggtggggtagctgtgagatttgtatttcacaacaccaccttttgcattgtcaattcccatctggctgcacacgtggaggactttgagagaaggaatcaagattataaggacatttgtgcgagaatgagttttgtggtcccaaatcagaccctcccgcagttgaacatcatgaaacatgaggttgtcatttggttgggagatttgaattatagactttgcatgcctgatgccaatgaggtgaaaagtcttattaataagaaagaccttcagagactcttgaaattcgaccagctaaatattcagcgcacacagaaaaaagcttttgttgacttcaatgaaggggaaatcaagttcatccccacttataagtatgactctaaaacagaccggtgggattccagtgggaaatgccgggttccagcctggtgtgaccgaattctttggagaggaacaaatgttaatcagcttaattatcggagtcacatggaactgaaaaccagcgaccacaagcctgttagcgccctcttccatattggggtgaaggttgtggatgaacgaaggtaccggaaagtctttgaagatagtgtacgcatcatggacagaatggaaaatgacttccttccttccttagaactcagcaggagggagtttgtgtttgaaaatgtgaagtttcggcaactacaaaaggagaagttccagatcagcaacaatggacaggttccctgccatttttctttcatccctaaacttaatgacagccagtactgcaagccatggcttcgggctgaaccttttgagggctacttggagccaaatgagacagtggacatttctcttgatgtgtatgtcagcaaagactctgtaaccatcctgaactcgggagaagataagattgaagatattctcgtccttcacctggatcgaggcaaagattacttcttgactatcagtggaaattacctcccaagttgttttggcacatccttagaggctctgtgccgtatgaaaagaccaatccgagaagttcctgttaccaaactcatagacttggagaaatcccttctgcaaatggttcctttggatgaaggtgccagtgagagaccccttcaggttcccaaggagatctggcttctagtagatcacctattcaaatacgcctgtcaccaggaggacctgttccagacccctggaatgcaggaagagctccagcagatcattgattgtctggataccagcattcctgagacaatccctggcagcaaccactctgtggctgaagcactgctcattttcttggaagccctgccagagccagtcatctgttacgagctgtatcagcgatgtcttgactctgcttatgatccccggatctgccgacaggtgatctcccagcttccgagatgccatagaaatgttttccgttacttgatggcattccttcgagaactcttaaaattctctgaatacaatagcgtcaatgccaacatgatcgctactctcttcactagtcttctcctgaggcctccacccaaccttatggcaagacagactccaagtgaccgccagcgtgctattcagttccttctgggctttctgcttgggagcgaagaagactaaggcttttactgttctctgatattctagaagcagacgatctcgggctccaagtatttcagaatgatttaaaaagtcatgccacaggaagggtctattgcagaatttcaagttctgtttatagtaaaaaggaagagcgtttcctaatccctcctttaccatatcctacacagaaaaatacttttagacttatattgccaagccaaagttaccatattttggtgtttttgtgttttctctttataaggcaaaaagatctgtatttacactccttcacctaaggatgtgtttgttgccctcctacccaattgtcatgattgtccttagtaccctaggcctagattctgagatcttcccattctaggcctacaagcactacttgctgtagctgagacttgtctagagtcctttgttttgcacttttgacccaccccttcctggatcactcctttgcactccactcccctcgttctgtcactttgaacgaagtctgagtgaggctagtgactccttgggtgtcctcaacagtgaattcactgtctgcgtgcagttattacatgcatttgtgcatttctactacaatggcatctttatgtctctgtaacattggccttttcatggctccacactgggtggaaccatattctcttagatcacatttagtagcataactgtagggactattagagatggcatctcatcgatgagagagaatcacaatcagaatggaagcactttgagtatctgaagagtgagagcattcatgtttgacaggtcctgcttcccactatccttttcctgttattattcaaattttacacaaggactaatcctgggtgtctctgagacccatctcctgcctagacatccacctccagagcaacactggccccacagtaaaagaggaagtcttgtacctcaggcaggcccatctagagctattgctccttcccacagcaaaggtattgtggatgacccttagaatccattctctggtcttctgaaataccaagggcagatgtcacctccttcctcagcaggactgactctgggctctacaaccagctccttcacataaagggtttagagactccccttggctcccagtcaccatatccagtgttgtgtaaagagactggccaacaggaccaaccaagcaccttacctctcccatacaagatgaccctctgagcttttcatttattcaagctctgtggtacagcctttttttaaaataaattaatctatattggttgacaaacaagccaccaaccactgactgcaaaactgcctgatgcagttgggttcctcctggttttcttttgttacaaccacccttgcctgtttacattaattgcaaggagcataacgtacaggctgtatgtacaatcctgggcattgactctgtgacatttctagcatatccaaggcaccaccagtgatttctcctgtttcttggtgggggtgggggggaaggtacgtattctgcaatatggctaaaccctttcctgattgagagttaaagcaataggagtcaagttactggtgccacagatctggaggtatgataggtcaggggctaggtgttgaacttagttaatggaagactgagagcagaacaggtttgtcatctccgcaaggccagaaagtgatcacaaaaagaggcagatgatagacactggggtagggtcataccacagggaaatacctttcctgggcttgttttctagcatatcactgacctgggatctttgggtgatcaagggtgtggttagtggaggctctgtgctgcacgtatgcagtatcctatctctttctacatcagatcaaaacactaagttggtgtactgcctcgaccttttttcagctcatcctggaacatatacagagttgagagttttagacaatctctaggtagaggagacaagatgtagacccagacagaagaaatctgcttccctaccatggctattccagcaccccaacctgtaattgccaagtcctctaaggtactaatttgtagctgctctgaagtaaggatttcggattcagctggtagggaaagactctgcacctgctgtcttagggaagaaatggttcaaatccatgtggtgacattgcattagtctccctttcactgttttcttattctgtaattgtttgttatatttcccaaaaacgtcttgatcactaagcaaagctgctagtgggattctatatttcgtgtcatcttttttattataatttattgcaaatttttttctgaataaatatatgttgtgtgaaaaagcaaa

SEQ ID NO: 199327 - DNA, 5243 bp, Homo sapiens
aggtgaactggaggggacgcagaggaggagcaaaggtctgggctttggggaattctccgatttagggcgtggaagaaagaagaggaaaggaaatggttaataatccagttgcatgagaaggaacagcatgttcaagatatcattcctataaatagccacttcagatgtgttcaagaagcagaagaaactcttttgattgacatagcttctaacaaaaggagaaggcaaaaacaacacttaaaaaagcaaaactagaacaaaagcaattccataacaactgacactgctgctgaaataagagatggaaatgtcctgtatttgatgtggagaagtatttgattcaaagctgaaaagttaaactgagctgtgccttttctcttataagcacctaattttcggcattagttttgttgtggccgcttctacattagccatgtgttgctatgtccagagttctagttactggctcatagggggaaaataggtggctgcaaaattcgggttcagggggactggatcagagagcgccgctttgaaatccctgatgaggaacactgtttgaagttcctctcagctgtccttgctgctcagaaagctcagtcacagcttcttgttccagagcaaaaggactcatctagctggtaccagaaattagacactaaggacaaaccttctgttttttcagggcttcttggatttgaagacaatttttcttctatgaatttggacaagaaaataaattcacaaaatcagcctactgggattcatcgggaacccccacctccacccttttcagtgaataaaatgcttccacgtgaaaaagaagcttctaacaaggagcagcccaaagtgaccaacaccatgcggaagctctttgtaccaaatacccaatctgggcagcgggagggtctcatcaaacatatcctggcaaagcgagagaaagaatatgtcaacattcagactttcagattttttgttggaacttggaatgtgaatggccagtctccagatagcgggttagaaccttggctgaactgtgatcccaatcctcctgatatctactgcattggattccaagaactggacttgagcacagaagccttcttctactttgaatctgtgaaggaacaagaatggtccatggctgtagagagaggtttgcattccaaagccaagtataagaaagttcaactggtgcgccttgttgggatgatgcttcttatatttgccagaaaggatcagtgtcgatacattcgtgatattgctacagaaacagttggaactggaatcatggggaaaatgggaaacaaaggtggggtagctgtgagatttgtatttcacaacaccaccttttgcattgtcaattcccatctggctgcacacgtggaggactttgagagaaggaatcaagattataaggacatttgtgcgagaatgagttttgtggtcccaaatcagaccctcccgcagttgaacatcatgaaacatgaggttgtcatttggttgggagatttgaattatagactttgcatgcctgatgccaatgaggtgaaaagtcttattaataagaaagaccttcagagactcttgaaattcgaccagctaaatattcagcgcacacagaaaaaagcttttgttgacttcaatgaaggggaaatcaagttcatccccacttataagtatgactctaaaacagaccggtgggattccagtgggaaatgccgggttccagcctggtgtgaccgaattctttggagaggaacaaatgttaatcagcttaattatcggagtcacatggaactgaaaaccagcgaccacaagcctgttagcgccctcttccatattggggtgaaggttgtggatgaacgaaggtaccggaaagtctttgaagatagtgtacgcatcatggacagaatggaaaatgacttccttccttccttagaactcagcaggagggagtttgtgtttgaaaatgtgaagtttcggcaactacaaaaggagaagttccagatcagcaacaatggacaggttccctgccatttttctttcatccctaaacttaatgacagccagtactgcaagccatggcttcgggctgaaccttttgagggctacttggagccaaatgagacagtggacatttctcttgatgtgtatgtcagcaaagactctgtaaccatcctgaactcgggagaagataagattgaagatattctcgtccttcacctggatcgaggcaaagattacttcttgactatcagtggaaattacctcccaagttgttttggcacatccttagaggctctgtgccgtatgaaaagaccaatccgagaagttcctgttaccaaactcatagacttggaagaagacagcttcctagaaaaggagaaatcccttctgcaaatggttcctttggatgaaggtgccagtgagagaccccttcaggttcccaaggagatctggcttctagtagatcacctattcaaatacgcctgtcaccaggaggacctgttccagacccctggaatgcaggaagagctccagcagatcattgattgtctggataccagcattcctgagacaatccctggcagcaaccactctgtggctgaagcactgctcattttcttggaagccctgccagagccagtcatctgttacgagctgtatcagcgatgtcttgactctgcttatgatccccggatctgccgacaggtgatctcccagcttccgagatgccatagaaatgttttccgttacttgatggcattccttcgagaactcttaaaattctctgaatacaatagcgtcaatgccaacatgatcgctactctcttcactagtcttctcctgaggcctccacccaaccttatggcaagacagactccaagtgaccgccagcgtgctattcagttccttctgggctttctgcttgggagcgaagaagactaaggcttttactgttctctgatattctagaagcagacgatctcgggctccaagtatttcagaatgatttaaaaagtcatgccacaggaagggtctattgcagaatttcaagttctgtttatagtaaaaaggaagagcgtttcctaatccctcctttaccatatcctacacagaaaaatacttttagacttatattgccaagccaaagttaccatattttggtgtttttgtgttttctctttataaggcaaaaagatctgtatttacactccttcacctaaggatgtgtttgttgccctcctacccaattgtcatgattgtccttagtaccctaggcctagattctgagatcttcccattctaggcctacaagcactacttgctgtagctgagacttgtctagagtcctttgttttgcacttttgacccaccccttcctggatcactcctttgcactccactcccctcgttctgtcactttgaacgaagtctgagtgaggctagtgactccttgggtgtcctcaacagtgaattcactgtctgcgtgcagttattacatgcatttgtgcatttctactacaatggcatctttatgtctctgtaacattggccttttcatggctccacactgggtggaaccatattctcttagatcacatttagtagcataactgtagggactattagagatggcatctcatcgatgagagagaatcacaatcagaatggaagcactttgagtatctgaagagtgagagcattcatgtttgacaggtcctgcttcccactatccttttcctgttattattcaaattttacacaaggactaatcctgggtgtctctgagacccatctcctgcctagacatccacctccagagcaacactggccccacagtaaaagaggaagtcttgtacctcaggcaggcccatctagagctattgctccttcccacagcaaaggtattgtggatgacccttagaatccattctctggtcttctgaaataccaagggcagatgtcacctccttcctcagcaggactgactctgggctctacaaccagctccttcacataaagggtttagagactccccttggctcccagtcaccatatccagtgttgtgtaaagagactggccaacaggaccaaccaagcaccttacctctcccatacaagatgaccctctgagcttttcatttattcaagctctgtggtacagcctttttttaaaataaattaatctatattggttgacaaacaagccaccaaccactgactgcaaaactgcctgatgcagttgggttcctcctggttttcttttgttacaaccacccttgcctgtttacattaattgcaaggagcataacgtacaggctgtatgtacaatcctgggcattgactctgtgacatttctagcatatccaaggcaccaccagtgatttctcctgtttcttggtgggggtgggggggaaggtacgtattctgcaatatggctaaaccctttcctgattgagagttaaagcaataggagtcaagttactggtgccacagatctggaggtatgataggtcaggggctaggtgttgaacttagttaatggaagactgagagcagaacaggtttgtcatctccgcaaggccagaaagtgatcacaaaaagaggcagatgatagacactggggtagggtcataccacagggaaatacctttcctgggcttgttttctagcatatcactgacctgggatctttgggtgatcaagggtgtggttagtggaggctctgtgctgcacgtatgcagtatcctatctctttctacatcagatcaaaacactaagttggtgtactgcctcgaccttttttcagctcatcctggaacatatacagagttgagagttttagacaatctctaggtagaggagacaagatgtagacccagacagaagaaatctgcttccctaccatggctattccagcaccccaacctgtaattgccaagtcctctaaggtactaatttgtagctgctctgaagtaaggatttcggattcagctggtagggaaagactctgcacctgctgtcttagggaagaaatggttcaaatccatgtggtgacattgcattagtctccctttcactgttttcttattctgtaattgtttgttatatttcccaaaaacgtcttgatcactaagcaaagctgctagtgggattctatatttcgtgtcatcttttttattataatttattgcaaatttttttctgaataaatatatgttgtgtgaaaaagcaaa

SEQ ID NO: 199328 - DNA, 2791 bp, Homo sapiens
tgaggcagggtgtgcgtatgaatgtgtgatgaccacgtggcctggtcattgagtggacagggaccaaacagcacggccactcttactttgaagttataatttggaaggtattgtgttggccatgaggagataatagaagttagacagatgaaatgggtcctgcaagggttggattatagactactattacagcagctgtaagttcctcttactttcatcttccacctgtttttctcactgcctgcccctatttttaaaaacaggtgatctcccagcttccgagatgccatagaaatgttttccgttacttgatggcattccttcgagaactcttaaaattctctgaatacaatagcgtcaatgccaacatgatcgctactctcttcactagtcttctcctgaggcctccacccaaccttatggcaagacagactccaagtgaccgccagcgtgctattcagttccttctgggctttctgcttgggagcgaagaagactaaggcttttactgttctctgatattctagaagcagacgatctcgggctccaagtatttcagaatgatttaaaaagtcatgccacaggaagggtctattgcagaatttcaagttctgtttatagtaaaaaggaagagcgtttcctaatccctcctttaccatatcctacacagaaaaatacttttagacttatattgccaagccaaagttaccatattttggtgtttttgtgttttctctttataaggcaaaaagatctgtatttacactccttcacctaaggatgtgtttgttgccctcctacccaattgtcatgattgtccttagtaccctaggcctagattctgagatcttcccattctaggcctacaagcactacttgctgtagctgagacttgtctagagtcctttgttttgcacttttgacccaccccttcctggatcactcctttgcactccactcccctcgttctgtcactttgaacgaagtctgagtgaggctagtgactccttgggtgtcctcaacagtgaattcactgtctgcgtgcagttattacatgcatttgtgcatttctactacaatggcatctttatgtctctgtaacattggccttttcatggctccacactgggtggaaccatattctcttagatcacatttagtagcataactgtagggactattagagatggcatctcatcgatgagagagaatcacaatcagaatggaagcactttgagtatctgaagagtgagagcattcatgtttgacaggtcctgcttcccactatccttttcctgttattattcaaattttacacaaggactaatcctgggtgtctctgagacccatctcctgcctagacatccacctccagagcaacactggccccacagtaaaagaggaagtcttgtacctcaggcaggcccatctagagctattgctccttcccacagcaaaggtattgtggatgacccttagaatccattctctggtcttctgaaataccaagggcagatgtcacctccttcctcagcaggactgactctgggctctacaaccagctccttcacataaagggtttagagactccccttggctcccagtcaccatatccagtgttgtgtaaagagactggccaacaggaccaaccaagcaccttacctctcccatacaagatgaccctctgagcttttcatttattcaagctctgtggtacagcctttttttaaaataaattaatctatattggttgacaaacaagccaccaaccactgactgcaaaactgcctgatgcagttgggttcctcctggttttcttttgttacaaccacccttgcctgtttacattaattgcaaggagcataacgtacaggctgtatgtacaatcctgggcattgactctgtgacatttctagcatatccaaggcaccaccagtgatttctcctgtttcttggtgggggtgggggggaaggtacgtattctgcaatatggctaaaccctttcctgattgagagttaaagcaataggagtcaagttactggtgccacagatctggaggtatgataggtcaggggctaggtgttgaacttagttaatggaagactgagagcagaacaggtttgtcatctccgcaaggccagaaagtgatcacaaaaagaggcagatgatagacactggggtagggtcataccacagggaaatacctttcctgggcttgttttctagcatatcactgacctgggatctttgggtgatcaagggtgtggttagtggaggctctgtgctgcacgtatgcagtatcctatctctttctacatcagatcaaaacactaagttggtgtactgcctcgaccttttttcagctcatcctggaacatatacagagttgagagttttagacaatctctaggtagaggagacaagatgtagacccagacagaagaaatctgcttccctaccatggctattccagcaccccaacctgtaattgccaagtcctctaaggtactaatttgtagctgctctgaagtaaggatttcggattcagctggtagggaaagactctgcacctgctgtcttagggaagaaatggttcaaatccatgtggtgacattgcattagtctccctttcactgttttcttattctgtaattgtttgttatatttcccaaaaacgtcttgatcactaagcaaagctgctagtgggattctatatttcgtgtcatcttttttattataatttattgcaaatttttttctgaataaatatatgttgtgtgaaaaagcaaa

SEQ ID NO: 199329 - DNA, 5481 bp, Homo sapiens
tcagcctgaacatggatgaagttttttgtttttaagagcttccttagtgattgttataggagcctcctagacaattctcagctcccagctccccgctcccggctcccggcgcccggcgcccggcgcggagctgttcctcaaacgacacgcagccgaggtgggtgggtgtggggacgcgggagccagtgtcgtcggatcggcccgcagtccgctgtcctgctgagcccggaggccgcctggatggagccgccgctcccggtcggagcccagccgcttgccactgtcgagggtatggagatgaagggtcctctccgggagccctgcgccctgaccctagcccagaggaacgggcaatatgagttaataatccagttgcatgagaaggaacagcatgttcaagatatcattcctataaatagccacttcagatgtgttcaagaagcagaagaaactcttttgattgacatagcttctaacagtggctgcaaaattcgggttcagggggactggatcagagagcgccgctttgaaatccctgatgaggaacactgtttgaagttcctctcagctgtccttgctgctcagaaagctcagtcacagcttcttgttccagagcaaaaggactcatctagctggtaccagaaattagacactaaggacaaaccttctgttttttcagggcttcttggatttgaagacaatttttcttctatgaatttggacaagaaaataaattcacaaaatcagcctactgggattcatcgggaacccccacctccacccttttcagtgaataaaatgcttccacgtgaaaaagaagcttctaacaaggagcagcccaaagtgaccaacaccatgcggaagctctttgtaccaaatacccaatctgggcagcgggagggtctcatcaaacatatcctggcaaagcgagagaaagaatatgtcaacattcagactttcagattttttgttggaacttggaatgtgaatggccagtctccagatagcgggttagaaccttggctgaactgtgatcccaatcctcctgatatctactgcattggattccaagaactggacttgagcacagaagccttcttctactttgaatctgtgaaggaacaagaatggtccatggctgtagagagaggtttgcattccaaagccaagtataagaaagttcaactggtgcgccttgttgggatgatgcttcttatatttgccagaaaggatcagtgtcgatacattcgtgatattgctacagaaacagttggaactggaatcatggggaaaatgggaaacaaaggtggggtagctgtgagatttgtatttcacaacaccaccttttgcattgtcaattcccatctggctgcacacgtggaggactttgagagaaggaatcaagattataaggacatttgtgcgagaatgagttttgtggtcccaaatcagaccctcccgcagttgaacatcatgaaacatgaggttgtcatttggttgggagatttgaattatagactttgcatgcctgatgccaatgaggtgaaaagtcttattaataagaaagaccttcagagactcttgaaattcgaccagctaaatattcagcgcacacagaaaaaagcttttgttgacttcaatgaaggggaaatcaagttcatccccacttataagtatgactctaaaacagaccggtgggattccagtgggaaatgccgggttccagcctggtgtgaccgaattctttggagaggaacaaatgttaatcagcttaattatcggagtcacatggaactgaaaaccagcgaccacaagcctgttagcgccctcttccatattggggtgaaggttgtggatgaacgaaggtaccggaaagtctttgaagatagtgtacgcatcatggacagaatggaaaatgacttccttccttccttagaactcagcaggagggagtttgtgtttgaaaatgtgaagtttcggcaactacaaaaggagaagttccagatcagcaacaatggacaggttccctgccatttttctttcatccctaaacttaatgacagccagtactgcaagccatggcttcgggctgaaccttttgagggctacttggagccaaatgagacagtggacatttctcttgatgtgtatgtcagcaaagactctgtaaccatcctgaactcgggagaagataagattgaagatattctcgtccttcacctggatcgaggcaaagattacttcttgactatcagtggaaattacctcccaagttgttttggcacatccttagaggctctgtgccgtatgaaaagaccaatccgagaagttcctgttaccaaactcatagacttggagaaatcccttctgcaaatggttcctttggatgaaggtgccagtgagagaccccttcaggttcccaaggagatctggcttctagtagatcacctattcaaatacgcctgtcaccaggaggacctgttccagacccctggaatgcaggaagagctccagcagatcattgattgtctggataccagcattcctgagacaatccctggcagcaaccactctgtggctgaagcactgctcattttcttggaagccctgccagagccagtcatctgttacgagctgtatcagcgatgtcttgactctgcttatgatccccggatctgccgacaggtgatctcccagcttccgagatgccatagaaatgttttccgttacttgatggcattccttcgagaactcttaaaattctctgaatacaatagcgtcaatgccaacatgatcgctactctcttcactagtcttctcctgaggcctccacccaaccttatggcaagacagactccaagtgaccgccagcgtgctattcagttccttctgggctttctgcttgggagcgaagaagactaaggcttttactgttctctgatattctagaagcagacgatctcgggctccaagtatttcagaatgatttaaaaagtcatgccacaggaagggtctattgcagaatttcaagttctgtttatagtaaaaaggaagagcgtttcctaatccctcctttaccatatcctacacagaaaaatacttttagacttatattgccaagccaaagttaccatattttggtgtttttgtgttttctctttataaggcaaaaagatctgtatttacactccttcacctaaggatgtgtttgttgccctcctacccaattgtcatgattgtccttagtaccctaggcctagattctgagatcttcccattctaggcctacaagcactacttgctgtagctgagacttgtctagagtcctttgttttgcacttttgacccaccccttcctggatcactcctttgcactccactcccctcgttctgtcactttgaacgaagtctgagtgaggctagtgactccttgggtgtcctcaacagtgaattcactgtctgcgtgcagttattacatgcatttgtgcatttctactacaatggcatctttatgtctctgtaacattggccttttcatggctccacactgggtggaaccatattctcttagatcacatttagtagcataactgtagggactattagagatggcatctcatcgatgagagagaatcacaatcagaatggaagcactttgagtatctgaagagtgagagcattcatgtttgacaggtcctgcttcccactatccttttcctgttattattcaaattttacacaaggactaatcctgggtgtctctgagacccatctcctgcctagacatccacctccagagcaacactggccccacagtaaaagaggaagtcttgtacctcaggcaggcccatctagagctattgctccttcccacagcaaaggtattgtggatgacccttagaatccattctctggtcttctgaaataccaagggcagatgtcacctccttcctcagcaggactgactctgggctctacaaccagctccttcacataaagggtttagagactccccttggctcccagtcaccatatccagtgttgtgtaaagagactggccaacaggaccaaccaagcaccttacctctcccatacaagatgaccctctgagcttttcatttattcaagctctgtggtacagcctttttttaaaataaattaatctatattggttgacaaacaagccaccaaccactgactgcaaaactgcctgatgcagttgggttcctcctggttttcttttgttacaaccacccttgcctgtttacattaattgcaaggagcataacgtacaggctgtatgtacaatcctgggcattgactctgtgacatttctagcatatccaaggcaccaccagtgatttctcctgtttcttggtgggggtgggggggaaggtacgtattctgcaatatggctaaaccctttcctgattgagagttaaagcaataggagtcaagttactggtgccacagatctggaggtatgataggtcaggggctaggtgttgaacttagttaatggaagactgagagcagaacaggtttgtcatctccgcaaggccagaaagtgatcacaaaaagaggcagatgatagacactggggtagggtcataccacagggaaatacctttcctgggcttgttttctagcatatcactgacctgggatctttgggtgatcaagggtgtggttagtggaggctctgtgctgcacgtatgcagtatcctatctctttctacatcagatcaaaacactaagttggtgtactgcctcgaccttttttcagctcatcctggaacatatacagagttgagagttttagacaatctctaggtagaggagacaagatgtagacccagacagaagaaatctgcttccctaccatggctattccagcaccccaacctgtaattgccaagtcctctaaggtactaatttgtagctgctctgaagtaaggatttcggattcagctggtagggaaagactctgcacctgctgtcttagggaagaaatggttcaaatccatgtggtgacattgcattagtctccctttcactgttttcttattctgtaattgtttgttatatttcccaaaaacgtcttgatcactaagcaaagctgctagtgggattctatatttcgtgtcatcttttttattataatttattgcaaatttttttctgaataaatatatgttgtgtgaaaaagcaaaaaaaaaaaaaaaaaatttggggggggttgggcccgaaaaatctactaaaacctttcgtgggggggggggccccagtgggtaggcgacacggtgccaagcaggggtccccgaagaaaaaccggggacagacaacaggtgcgggggttctcccaccatattaaaaaaggcccgggggaacacgaaggtgtctggaaaaactccaagagggaccccgagggcaaaacggggtccctccacaggggtcccagggaagccgatattaaataca

SEQ ID NO: 199330 - DNA, 4592 bp, Homo sapiens
tcagcctgaacatggatgaagttttttgtttttaagagcttccttagtgattgttataggagcctcctagacaattctcagctcccagctccccgctcccggctcccggcgcccggcgcccggcgcggagctgttcctcaaacgacacgcagccgaggtgggtgggtgtggggacgcgggagccagtgtcgtcggatcggcccgcagtccgctgtcctgctgagcccggaggccgcctggatggagccgccgctcccggtcggagcccagccgcttgccactgtcgagggtatggagatgaagggtcctctccgggagccctgcgccctgaccctagcccagaggaacgggcaatatgagttaataatccagttgcatgagaaggaacagcatgttcaagatatcattcctataaatagccacttcagatgtgttcaagaagcagaagaaactcttttgattgacatagcttctaacagtggctgcaaaattcgggttcagggggactggatcagagagcgccgctttgaaatccctgatgaggaacactgtttgaagttcctctcagctgtccttgctgctcagaaagctcagtcacagcttcttgttccagagcaaaaggactcatctagctggtaccagaaattagacactaaggacaaaccttctgttttttcagggcttcttggatttgaagacaatttttcttctatgaatttggacaagaaaataaattcacaaaatcagcctactgggattcatcgggaacccccacctccacccttttcagtgaataaaatgcttccacgtgaaaaagaagcttctaacaaggagcagcccaaagtgaccaacaccatgcggaagctctttgtaccaaatacccaatctgggcagcgggagggtctcatcaaacatatcctggcaaagcgagagaaagaatatgtcaacattcagactttcagattttttgttggaacttggaatgtgaatggccagtctccagatagcgggttagaaccttggctgaactgtgatcccaatcctcctgatatctactgcattggattccaagaactggacttgagcacagaagccttcttctactttgaatctgtgaaggaacaagaatggtccatggctgtagagagaggtttgcattccaaagccaagtataagaaagttcaactggtgcgccttgttgggatgatgcttcttatatttgccagaaaggatcagtgtcgatacattcgtgatattgctacagaaacagttggaactggaatcatggggaaaatgggaaacaaaggtggggtagctgtgagatttgtatttcacaacaccaccttttgcattgtcaattcccatctggctgcacacgtggaggactttgagagaaggaatcaagattataaggacatttgtgcgagaatgagttttgtggtcccaaatcagaccctcccgcagttgaacatcatgaaacatgaggttgtcatttggttgggagatttgaattatagactttgcatgcctgatgccaatgaggtgaaaagtcttattaataagaaagaccttcagagactcttgaaattcgaccagctaaatattcagcgcacacagaaaaaagcttttgttgacttcaatgaaggggaaatcaagttcatccccacttataagtatgactctaaaacagaccggtgggattccagtgggaaatgccgggttccagcctggtgtgaccgaattctttggagaggaacaaatgttaatcagcttaattatcggagtcacatggaactgaaaaccagcgaccacaagcctgttagcgccctcttccatattggggtgaaggttgtggatgaacgaaggtaccggaaagtctttgaagatagtgtacgcatcatggacagaatggaaaatgacttccttccttccttagaactcagcaggagggagtttgtgtttgaaaatgtgaagtttcggcaactacaaaaggagaagttccagatcagcaacaatggacaggttccctgccatttttctttcatccctaaacttaatgacagccagtactgcaagccatggcttcgggctgaaccttttgagggctacttggagccaaatgagacagtggacatttctcttgatgtgtatgtcagcaaagactctgtaaccatcctgaactcgggagaagataagattgaagatattctcgtccttcacctggatcgaggcaaagattacttcttgactatcagtggaaattacctcccaagttgttttggcacatccttagaggctctgtgccgtatgaaaagaccaatccgagaagttcctgttaccaaactcatagacttggaagaagacagcttcctagaaaaggagaaatcccttctgcaaatggttcctttggatgaaggtgccagtgagagaccccttcaggttcccaaggagatctggcttctagtagatcacctattcaaatacgcctgtcaccaggaggacctgttccagacccctggaatgcaggaagagctccagcagatcattgattgtctggataccagcattcctgagacaatccctggcagcaaccactctgtggctgaagcactgctcattttcttggaagccctgccagagccagtcatctgttacgagctgtatcagcgatgtcttgactctgcttatgatccccggatctgccgacaggtgatctcccagcttccgagatgccatagaaatgttttccgttacttgatggcattccttcgagaactcttaaaattctctgaatacaatagcgtcaatgccaacatgatcgctactctcttcactagtcttctcctgaggcctccacccaaccttatggcaagacagactccaagtgaccgccagcgtgctattcagttccttctgggctttctgcttgggagcgaagaagactaaggcttttactgttctctgatattctagaagcagacgatctcgggctccaagtatttcagaatgatttaaaaagtcatgccacaggaagggtctattgcagaatttcaagttctgtttatagtaaaaaggaagagcgtttcctaatccctcctttaccatatcctacacagaaaaatacttttagacttatattgccaagccaaagttaccatattttggtgtttttgtgttttctctttataaggcaaaaagatctgtatttacactccttcacctaaggatgtgtttgttgccctcctacccaattgtcatgattgtccttagtaccctaggcctagattctgagatcttcccattctaggcctacaagcactacttgctgtagctgagacttgtctagagtcctttgttttgcacttttgacccaccccttcctggatcactcctttgcactccactcccctcgttctgtcactttgaacgaagtctgagtgaggctagtgactccttgggtgtcctcaacagtgaattcactgtctgcgtgcagttattacatgcatttgtgcatttctactacaatggcatctttatgtctctgtaacattggccttttcatggctccacactgggtggaaccatattctcttagatcacatttagtagcataactgtagggactattagagatggcatctcatcgatgagagagaatcacaatcagaatggaagcactttgagtatctgaagagtgagagcattcatgtttgacaggtcctgcttcccactatccttttcctgttattattcaaattttacacaaggactaatcctgggtgtctctgagacccatctcctgcctagacatccacctccagagcaacactggccccacagtaaaagaggaagtcttgtacctcaggcaggcccatctagagctattgctccttcccacagcaaaggtattgtggatgacccttagaatccattctctggtcttctgaaataccaagggcagatgtcacctccttcctcagcaggactgactctgggctctacaaccagctccttcacataaagggtttagagactccccttggctcccagtcaccatatccaggtgtggttagtggaggctctgtgctgcacgtatgcagtatcctatctctttctacatcagatcaaaacactaagttggtgtactgcctcgaccttttttcagctcatcctggaacatatacagagttgagagttttagacaatctctaggtagaggagacaagatgtagacccagacagaagaaatctgcttccctaccatggctattccagcaccccaacctgtaattgccaagtcctctaaggtactaatttgtagctgctctgaagtaaggatttcggattcagctggtagggaaagactctgcacctgctgtcttagggaagaaatggttcaaatccatgtggtgacattgcattagtctccctttcactgttttcttattctgtaattgtttgttatatttcccaaaaacgtcttgatcactaagcaaagctgctagtgggattctatatttcgtgtcatcttttttattataatttattgcaaatttttttctgaataaatatatgttgtgtgaaaaagcaaa

SEQ ID NO: 199331 - DNA, 2391 bp, Homo sapiens
tcagcctgaacatggatgaagttttttgtttttaagagcttccttagtgattgttataggagcctcctagacaattctcagctcccagctccccgctcccggctcccggcgcccggcgcccggcgcggagctgttcctcaaacgacacgcagccgaggtgggtgggtgtggggacgcgggagccagtgtcgtcggatcggcccgcagtccgctgtcctgctgagcccggaggccgcctggatggagccgccgctcccggtcggagcccagccgcttgccactgtcgagggtatggagatgaagggtcctctccgggagccctgcgccctgaccctagcccagaggaacgggcaatatgagttaataatccagttgcatgagaaggaacagcatgttcaagatatcattcctataaatagccacttcagatgtgttcaagaagcagaagaaactcttttgattgacatagcttctaacagtggctgcaaaattcgggttcagggggactggatcagagagcgccgctttgaaatccctgatgaggaacactgtttgaagttcctctcagctgtccttgctgctcagaaagctcagtcacagcttcttgttccagagcaaaaggactcatctagctggtaccagaaattagacactaaggacaaaccttctgttttttcagggcttcttggatttgaagacaatttttcttctatgaatttggacaagaaaataaattcacaaaatcagcctactgggattcatcgggaacccccacctccacccttttcagtgaataaaatgcttccacgtgaaaaagaagcttctaacaaggagcagcccaaagtgaccaacaccatgcggaagctctttgtaccaaatacccaatctgggcagcgggagggtctcatcaaacatatcctggcaaagcgagagaaagaatatgtcaacattcagactttcagattttttgttggaacttggaatgtgaatggccagtctccagatagcgggttagaaccttggctgaactgtgatcccaatcctcctgatatctactgcattggattccaagaactggacttgagcacagaagccttcttctactttgaatctgtgaaggaacaagaatggtccatggctgtagagagaggtttgcattccaaagccaagtataagaaagttcaactggtgcgccttgttgggatgatgcttcttatatttgccagaaaggatcagtgtcgatacattcgtgatattgctacagaaacagttggaactggaatcatggggaaaatgggaaacaaaggtggggtagctgtgagatttgtatttcacaacaccaccttttgcattgtcaattcccatctggctgcacacgtggaggactttgagagaaggaatcaagattataaggacatttgtgcgagaatgagttttgtggtcccaaatcagaccctcccgcagttgaacatcatgaaacatgaggttgtcatttggttgggagatttgaattatagactttgcatgcctgatgccaatgaggtgaaaagtcttattaataagaaagaccttcagagactcttgaaattcgaccagctaaatattcagcgcacacagaaaaaagcttttgttgacttcaatgaaggggaaatcaagttcatccccacttataagtatgactctaaaacagaccggtgggattccagtgggaaatgccgggttccagcctggtgtgaccgaattctttggagaggaacaaatgttaatcagcttaattatcggagtcacatggaactgaaaaccagcgaccacaagcctgttagcgccctcttccatattggggtgaaggttgtggatgaacgaaggtaccggaaagtctttgaagatagtgtacgcatcatggacagaatggaaaatgacttccttccttccttagaactcagcaggagggagtttgtgtttgaaaatgtgaagtttcggcaactacaaaaggagaagttccagatcagcaacaatggacaggttccctgccatttttctttcatccctaaacttaatgacagccagtactgcaagccatggcttcgggctgaaccttttgagggctacttggagccaaatgagacagtggacatttctcttgatgtgtatgtcagcaaagaactctgcacctgctgtcttagggaagaaatggttcaaatccatgtggtgacattgcattagtctccctttcactgttttcttattctgtaattgtttgttatatttcccaaaaacgtcttgatcactaagcaaagctgctagtgggattctatatttcgtgtcatcttttttattataatttattgcaaatttttttctgaataaatatatgttgtgtgaaaaagcaaa

SEQ ID NO: 199332 - DNA, 5237 bp, Homo sapiens
tcagcctgaacatggatgaagttttttgtttttaagagcttccttagtgattgttataggagcctcctagacaattctcagctcccagctccccgctcccggctcccggcgcccggcgcccggcgcggagctgttcctcaaacgacacgcagccgaggtgggtgggtgtggggacgcgggagccagtgtcgtcggatcggcccgcagtccgctgtcctgctgagcccggaggccgcctggatggagccgccgctcccggtcggagcccagccgcttgccactgtcgagggtatggagatgaagggtcctctccgggagccctgcgccctgaccctagcccagaggaacgggcaatatgagttaataatccagttgcatgagaaggaacagcatgttcaagatatcattcctataaatagccacttcagatgtgttcaagaagcagaagaaactcttttgattgacatagcttctaacagtggctgcaaaattcgggttcagggggactggatcagagagcgccgctttgaaatccctgatgaggaacactgtttgaagttcctctcagctgtccttgctgctcagaaagctcagtcacagcttcttgttccagagcaaaaggactcatctagctggtaccagaaattagacactaaggacaaaccttctgttttttcagggcttcttggatttgaagacaatttttcttctatgaatttggacaagaaaataaattcacaaaatcagcctactgggattcatcgggaacccccacctccacccttttcagtgaataaaatgcttccacgtgaaaaagaagcttctaacaaggagcagcccaaagtgaccaacaccatgcggaagctctttgtaccaaatacccaatctgggcagcgggagggtctcatcaaacatatcctggcaaagcgagagaaagaatatgtcaacattcagactttcagattttttgttggaacttggaatgtgaatggccagtctccagatagcgggttagaaccttggctgaactgtgatcccaatcctcctgatatctactgcattggattccaagaactggacttgagcacagaagccttcttctactttgaatctgtgaaggaacaagaatggtccatggctgtagagagaggtttgcattccaaagccaagtataagaaagttcaactggtgcgccttgttgggatgatgcttcttatatttgccagaaaggatcagtgtcgatacattcgtgatattgctacagaaacagttggaactggaatcatggggaaaatgggaaacaaaggtggggtagctgtgagatttgtatttcacaacaccaccttttgcattgtcaattcccatctggctgcacacgtggaggactttgagagaaggaatcaagattataaggacatttgtgcgagaatgagttttgtggtcccaaatcagaccctcccgcagttgaacatcatgaaacatgaggttgtcatttggttgggagatttgaattatagactttgcatgcctgatgccaatgaggtgaaaagtcttattaataagaaagaccttcagagactcttgaaattcgaccagctaaatattcagcgcacacagaaaaaagcttttgttgacttcaatgaaggggaaatcaagttcatccccacttataagtatgactctaaaacagaccggtgggattccagtgggaaatgccgggttccagcctggtgtgaccgaattctttggagaggaacaaatgttaatcagcttaattatcggagtcacatggaactgaaaaccagcgaccacaagcctgttagcgccctcttccatattggggtgaaggttgtggatgaacgaaggtaccggaaagtctttgaagatagtgtacgcatcatggacagaatggaaaatgacttccttccttccttagaactcagcaggagggagtttgtgtttgaaaatgtgaagtttcggcaactacaaaaggagaagttccagatcagcaacaatggacaggttccctgccatttttctttcatccctaaacttaatgacagccagtactgcaagccatggcttcgggctgaaccttttgagggctacttggagccaaatgagacagtggacatttctcttgatgtgtatgtcagcaaagactctgtaaccatcctgaactcgggagaagataagattgaagatattctcgtccttcacctggatcgaggcaaagattacttcttgactatcagtggaaattacctcccaagttgttttggcacatccttagaggctctgtgccgtatgaaaagaccaatccgagaagttcctgttaccaaactcatagacttggaagaagacagcttcctagaaaaggagaaatcccttctgcaaatggttcctttggatgaaggtgccagtgagagaccccttcaggttcccaaggagatctggcttctagtagatcacctattcaaatacgcctgtcaccaggaggacctgttccagacccctggaatgcaggaagagctccagcagatcattgattgtctggataccagcattcctgagacaatccctggcagcaaccactctgtggctgaagcactgctcattttcttggaagccctgccagagccagtcatctgttacgagctgtatcagcgatgtcttgactctgcttatgatccccggatctgccgacaggtgatctcccagcttccgagatgccatagaaatgttttccgttacttgatggcattccttcgagaactcttaaaattctctgaatacaatagcgtcaatgccaacatgatcgctactctcttcactagtcttctcctgaggcctccacccaaccttatggcaagacagactccaagtgaccgccagcgtgctattcagttccttctgggctttctgcttgggagcgaagaagactaaggcttttactgttctctgatattctagaagcagacgatctcgggctccaagtatttcagaatgatttaaaaagtcatgccacaggaagggtctattgcagaatttcaagttctgtttatagtaaaaaggaagagcgtttcctaatccctcctttaccatatcctacacagaaaaatacttttagacttatattgccaagccaaagttaccatattttggtgtttttgtgttttctctttataaggcaaaaagatctgtatttacactccttcacctaaggatgtgtttgttgccctcctacccaattgtcatgattgtccttagtaccctaggcctagattctgagatcttcccattctaggcctacaagcactacttgctgtagctgagacttgtctagagtcctttgttttgcacttttgacccaccccttcctggatcactcctttgcactccactcccctcgttctgtcactttgaacgaagtctgagtgaggctagtgactccttgggtgtcctcaacagtgaattcactgtctgcgtgcagttattacatgcatttgtgcatttctactacaatggcatctttatgtctctgtaacattggccttttcatggctccacactgggtggaaccatattctcttagatcacatttagtagcataactgtagggactattagagatggcatctcatcgatgagagagaatcacaatcagaatggaagcactttgagtatctgaagagtgagagcattcatgtttgacaggtcctgcttcccactatccttttcctgttattattcaaattttacacaaggactaatcctgggtgtctctgagacccatctcctgcctagacatccacctccagagcaacactggccccacagtaaaagaggaagtcttgtacctcaggcaggcccatctagagctattgctccttcccacagcaaaggtattgtggatgacccttagaatccattctctggtcttctgaaataccaagggcagatgtcacctccttcctcagcaggactgactctgggctctacaaccagctccttcacataaagggtttagagactccccttggctcccagtcaccatatccagtgttgtgtaaagagactggccaacaggaccaaccaagcaccttacctctcccatacaagatgaccctctgagcttttcatttattcaagctctgtggtacagcctttttttaaaataaattaatctatattggttgacaaacaagccaccaaccactgactgcaaaactgcctgatgcagttgggttcctcctggttttcttttgttacaaccacccttgcctgtttacattaattgcaaggagcataacgtacaggctgtatgtacaatcctgggcattgactctgtgacatttctagcatatccaaggcaccaccagtgatttctcctgtttcttggtgggggtgggggggaaggtacgtattctgcaatatggctaaaccctttcctgattgagagttaaagcaataggagtcaagttactggtgccacagatctggaggtatgataggtcaggggctaggtgttgaacttagttaatggaagactgagagcagaacaggtttgtcatctccgcaaggccagaaagtgatcacaaaaagaggcagatgatagacactggggtagggtcataccacagggaaatacctttcctgggcttgttttctagcatatcactgacctgggatctttgggtgatcaagggtgtggttagtggaggctctgtgctgcacgtatgcagtatcctatctctttctacatcagatcaaaacactaagttggtgtactgcctcgaccttttttcagctcatcctggaacatatacagagttgagagttttagacaatctctaggtagaggagacaagatgtagacccagacagaagaaatctgcttccctaccatggctattccagcaccccaacctgtaattgccaagtcctctaaggtactaatttgtagctgctctgaagtaaggatttcggattcagctggtagggaaagactctgcacctgctgtcttagggaagaaatggttcaaatccatgtggtgacattgcattagtctccctttcactgttttcttattctgtaattgtttgttatatttcccaaaaacgtcttgatcactaagcaaagctgctagtgggattctatatttcgtgtcatcttttttattataatttattgcaaatttttttctgaataaatatatgttgtgtgaaaaagcaaa

SEQ ID NO: 199333 - DNA, 2683 bp, Homo sapiens
gcctcgtgccgaatcggcacgtgggtgggtgtggggacgcgggagccagtgtcgtcggatcggcccgcagtccgctgtcctgctgagcccggaggccgcctggatggagccgccgctcccggtcggagcccagccgcttgccactgtcgagggtatggagatgaagggtcctctccgggagccctgcgccctgaccctagcccagaggaacgggcaatatgagttaataatccagttgcatgagaaggaacagcatgttcaagatatcattcctataaatagccacttcagatgtgttcaagaagcagaagaaactcttttgattgacatagcttctaacacgtgctattcagttccttctgggctttctgcttgggagcgaagaagactaaggcttttactgttctctgatattctagaagcagacgatctcgggctccaagtatttcagaatgatttaaaaagtcatgccacaggaagggtctattgcagaatttcaagttctgtttatagtaaaaaggaagagcgtttcctaatccctcctttaccatatcctacacagaaaaatacttttagacttatattgccaagccaaagttaccatattttggtgtttttgtgttttctctttataaggcaaaaagatctgtatttacactccttcacctaaggatgtgtttgttgccctcctacccaattgtcatgattgtccttagtaccctaggcctagattctgagatcttcccattctaggcctacaagcactacttgctgtagctgagacttgtctagagtcctttgttttgcacttttgacccaccccttcctggatcactcctttgcactccactcccctcgttctgtcactttgaacgaagtctgagtgaggctagtgactccttgggtgtcctcaacagtgaattcactgtctgcgtgcagttattacatgcatttgtgcatttctactacaatggcatctttatgtctctgtaacattggccttttcatggctccacactgggtggaaccatattctcttagatcacatttagtagcataactgtagggactattagagatggcatctcatcgatgagagagaatcacaatcagaatggaagcactttgagtatctgaagagtgagagcattcatgtttgacaggtcctgcttcccactatccttttcctgttattattcaaattttacacaaggactaatcctgggtgtctctgagacccatctcctgcctagacatccacctccagagcaacactggccccacagtaaaagaggaagtcttgtacctcaggcaggcccatctagagctattgctccttcccacagcaaaggtattgtggatgacccttagaatccattctctggtcttctgaaataccaagggcagatgtcacctccttcctcagcaggactgactctgggctctacaaccagctccttcacataaagggtttagagactccccttggctcccagtcaccatatccagtgttgtgtaaagagactggccaacaggaccaaccaagcaccttacctctcccatacaagatgaccctctgagcttttcatttattcaagctctgtggtacagcctttttttaaaataaattaatctatattggttgacaaacaagccaccaaccactgactgcaaaactgcctgatgcagttgggttcctcctggttttcttttgttacaaccacccttgcctgtttacattaattgcaaggagcataacgtacaggctgtatgtacaatcctgggcattgactctgtgacatttctagcatatccaaggcaccaccagtgatttctcctgtttcttggtgggggtgggggggaaggtacgtattctgcaatatggctaaaccctttcctgattgagagttaaagcaataggagtcaagttactggtgccacagatctggaggtatgataggtcaggggctaggtgttgaacttagttaatggaagactgagagcagaacaggtttgtcatctccgcaaggccagaaagtgatcacaaaaagaggcagatgatagacactggggtagggtcataccacagggaaatacctttcctgggcttgttttctagcatatcactgacctgggatctttgggtgatcaagggtgtggttagtggaggctctgtgctgcacgtatgcagtatcctatctctttctacatcagatcaaaacactaagttggtgtactgcctcgaccttttttcagctcatcctggaacatatacagagttgagagttttagacaatctctaggtagaggagacaagatgtagacccagacagaagaaatctgcttccctaccatggctattccagcaccccaacctgtaattgccaagtcctctaaggtactaatttgtagctgctctgaagtaaggatttcggattcagctggtagggaaagactctgcacctgctgtcttagggaagaaatggttcaaatccatgtggtgacattgcattagtctccctttcactgttttcttattctgtaattgtttgttatatttcccaaaaacgtcttgatcactaagcaaagctgctagtgggattctatatttcgtgtcatcttttttattataatttattgcaaatttttttctgaataaatatatgttgtgtgaaaaagcaaa

SEQ ID NO: 199334 - DNA, 2864 bp, Homo sapiens
tcagcctgaacatggatgaagttttttgtttttaagagcttccttagtgattgttataggagcctcctagacaattctcagctcccagctccccgctcccggctcccggcgcccggcgcccggcgcggagctgttcctcaaacgacacgcagccgaggtgggtgggtgtggggacgcgggagccagtgtcgtcggatcggcccgcagtccgctgtcctgctgagcccggaggccgcctggatggagccgccgctcccggtcggagcccagccgcttgccactgtcgagggtatggagatgaagggtcctctccgggagccctgcgccctgaccctagcccagaggaacgggcaatatgagttaataatccagttgcatgagaaggaacagcatgttcaagatatcattcctataaatagccacttcagatgtgttcaagaagcagaagaaactcttttgattgacatagcttctaacagtggctgcaaaattcgggttcagggggactggatcagagagcgccgctttgaaatccctgatgaggaacactgtttgaagttcctctcagctgtccttgctgctcagaaagctcagtcacagcttcttgttccagagcaaaaggactcatctagctggtaccagaaattagacactaaggacaaaccttctgttttttcagggcttcttggatttgaagacaatttttcttctatgaatttggacaagaaaataaattcacaaaatcagcctactgggattcatcgggaacccccacctccacccttttcagtgaataaaatgcttccacgtgaaaaagaagcttctaacaaggagcagcccaaagtgaccaacaccatgcggaagctctttgtaccaaatacccaatctgggcagcgggagggtctcatcaaacatatcctggcaaagcgagagaaagaatatgtcaacattcagactttcagattttttgttggaacttggaatgtgaatggccagtctccagatagcgggttagaaccttggctgaactgtgatcccaatcctcctgatatctactgcattggattccaagaactggacttgagcacagaagccttcttctactttgaatctgtgaaggaacaagaatggtccatggctgtagagagaggtttgcattccaaagccaagtataagaaagttcaactggtgcgccttgttgggatgatgcttcttatatttgccagaaaggatcagtgtcgatacattcgtgatattgctacagaaacagttggaactggaatcatggggaaaatgggaaacaaaggtggggtagctgtgagatttgtatttcacaacaccaccttttgcattgtcaattcccatctggctgcacacgtggaggactttgagagaaggaatcaagattataaggacatttgtgcgagaatgagttttgtggtcccaaatcagaccctcccgcagttgaacatcatgaaacatgaggttgtcatttggttgggagatttgaattatagactttgcatgcctgatgccaatgaggtgaaaagtcttattaataagaaagaccttcagagactcttgaaattcgaccagctaaatattcagcgcacacagaaaaaagcttttgttgacttcaatgaaggggaaatcaagttcatccccacttataagtatgactctaaaacagaccggtgggattccagtgggaaatgccgggttccagcctggtgtgaccgaattctttggagaggaacaaatgttaatcagcttaattatcggagtcacatggaactgaaaaccagcgaccacaagcctgttagcgccctcttccatattggggtgaaggttgtggatgaacgaaggtaccggaaagtctttgaagatagtgtacgcatcatggacagaatggaaaatgacttccttccttccttagaactcagcaggagggagtttgtgtttgaaaatgtgaagtttcggcaactacaaaaggagaagttccagatcagcaacaatggacaggttccctgccatttttctttcatccctaaacttaatgacagccagtactgcaagccatggcttcgggctgaaccttttgagggctacttggagccaaatgagacagtggacatttctcttgatgtgtatgtcagcaaagactctgtaaccatcctgaactcgggagaagataagattgaagatattctcgtccttcacctggatcgaggcaaagattacttcttgactatcagtggaaattacctcccaagttgttttggcacatccttagaggctctgtgccgtatgaaaagaccaatccgagaagttcctgttaccaaactcatagacttggaagaagacagcttcctagaaaaggagaaatcccttctgcaaatggttcctttggatgaaggtgccagtgagagaccccttcaggttcccaaggagatctggcttctagtagatcacctattcaaatacgcctgtcaccaggaggacctgttccagacccctggaatgcaggaagagctccagcagatcattgattgtctggataccagcattcctgagacaatccctggcagcaaccactctgtggctgaagcactgctcattttcttggaagccctgccagagccagtcatctgttacgagctgtatcagcgatgtcttgactctgcttatgatccccggatctgccgacaggtgatctcccagcttccgagatgccatagaaatgttttccgttacttgatggcattccttcgagaactcttaaaattctctgaatacaatagcgtcaatgccaacatgatcgtactctcttcactgtctcctccttgtcctctgggggatcctct

SEQ ID NO: 199335 - DNA, 1620 bp, Homo sapiens
tcagcctgaacatggatgaagttttttgtttttaagagcttccttagtgattgttataggagcctcctagacaattctcagctcccagctccccgctcccggctcccggcgcccggcgcccggcgcggagctgttcctcaaacgacacgcagccgaggtgggtgggtgtggggacgcgggagccagtgtcgtcggatcggcccgcagtccgctgtcctgctgagcccggaggccgcctggatggagccgccgctcccggtcggagcccagccgcttgccactgtcgagggtatggagatgaagggtcctctccgggagccctgcgccctgaccctagcccagaggaacgggcaatatgagttaataatccagttgcatgagaaggaacagcatgttcaagatatcattcctataaatagccacttcagatgtgttcaagaagcagaagaaactcttttgattgacatagcttctaacagtggctgcaaaattcgggttcagggggactggatcagagagcgccgctttgaaatccctgatgaggaacactgtttgaagttcctctcagctgtccttgctgctcagaaagctcagtcacagcttcttgttccagagcaaaaggactcatctagctggtaccagaaattagacactaaggacaaaccttctgttttttcagggcttcttggatttgaagacaatttttcttctatgaatttggacaagaaaataaattcacaaaatcagcctactgggattcatcgggaacccccacctccacccttttcagtgaataaaatgcttccacgtgaaaaagaagcttctaacaaggagcagcccaaagtgaccaacaccatgcggaagctctttgtaccaaatacccaatctgggcagcgggagggtctcatcaaacatatcctggcaaagcgagagaaagaatatgtcaacattcagactttcagattttttgttggaacttggaatgtgaatggccagtctccagatagcgggttagaaccttggctgaactgtgatcccaatcctcctgatatctactgcattggattccaagaactggacttgagcacagaagccttcttctactttgaatctgtgaaggaacaagaatggtccatggctgtagagagaggtttgcattccaaagccaagtataagaaagttcaactggtgcgccttgttgggatgatgcttcttatatttgccagaaaggatcagtgtcgatacattcgtgatattgctacagaaacagttggaactggaatcatggggaaaatgggaaacaaaggtggggtagctgtgagatttgtatttcacaacaccaccttttgcattgtcaattcccatctggctgcacacgtggaggactttgagagaaggaatcaagattataaggacatttgtgcgagaatgagttttgtggtcccaaatcagaccctcccgcagttgaacatcatgaaacatgagtaagtggttaactcacctgtagcctttgagtagtggctacaggagtttggatagtgtagagattaaatgtgagatactgtagagctgtgaagagtgaaagattaccagtgagggattggggtcacaaaggagagg

SEQ ID NO: 199336 - DNA, 490 bp, Homo sapiens
atccgcctgcctcggcctcctaaagtgctgggattacaggcgtgagccaccgcgcctggctggtaaaactctttattggaccaaagttgatataaaaaaaatagttctggttgtcagctgacatgagtcagcagtattctgtgactcaagttgcattcattcattcattcatccagtacttactgaagtcctgcttaccatgtgccaagcactattctagaggcttgagatacattacttaacaaaccaaataagcaaaaatctctgccctctcagtcagcattctgggggagatgggatgtcagacaataaagaaaaaccataactaatatatcgtatgttattcagtgatgagtgctctgaaaaaatatctcaaggtatttttaaggagataaggggcatattaggaggaagttcagattcttcaaggtgataaatgagcaaaaggaagcaagggactcagtcctgtggttatctagggggagagtgt

SEQ ID NO: 199337 - DNA, 374 bp, Homo sapiens
gtgaacctatgtatatagacatcaggtatggaggatagggcaggtgacatgtgaattcttgtcaacttgtgggtacagtcaggagtgattcagaaggagcaagagaaaactgggtgtaattaatagaaattaaaaccactaacttcaaaatgtacaacatgtataccttctgctctatcaatctcctttctagaatatatcaatatgaagaaatgtgtgatcaggtgttcattataccgtggagagctggataacacacaaacagaatacctatggcaggtaactttcgggattggaatttggaatttcacgatttttttttctttgtatgtattacttggcacttttttttttttttttttttttgagatgga

SEQ ID NO: 199338 - DNA, 347 bp, Homo sapiens
ctctccaacccttttttctaggaggaatgtatcagcaaagtcttacttcatcagactcagccttcttagtcctccagttgtcatcaagtttacaaatacaaattaaaaccactaacttcaaaatgtacaacatgtataccttctgctctatcaatctcctttctagaatatatcaatatgaagaaatgtgtgatcaggtgttcattataccgtggagagctggataacacacaaacagaatacctatggcaggtaactttcgggattggaatttggaatttcacgatttttttttctttgtatgtattacttggcacttttttttttttttttttttttgagatgga

SEQ ID NO: 199339 - DNA, 613 bp, Homo sapiens
aaggggctgacagtcatctcatctgacctgcatgatctcaggacatggccatgtgcctctatctcagccattctgatttcttttctggtattttctacgtggagtcagagtttaactttctatgggtggtttgcctgggatgatgggagactggggctccaaattactcttactcctttaatcttcctttgattagtaagcttctttcacatctctccatttaatctcattttaagtttaacatactttgagtttcagtctcctgtagatgttactaataggtaattttgacgaatacataatcttggctagagaagagatgcctcttttaagatgaaaatatccttcgttaatagcacaataaactgcagctgtcatgatttaacacagatacttcttttgtcttaataggtgaagtaggaaccccctctatttactcataatcatatttcataaggttgctgagaggatttaagtgagattatccatgtgtgtacctgcctagtctttaagtaccattagaacacttatgtgctagacgctgggctatcttgtgtagacatggggactatgtcatttaattctcacaaccagcatatcaggtaaattctgt

SEQ ID NO: 199340 - DNA, 338 bp, Homo sapiens
acatagccttttctctgcaaatgcatcccaaatgtctatccttttttctataaggacaccagcccatattggattagggtcacacccaagttgtaacttaacttttaattctaactgcctaattttaacttaatcacctctattaaaaatcttatctccaaaatacagctgcattttaagattttagaggttgggacttcaatgtatgaattttaggagagcatgattcagtctgtaacacttacataatgagagagcagagcaagtaaggtctctattgttcattcgttttgcttttatttaaagaggtaattccttgatttatcacaaagggtgat

SEQ ID NO: 199341 - DNA, 485 bp, Homo sapiens
aatatcttatttgtcaaagtaaagtatgtatgtatttctgtcttccttgttttcctcatgtattccttagcattctgatattgtgtcataggatgttgagttgtaaagcctatctgggttcatattttacatactagcttgtcttaagtcatataaccagtaaatagaaggcctggaagttgagtacatctctgtcaggttccagatcccatgccattgattatcatctataatgtcttgatgaagcttttaactagctgggtggtggaatgataatctagtttcctcatatgtaaaatggggatggaactatgcaaaccaagcactgttgtgaggaataaatgagatattttttgtgaaagtggtttgtaaatcaatttgatcttctgtttactctttgcaaagagaaccaagtatgtgtttaaatatattgcaattaataattactgagataaaatgtaactatacatttgaaatgatcagtt

SEQ ID NO: 199342 - DNA, 3289 bp, Homo sapiens
cccccgcctcccatggcttcgctttcagagcatcctcactccgcccagttcggtgccagctgcgtgggctccagcttcgatcgttttccttggaatgctccaaaactcagcagcgactaagggaattccattggaatttgccgggcgtgctctcaccccgcacggcacccgcgccgtcagtcctcggatcccatcacttcagcccgaagattgcaactttgcagagacgaagaaatagcatggcatgaaacatggctcagttctattacaaaagaaatgttaatgctccctatagagaccgcatccctctaaggatagtaagagcagaatcagaactttcgccatcagaaaaagcctacttgaatgctgtggaaaagggagattatgccagtgtcaagaaatccctagaggaagctgaaatttattttaaaatcaatattaattgcattgatcctctcggaagaactgctctcctcattgcaattgaaaatgagaacttggagctcatcgaactactcttaagctttaatgtctatgttggagatgctctattacatgctatcagaaaagaagtcgtcggagctgttgagctgttattgaaccacaaaaaacctagtggagaaaaacaggtgcctcctatactccttgataagcagttctctgaattcactccagacattacaccaatcattttggcagcccatacaaataattatgagataataaaactcttggttcagaaaggagtctcagtgcctcgaccccacgaggtccgctgtaactgtgtggaatgcgtgtccagttcagatgtggacagcctccgtcactcacgctccagactcaacatctacaaggccttggccagtccctctctcattgcactgtcaagcgaagatccttttctcacagcctttcagttaagttgggaacttcaggaactgagcaaggtggaaaatgaattcaagtcggagtatgaagagctgtcacggcagtgcaaacaatttgctaaggacctactggatcagacgagaagttccagagaactggaaatcattcttaattaccgagatgacaatagtctcatagaagaacaaagtggaaatgatcttgcaagactaaaattggccattaagtaccgtcaaaaagagtttgttgcccagcccaattgtcaacagctgctggcatctcgctggtacgatgagtttccaggctggaggagaagacactgggcagtgaagatggtgacatgtttcataataggacttctttttcctgtcttctctgtgtgctacctgatagctcccaaaagcccacttggactgttcatcaggaagccatttatcaagtttatctgccacacagcctcctatttgacttttttgttcctgctgctgcttgcctctcagcacatcgacaggtcagacttgaacaggcaaggtccaccaccaaccatcgtcgagtggatgatattaccgtgggtcctgggcttcatatggggagaaattaaacagatgtgggatggcggacttcaggactacatccatgattggtggaatctaatggactttgtaatgaactccttatatttagcaacaatctccttgaaaattgttgcatttgtaaagtacagtgcccttaatccacgagaatcatgggacatgtggcatcccactctggtggcagaagctttatttgctattgcaaacatcttcagttctctgcgtctgatctcactgtttactgcaaattctcacctgggacctctgcaaatatctctgggaagaatgctcctggacattttgaagtttctattcatatactgccttgtgttgctagcatttgcaaatggcctaaatcaattgtacttctattatgaagaaacgaaagggttaacctgcaaaggcataagatgtgaaaagcagaataatgcattttcaacgttatttgagacactgcagtccctgttttggtcaatatttgggctcatcaatttatatgtgaccaatgtcaaagcacagcatgaatttactgagtttgttggtgccaccatgtttgggacatacaatgtcatctctctggttgttctactcaacatgttaatagctatgatgaataattcttaccaactgattgctgaccatgcagatatagaatggaaatttgcacgaacaaagctttggatgagttattttgaagaaggaggtactctgcctactcccttcaatgtcatcccgagccccaagtctctctggtacctgatcaaatggatctggacacacttgtgcaagaaaaagatgagaagaaagccagaaagttttggaacaatagggaggcgagctgctgataacttgagaagacatcaccaataccaagaagttatgaggaacctggtgaagcgatacgttgctgcaatgattagagatgctaaaactgaagaaggcctgaccgaagagaactttaaggaactaaagcaagacatttctagtttccgctttgaagtcctgggattactaagaggaagcaaactttccacaatacaatctgcgaatgcctcgaaggagtcttcaaattcggcagactcagatgaaaagagtgatagcgaaggtaatagcaaggacaagaaaaagaatttcagcctttttgatttaaccaccctgattcatccgagatcagcagcaattgcctctgaaagacataacataagcaatggctctgccctggtggttcaggagccgcccagggagaagcagagaaaagtgaattttgtgaccgatatcaaaaactttgggttatttcatagacgatcaaaacaaaatgctgctgagcaaaatgcaaaccaaatcttctctgtttcagaagaagttgctcgtcaacaggctgcaggaccacttgagagaaatattcaactggaatctcgaggattagcttcacggggtgacctgagcattcccggtctcagtgaacaatgtgtgttagtagaccatagagaaaggaatacggacacactggggttacaggtaggaaagagagtgtgtccattcaagtcagagaaggtggtggtggaggacacggttcctataataccaaaggagaaacatgcaaaagaagaggactctagtatagactatgatctaaacctcccagacacagtcacccacgaagattacgtgaccacaagattgtgatacttgaaggaggaagcttttaccatacacatacgtatgtgtatggtaaaagcttcctccttcaagtattacaatcttgtggtcacgtaatcttcgtgggtgac

SEQ ID NO: 199343 - DNA, 2870 bp, Homo sapiens
cccccgcctcccatggcttcgctttcagagcatcctcactccgcccagttcggtgccagctgcgtgggctccagcttcgatcgttttccttggaatgctccaaaactcagcagcgactaagggaattccattggaatttgccgggcgtgctctcaccccgcacggcacccgcgccgtcagtcctcggatcccatcacttcagcccgaagattgcaactttgcagagacgaagaaatagcatggcatgaaacatggctcagttctattacaaaagaaatgttaatgctccctatagagaccgcatccctctaaggatagtaagagcagaatcagaactttcgccatcagaaaaagcctacttgaatgctgtggaaaagggagattatgccagtgtcaagaaatccctagaggaagctgaaatttattttaaaatcaatattaattgcattgatcctctcggaagaactgctctcctcattgcaattgaaaatgagaacttggagctcatcgaactactcttaagctttaatgtctatgttggagatgctctattacatgctatcagaaaagaagtcgtcggagctgttgagctgttattgaaccacaaaaaacctagtggagaaaaacaggtgcctcctatactccttgataagcagttctctgaattcactccagacattacaccaatcattttggcagcccatacaaataattatgagataataaaactcttggttcagaaaggagtctcagtgcctcgaccccacgaggtccgctgtaactgtgtggaatgcgtgtccagttcagatgtggacagcctccgtcactcacgctccagactcaacatctacaaggccttggccagtccctctctcattgcactgtcaagcgaagatccttttctcacagcctttcagttaagttgggaacttcaggaactgagcaaggtggaaaatgaattcaagtcggagtatgaagagctgtcacggcagtgcaaacaatttgctaaggacctactggatcagacgagaagttccagagaactggaaatcattcttaattaccgagatgacaatagtctcatagaagaacaaagtggaaatgatcttgcaagactaaaattggccattaagtaccgtcaaaaagagtttgttgcccagcccaattgtcaacagctgctggcatctcgctggtacgatgagtttccaggctggaggagaagacactgggcagtgaagatggtgacatgtttcataataggacttctttttcctgtcttctctgtgtgctacctgatagctcccaaaagcccacttggactgttcatcaggaagccatttatcaagtttatctgccacacagcctcctatttgacttttttgttcctgctgctgcttgcctctcagcacatcgacaggtcagacttgaacaggcaaggtccaccaccaaccatcgtcgagtggatgatattaccgtgggtcctgggcttcatatggggagaaattaaacagatgtgggatggcggacttcaggactacatccatgattggtggaatctaatggactttgtaatgaactccttatatttagcaacaatctccttgaaaattgttgcatttgtaaagtacagtgcccttaatccacgagaatcatgggacatgtggcatcccactctggtggcagaagctttatttgctattgcaaacatcttcagttctctgcgtctgatctcactgtttactgcaaattctcacctgggacctctgcaaatatctctgggaagaatgctcctggacattttgaagtttctattcatatactgccttgtgttgctagcatttgcaaatggcctaaatcaattgtacttctattatgaagaaacgaaagggttaacctgcaaaggcataagatgtgaaaagcagaataatgcattttcaacgttatttgagacactgcagtccctgttttggtcaatatttgggctcatcaatttatatgtgaccaatgtcaaagcacagcatgaatttactgagtttgttggtgccaccatgtttgggacatacaatgtcatctctctggttgttctactcaacatgttaatagctatgatgaataattcttaccaactgattgctgaccatgcagatatagaatggaaatttgcacgaacaaagctttggatgagttattttgaagaaggaggtactctgcctactcccttcaatgtcatcccgagccccaagtctctctggtacctgatcaaatggatctggacacacttgtgcaagaaaaagatgagaagaaagccagaaagttttggaacaatagggaggcgagctgctgataacttgagaagacatcaccaataccaagaagttatgaggaacctggtgaagcgatacgttgctgcaatgattagagatgctaaaactgaagaaggaagttgctcgtcaacaggctgcaggaccacttgagagaaatattcaactggaatctcgaggattagcttcacggggtgacctgagcattcccggtctcagtgaacaatgtgtgttagtagaccatagagaaaggaatacggacacactggggttacaggtaggaaagagagtgtgtccattcaagtcagagaaggtggtggtggaggacacggttcctataataccaaaggagaaacatgcaaaagaagaggactctagtatagactatgatctaaacctcccagacacagtcacccacgaagattacgtgaccacaagattgtgatacttgaaggaggaagcttttaccatacacatacgtatgtgtatggtaaaagcttcctccttcaagtattacaatcttgtggtcacgtaatcttcgtgggtgac

SEQ ID NO: 199344 - DNA, 2840 bp, Homo sapiens
cccccgcctcccatggcttcgctttcagagcatcctcactccgcccagttcggtgccagctgcgtgggctccagcttcgatcgttttccttggaatgctccaaaactcagcagcgactaagggaattccattggaatttgccgggcgtgctctcaccccgcacggcacccgcgccgtcagtcctcggatcccatcacttcagcccgaagattgcaactttgcagagacgaagaaatagcatggcatgaaacatggctcagttctattacaaaagaaatgttaatgctccctatagagaccgcatccctctaaggatagtaagagcagaatcagaactttcgccatcagaaaaagcctacttgaatgctgtggaaaagggagattatgccagtgtcaagaaatccctagaggaagctgaaatttattttaaaatcaatattaattgcattgatcctctcggaagaactgctctcctcattgcaattgaaaatgagaacttggagctcatcgaactactcttaagctttaatgtctatgttggagatgctctattacatgctatcagaaaagaagtcgtcggagctgttgagctgttattgaaccacaaaaaacctagtggagaaaaacaggtgcctcctatactccttgataagcagttctctgaattcactccagacattacaccaatcattttggcagcccatacaaataattatgagataataaaactcttggttcagaaaggagtctcagtgcctcgaccccacgaggtccgctgtaactgtgtggaatgcgtgtccagttcagatgtggacagcctccgtcactcacgctccagactcaacatctacaaggccttggccagtccctctctcattgcactgtcaagcgaagatccttttctcacagcctttcagttaagttgggaacttcaggaactgagcaaggtggaaaatgaattcaagtcggagtatgaagagctgtcacggcagtgcaaacaatttgctaaggacctactggatcagacgagaagttccagagaactggaaatcattcttaattaccgagatgacaatagtctcatagaagaacaaagtggaaatgatcttgcaagactaaaattggccattaagtaccgtcaaaaagagtttgttgcccagcccaattgtcaacagctgctggcatctcgctggtacgatgagtttccaggctggaggagaagacactgggcagtgaagatggtgacatgtttcataataggacttctttttcctgtcttctctgtgtgctacctgatagctcccaaaagcccacttggactgttcatcaggaagccatttatcaagtttatctgccacacagcctcctatttgacttttttgttcctgctgctgcttgcctctcagcacatcgacaggtcagacttgaacaggcaaggtccaccaccaaccatcgtcgagtggatgatattaccgtgggtcctgggcttcatatggggagaaattaaacagatgtgggatggcggacttcaggactacatccatgattggtggaatctaatggactttgtaatgaactccttatatttagcaacaatctccttgaaaattgttgcatttgtaaagtacagtgcccttaatccacgagaatcatgggacatgtggcatcccactctggtggcagaagctttatttgctattgcaaacatcttcagttctctgcgtctgatctcactgtttactgcaaattctcacctgggacctctgcaaatatctctgggaagaatgctcctggacattttgaagtttctattcatatactgccttgtgttgctagcatttgcaaatggcctaaatcaattgtacttctattatgaagaaacgaaagggttaacctgcaaaggcataagatgtgaaaagcagaataatgcattttcaacgttatttgagacactgcagtccctgttttggtcaatatttgggctcatcaatttatatgtgaccaatgtcaaagcacagcatgaatttactgagtttgttggtgccaccatgtttgggacatacaatgtcatctctctggttgttctactcaacatgttaatagctatgatgaataattcttaccaactgattgctaggcgagctgctgataacttgagaagacatcaccaataccaagaagttatgaggaacctggtgaagcgatacgttgctgcaatgattagagatgctaaaactgaagaaggcctgaccgaagagaactttaaggaactaaagcaagacatttctagtttccgctttgaagtcctgggattactaagaggaagcaaactttccacaatacaatctgcgaatgcctcgaaggagtcttcaaattcggcagactcagatgaaaagagtgatagcgaaggaagttgctcgtcaacaggctgcaggaccacttgagagaaatattcaactggaatctcgaggattagcttcacggggtgacctgagcattcccggtctcagtgaacaatgtgtgttagtagaccatagagaaaggaatacggacacactggggttacaggtaggaaagagagtgtgtccattcaagtcagagaaggtggtggtggaggacacggttcctataataccaaaggagaaacatgcaaaagaagaggactctagtatagactatgatctaaacctcccagacacagtcacccacgaagattacgtgaccacaagattgtgatacttgaaggaggaagcttttaccatacacatacgtatgtgtatggtaaaagcttcctccttcaagtattacaatcttgtggtcacgtaatcttcgtgggtgac

SEQ ID NO: 199345 - DNA, 1542 bp, Homo sapiens
cccccgcctcccatggcttcgctttcagagcatcctcactccgcccagttcggtgccagctgcgtgggctccagcttcgatcgttttccttggaatgctccaaaactcagcagcgactaagggaattccattggaatttgccgggcgtgctctcaccccgcacggcacccgcgccgtcagtcctcggatcccatcacttcagcccgaagattgcaactttgcagagacgaagaaatagcatggcatgaaacatggctcagttctattacaaaagaaatgttaatgctccctatagagaccgcatccctctaaggatagtaagagcagaatcagaactttcgccatcagaaaaagcctacttgaatgctgtggaaaagggagattatgccagtgtcaagaaatccctagaggaagctgaaatttattttaaaatcaatattaattgcattgatcctctcggaagaactgctctcctcattgcaattgaaaatgagaacttggagctcatcgaactactcttaagctttaatgtctatgttggagatgctctattacatgctatcagaaaagaagtcgtcggagctgttgagctgttattgaaccacaaaaaacctagtggagaaaaacaggtgcctcctatactccttgataagcagttctctgaattcactccagacattacaccaatcattttggcagcccatacaaataattatgagataataaaactcttggttcagaaaggagtctcagtgcctcgaccccacgaggtccgctgtaactgtgtggaatgcgtgtccagttcagatgtggacagcctccgtcactcacgctccagactcaacatctacaaggccttggccagtccctctctcattgcactgtcaagcgaagatccttttctcacagcctttcagttaagttgggaacttcaggaactgagcaaggtggaaaatgaattcaagtcggagtatgaagagctgtcacggcagtgcaaacaatttgctaaggacctactggatcagacgagaagttccagagaactggaaatcattcttaattaccgagatgacaatagtctcatagaagaacaaagtggaaatgatcttgcaagactaaaattggccattaagtaccgtcaaaaagagtttgttgcccagcccaattgtcaacagctgctggcatctcgctggtacgatgagtttccaggctggaggagaagacactgggcagtgaagatggtgacatgtttcataataggacttctttttcctgtcttctctgtgtgctacctgatagctcccaaaagcccacttggactgttcatcaggaagccatttatcaagtttatctgccacacagcctcctatttgacttttttgttcctgctgctgcttgcctctcagcacatcgacaggtcagacttgaacaggcaaggtccaccaccaaccatcgtcgagtggatgatattaccgtgggtcctgggtaaatgtgttactatagaaaatataataaaaacatgttactgccacggaatttcgt

SEQ ID NO: 199346 - DNA, 3431 bp, Homo sapiens
cccccgcctcccatggcttcgctttcagagcatcctcactccgcccagttcggtgccagctgcgtgggctccagcttcgatcgttttccttggaatgctccaaaactcagcagcgactaagggaattccattggaatttgccgggcgtgctctcaccccgcacggcacccgcgccgtcagtcctcggatcccatcacttcagcccgaagattgcaactttgcagagacgaagaaatagcatggcatgaaacatggctcagttctattacaaaagaaatgttaatgctccctatagagaccgcatccctctaaggatagtaagagcagaatcagaactttcgccatcagaaaaagcctacttgaatgctgtggaaaagggagattatgccagtgtcaagaaatccctagaggaagctgaaatttattttaaaatcaatattaattgcattgatcctctcggaagaactgctctcctcattgcaattgaaaatgagaacttggagctcatcgaactactcttaagctttaatgtctatgttggagatgctctattacatgctatcagaaaagaagtcgtcggagctgttgagctgttattgaaccacaaaaaacctagtggagaaaaacaggtgcctcctatactccttgataagcagttctctgaattcactccagacattacaccaatcattttggcagcccatacaaataattatgagataataaaactcttggttcagaaaggagtctcagtgcctcgaccccacgaggtccgctgtaactgtgtggaatgcgtgtccagttcagatgtggacagcctccgtcactcacgctccagactcaacatctacaaggccttggccagtccctctctcattgcactgtcaagcgaagatccttttctcacagcctttcagttaagttgggaacttcaggaactgagcaaggtggaaaatgaattcaagtcggagtatgaagagctgtcacggcagtgcaaacaatttgctaaggacctactggatcagacgagaagttccagagaactggaaatcattcttaattaccgagatgacaatagtctcatagaagaacaaagtggaaatgatcttgcaagactaaaattggccattaagtaccgtcaaaaagagtttgttgcccagcccaattgtcaacagctgctggcatctcgctggtacgatgagtttccaggctggaggagaagacactgggcagtgaagatggtgacatgtttcataataggacttctttttcctgtcttctctgtgtgctacctgatagctcccaaaagcccacttggactgttcatcaggaagccatttatcaagtttatctgccacacagcctcctatttgacttttttgttcctgctgctgcttgcctctcagcacatcgacaggtcagacttgaacaggcaaggtccaccaccaaccatcgtcgagtggatgatattaccgtgggtcctgggcttcatatggggagaaattaaacagatgtgggatggcggacttcaggactacatccatgattggtggaatctaatggactttgtaatgaactccttatatttagcaacaatctccttgaaaattgttgcatttgtaaagtacagtgcccttaatccacgagaatcatgggacatgtggcatcccactctggtggcagaagctttatttgctattgcaaacatcttcagttctctgcgtctgatctcactgtttactgcaaattctcacctgggacctctgcaaatatctctgggaagaatgctcctggacattttgaagtttctattcatatactgccttgtgttgctagcatttgcaaatggcctaaatcaattgtacttctattatgaagaaacgaaagggttaacctgcaaaggcataagatgtgaaaagcagaataatgcattttcaacgttatttgagacactgcagtccctgttttggtcaatatttgggctcatcaatttatatgtgaccaatgtcaaagcacagcatgaatttactgagtttgttggtgccaccatgtttgggacatacaatgtcatctctctggttgttctactcaacatgttaatagctatgatgaataattcttaccaactgattgctgaccatgcagatatagaatggaaatttgcacgaacaaagctttggatgagttattttgaagaaggaggtactctgcctactcccttcaatgtcatcccgagccccaagtctctctggtacctgatcaaatggatctggacacacttgtgcaagaaaaagatgagaagaaagccagaaagttttggaacaatagggaggcgagctgctgataacttgagaagacatcaccaataccaagaagttatgaggaacctggtgaagcgatacgttgctgcaatgattagagatgctaaaactgaagaaggcctgaccgaagagaactttaaggaactaaagcaagacatttctagtttccgctttgaagtcctgggattactaagaggaagcaaactttccacaatacaatctgcgaatgcctcgaaggagtcttcaaattcggcagactcagatgaaaagagtgatagcgaaggtaatagcaaggacaagaaaaagaatttcagcctttttgatttaaccaccctgattcatccgagatcagcagcaattgcctctgaaagacataacataagcaatggctctgccctggtggttcaggagccgcccagggagaagcagagaaaagtgaattttgtgaccgatatcaaaaactttgggttatttcatagacgatcaaaacaaaatgctgctgagcaaaatgcaaaccaaatcttctctgtttcagaagaagttgctcgtcaacaggctgcaggaccacttgagagaaatattcaactggaatctcgaggattagcttcacggggtgacctgagcattcccggtctcagtgaacaatgtgtgttagtagaccatagagaaaggaatacggacacactggggttacaggtaggaaagagagtgtgtccattcaagtcagagaaggtggtggtggaggacacggttcctataataccaaaggagaaacatgcaaaagaagaggactctagtatagactatgatctaaacctcccagacacagtcacccacgaagattacgtgaccacaagattgtgatacttgaaggaggaagcttttaccatacacatacgtattttccgtagtgctctgggtgggggaaaatgtttaaattgtattagcaaatgctaacttacactttatagcgtttatcagctgtggcatattacctgtaacatgtttaaataaggcaaaggcaatcaaaaacctttttgttttgtagcctgcttttgctttcacaatttgtcttacaattgtttttgttaataaataaatgcaccttgt

SEQ ID NO: 199347 - DNA, 3035 bp, Homo sapiens
cccccgcctcccatggcttcgctttcagagcatcctcactccgcccagttcggtgccagctgcgtgggctccagcttcgatcgttttccttggaatgctccaaaactcagcagcgactaagggaattccattggaatttgccgggcgtgctctcaccccgcacggcacccgcgccgtcagtcctcggatcccatcacttcagcccgaagattgcaactttgcagagacgaagaaatagcatggcatgaaacatggctcagttctattacaaaagaaatgttaatgctccctatagagaccgcatccctctaaggatagtaagagcagaatcagaactttcgccatcagaaaaagcctacttgaatgctgtggaaaagggagattatgccagtgtcaagaaatccctagaggaagctgaaatttattttaaaatcaatattaattgcattgatcctctcggaagaactgctctcctcattgcaattgaaaatgagaacttggagctcatcgaactactcttaagctttaatgtctatgttggagatgctctattacatgctatcagaaaagaagtcgtcggagctgttgagctgttattgaaccacaaaaaacctagtggagaaaaacaggtgcctcctatactccttgataagcagttctctgaattcactccagacattacaccaatcattttggcagcccatacaaataattatgagataataaaactcttggttcagaaaggagtctcagtgcctcgaccccacgaggtccgctgtaactgtgtggaatgcgtgtccagttcagatgtggacagcctccgtcactcacgctccagactcaacatctacaaggccttggccagtccctctctcattgcactgtcaagcgaagatccttttctcacagcctttcagttaagttgggaacttcaggaactgagcaaggtggaaaatgaattcaagtcggagtatgaagagctgtcacggcagtgcaaacaatttgctaaggacctactggatcagacgagaagttccagagaactggaaatcattcttaattaccgagatgacaatagtctcatagaagaacaaagtggaaatgatcttgcaagactaaaattggccattaagtaccgtcaaaaagagtttgttgcccagcccaattgtcaacagctgctggcatctcgctggtacgatgagtttccaggctggaggagaagacactgggcagtgaagatggtgacatgtttcataataggacttctttttcctgtcttctctgtgtgctacctgatagctcccaaaagcccacttggactgttcatcaggaagccatttatcaagtttatctgccacacagcctcctatttgacttttttgttcctgctgctgcttgcctctcagcacatcgacaggtcagacttgaacaggcaaggtccaccaccaaccatcgtcgagtggatgatattaccgtgggtcctgggcttcatatggggagaaattaaacagatgtgggatggcggacttcaggactacatccatgattggtggaatctaatggactttgtaatgaactccttatatttagcaacaatctccttgaaaattgttgcatttgtaaagtacagtgcccttaatccacgagaatcatgggacatgtggcatcccactctggtggcagaagctttatttgctattgcaaacatcttcagttctctgcgtctgatctcactgtttactgcaaattctcacctgggacctctgcaaatatctctgggaagaatgctcctggacattttgaagtttctattcatatactgccttgtgttgctagcatttgcaaatggcctaaatcaattgtacttctattatgaagaaacgaaagggttaacctgcaaaggcataagatgtgaaaagcagaataatgcattttcaacgttatttgagacactgcagtccctgttttggtcaatatttgggctcatcaatttatatgtgaccaatgtcaaagcacagcatgaatttactgagtttgttggtgccaccatgtttgggacatacaatgtcatctctctggttgttctactcaacatgttaatagctatgatgaataattcttaccaactgattgctgaccatgcagatatagaatggaaatttgcacgaacaaagctttggatgagttattttgaagaaggaggtactctgcctactcccttcaatgtcatcccgagccccaagtctctctggtacctgatcaaatggatctggacacacttgtgcaagaaaaagatgagaagaaagccagaaagttttggaacaatagggaggcgagctgctgataacttgagaagacatcaccaataccaagaagttatgaggaacctggtgaagcgatacgttgctgcaatgattagagatgctaaaactgaagaaggcctgaccgaagagaactttaaggaactaaagcaagacatttctagtttccgctttgaagtcctgggattactaagaggaagcaaactttccacaatacaatctgcgaatgcctcgaaggagtcttcaaattcggcagactcagatgaaaagagtgatagcgaaggaagttgctcgtcaacaggctgcaggaccacttgagagaaatattcaactggaatctcgaggattagcttcacggggtgacctgagcattcccggtctcagtgaacaatgtgtgttagtagaccatagagaaaggaatacggacacactggggttacaggtaggaaagagagtgtgtccattcaagtcagagaaggtggtggtggaggacacggttcctataataccaaaggagaaacatgcaaaagaagaggactctagtatagactatgatctaaacctcccagacacagtcacccacgaagattacgtgaccacaagattgtgatacttgaaggaggaagcttttaccatacacatacgtatgtgtatggtaaaagcttcctccttcaagtattacaatcttgtggtcacgtaatcttcgtgggtgac

SEQ ID NO: 199348 - DNA, 272 bp, Homo sapiens
cccccgcctcccatggcttcgctttcagagcatcctcactccgcccagttcggtgccagctgcgtgggctccagcttcgatcgttttccttggaatgctccaaaactcagcagcgactaagggaattccattggaatttgccgggcgtgctctcaccccgcacggcacccgcgccgtcagtcctcggatcccatcacttcagcccgaagattgcaactttgcaggtaaagaggatgtcgcctctgggctccgttcgaccggagctacacctc

SEQ ID NO: 199349 - DNA, 86 bp, Homo sapiens
ttctttattttaacttttggaaagaaaacacaactaaggaaaaatctctgtggctcttatatcccctgatatccctgggggattgg

SEQ ID NO: 199350 - DNA, 649 bp, Homo sapiens
ctgaagtcccaagaaagattaaaacctagaaggataatgagaataaaatctcgctcactcttcttctacaaaaatgtagacagataccacggagttctcacctcctagaataaaagatgcctgcaagggtgaggcaagtatggaaaaggtttatggacaaaaggaatcagaaaaacaaagactgggggcctggaaaagcaattgaggcttgtcttagggagtcacaggatataaagagtacagttatctggaggacggaaaaaaaacgaaagataattgagcacatgaaaaaacagattcatttggtttcatttttattaacaggtaaggcttaaggatttaaaatggaacagaccttccacaatatctcataagtaaaacaatatataattaaagttgccagattacaagatagaagcttctgaactccatgaattaggtgcaaaattactaatctttctgctccctgccactcagtaaatggcacaattattttaactccaaaagtaatacaatcacctcagtaggactactttaaactgatccacactttacatgttacatggcatgaagcagacagggagtccagtttagcatgcggggattaaggctaaacacagttggaagcactcttatcagagatgacaag

SEQ ID NO: 199351 - DNA, 667 bp, Homo sapiens
tgggactataggtactagtccaaccatacctggctaatttttaatagtttttctgtagagatgggatctcactatgttgcccaggctgatcttgaactcctgagctcgagtgatcctccctcttggctcccaaaatgctgggattacaggcctgagccaccatgcccagccgtgactcactcttaaaggagctcaagtcttttgtgttggaactccaggaggttgacgaccacactcatctattcagtcagcatttgctaggtacctagcacacgcccagctctggggaggtatggggatataaaaatgaaggtgatttgattcttcccccgtggaggttaggacctggaaaggatggtgtgtgaagtgaatgctaggtttgctggtggctgaaaggaaggaacgttgtcatctttgtcatatgttagggattgccagacccaccagttgactatatccaaataaaggaacacagaatttggagtgatcacagggcagtgagatttgtctgggaagatatcttaggactcgtgaattttttgcagatcttaataattatagagaaaatgagtaggtggttaggaagaccaggtaactataacttacagaggtgagagaatgagaattgtatgcgtgggactagtcgggtccgagtcgatcgaatctg

SEQ ID NO: 199352 - DNA, 103 bp, Homo sapiens
tgctgggattacaggcctgagccactgcgcccagccaggccttttcttttataaaccttaggtttttccctgaggaccagactaggtcctcatttaaacaaaa

SEQ ID NO: 199353 - DNA, 780 bp, Homo sapiens
cccagaggggactcaagagggtaggaggaggagtcgtcagccagaaggaggtagaattcacttttttacaagcttctaaagtctcttcatagatgattgctggaattgtttgtttgtttgtgttttacgaatgatgtttaataaagaactgccaaaactgcagttagcattttttgaaaaataaataacttagtaaagaagcagccatatggtatctgtttagaactggaagtgcagaatctgttttcaaaaatagacctacaaaaagactgaacacaaaccaaaaacccttccaccttaataaaaataattcatggttaatttttttaaagatgtatgaatttaaaacttttacagctagtacattaaatttggcaagtagaaattctgaggaagaatgaatttgattccgtcaggtggttctcaaagattcttttattgtgaactttctaagtagaagaaagaattgtaaggccggtgcggtggctcacaccctacaatcccagcactttgggaggttgaggtgggaagatcactgaaggtctgggttttccatccaaatatcccacttcaggaactgcaggagtttgagaccagcctgggcaacatggtggaaccctgtctctacaaataatacaaaaaaaaaaaaaaatcaaatctgggcgtggtgggatgtgcctgtagtccctcccagctactcgggaggcgaggtatgaggatcacccaagcccatagatcgaggctgcagtgagtcactccagcctgggtgaccctgtctcc

SEQ ID NO: 199354 - DNA, 589 bp, Homo sapiens
  misc_feature (88)..(88): n is a, c, g, or t
cgatcatttcaaaatacaaccttccctctacattatcatcttcacaattccaattctactgactatccttgaaatggtcgccaatccncggatggcgacatttcaagtgcttaatagccatatgtggctagtggctgctgtgattgtatagcacagctccagagttttctttatagtaatttagaaccattccatttgattggtgatatgttgtctctcaggggaagagcagaacatttgttcatgaatttggattgccgtgttcacccaaaagattttttgggctgggagcattaccctgtgcttgttgtatccagctacttgagaggctgaggtgggaggttcacttgaggccaggagtttgagatcagcttggaaaacattgtaagaccttggctctaaaaaaattttttttaactaaaaacaaacaaacaaaaaatttagtgaggcatggtggtgtgtgcctgtagtctcagctactgaagaggctgaggtgggaggattgcttgtgcccaggagttggaggctgttgtgagctatgattgccactgcactccagcctaggcaacagagtgagaacctgtctctt

SEQ ID NO: 199355 - DNA, 594 bp, Homo sapiens
aacagtaataataataaatgttaaaagtgcataaaacatctcagtaatcccaaggactacagaaactctcttaaaaggactctttcacacaggtgaaagttacaaggtgcaagagcaacttcggaaaatgcctggcggccatccctgttctccagcatgtgttagctggtcacagggctgcccccttaaacaccacatttcccagtcccagcatggctagatgtgatcttgtaatgagagaatggaatgtgaatgggcttgatgtgtccagctcccattttctgcctggcaggagcttggacatgagggcagcaatgaactcttgtcagagcacacatgctgaggatggcagagaaattggagggatggagagtgggtcccacagattttgaaatcacctcgggacgtttacgtttggactcttacaagagaagcaaactgctctctgagttatgccactattatattgattttttaaaagaaaccagtatcctaactaacataaaaaggttaaagatgcttaaatagttgactccaaggtacatattgttaaatgaacaaaaaattcacacaaaatgaaactcaagtgactgt

SEQ ID NO: 199356 - DNA, 617 bp, Homo sapiens
ttattttccccacttacgcactcacactacttaccagttcccacccccacttacgcactcacattacttaccagttcccacctccactttccaaatgaccttatttcatgattttatttaaggatgcctatataaaaagtcccatttattccatacaaaaactgaaaaacagatttgttcaggcaatattaaatagatgagaggtttaaaatctggtgctcaaaccaacctagtcgcctctcctgattctatttaagagcatcttgtattgatttattgttactgattccaatgtgggaggtaacagtacattctatatgcaccagtctcatgggaacttctatcctgttttttacactgagccttgctctgactagttactaataattagaggatctcttttataacagtcttgtctgagtagcccagagtgtttcaaaggcataattaacttatactaatccaatgaaaaagatgatgaatatccttccttattttattttagagatggtgtcttgctctgttgctcaggctggagtacagtggcacaatctcagctcactgcaacctctacctcccaagttcaagcaattctcctgcctcagcctccctagtag

SEQ ID NO: 199357 - DNA, 458 bp, Homo sapiens
gaatcgtaaaacgaaggctatacatttcctcatcccccgaagaatattcagtgtttcttgctgacttttatgtccctgtctttcattttgtttttgttttttggttgagattttttgagtctgtcttctatgaaaggtggtttcttctaagtgaaagtacttaataataagagagtgctcagtttgcagtcaagactgcaaggtgactagacactgacattctgttgtgagagttgagctccatgactaaacagctcctctttctctagaccaaataaaagtcttatcatctcatgtatgtatctttaatcggacaccaatcatacatggaacattagggagaataggtaaagttatctttggtttgccagaagtgtttcacactcaaaggctcaatactttcacctgtgaatcattttgtgtgtgtatgtgagaggtaggaataatcaggtgacatc

SEQ ID NO: 199358 - DNA, 731 bp, Homo sapiens
gaataaaatcatcatggtcaggcgacccaagcagagcacagctgactatggtatgaggaccagtggccctgtggaaagcggtctcagtgctgactcgctgcagcttctttgtagctatgcagcaatcaagaatagtgctgagctcttgatggtggggccccaaggtatgaggccagccacaggccaagacttgctgtgtaggccttgcctgtcacatgatccgccaggccctcttcatcctccccgtggcctctcaggatcttcttccctgctgatctctcccaggctccaggatgtgtccctgcagttggttcatcccaccccagaggagtctttctaaactgtggctcggaacttgtcagttgcttaggcaccacctcctcacacttccaaggccttcctttcccagcctcgttagccactgggctgctctttctcacacactcaggtatccgccatgccacctgcccttaaccctccttcactcagcatttgcttgatgctgggtcctgggtaagacaactctcaacctattgcaggatctggccagcagtctgcaatgcaacggtgctctctctttgttcccaggcagatcggcaggtcgagaaataatagacacacgcaagatagcaaaatctgggtccaggggggtcaccgccttctgctcccacggtgccaacaacgcactggatataccggcatttattattaagtttggtgagagggcaggg

SEQ ID NO: 199359 - DNA, 613 bp, Homo sapiens
agaaccttcaccctatggaaacatccagagcattcactcactcaccattcattcattcattcactcactccacaaatccacggtgagccccttctgcgctccaggtagtgttctctgtgcaggggcattagtggtaagggcctgtctcctggagctcacggtctatggcagagactgacagtgaccagccagacatcaacacacagtggcatgtggtgatgcagaagtgcacacacagagaacctacacacaacagggatacgccttaaaaggagggaaattctgacatcctacaacatggatgagcctggaggacatgatgccaagtgaaagaagccagtctcaaaggacaagcactgtctgattccacttgcatgaggttcctggggtagtcagactcagagatggaaggtaggatggtgggtgccagggaaagggtgccaggctgggaaaggagggaatggggagttactatttaatgggtgtacagggttgcagttttacaggataaaaagagttttagagctggatggtcacacattatgaatgtatttaataccattgaactgtacatttaaaatggtaaattttatattatatgtattttaccata

SEQ ID NO: 199360 - DNA, 449 bp, Homo sapiens
taagaggaaacggataatgattgattctcacctaacaacctttgcagtccccattggagggtttagggaacttgtcaagttactctgcagcacatccacagtaagaaaataagcaaaactagcactcttaaaaagatatctaatcttttttaaaacataaaaatgtgttttgaagctaaggtgattcgcatagtgtgtaagaatataagaatcaacacacacaagttaaggggacatgcgccactgcagaaaggataaattattaaagaaattaggatgggaagattggatgtttggggtaaagtcactgtttgtgacacaatacagtaaaatacattccagctgggttaaaatataaataatcaaaataaaattgtgcagaaatagaagaaaatatatgcaattaatagaataaatcacaagaaaaataaatttgaccaataatatgc

SEQ ID NO: 199361 - DNA, 795 bp, Homo sapiens
cagacgcaggaatgaggagcgaggatgataaggaaagagagaagggacagaggagcaaggaggaggctccaaaagagaaaaagaaacagtgagaaaaacacagggttggggaagacacagttcaggccaaaaatacagacaacgagttgggaaacagcagtgtgagagggtgaagggcagatacagaaactgagagaaaccaagggaaaaaggaagagggtaaaaggacagagagaatgaaagggcagaggggagaacagtgacaaacaaggtgagccgaaaatacacaggatgagaaagaaaagacagaaacatagagaaacagacatgggccagagaaagagagagagaagaacaaaaccaggcagaaagtgagaaacagatgaatgagaaagggaagcaggaagtcaaaggaagaatgagaaccaagtagagaggaatccgggggatgataaagtgtgggagagaaaagggagagagactttggagctgagtggggaccgccggggaggggaggcctcagagtggctcagctgtagatgcggctttggcgtgggtttccaagtgggtaggtagcctggcctgcaggcccaaggttgtatcctccacttcgctccccagggtcctttcccccataccctgttttccttcccccttctccttcctcctccctcaattgcccctcccagctccagctggaaccagcccttctctgtgtctcccaagagtggagggatgtcctggagaaggaatggagtgagaggggccctctcataccctcatacccacacacat

SEQ ID NO: 199362 - DNA, 467 bp, Homo sapiens
agatggggcaggggaggataagggagactccaaagggaagaaaaagaaacagtgagaaaagcacaggggtcggggagatatagtcgtggtgaaatacagacagtgagttagaaaacaggagtgtgatcatgtgagagagaaaagggagagagactttggagctgagtggggaccgccggggaggggaggcctcagagtggctcagctgtagatgcggctttggcgtgggtttccaagtgggtaggtagcctggcctgcaggcccaaggttgtatcctccacttcgctccccagggtcctttcccccataccctgttttccttcccccttctccttcctcctccctcaattgcccctcccagctccagctggaaccagcccttctctgtgtctcccaagagtggagggatgtcctggagaaggaatggagtgagaggggccctctcataccctcatacccacacacat

SEQ ID NO: 199363 - DNA, 463 bp, Homo sapiens
agacaagtgacacaccagggaaaaatattggtaactcatcaaaactgaagactggttttactgatataaaagtgcaccagaggccaggtgcagtggctcacgcctgtaatcccagcgctttgggaggccgaggcaggcggatcacctgaagtcgggagtttgagaccatcctggctaacatggtgaaaccccgtctctactaaaaatagaaaaaattagccaggcatggtggtatgcgcctgtaatcccagctactcaggaggctgaggcagaagaatcgcttgatcccgggaggcagaggttgtagtgagccgagatcgcgccactgcactccagcctgggcgacaaagcaagactgcctctcaaaaaaaagtgcaccaggccaggcatggtggctcacgcctgtaatcccagcactttgggaggctgaggcaggtggatcacctgaggtcaggagttcgag

SEQ ID NO: 199364 - DNA, 432 bp, Homo sapiens
tcagcctcctgagtagctgggattacaggcacacgccaccacacccggctaatttttgtatttttagtagagatggggtttcaccatgttggccaggatggtctcaatctcctgacctcgtgatcctcccacctcggcctcccaaagtgccgggattacaggcgtgagccaagtataataatttttaaatcaccaagaaaatatctaataatgatcccagagtactaaagactcaagtgttccagtggtcaaagttctttcaggttgggaggcttttggttttacttccagtctctgtaatctttgccttaaaagcaggagaagggggtgatacaaagaacacagacatgatatttctaaatttgttttatttgaagaaaagtatgcttataatgtaataaggctcatcatagacagtatgcaaaacgtggg

SEQ ID NO: 199365 - DNA, 706 bp, Homo sapiens
gggacaactgtatatgaaagcatctttgtagaacctgttatgtaggataacccaacagaggtttcccttcccgaagaatattttgctataggtttctcggaaaacctagaacatcaaatctgtgagggcaggttacatggaaagtttatttaattgaattagacatgtaggaattcatagattaaagtattactggcgttgtttatgattgtaaacacaaagaaatttattgttggtagtatttcatgttggcaaggaaattattacacgtaagtgaaagtgctaggggagattccaagaaacttagggccttttcaaaggggaaaaagacagtgtttcagtagtctttccctgataccctttgtcgtatcagctttgtcatttgtaatccagctgccttattggctgtgataatatgccttgctagtggcaggttttactttttcttcacctttgtgagggattttattatattatcctcttgaaactactgagttttgtttacgttaacatacttttgaaactcaattggcacattaagattatctgactttagtgtaaaactttttaaaaaagttttgttttaaagtaaattgaggctgggtgtggtggctcacgcctgtaatcccagcactttgggaggccgaggcgggtggatcacatgaggtcgggagttcgagaccagcctggccaacatggtgaaacc

SEQ ID NO: 199366 - DNA, 315 bp, Homo sapiens
tgctaccaaatccagacattaaaagaaaaccataggccaatatcctatatgaatataaatacaaaaatcctcaacaaaatactagcaaaacgaacccagcaatatataagaggaatcatacatcatggccaaataagatttatcccaggactgcaaggttggtttaacatctgaaaatcaattaatgcaatataccatatcaatagaagacaaaattcacttgatcatctcaacagacatggaaaaagcatttgacaaaatccaacaccatttcctaataaaaaccattcaataggggctgggtgcggtggctca

SEQ ID NO: 199367 - DNA, 752 bp, Homo sapiens
ccgtgttagccaggatggtcttgatctcctgaccttgtgatccgccctcctcagcctccccaaagtgctgggattacaggcgtgagacaccgcgcctggtgaccgctctccttttaaaaacagaatgccaaagctaagccctgccatgtcctggtttgggacagactggctgagctgtttggcttcctgggtgtcttttaattgccagtttgtagccccttgagtactctcttcagtgcatccattttccttgagaagctggcaccgccttcccagagtactggtgggatctgaggaacgagctggggttgcccagtagatgcaagtatcctgcttcagtttcctaaagaggagctcctacagtgttcttagaatgaaagctaagaactggcacaggatctatttgataaacagctgtcatttgtagccatcctcccagatgtatgacagcagagtgttctctgatggaaagatcagcacccagattcccagccccagcgggttcctttccctgagcccctaggttactgccctgtaaaacccttgtttctttccagatcactgaagaacaaatagttgaattcactagtccttgtgcatcttctccctgccttcatgaagccacccttgtttttttttatctgacaaaccactgacagagacagcctggtccagataacatcttggtttcaccttctcaggtggagccatttttcctctacagctcataaccttaccactattatttcccc

SEQ ID NO: 199368 - DNA, 319 bp, Homo sapiens
tagccggacctctctccacactggctataatgacaccgtcccttacaaaaactacctctggaattagttccagtaaacagagtgtatgggaggagggagagtaaatgtgaccaggaattcctcattgcttttccaggcaaaaaagttcccctttgattcacctcagatctcaaatggtttttcacattcaaaaacgtgattttaaagcaatgcctatatctctaagatgataattggcttatactgcagttccttattatggtcctaattagtgtgcaagtttctgggtatcaaatcttagtactcaattcctattaag

SEQ ID NO: 199369 - DNA, 452 bp, Homo sapiens
acacatggttctgccaaagccggaagccggagcgagaggagggaagcactgctcatagaatatttggttgttccaggccagtctgaggtaaagttagccccctcccagggcccgtacacaggcaaacctagaaaaaggcacaggatgaggaaacgaagacccagggaaatggaagctgagattttaagagtcagccacaaagttgtcctttcattttgagtaggaatgttgtgtggtgctgcgggggttgggtggggccagccaaaaaaaatcaaaacatcttgtgcttatcactgaaatgctttgtttaaataattctatttgcctccaaaatgtaagttccaggttagacagatcaaaagcaaccagtcttgaaaatgaagctttttaaattccagccgcgctgttggaacagagaataaaggctttgtttaaacatgcattcccagcag

SEQ ID NO: 199370 - DNA, 674 bp, Homo sapiens
taccaaataaaaaaacttatggtttgtttttacttaaaaaaaaaaccgccaaaacaactagattgttttactgataagtgcaaccactttacattaaaaaacaattaaaataatgtatgcagtaatatggttctaataagaatcttattgaatttcaatgtacgtccctttagcgctctacctcttgtattaacaaaagcacaggaagtcaactctccctacctctttcttctctacacctaagcatccaacagtttcataaggtctctttatatttcatgttgcaggacacagttttcaacacaaccttcactcacagctaattccagtgtattaaagtactctcaatccttagaacaggctttaaaaaaagccaggtgaggaagcacgcatctgtagtcttggctactagggaggccaaggttggaggattgcttgagcctaggatttcaagaccaacctgggtaacacaggagactccatctcataaaaaacaaacgactgagctttaattatcaagtcttaaggaatctaaagggaggatgggagacaaaaagagattttcagggggagtgcgaggcaactggcactttaaaggagtactggatttgcaaaataaatagtgcacaatatcctaaatgtcctacataactttcaagtgttcaagaattact

SEQ ID NO: 199371 - DNA, 292 bp, Homo sapiens
ccctttggtcatgatagtgagtaagttctcatgagatctggtagtttacaagtggatggcacctcccactcttgctctccctctgcccccatcatgggagacacctctcttcccttttgccttcttccatgattgtaagtttcctgatgccttcccaaaagtggagcagatgctgccatgcttcctgtatagtctgaaagcaccatgagctaattaaatgtttttttctttataaattacctagttttgggtatttcattatagcaatgggagactaaactagtacagatgc

SEQ ID NO: 199372 - DNA, 393 bp, Homo sapiens
tttcctttccaatctgaatgccttttctttctcctgctgtggatagaccctcaagtataatattgagtagagtggtaacagcagaactacctctatttgtagatagcggtgagggcgtactgccctcaccgctaccgtccagtctcgactgccgcgtaatttcactttctccatgctgatccaggtctctaccctctcacccttaattcatctgataacataatctgctactctcaatagaaaattatatgaaaagcatgaaacatctttttcacattcttctacctaaaaaattgcctacacccacatgcatcctttatcttctatccttcttcatgtgcaaggctaatttcttgcaattatgctcatccctcagatgaattgggtaccgag

SEQ ID NO: 199373 - DNA, 141 bp, Homo sapiens
tactgggattactttccattaaggtatataattttagaatatctcacaaatagcccatgcaaaatcctgcggaaaggcaaccataaatatagagagaatatgtaaaaaagtggcatggtctagtatatgccaaacaaggca

SEQ ID NO: 199374 - DNA, 439 bp, Homo sapiens
caggctccccatctcccaggaggcagaggatcaaagggctgcacagtcatcccttttcctgtgaggcttgaccagttcatctttttatagccctctgtgggacccgttttctacctggttattggctgaggccaccagtgactgatctattcttcctgttctggccaattcttagctttatttaaaatgatgtggctggctgacagtacctacccatgtactcttacctacataaagaaaactgtgtctatacatcacagacaggtcactgtctaatcaaacacaggacatcagttaggttcatgcatgattataagaagccctggtcccttccccaacatcagactgtcacctttctatagccgtacgcaggggagtttgttcctgtagaaggcttggtaattacaaaggtcaatgattgtcttatccttgcactatg

SEQ ID NO: 199375 - DNA, 383 bp, Homo sapiens
taactaaggtaatcaggttccttagttcagaacacactgtcatcctggatccatgggaggcgcccttagttttccccactatcctggcctgctccccaattctcagacacccagcctcatgtgcctgatatgtaaccttgtcaagtagatagtgttcttctgtgtgggtgttttgtttacataagtgatgatatgctataaatcttagttctgtttcttgtcactccacataacatttttagaatctggccttgctggtggttgcacatgtgtttgttgcttctcaataataccgaatattctatagtgcacattcccctagtatcagatagctaaggttgccctcaacttctcccatgaaattagcaccacaaccaagcaac

SEQ ID NO: 199376 - DNA, 314 bp, Homo sapiens
  misc_feature (314)..(314): n is a, c, g, or t
tcataagaaatgctgatggggacagagcgccatgtgccaggctctctgccgagaacctgacatgtcctcagtcctcagaacgagcctatcaggccggcaatgtttttacatccatctcacagatgaggacacaaaggtcccgagaaaagtcatcaaacttactgatggctgtgaggacagaagagtaggacaccatctgggaactaatggcatacttcaggtaggacaagatgagaggattgggggatggtccaatcatggcctgccctagtaacgcatctgccaggttgagaatatcccaggtggctcctttn

SEQ ID NO: 199377 - DNA, 592 bp, Homo sapiens
ctcaaaaaaaagaaaaaacaaaatacaaacttgccaaataataccattaagaaattaacaggaagccatacaatagaagatatttgcaataaatataacaaataaagatcctgtatctataatatataaagaactcttccagacaagccatttgaaaaattgacaaaaacacaggacaccttattaaaatggagatctaaatgaactaaaggtctaaatgaacaagtactcaatatcattaattgtcaagtaaatgcaagataaaaatataccactttgaaattagaactcttgtgtactgctgctgggattataaaatggtgaaactactatagaaaacaatatgaagaggttcctcttaattaaaaatagaactaccagatgacaaaaaaattaaaaatagaattaccccagaactcctgcttccaggtatatatcaaaaaaaaaaaaatggaaagcagggtcttgagatatttgcagactcatgttcatagcagcagtattcacaataacaaagaggtggaagcaacccacatgtccactgatggaaggataaatgtggcgtgtacatacaatggaatattattcagcc

SEQ ID NO: 199378 - DNA, 274 bp, Homo sapiens
cttatctgccatgctcaaatctgagagataagtagatatcaagaaacttccagccaaatgtctcatctttatcctgggagcatagaccaaaaactactcacactagctaaaatagaaaagaaggtgttttgaacagacacaagaggcaatctcttgaggcaccaaagtgcagggttcagcatagctagggagcaaaatcaccaaaaagacacaaaaatgatcaaaaacgtggcactaaatagactgcgataagattcttgtctacagtataaca

SEQ ID NO: 199379 - DNA, 585 bp, Homo sapiens
aatataagaactgttactagtaaattgagtaaagcaggaaaattaaatttggtctcttactgatcaaccattattagattgttgataacaacggttataatgttgatcaaccgttatattgttgatacaattatatttgatgtatttaaccagattttatatattatattctatattttataacatgtatatgtatcatataacatacacatatacatacacacacacagccaatataatttcactctcagtttcttgttaatcaactattatattgttgatacaacaaatataagaactgttactagtaaattgaataaagcaggaaaattacatttgggagccttaaagatgtaggttttcttcaagaaatttatgttatagttatatcccctgttgcatgtgaagacatacattcaaggatacttactgcagctcacacaatttgctgataggttggatgtgggtgtgagagaagagatgctgttttccttttgggcgatggcaactggatagtaatcagttactaagatggagaagaatgagaaagaagtctttttttgtttgtttgttggagtgatatgg

SEQ ID NO: 199380 - DNA, 194 bp, Homo sapiens
gtcgagtacgtaacatgttctttgctgcgttcattacactagcatatgaaatacatcataaaatgttttactggttgcactatttcctataaagcttatatgccacaatttcttttcttttcgtttttttttttttttttttttgggaaaggggtccccccttggtgcccagggtggagtgccggggcgggatt

SEQ ID NO: 199381 - DNA, 265 bp, Homo sapiens
cattattcaacctgaaaatggtcagcatatttaactaagtgtgaataattaattttattaaactatggacaattagttgatctggttctattatagatgagatatatatgactataatatggctcttcattgaaatagatattatataacattaaatgttgaaaatccagttatatttttatatagaaagtaggcccccacacactcacttcaaactttttaaaatcaacattggaggtacaatttataaataataacactcatc

SEQ ID NO: 199382 - DNA, 693 bp, Homo sapiens
tccaggtgttctcattgttcaattcccacctatgagtgagaaacacctatgcggtgtttgggtttctgtccttgcgatagtttgctcagaatgatggtttccagcttcatccatgtccctgcaaaggacatgaactcatccttttttatggctgcatagtattccatggtgtatatgtgccacattttcttaatccagtctatcattttatggtgttctcagtttacatatttaaatcactaaactgactatttgacttaaaaggctcaaaaaaagtcatctcaaaaatacaacacactgcataaccttttataagtatttgtgtagcttcttgaatttatatttttaaatcattctcatttaacttgtcagggccttttcctgaaagccagcagagtgaaatcttaacctgcagttaagccaataaaatttgtcagcttataaccaattttattattttagattttctggactctctccaactatagtaattctcatgaaatcacattcctgccatccccttggggaaaattttatttcttaaaattgcatgggaaatgagagcttttttaaaagaaaaaaatttttatattcaaatgagatgtagtggctttgtgccatttcttatttgtcacaaggggtaagatgtttaaaattgctatatcttatatataaaaatgtacctttgaataa

SEQ ID NO: 199383 - DNA, 320 bp, Homo sapiens
ctactatgtatgtgcaagaccctgtgctaagacaaataaaacataatcccagcttttaagagagcggctctcaagttttcggggttgtctgcacaccttcgtaccctagaccttaaactgactccacacttatcccacctttacacggtataagtagcactgcttcctgctcttcttcctgaacattgtcttctatgcccgggaggcaacatgcctcggttgttccttagtgctggcttgactttatagtatcttcctccctctttctctaagcaagttgtcccactaggtacttagctcattgtttcttctagtagaca

SEQ ID NO: 199384 - DNA, 341 bp, Homo sapiens
tgtgctggtctgaggagagggagttccctgtgtgcttcctaacgccagtattttcatcaaatgagtttgacctgagagtgatgttgaaagggcagacatgagcatggggtcagcgtgggggattgggagccagtgtgaaggggcggtacttccgtggtgggttgttcggggccattgagtgtatgtgcctattaggtttaggggggcacctgccccctccttcctggctggtgtaactgtgtttgccacagtgagagttgggcttgtgggtgcagcagggctgggatgtcagggactggttccaaagatggtttttgctatgtggccagggaaaaaactag

SEQ ID NO: 199385 - DNA, 655 bp, Homo sapiens
agctgaagtcatctggaagcttcacgagggaaagacctgcttccaggctcactgtgtgactgtcaacatgtaggcctctcagatacagcaattggcttcctccagagacagcaatcgcagagagagcgagagtgtacccaacccggaagccacagactttttataacctggaatcatcagatgcaagtcactccatgctcaagtggaggaaagcttagctccacttcctgaatgtagaaatatcaaatgaatggccaggcacaatggctcacacctgtaattccagcactttgggaggccaaggcaggagaggatcacttgagctcaggagttcaagaccagcctgggcaacatagtgaaacctcttctctataaataatttaaaaattagccaggcacagtggtgcatgcctgtattgccagctactcaggaggctgaggtgagaggatcacccgagcctgggaggtggaagctgccaacaggttgagtgaaccatgattgtgccactgcactccagcctgggagacagagcaagtccctgtctgaaaaaaatccaaaaacaaacaaacaaaaaatattctgtaggggccagtggaaaatttcttctttgcctctaaggagccctgaatcattgacaaagcaaataatggagaa

SEQ ID NO: 199386 - DNA, 447 bp, Homo sapiens
taccccttccccacagtgagcctaagctttcctgcactccccttcatttgacagctttaataagttttagtcttatatgaggccagctagtgtcagagcatttctgtccatctgtcagtctccctggtgtactctttgctactttccctgaacatcgtaacctcttttcagctatttttaaccctgtacttgggagaaacagccaactatctagtggaaatctttaggccaccaagtttcttttttttaagttttattttacttttaattgactcataataattgtacatatttatagggtatagtgtgatgttttgatacacgtatatattttgtgatgatcaaatcagggtatttagcatatttttcacctcaaacatttatcatccctttgtggtaagaacattcaaaatcctcactgtgggggagggggatctctagaacgag

SEQ ID NO: 199387 - DNA, 200 bp, Homo sapiens
tttttgaggatgtatgccctgtgcctgcctctgttttttgaggacttatgccaacccaaacagttgtgatcaactaccttagaccccagtttaacatagttgttcggactgttctcagcaaaataatcatttggccagttgtcattcagcaaactgacctaaaaccatcaaataccccaagagagctgccaggacattat

SEQ ID NO: 199388 - DNA, 518 bp, Homo sapiens
tacatatgtgtgtgtgtgtatatacatatgtgtgtttgtgtatatatatatataactttacaataatcatcttgtatcatttttgcaataaggatttgtatatataaattaatagaaatactgcagaaatatatagaactccttctcaggtctgtactggaagtcgttgcttattcttgtattcccagtgagaaaacccagaaaagcagatttctttaactgactctttgcatgtatggaggctttattcccctatctgtgctttcttatcaggaatattaccctcattcatttatgcatttaatcagcatccattagttgattgccagaaatgtgccggaatacaagatgaccaagatcatccctctctgagccttcgctctgttggctgtaaagtagaaatgataaaaatacttcctcataatgttgctgtcagtagaaaattacgtcaagtgtgtacagcacttaacagggcttggcacataataagcactcaataaatggtagctttaatcatc

SEQ ID NO: 199389 - DNA, 417 bp, Homo sapiens
ccttccaggggaggaaaataagttctgggagatctgctggtatagaaaagtgggacagtgtgctgggccctcgtcttccaccccgggaggctgacagtatggaccacatccgtgggatctctggattctggttgagtctgccagagagagtcaggctccctccctgattctccctgtggaaaatcacatcggactggctctggcccttgaccaaaagtcattgtgtttctcaaaacagcctgctttatacagctttctccagggttccagtaactgcatccttcccctgccctcccggttcagggtggtaagggctctgctatttctcctgagttgcagtgtcatctcctatagttccctgcacctcattctctcttgtgtaaaatgtcactaattaaatatccttcgatgccccta

SEQ ID NO: 199390 - DNA, 273 bp, Homo sapiens
aggctgtaaggtgaaggagaaaactgcagaaatctccgaaagaagacttcccagcaagctgtgagcacgtctacctggcttactgaaggaacggttatggtggtcattttgtcatgggccatttcatcagagggtcttctgctaggagtactgggagccgggtcctgcagcacccagtgccccggacagtctcggtccagaacggcgttgaaaaaatgtgtgttaaagggagctgggatccgaggcttcttgccctgtgtaccctgagccaag

SEQ ID NO: 199391 - DNA, 684 bp, Homo sapiens
gcaagagctcactcattaccatggggaaagcaccaatccattcatgagggatctgccctcatgacccaaacacctcccactagcctccaccttcaacactggggattctatttcatcatgagatttggagaggacaaatattcaaaccatatcaagcaggtctctagaacttatcatcttgtataataaatattatatccattgagcaacaattcctacttctcccttgctccagcccctggtaatcacaattctattctttgcttccatgcatttgactattttagatatcagatgtaagtggaatcatgtagcgattgtccttctgtgacacgtagcataatgtcctccaggtccatccatgttgtcacaaatggaaataaatgttgtgaaaaatgtaaaagagggtaatggcatataaaatggtgagaagtgagtgatgtttagataagcgtgattaaaaatggcctctgagaaagtcatccttgatcagagacattaattaagtatgggaaataaatgcatgaagatctggggtagagttttcaaggaaaatgaaacaacgtgcaagacatctcaggctggaaagaatttggcacatttaagaaattgctagaagggtgatgtgtttagtgtggcatgaatgtgggagaaagggacagaaagtctaccacttctgaaaat

SEQ ID NO: 199392 - DNA, 325 bp, Homo sapiens
cctattttataattcctttttaataaaatattcagaaaaagcaaaactgtggttgcctgaggctgaagctaggaagattgactacagacaagcatgagggaaattttgggggtgatgagagttttctaaaactggattgtggggttggttgcattactgtataaatttattaaaaatccctgcatcgtataggggcactatattgtatgtagaaagctgtgaaaagattttaaaaatgattgacatgtctgtggttatatcaatgagtactattattattcccattttatacataaagaaaataaaagagaagttaaaaataaaa

SEQ ID NO: 199393 - DNA, 385 bp, Homo sapiens
cactctagagtatcccctccccgtacgcccaatgttgggcatcaagatctagcctttgaaccttctatgagccctgttgtcagtacctctggggttctgccagttacgcttaattttgacatattggtcagactggtgctggatgaacttcttggttctttttttgacaatcttgggctccacaaggagtctgaagttggccctgatgccaaggaggagatggcccctctttctttctttcttttctatcacagtttgccctgaattgtagggaagctggcagttcttttactcttgtggggtcacgaaatgaactgttcctaggaaatgcattgcgctaacatcctggagtggggttgctgcaggtaatggaggttgggcgtac

SEQ ID NO: 199394 - DNA, 552 bp, Homo sapiens
tcttgagattatcatcggctgatggtggaagcggaatccgcagacgctcagcaggtatcttgatattatcatctgctgagggtggagctgagggtggaaggggagtgagctgacgctcccggaaggtgtcttgagattatcatccgctgagggtggaaggcaggtgtcttgatattatcatctgctgagggtggagctgagggtggaaggggagtgagctgacgctcggaaggtgtcttgagattatcatccgctgagggtggaagcggcccccgcagacgctcggcaggtgtcttgatattatcatctgctgagggtggagctgagggtggaaggggagtgagctgacgctcggaaggtgtcttgagattatcatccgctgagggtggaagcggcccccgcagacgctcggcaggtgtcttgatattatcatctgctgagggtggagctgagggtggaaggggagtgagctgacgctcggaaggtgtcttgagattatcatccgctgagggtggaagcggcccccgcagacgctcagcaggtgtcttgata

SEQ ID NO: 199395 - DNA, 298 bp, Homo sapiens
ctggaatagacatgttgtctgtccagcctaggcacctgcttctcataatgactaatgccagatgttttaaggaaagatacaagcttctattacacatccgctttatgcaattatgcaatgatatatcacaagggagttttctttctctgaccctgggttagccatcagttgcagcctagtatttcaagataccagcccttgaattcattaccccagcatcctttactaaactatttcataacacacacacacacgcacacacatatacacacacagtatttgtccaaaatgctccctt

SEQ ID NO: 199396 - DNA, 470 bp, Homo sapiens
atctaagaataaggaattaaaccaaatacacaggtgccaacattggttttacagttatactaaagctcacatacataggtcataatagttctacaagtcctgactgtaggcccttagtctattttggattaagttctatagcagaattgtttggtttaccaaaaataaagtcagtcatggacagttgcaacaaataataaactggtctgatagcgaaggaagagatgttaaaaactacctaagagaccatgtgggccccatttgcctctgtgatgtggtatgctataattatggggccattatgaaaaggtcaaatatctttagttaggggcccctgcttaagatggcagggaaagtggaaggaccacttctttctggattattgtcagtatatcagccttaccagatgtacctccagtatcttgtcacctagggcattttatagcttattattttagatacaagttaaa

SEQ ID NO: 199397 - DNA, 365 bp, Homo sapiens
aggtcaggagatcaggaccatcctggctaacatggtgaaatcccctttctactaaaaatacaaaaaattagccagacgtggtggtgggcgcctgcagtcccagctacttggaaggctgaggcaggagaatggcgtgaactcgggaggcaagagcttgcagtgagctgagatcacgccactgtactccagtctgggcaacagagcgagactctgtcacaaaaacaaaaacaaacaaacaaacaaaaaaacttaaaataaggctgggcctggtagctctcgcctgtaatcccagcattttagaaggctgaggcgagaggactacttgagcccaggagcttgggcaacatgggagaccctgtctatac

SEQ ID NO: 199398 - DNA, 511 bp, Homo sapiens
gatgattatgaagataatatttatagaaactatgcaaaacaagatataaaaaataattgaagcacatcactacacaattaaaatgaaatttaaggcaataaaccaacatataaaaaataccactgaggaacacataaaacaatcacaataaaagtagtaacttcatttttaataaataattttaaatataaattaaactacttaatagaaaaaaatataatctcaggactttgagaggttaagatgggctgatcactggatctcagaagtttgagaccagccttggcaacgcggcaaaactgtctcaaccataaatacaaaaaaaactagctaggtgtgatgctacacacttgtaacccagctacctgagaggctgaaatgagagaatcttctgagtttgagaaactgaggctgctgtgagccatgatcacaacactgcaaaccagcctggttgacagagtgagacctatctcaaaaataaatgaataaacaagtaaataaatgaaattat

SEQ ID NO: 199399 - DNA, 515 bp, Homo sapiens
ctgacagaggagctgggacatgactaaacagcaggcaaatgttgatcccctgctcagcctagtgattgagagcatgtggtttaggactagggaggcctggattctgttcccagctctgcctcttacagactaagcttacctggatcttctaacttctgtgagcccaatttcctcacctgtgaaatggaggttaggatacttacctctcgaggggttgtgaggattaaatgaaatgatattatatgagatatgacttagtacggtgagtaatctcttctaatgtattggttacataaatccagatttctatggatcagatgttattaaagcaaaatataattatactcctgggactcatgcagcacagttctgttcaagtcagtaagcacttttgagggcctactatacgggaagtcctgtgctaggtgtagttgctacgaaagtgagaggcagtacctgcccttacattgctcactgcctagtgacaatatacacagcagaacgccagttctaca

SEQ ID NO: 199400 - DNA, 351 bp, Homo sapiens
ttggcatataagaatacttttgccctcactttccaatatgtttatctcctgtatttcctttccttcttattggccagtgtttgttctgattggttgatacataaactctactgtttaaataacttgtgcatcacccctgtgctatatgacatgtttctactcctctttggagtaagaagaaggtaaatgtgattcataatgaacctatgtgatttataagtgtgcttcatatcaaaaattagcatatatttctttagttttcatcagctgcctccaagtcgattgctccttcaccctgacattctctccaccggcttcctccaaacatggctcatctgaaggccttttccc

SEQ ID NO: 199401 - DNA, 692 bp, Homo sapiens
taaatagagacggggttttgcccggttagcctggatggtctcgatctcctgaccttgtgatccacccgtcgtggcctccccaaagtgctgggatcacaggtgtgagccagtgcatcccgcccccttcttttcattcttatttaacaaataatgagtaattataatgggttcaagttttcatcatgaaaaaaaaaaaaagaaataagcaaggacgttttgtatgtgatgacttgggactctctcccaagtgctttatgtacattgattcattaacattttcattgtaattctacaagtcaggtactgttactgtctttctcttattagagatttaaagcacagagacatggcataccttgttcaagttcacattagtaaatgatgaggattgctgtcctatatgtgatattgaatgcttatagtgagtagactgggtaaatgaacatgacaatacacactgtatagacaattttaataaaagtatgtagatcatctgttgagaatgtattcctgcaaatctattgtttccatcatgattcctcaatctgtaatatacatacaggatttggctcctaattataagttctgtgggccttcattatgtattttcctgaactccacatgctgggacatttaactagaatttgttctacataaccttctgccatttttgagtttaacaggcttagaag

SEQ ID NO: 199402 - DNA, 458 bp, Homo sapiens
acatcagatgcataatgtactctatctgggatattagcttctcggtcttgcagtgttgcctaacacacacagtgatcagcacattttttgagactgcaataatcagaggaatgtaacagtgatgtgggaacaagaggaaataacatggaataataatgtacccatcattgttctgttgtcatccctcctagccagtttggtttcccttagagcctaacaaaagcttcacgaattcaatggaataaaacatggaactgggtgcaaaattaatacatctattcccaagctccatattcatagaaaaaaggaaaatattgactacatagggaacagactttccctgaaagctttgtggatctatgcatatgcttatgtaatcttcaaacaagttgtgcagccttttacaaatgtgtctagcctcatttaatctcaagtaagcctgtggataccacaaagga

SEQ ID NO: 199403 - DNA, 294 bp, Homo sapiens
agctctaagtgatgctacacggaaatcaggtgagaaaggctatggttgatcaagaacaagaatgagcagccacatttcaaagcacagagctcttctaaaattgtccccgagcgggagtctctgagccaacaaacccagtgggtttcttaaccctttttttcttttattttcacctatttccatgcagtgtaagaaaatcctcgctctaggttaagctatatttttaatcaccgttaaagcagtaggttgttcccttaggatagctcctccacccactccaaactcaccccacag

SEQ ID NO: 199404 - DNA, 481 bp, Homo sapiens
agaaaccaggtgcagggcttgccctcttgacttggggttttatatgctggcatacttccgggatcttgtgttacttttccccactcctgagatctttttgagaagctgatgatcagtctcaggtgttttctattgcggggggggggggcgggcgggggagctgcctgtccctggcaccacctgtgaccaattattactttacagaaacatttaacaaccgcctgaccatcacctgatggttgcccaacactcttggtgtgtgtcgggggagccctctcctgccttgctcagacctgaatgtacccattgtaacaaaccccttctttgtatactttgatatggtgacatttcttgtcacttgcctcattgtgaatttttatagatgtggctaagtcatatgcttccttctgaaaaattatgtcaaatactagcagtttctcactgttttttgccctagaaacaacaaactaaccttgaagtg

SEQ ID NO: 199405 - DNA, 463 bp, Homo sapiens
ggaactttttaagcttggcagacattttagttaagaacacttaatttaatgtttttagatttcctttttattaaaacagctcagtaatctgttctcaggtttaaagcacagattttaaatactataaggaataattgaccattaactttcttatacataccctaggtttaaagcttttggtaattgaagcaattcttgaattttgttattgtcctcatccctgatgcgaagtgaaacctggcttcatttggattcttcctccttattgacttgataatatggtgggaggctagagggtgttctaggcaaagacacaggactgttccagcaggcacagaatgttagtttcattcctaatcctgtgtaatccgtattatcctcaattttatgtggatgccgtttccattacaggaagggtttaccaagccttaactacaaatttttgtgggataaagctctgtgc

SEQ ID NO: 199406 - DNA, 567 bp, Homo sapiens
gaatgcatgatgggagccctcaaataatagaagctaggaggtcacaattaccacagtaactggcatggttagtcagacagccaccgggactagagccacagggagttgtggagatggttaatggagaatgatgtccttagaggcaaaatagacaggcagccaataagaatgttacttaacatccataacccacgaagagcaataataaaggagcaggaagctatgggtgattgcccccagtaaaaagccacaacttcttgtttagttctcaaactcaagtcaatttgcagatctggaacccactggctgaagtgatgggtccccaggaggaagaatcttacaatgccatggcaaatgtatgccatgacaattcctccagctcttccccaaaggtacctatgggcatttactcatgtgaccatatgctggggaaaggaaataaccagacatttcaaggtctgttgaatatgggatgtgagttaacactgatacccagaaacctgaaatatcatcatagtgcctgttacaatgggacaaggtaatgaatggagttctgtctgaaatctg

SEQ ID NO: 199407 - DNA, 231 bp, Homo sapiens
agttactgttattgacaattccctagagtattgtccagtagatgggtgaggggagttcactaagtattcttagtgtctagtttgtaattagtttatgagacttaaaaccccaccacacattattctgaacctgctgtaaatattatgagaggcagtatgtatagttgcctctggagctggagtgcctggatttgttttccagctttaccatttgctagctgtatgaccttg

SEQ ID NO: 199408 - DNA, 386 bp, Homo sapiens
gaaaggcacataggcccagtaagtataattagctgcagctgctcctgcagacatagtgagacttaccaccattgatacaatcattaaagctgcaagcagcatattctctggagtttgtgttacccttgtgtactttaggcttttttcagctaactgtgtcagcttctttagctgggcccaggtcggcggcttcgcttttttggtggatggcaactttttctgtaagttgtaggtacccaaactggaagctgattttctcctggtgaaacacgagcaaaacctctcccccacgttatcaccttctctattttttatgttttatttttgttgtctttttaccaaatcagtttttcctcatgtgggctgttctttttaccagtaaaatg

SEQ ID NO: 199409 - DNA, 212 bp, Homo sapiens
gcacaggtttaaatcctgggccctccacttaatatctgcgttaccttgggcaatggtttagacctctctaagcctcagtttcttcttctacaaaataggctctaacagtagtttctacttcatggacttgccatgaggactgaatgagacaatgagtggacggtacttggcatgacacccagcagagaaactacttgccatctggcttctga

SEQ ID NO: 199410 - DNA, 427 bp, Homo sapiens
tagcttatttgcaagccatctgtgacggcggggggcaggtggtgcccgctgtggcaccgtgctgtgtgtgttccctttgcatccacttgctgactcacccaaggtcacaggtagctagtggtggtaggaccacagggtcacgtccaggaactttcccaggatttcccaagaaatcaatttatcaacaaaagtaatcttgccagtgttagaccactgatcagcttaagtctgtggtcttgttgttattttcttctttttttaatccagtccctgtttgagtcaatatcaaaaggaaaccaagtgtctgctgtatgcacggtgcccatctaggtctgtggttttgtcctttgacataacttgtcttcttatgtggttctttcatggagaccaggaatgctagtaataaaatttgataccacctaaaacc

SEQ ID NO: 199411 - DNA, 442 bp, Homo sapiens
acaagaattttcttttcttcatatcctcaccagccatttttatcttttgtttttgacttaacaggattcttatttgctaaaggcaggccagcatgataaataatgtgaattgggggtggggagtgaggaatttgatcagatattgagagtaatcaactaccaaggtggggcacttccactaaactgactcagcaggatcttgctggactaagtggcccaaagacagaggctaaggtagggacctagtcaagaagaagggccagaggagcctgactcaggtttggtcgaggacagaatctttgttacagatagcagcaaatgcggccaggacctggatggatttggggaactcccagctataaacacttgtcctggccaggtgcagtgggtcatggctgtaatctcagcactttgggaagctgaagcgggaggatcaccactt

SEQ ID NO: 199412 - DNA, 900 bp, Homo sapiens
gcacggagttgcgtcccggggacttggggccgcagggagctgtgagtacccaggaagctgcaccgtgtggcctggagctgtctatctgtccttccagccacctgtctgtccagccacccttccacagactgaggcttgacaccggagcatctgtacagagcaaggagaagacaagaacatgctctaaagcccttcacagcaagacccaggaagccgcgggcaaactcagactcgaagccctcccgcctcctgcccacaatggcctctgctgacaagaatggcgggagcgtgtcctctgtgtccagcagccgcctgcagagccggaagccacccaacctctccatcaccatcccgccacccgagaaagagacccaggcccctggcgagcaggacagcatgctgcctgagggttttcagaataggaggctaaagaaaagccagcccaggacctgggctgcacacaccaccgcctgccctccctccttcctccccaagaggaagaacccagcctacttgaagagcgtcagcctccaggagccacgcagccgatggcaggagagttcagagaagcgcctggcttccgccgccaggcctcactgtcccagagcatccgcaagggcgcagcccagtggtttggagtcagcggcgactgggaggggcagcggcagcagtggcagcgccgcagcctgcaccactgcagcatgcgctacggccgcctgaaggcctcgtgccagcgtgacctggagctccccagccaggaggcaccgtccttccagggcactgagtccccaaagccctgcaagatgcccaagattgtggatccgctggcccggggccgggccttccgccacccggaggagatggacaggccccacgccccgcacccaccgctgacccccg

SEQ ID NO: 199413 - DNA, 813 bp, Homo sapiens
gcacggagttgcgtcccggggacttggggccgcagggagctgtgagtacccaggaagctgcaccgtgtggcctggagctgtctatctgtccttccagccacctgtctgtccagccacccttccacagactgaggcttgacaccggagcatctgtacagagcaaggagaagacaagaacatgctctaaagcccttcacagcaagacccaggaagccgcgggcaaactcagactcgaagccctcccgcctcctgcccacaatggcctctgctgacaagaatggcgggagcgtgtcctctgtgtccagcagccgcctgcagagccggaagccacccaacctctccatcaccatcccgccacccgagaaagagacccaggcccctggcgagcaggacagcatgctgcctgagaggaagaacccagcctacttgaagagcgtcagcctccaggagccacgcagccgatggcaggagagttcagagaagcgcctggcttccgccgccaggcctcactgtcccagagcatccgcaagggcgcagcccagtggtttggagtcagcggcgactgggaggggcagcggcagcagtggcagcgccgcagcctgcaccactgcagcatgcgctacggccgcctgaaggcctcgtgccagcgtgacctggagctccccagccaggaggcaccgtccttccagggcactgagtccccaaagccctgcaagatgcccaagattgtggatccgctggcccggggccgggccttccgccacccggaggagatggacaggccccacgccccgcacccaccgctgacccccg

SEQ ID NO: 199414 - DNA, 829 bp, Homo sapiens
gcacggagttgcgtcccggggacttggggccgcagggagctgtgagtacccaggaagctgcaccgtgtggcctggagctgtctatctgtccttccagccacctgtctgtccagccacccttccacagactgaggcttgacaccggagcatctgtacagagcaaggagaagacaagaacatgctctaaagcccttcacagcaagacccaggaagccgcgggcaaactcagactcgaagccctcccgcctcctgcccacaatggcctctgctgacaagaatggcgggagcgtgtcctctgtgtccagcagccgcctgcagagccggaagccacccaacctctccatcaccatcccgccacccgagaaagagacccaggcccctggcgagcaggacagcatgctgcctgagggttttcagaataggaggctaaagaaaagccagcccaggacctgggctgcacacaccaccgcctgccctccctccttcctccccaagaggaagaacccagcctacttgaagagcgtcagcctccaggagccacgcagccgatggcaggagagttcagagaagcgcctggcttccgccgccaggcctcactgtcccagagcatccgcaagtgagcccccctacacccaagcccagcaccccccacccagcaacctgtggattctcggggcctggacatgattgggcctggtccctgcgtcccctctctggaaggaggaggccggcattaatgagcatgtctccctgtggcctattatcatggtatagatggggaaatggtatgtgctttgcgaaagtcacgatgtgtcggaggctggggggc

SEQ ID NO: 199415 - DNA, 443 bp, Homo sapiens
agaaatgtcatcagtgaataacatttaagtaatgtgctttctgatttttttccctttttttttttgagacggagtctcgcactgtcacccagactggagtgcagtggcgcaatctcggctcactgcaacctcctcctcctaggttcaagtgattctcctgcctcagcgtcccgagtagctgggactataggtgtgcaccaccagggccagctaatttttgtatttttagtagagatggggtttcacaatattggccaggatggtctcaatctcttgacctcgtgatccgcctgcctgggcttcccaaagtgctgggattacaggcgtgagccactggtgcccggcctgtgctttctgattttgtgcaggattgataaaaagatgcctactactgaagaatcacccccaaagtatttttccattatcttaatgtgtctttgaga

SEQ ID NO: 199416 - DNA, 851 bp, Homo sapiens
atctcaaaaaaaaaaaaaaagacataaatagagcagtggaatagaatacagagcccacaaataaaccctcacatagatagtcaaatgatcctcaacaagggtgccaagatgaccactcgacgaagaatagtttcttcaacaaatggtgttgagaaagctgggtactcacatgcaaaacataaaggtgcatctctgccaaaaaattaactcaaaatggattaaagacttcaatgtaagacccaaaactgtccagtgtctagaagaaaatacaggagaaaacatagggtgatgagacaagatggtgggtccttgcaccatcatccccagacccatggtttttattccacaggggaaggatggtttgtattctacaggtgaagtatgatcacatcaaggttgtttgactccagggcaggatttatgatacgtacctgctcttacacaagaacgatagatcaactggaaatcttagaggccttcccagaactggggttaatcagaagctgccatggcagattagcttccaagatggagttgccttagcctccacaatattaaaagtagaactaccatatgatccaacaatctcacttctgggcatctatccaaccaattgaaagcagggtcaggaagaggtgtttgcacaccgatgtttgtagtagcattactcaaaataccccaaacgtagaatcaactgaaatgtccatcaaacaaaatacggtgtctgtagtccaagctactcgggaagctgaggttaggagaatgacctgagcccaggaggttgagggtgtagtgaactatgattgtgccactgcactccatcctgggtgacagtataagatcctgtctat

SEQ ID NO: 199417 - DNA, 127 bp, Homo sapiens
ttggccttatgcataggaaaagaaaggcaggtggctggtgtttcttcacctgttctctttgatatcatctactgctgcttctgctcttttctcgtttggttgctgctatggtttggctgtgtccccg

SEQ ID NO: 199418 - DNA, 273 bp, Homo sapiens
ccagaagaaaacatctctacattgagccctgtttctaccttttctttgaactcaagagatgaagacttcatggtagaattctctgagacgtccctgaaagcaagaactttacctgatgatcttcattttctcaacttggagggtagtcgttaccacattgctctaatatctgtctattcatttaagatgaagttttttatttgagagattattacactaaatatatcttagaaccagattcagtgtcatatcccttgaagcctttccataacc

SEQ ID NO: 199419 - DNA, 647 bp, Homo sapiens
accagtataccagctcaaagagtttgaacctcagctgcagatggtgagctcacaccttcttccttccctccttttcggtgccttcctctgcggttattcccgtgtgctgaagttctgttttaaccctcctgggattgccaggttggagcccagggcaagggaaccgaccaggcaggcagtgttgaatgccagccctcctgttcttgcccaagatgttgtcgttccacttgattcatgagcctgcctgcatgcagcctcctcatggagacattgaagctgtgccagtgcaacttggatctctcttgattcacctggaaaactttcacttgtgtggacttaaacttaattctagagtttggtagcctctttggtgaggttatgctggttgagatatgaggccactacatcaaaaacattggtgtgtttttcttttgacaatagacttaaagctttaaagaaagtggccattaggctggtgatatttattacttgggaaagtaacataacacagagaagtagatgggtgattaggtctgcactctttatccactttttgggagaagaataacaactcatttgaatggaaatggtatccttagctcgtgctgctttgggacttggaactttatcacttttaatctcaaatg

SEQ ID NO: 199420 - DNA, 437 bp, Homo sapiens
tagaaagctgcttgggtgtggaatgtaagttgaaagtgagactttcacactaggggcaaactttgcaacagaggaaacaattgtagaaaaaccaatttagttaattgtctttgtttcacctgctgttcatgtgtacctggagcttgctgctcccctgaagcctagtcttgctccagtttgagtggccctgtggggtaggtcttgctgcttctgcatggatttccacatgtctcagaggttagggttaatgaaaaagtggtatttgcaaagggtttgaggagtggctctaggacagtgatgtttgttgccatggaaatgaatacagtctccaattcatcactatcatctcagcaggacttgggagaggaatagccaagccagagaccttacaagtttggtcacagatgcacccatgaactagcaagagaagtggagga

SEQ ID NO: 199421 - DNA, 502 bp, Homo sapiens
tatacacagagaaaaccaagtcccaagtctagatgggtgtggcaatgcgcctcatgatccattaacttatcattaagagcataggctctagagtgagcttcctgagttcaaatcccagctctgctatatctaggcagttctcatagcctctcatctataaaatggggataagagtgttttggcatagacctgctgtgaagattaagcgagagcatcttcaaagagcttttaggagcagtatctggcatatagcaagagctcaatgaatattcatgattattatattagagacagtatcagtacagtggtgtgttataaaagtttgcttttctcttaattatgaattacctatattttggactctgagttacgactttctggaccttaagagcaagggttggttcatcttcatctttgtattttcagtgcctggaatatggcaagtgagcttaataaataaataatgacacactgaatgaaaatgggagccatctgcatatcc

SEQ ID NO: 199422 - DNA, 325 bp, Homo sapiens
cctgaagttatcaaaaaaagaagaggcttagggaaaactgagcatagttacttcttaggtcggggtctccaaagtgctctgcagatgccaaaatggcttcactttcaccccagacaacaatcatgaagcccctgagagccaagtgtatgagaccctccaaaggtgcctgtaactaccaaatcagacaccaaaggagctactttcagaaagatagcaaagacctcatcttacacagaaatactaactggctttttaaaaaacatcttcaaatctgttttgtttttttttttttttttttttttagatggagtcttgctctgtcacc

SEQ ID NO: 199423 - DNA, 254 bp, Homo sapiens
gcacaaccttcttacacatatggagggtgaacttctctgtccttccctccagacgccttgagaaagggagtccaaagccccggaggcagagagttcagccagctgcagggggtgatggtgtcaccaccactatctgctgaactcctctgtgccaaggagcattgcatcagggtgctggtggcacacctggggatcatcatctcttccttctaaagcagctgtctgtctccactttgtcactgagaaaacagtaa

SEQ ID NO: 199424 - DNA, 2177 bp, Homo sapiens
aacaattcatttaaaaaaatacacatacacacacacacacacacacacacacacacacacacgtcatctaatttagcaatgtatgagaatagtggatgccattttaaaattatattaatgcctagatttgtttctagggggaaaatatggccgtgtttgcttctgatgtatataaaatctcagacatttatagtgctctaagccatagtaagagaaatatgagtgctatcaatacatgaatatttccaaactcagttctcccaactgcctcaaaactaaacactaattcaggaaatgcaagcaataacatttaaaatgtgttcaaatgcttttagcttttaattcttttatgtttttgcttcactaaagacactctcatttgttttgtcatccattgatgtaatttacactttggtaaaacatatctcaaaggactttgcagatattgataaatactcttaacctatagtctctaagataggcatatgttttagataaatgcaatataagtaataactaaccattgctgtaaataattcagctaatgtgtttttttctgagagttatcctttttttaagattttttaaaaaaattttaaaaattcaaagcaaactgtcaagaattgcaccctgaaactacatccatttgacaccactttttttaaaaaagcaagaaagacggccgggcacggcggatcatgcctgtaatcccagcactttgggaggccgaggcgggcggatcacgaggtcaggagatcgagaccatcctggctaacatggtgaaaccccgtctctactaaaaatacaaaaaattagccgagcgttgtggcaggcgactgtagtccccgctactccggaggctgagtcaggagaatggcgtgagcccgggagacggagcttgcagtgagtggggagatctcgccgctgcactccagcctggatgacagagcaagactccgtctcaaaaaaaaaaaaaaaaaaagaacaaaaaagcagaaagacaatgaaatttggtatttattacaataattaaaagtaaagacaaaatccgcaaatacttttgcaccaaccgaataatacatctgggcagttttctatattctaatttaagttagagagctcatttcttcttccactgacattaaatgtgaaaaacaataaataaatagaagctcaaaaccaaaaattattcttcattaaaaacttaccactattggccatttagcaatgagtagatttttcaatagtgtctaccttcacttgacctaataagcattcttactcatctccaactcagttagcaaggtttaccatggctttaaattgtgcaatacacatgctaccttacttcagtttgaataattttcttttgccattatgctgtatctagaatcaatgtacaattgctttttcattggccacaaatcatattaaggaagcattgaaaagtcaaatgacgtcattgaaaaactgcacagcttctataatctgcattcccgatttctgcattgctatgaccttcctgccattaagataaatttgttccatatatgtgtattttatatctagtgatgttgtgtgtgtgtatatatgtatgtatatatagtgtatgtgtatattatacagatagacacacacctccatacacatacaaaaaatatatacagaaatatatgtgtgtatagtgaaaagcaacaatatagtagagagttgaaccggtccactgatttgacattttaactgattttaacagggatctcaggttgatttttctacaactgaaattgaaatcccaagtcaaaaattttgtggaaaaatacacctttttatcctatatttctatatacatatactgcattaggccattactgcattgctataaagaaatacctgagattggccgggggcagtggctcatgcctgtaatcccagcactttgggaggccaaggcgggcggctcatgagatcaggagattgagaccatcctggctaacactgtgaaaccctgtctctactaaaattacaaaaaattagcctggcgtggtggcaggcacctgtagtcccagctacttgggaggctgagacaggagaatggcgtgaacccaggaggcagagcttgcagtgtgccgagatcgtgccactgcactccagcctgggtgatagagtgagactctgtc

SEQ ID NO: 199425 - DNA, 474 bp, Homo sapiens
acactccctgtcccgcgcccgcaccctaaccctgggcgcctatgtgtgcgtgggacctcccgcctctccccaggccccaccgcagactccctcacctgctcagaagccgccacccagggccggtccctcctcacacacatgctgggaccctgggggccagccgagcgctctcccccacaaccctgcctctctccctcacctctttctcttgccacctccctctctccctcgttttctccatttctccctccacgctttgcctctccctggctccctctcccttctcctgtcgttctttctctctggctctggctggttctctgttcgtagacccgcaggcccgggaggattcgcccaggcctctaagtattcagcgctcgactcctgcccggctcacaagcgctccgcgccctgctctggcgctatctcccatcgcccggccgctgctaatccgtgattgcttcccgcggccgc

SEQ ID NO: 199426 - DNA, 274 bp, Homo sapiens
cagatattaagagaaaatattaagatattgaaatattaagaaatattgttaaaagatattattaagagttttgaagaacaagtagggtagtctataagaaaagcgtagaggaagtgagggagaagaaacactggaaatgataatagctagaccttttccaaaatttttttaaagatataaatgcctagataaaagcagcactccaaatcatgaacagtataaatacaaattatgttacaatgatctgcagaataccaaagataaaaagtgacca

SEQ ID NO: 199427 - DNA, 515 bp, Homo sapiens
ttaagccaatttgagttgaaattttttgtcatttgcaacggaatgagacatgttcctctcccccaagagctagcgtgtggtatagtgataccaggttgtgtttgatatatggggcgatagagacacatgtggggtggaagctgtccctgtgagtatggagtgtctgaaggcttcacatcgtcaaggatgtggaattccagccaagccttggagtatgacgatggtttgggaagccagagagggtcctcatgtgaatatctgtgcctcgttccactcctttcagatggattcggtctcctctgggtgtcttctctctctgtttatccattcttgcatccttttctcgggatttcgtccttggatgactttctattctattctcaagctgttgtttcaatccacgccatatgcaaataattctgaatgcaaataattcacactctgtctcaaaaaaaagaaagaaagaaaaaatgaggcattctcatgaccactatcccttctgcactggggaatca

SEQ ID NO: 199428 - DNA, 480 bp, Homo sapiens
tgtaattattatgtttattcctatgagaataattgtgatgttggatcatgaaaatgatgctgtaatgataaataattctccgattagattgatgtggggtggaagctgtccctgtgagtatggagtgtctgaaggcttcacatcgtcaaggatgtggaattccagccaagccttggagtatgacgatggtttgggaagccagagagggtcctcatgtgaatatctgtgcctcgttccactcctttcagatggattcggtctcctctgggtgtcttctctctctgtttatccattcttgcatccttttctcgggatttcgtccttggatgactttctattctattctcaagctgttgtttcaatccacgccatatgcaaataattctgaatgcaaataattcacactctgtctcaaaaaaaagaaagaaagaaaaaatgaggcattctcatgaccactatcccttctgcactggggaatca

SEQ ID NO: 199429 - DNA, 175 bp, Homo sapiens
gtatagagagccagcaaaagctcgactcttccatctaacaagcaccacaaacctagagtcatgctctacttttttggagaaaacatgttggcttcccactgagcctgccatcatgaggcacaatagtgggcatcttggtggttggctaataataacaggtgatatttatagaagg

SEQ ID NO: 199430 - DNA, 490 bp, Homo sapiens
acctatataatctcaaggaaataccaaacacatattaaatgatattctacaaaatacttattctgtaatctagaaagtattaaggttaagaaaataaagtaaaaatggagaagaaacttgtctaaagtgaagtaagaagacttgacaaccaaatgcagtgcttagttaagaactagatccttttggcataacattattaggttaatcgacaaaacttgaatgtggtttgaggagtatgtagtagtaatgtattagtgtgttgatttccagtaataatgtatcaatgttaattcccagatgattgtatttctgtaggagaatgtctttgtaggaagtataaaagtattcaggggtgatgatgggtcatcagctcagcagcttactctcaaagattaagggaagaagttacttatactgtgcttaaattttcctgtaaatttgtatttaaataggtatatagtatccatgatgttatggccatgataataga

SEQ ID NO: 199431 - DNA, 372 bp, Homo sapiens
aatgaataaacagctctgtaaggcaatttctttaaaggacttagaaaactaaacttctagcaaaacagggtctcaatgaagagggaagagaaggaaaaaaaatcacaattattgagcagtttctatatgctagacattgtggtacattatctcatttaatcctttaaaccaccatgaattgtaggaatcattatccctcctacttgaaggaaaacaaaaacaaaaacaaaaacaaaaaaccttagaaacacagcttgcactcagataaagaaataccagtccagaggcccccagtcggttgatctgtcttggtggctactaccaaactgccctccccaggtctaatcagtgtttcaagcttctggctgaatg

SEQ ID NO: 199432 - DNA, 439 bp, Homo sapiens
actttgagttctatgtatattgtatgttcattccgttcaccaattttaacttatagtacattccactagaagaacttatattttaaattttttttcttctagtgacgagcatgtaggtttcttccaatttctaaatgacacaaaaaaacctacaataaactgcctttggtgtatctgctcagtaatctgtgtgagaatttcttctggacataactaggtttgggtccttgaattataagctgtctgtatacattatgtctctaaataactaccaaatttatttccaaaatagctgtaacagagcccttgttggtttttaatgttgttaatatcttctttgtcaatattgtctatgatgtactacattaaacttatatccttaaatttgctatatttataccaattaactttaaactcaataaatgtggattttaagtaa

SEQ ID NO: 199433 - DNA, 327 bp, Homo sapiens
ggggacacatggactctgggcccatcagtccaaccccagaactgatgcttgaccccttcccagcatctctgccaactgatgggctggcttcaccttgcatgcctacagccatggggagttcctccctcctgtggcagtctgttccatctctgggcagctggactagccccaacccttctatttgcatttctgctccttgtagtgacatgcaatgggtctgggaactggggaaggagccctgattctgcctttggagacttagcagggactcagggaggtaacgagtagaggagggcatgaggtgaactctgggcccacttgagtgac

SEQ ID NO: 199434 - DNA, 461 bp, Homo sapiens
  misc_feature (18)..(18): n is a, c, g, or t
tcatagctgttctagagnatcactcatgctgcacgacggtcaaacaattctcctgcctcaacctcccaagtagctgggactacaggcgtgtgccaccatgcctggctaatttttgtatttttggtagagacggggtttcaccatgctggcaaggctggtctggaactcctgacctcgtgatctgccaaagtgctgggattacaggcgtgagccactgtgcccggctattgtggtatgtttgtgtgttggtctttaattatttgtgtagagatggggtcttgctatgttgcccaggcttgtctcaaactcctggcctcaagcgatcctcccgcctcagccttccaaagtgttgggattataggcgtgagccattgcatccagcctggtgtatatacctagcccaaactagatagatacatagaaagtacttaaaatgtttttctttccattgtaaaaattca

SEQ ID NO: 199435 - DNA, 338 bp, Homo sapiens
ccgtgttcaaaatcacggattttgtccatgttattgacatcaaaaattactaattgaatttttataacaattatgatttgaatatttgtatacatgtaaggctcagagataatgctagatgttaagaaagagaaaactgtttataagttactataatcttttatggactatggccatctgtgttcatcttacacaaccatcctctcaccaggactaacatgaaaaaacttaaagttttaaggtgtccaaagatcattctagaaatccatccctgagttaagaaccatggatctgagcataaatttcttccctgagtgactcattgattagaaaaatgc

SEQ ID NO: 199436 - DNA, 761 bp, Homo sapiens
cccgcgttccggaagcccgctcccggggccatgggggcacaggtgaggctgccgcccggagagccctgccgagaaggatatgtgctgtctctggtctgtccaaactcctcccaggcttggtgtgagatcacaaatgtgtcacagctgctggcttctcctgtgctctacacggacctgaattacagcataaacaacttgagcatttcagcaaatgtagaaaacaaatacagtctttatgtgggcttggtactggcagtaagctcaagtatttttattggctccagcttcatactgaaaaagaagggcctcttgcaactggccagcaagggctttactagagctggacaaggtggacattcttacctgaaggaatggctctggtgggtaggattgctgtcaatgcaatattatcttcctactttttaaacgagcacttgaacattcatgggaaaataggctgcatattaagtatattggggtcaactgtgatggttatccatgccccacaagaagaggaagtcacatctttgcatgaaatggaaatgaaattgagagacccagggtttatttcctttgctgtgatcataactgtgatctccttggtgctgattttgattgtggctcccaagaaaggacagaccaatatattggtttatatttcaatctgttccttgattggagcgttttcagtttcttctgtgaaaggcctgggaattgccattaaggagctgatagaatggaagccagtttacaaacatccg

SEQ ID NO: 199437 - DNA, 318 bp, Homo sapiens
cagggctgacaggaaaagaggaaagcgaggcagtagttaataggcagttgaggacagagctttgtcatggaaatctcactactttgtgacatggatgaggcctttagaaaaatcatgtggactcttcattcatgcagcaaccattaattgagcacctactatgtgccaggcactgaactgccaggcaatggggatattgaagtgaatgaagctgtacatgaatatttatagtagcactgtaaatatgttgcataatatattgcacaattatgaatttagcaattcataattgctaaaaagtagaaacaacccagatgt

SEQ ID NO: 199438 - DNA, 794 bp, Homo sapiens
gaagagagcatccccaacccccgaccatgctggctccctgatctcaggctttcagcctccagaacaatgagaaaatcaatgcctgttgtttaagccccagtctgtggtctgtagttacagcagccctagctggctgagacagcaggtctggggtgagcctggggatctgtggttgctggcaagaccccaggagacactgatgctgatgcgattggcccatggactgaccacactgcgaaacacggatccagactccccaaatagggaccctcgtcttgagttggctgctgtgtgcctgagacattaggccaaggggaggagccttccaggtggaatctgaagagctcgcagactttggagtgtgacagacctgggccgaatgctgccctgtgacttcccagcagtcacttaccatgctgcctttcccatctgttaaaggggcatgaagacacctccctccaaggctggcaccggatgggatattgcatgggcacagtgcctcgtgcagtgacgacactgtttcagggtaggtttgcttgtctgttgttttggggctgagaggagggagacgggagaaggtggtcttcaggagcttggggccatattgcctaggtgcttccatcacccgcttcctgatcctggaagccctacagtccccacacgtcatcccttacatcagttcttcagtggaaccatccagaggcacaggcacctgccccttctgcagagtctcccctgaccacccagcaactgggagacaggcacaaagcatggggaagggggtgtgaactgca

SEQ ID NO: 199439 - DNA, 578 bp, Homo sapiens
cccttaagcttacgtgagagaagtattatactatttatgttctctgtattgccacaagggtaagacagcctttaagactaaaaatgatacaacatcagatagacaccatatgaaagaaataaagggaacttttgttggaactaccatgtatatgtattgtgaccatttttgtgtttagttatattatgagagaatacttctagaagtggggatattttgcaatttatagtttaaaaagaggcatttacattaaaccattttttagagactatatctttcaaaagcgttattcatttaacagatattctgtgtttactatttcccacacatgattgtaggtgctgggaatatggtaacaagcaatatatcaagattaagacctcacgatttgaagttcttttatacgaagtgtaaatacaagcctaaaagaaatactttttcccccaaaagaattgactctttaatttggtaggacaatcaactgcatttttcctatgtcaacagcaaaatataagatgataatatgacttatactgaatgcttacttttaggaatttcacatatatcttcaagtatca

SEQ ID NO: 199440 - DNA, 320 bp, Homo sapiens
taagaggaaagattaaagtgtaaatcaccaaccttaaaatgttagaaagatctcaaattaatgatctaaagtcacacctacaggaactagaaaaaaacagaacaatgtaaccccaaaggtagcagaaaaaaatcactaaaatcagagcagaactgaatgaaattgagacccaaaatttaatacaaaggtcagtgaaaccaaaggttggttctttgaaagaataaacaagatcaatagactaataactagataaacacaaaagagaaaagtttaaaataagcaaaatcagaaacaacaaaggtggcattacaacctatctc

SEQ ID NO: 199441 - DNA, 400 bp, Homo sapiens
ggttaatggcatcacttttatctcagtggctagacctaagatctgtcctaagtcctgtcttttcactcccatatctaatcaggtgacaataactggattctgcttccagcatgattgtatctttctcttcagtcccaacagtcccatctgggagttcagcacctcctgcttggaatgccttcacaatggttactctctgccttcccaaaaactgcatacccttcatgtggccacagctctgaaatcacttctgctcaaatcctttatggttgcgtcaccccttaacagcataatgtccagatttctacatgaggcctctgataagctggccccaacatttcctaccttacttttctactttcccttcccaaacctcatgaccatctacatgcaactacta

SEQ ID NO: 199442 - DNA, 406 bp, Homo sapiens
acaaaacaagtgtgaaacactgccactctcagaacttttgaaatacagcagcctagagcaatgtctataaccgccaaggaccatatacaaactttcagtttctctaacccattaagatcctagtcaatctggaattctactggtttagccacttagtatttgatcatgggcattatacaactctgtaacactcaaatttttcatctctaaaatgggcacaacaatagacctattttacaggactgttgtgagaaccaagtaagagactggaatcccgtccagaatatattccaaattccttaacttcgtcttcacagccctccatgaactagtcattacctgcttggcaagtgttcaccccttaactctaatcaaactggagattattctacttcctgtgagcaca

SEQ ID NO: 199443 - DNA, 673 bp, Homo sapiens
ccagtccagtgttttacaggagaggctgcaaggcttgggaaagtggcccaggattcagagtcagacctcaggtgctgtgaattctgactccaccttcttccaggtgaatcatcttgtcaagttacttgatgtgcccttgcgtttctttctccctatccctgagttggggagtatcagatgccagaaagttgggaggttgataaataaagatgtggaaatgcctgcctggagcctggtactggagctgctttcgtccttgggatggatggtgccgcctgccctataggcagtgaccccagcagcatgtcccaccttccactgaggcaggcgtgtctgtcttttctcagagtgtgaagagtacaaagagtacaaagacatcatagactctgccaatgtttccatgtagcattagagattcttttgatttaatctgtccctctaaatgcaaattctacaaaaacactgacaacagcttatcagaaggaaacatgctgaatactgcagtaacctgctaggaagcattaaagtagatccccaggatctgttagtaaacaggatatggttaacagtttgctgtgactcaagacagaagggactgtgatgatgacctgtcagatcagggagatttgctccatgactcaggaaagcaaacctagtgacttctcacaaggct

SEQ ID NO: 199444 - DNA, 391 bp, Homo sapiens
tattaacctaatccaaaaataaagtgtaataccaacaatgaggtagctaattacatattctcctttaagagtataagacagcttttttaaggaggaaaaaaactcaagcttgcaagtttaagaaaacttctaaaagtacagacaacttgggccatgggggaaaaaaatgtgaaaagagaaaaattctaaaagtcttttaaacaaaaagtatgggcctggcggtggctcgcgcctataatcccagcacttcgggaggccaaggcaggtggaccacctgaggtgggagaatcattttgagcccgagagtttaagaccagcctgggcaacatagtgagacattgtctcaaaaaaaaccaaaaaacaaaacaacatgtgggggggaacacccacg

SEQ ID NO: 199445 - DNA, 449 bp, Homo sapiens
ccaccataaagcagaatgccagccgcacagtgcctactagctcatagctaaacaacggagaactgcagccttgaaacagtgccccaaagagttaaagaagtctgtgactaacaaattcttgagtttgcaggatagcagatgagaaaagaaacaacttgctgaaactccctccacttgtaatattaaaaaactgactgaaattgcttgcaatcaacatgactaactggagtttgtgcagaatggtttgctaacatcacagcctgaatttccagtgcatggttcatacaaactccccgagtttgacatatgatccatgtggtggcatgaagaggtaactgtgcatgcctcagcactttctagacctccgctttccttccgccaatcacctactaatcccagaatccacccatgaatttttttctaataaaattactgctttaaacctagca

SEQ ID NO: 199446 - DNA, 382 bp, Homo sapiens
taattagttaatgggattgatattcacattaacctttatttatttctctttgttgttaggggttctgtctgtaatgtgttgttaacttcatgtcatgatggtgtgtgccggctctgggcagaaactttattaccagaagactgtcttttgggtgagcagatttgtgagactaccacttccagcattgccagcagcctttctcatgctggaagacacaaagacagaatacagcatgctcttgaggtattatattatttaaaatggtaaatgaattttgaagataatgtgagcctggtggaaattcatgaactaacatgcagatggcacacatggtacatgtaatgagtgaaattaatagcaataaactctcatttatgcttgt

SEQ ID NO: 199447 - DNA, 712 bp, Homo sapiens
tatctgtgaggattcctaaacttccattaagcaattctactacttccatttttaaggaagtaaaatgatattaaaaggacatctatttattatactcaatgtcttccagcttgcagataaggaaacgtatgcagactaggaaatttgcttagaagtcacaaatcactttgttattcatccctgaggcagtatttcttccagagagaatatggtaattacccaattcccacaatctggtatggtcccctttccctgcaattgtaagtcactgcctaaatgagccactgttaaaatgggaatgtgcactatgtattaagtgtgtacatgcatgcatggagcatacatttctgttagagaaaggaggaagaggtaggaaagatgggaagactgaaacccactgttctcaaaagcaaaaggatataaacatcatcgttaaacctcattatttgctctaaggatttagattacagttatgccatacagcgaatttttctttaagacacaaacaaaccacattctaagaaagtgattaacatgaggcctggcacggtggctcacacctgtaatcccagcactttgggagacccaggtgggtggatcacctgaggtcaggagtttgagatcagcctgggcaacatagcaagtcctgatttctacaaaaaaattttaagcattagctgggcatggtggcatgtggaggctgagacaaggg

SEQ ID NO: 199448 - DNA, 876 bp, Homo sapiens
gtaactggcatagatatcatggggatatttgaagaacgctgtgaacacatatgcatgggtccatgtattcatgagtgtgcacatatgtgtaattattcatacaattcatggtggatactacttcgagggtgttcacagaccccaggcagagagcgcctggagggaaaattatccaaggcaggcccattcatagttccaggacagccagaagaaagcctccgttaagcaccagaagtctccggggcaggtggggccaggcagcatgaaagaattggccgcaagagttccaaaccctgtcccaattatggagggtgacttttctttgtcctccttctccattcccttccatattgctcatgcatccaaagggagacctgaagactctctagcagggcaaggccattttcttttggcatttttctctccccagagtctagctgattatcagcttagacacacagcaggctatgtgctgtgaacaacaggcatcctgggttattttacaaactcatggatagtcattttgaaaccacctttgcaaaattgtgactgaaacagtgaaagagagctaacttaaccagctccatcttgtttctaacctccaagctgtctttgttcattcctgggcgtaggctgaactaactttgggagaaacttagtttgtagttatagtttaaacaaagactgtgacagccctttcccaatgcagacctccttcttgtctggggactagactaacattagccacaggattagaaattacggtttaggagtcacgcagctggaggctacaagattctgaccctccctaaactgcttctaagatcagtgcttgagacatgttgcagaccccgcacttgctggatcagctgacgc

SEQ ID NO: 199449 - DNA, 169 bp, Homo sapiens
agagaaagaaaaagaatgaagaacgaaaataaaaattttttaaaaacctaaggttaaaataaaccctttttcttcatatataaacacatgagttcaaattacagctttgctgcttaatagcttggtgacccaggacaagttatataacctctctgtgcctcagtttcct

SEQ ID NO: 199450 - DNA, 163 bp, Homo sapiens
gattgccagctacattttcatgagacaggtgatttgacctctctggtgcctcattttccaacacctgtaaagtgccagtaataccagggcctacctcagagtattgaagagttagcctatgtgaagccctagaacaatgctagacacttcctaagcaggcaat

SEQ ID NO: 199451 - DNA, 439 bp, Homo sapiens
atgagttggagaagaaaatattcttttcagattcctggtccagagctgtagcattaactcccccacactggtccttggacatgtgccctatggtccacctgtaagatttcttgggccactggcaaatataataagaacagcataataggatgtgggcaaaagattgcctgcttatcttatcctggataggactatcttttattgtgtgtcttgagtgttctgacagcttttacattaacatgtcctatctttttttttttttttttagacagagtctcgttccatcaccaggctggggtgcagtggcgtgatctcggctcactgcaatctctgtttccctggttcaagggattctcctgcctcagcctcccaagtagctgggattacaggcacacgccactatgcccagctgatttttgtatttttagtagagacaggg

SEQ ID NO: 199452 - DNA, 876 bp, Homo sapiens
agaactcacagtcttcttggggaagaggtcataaacttgggcctgggtggttgccctatccaactgaggtcgcctttgcgatccctgctgcaaataggcagtgactagtccaggagtgcagctgggaggaactgctcgccggatagaagggaagaaaggagattctaggcagaggctggaatgcaatgatgcgatcttggctcactgcaacctccacctctcggcttcaagcaattctcctgcctcagcctcccgggtagctggtactacaggctcctgccaccacgcccagcaatttttgtatttttagtagcgacagggttgtaccatgttggccatcctgacctcaggtgatctgcctgccttggcctcccaaagtgctgggattacaggcatgagccactctgttcagttggccatactgatagactccaggctttgggaaactgatggcatttggggatttccccagcatgtcctgtgatgctcttgattccttgtgtctccagtcatgacagagagaaggcattcctggcttgttggtccacatttatgatttgttgatgttgttgttgagatggagtctcaccttgtcgcccaggctggagtacagtggcgtgatcttggcaacctccatctcttgggttcaagtgattcctctgcctcagcctcccaagtagctgggattaaaggggcgtgccagcatgcctggctaattttcatatttttagtagagatggggtttcaccatgttggccaggctggtctcgaactcctgacctcaggtgatccaccagccttggcctcccaaagtgctgggattacaggcgtgagccactgtgcctggcctgtgatttttttattttttcagaaggg

SEQ ID NO: 199453 - DNA, 1039 bp, Homo sapiens
attctagaggatcccaggacgtgtcagtgatactggaggctggctgcagtggtggcggtggagtcagcagaaggtggaggtggagacgaggaggtctgcatgctggggggcactgtgtagagttgataatttttacgtcgttctagatccaaaacttctctccgacactgaataccttctgcttctcctatcattactctcattgtctggggactgggaaatgggcagtggaggatgaacttcaggggtatcgctccggtcctcaggaagtacctgaatctcctcagaagcctgagagtctgtggaggtatcaacactggggctactagatcgagaggagtctgaagacattggagaggagtgctgagaagctgcacttgatttttcagaagatccacaggccgttgtcaatgacccccgagcggtcggcgtcccccaacttcttagagggacaagtggcgttcagccacccgagattgagcaataacaggtctgtgatgcccttagatgtccggggctgcacgcgcgctacactgactggctcagcgtgtgcctaccctacgccggcaggcgcgggtaacccgttgaaccccattcgtgatggggatcggggattgcaattattccccatgaacgaggaattcccagtaagtgcgggtcataagcttgcgttgattaagtccctgccctttgtacacaccgcccgtcgctactaccgattggatggtttagtgaggccagccccgaattcagcccttccagaacctcacgctgctactcagcctcctcctagccttcactactccctgcatctgtttgagggcatgaaggcgttctaaaggcaatatgaccaagctatggtgcgcctcttccacgcctggctcaacatggaccggatgctgcgctcatccatgcgcctgtgcctgccgagtttcgacaagctgtacttgctggagtgcatccgccggctcatcgaagtgataaggactgggttctcgatgccgccagcaccagcctctatgtgcggcaatagctcatc

SEQ ID NO: 199454 - DNA, 1114 bp, Homo sapiens
tgggactacaggcactgccaccatgccctgggtaatttttgtcttgttgtagagacagggttcgccacgtatcccactctggtctcaagcacgtgtgctcaagcaatcctcttgcctcgggctcccaaagtgctgggatcacaggtatgagccaccatgcccagcccattgcaaccatcttagtgtatcaaaatacatgtgaaagatgacatgcatggaatcaccctaagggtgtcttctcaaaatttgcaaatattatacaaagaaaatatccctctgctctttaagaaatatatatatatgcactattagaccagcctggccaacacgggaaacctcacccggcccggacacggacaggattgacagattgatagctctttctcgattccgtgggtggtggtgcatggccgttcttagttggtggagcgatttgtctggttaattccgataacgaacgagactctggcatgctaactagttacgcgacccccgagcggtcggcgtcccccaacttcttagagggacaagtggcgttcagccacccgagattgagcaataacaggtctgtgatgcccttagatgtccggggctgcacgcgcgctacactgactggctcagcgtgtgcctaccctacgccggcaggcgcgggtaacccgttgaaccccattcgtgatggggatcggggattgcaattattccccatgaacgaggaattcccagtaagtgcgggtcataagcttgcgttgattaagtccctgccctttgtacacaccgcccgtcgctactaccgattggatggtttagtgaggccagccccgaattcagcccttccagaacctcacgctgctactcagcctcctcctagccttcactactccctgcatctgtttgagggcatgaaggcgttctaaaggcaatatgaccaagctatggtgcgcctcttccacgcctggctcaacatggaccggatgctgcgctcatccatgcgcctgtgcctgccgagtttcgacaagctgtacttgctggagtgcatccgccggctcatcgaagtgataaggactgggttctcgatgccgccagcaccagcctctatgtgcggcaatagctcatc

SEQ ID NO: 199455 - DNA, 823 bp, Homo sapiens
tagtacctcggtagtcgtgaggtgcttgagtgttcccggtgttgtgggccttggtggtatacctccaacgggtaccgcttaatgcagctacctacggagtggcagtcgagatctggcttcggattgtctcccattttccgaggtgggtgcctgccttggggaaagcttgtggcgggaagagaaaatgagcttcctaggacccctgactcactgagcacgaggaattccggcagggacaagtggcgttcagccacccgagattgagcaataacaggtctgtgatgcccttagatgtccggggctgcacgcgcgctacactgactggctcagcgtgtgcctaccctacgccggcaggcgcgggtaacccgttgaaccccattcgtgatggggatcggggattgcaattattccccatgaacgaggaattcccagtaagtgcgggtcataagcttgcgttgattaagtccctgccctttgtacacaccgcccgtcgctactaccgattggatggtttagtgaggccagccccgaattcagcccttccagaacctcacgctgctactcagcctcctcctagccttcactactccctgcatctgtttgagggcatgaaggcgttctaaaggcaatatgaccaagctatggtgcgcctcttccacgcctggctcaacatggaccggatgctgcgctcatccatgcgcctgtgcctgccgagtttcgacaagctgtacttgctggagtgcatccgccggctcatcgaagtgataaggactgggttctcgatgccgccagcaccagcctctatgtgcggcaatagctcatc

SEQ ID NO: 199456 - DNA, 1079 bp, Homo sapiens
gtggcgatcaacagtggaacgggacatccctgtgacccacaagcccagctcgtaggaagtgattcgacagatccatctcacatggacacaaagacgtgaagagaatgacatgaaagtgtagcactgtttgcggcagataagcggtaggaaataacctagatattgatcagagggcaacagtcaaaagtggcatatcggcaggtgcggtggatcactgggtgtagtccgaggacttagggaggccgaggagggtggatcacaaggtcaggagatcgagaccatcctggccaacacgggaaacctcacccggcccggacacggacaggattgacagattgatagctctttctcgattccgtgggtggtggtgcatggccgttcttagttggtggagcgatttgtctggttaattccgataacgaacgagactctggcatgctaactagttacgcgacccccgagcggtcggcgtcccccaacttcttagagggacaagtggcgttcagccacccgagattgagcaataacaggtctgtgatgcccttagatgtccggggctgcacgcgcgctacactgactggctcagcgtgtgcctaccctacgccggcaggcgcgggtaacccgttgaaccccattcgtgatggggatcggggattgcaattattccccatgaacgaggaattcccagtaagtgcgggtcataagcttgcgttgattaagtccctgccctttgtacacaccgcccgtcgctactaccgattggatggtttagtgaggccagccccgaattcagcccttccagaacctcacgctgctactcagcctcctcctagccttcactactccctgcatctgtttgagggcatgaaggcgttctaaaggcaatatgaccaagctatggtgcgcctcttccacgcctggctcaacatggaccggatgctgcgctcatccatgcgcctgtgcctgccgagtttcgacaagctgtacttgctggagtgcatccgccggctcatcgaagtgataaggactgggttctcgatgccgccagcaccagcctctatgtgcggcaatagctcatc

SEQ ID NO: 199457 - DNA, 1056 bp, Homo sapiens
ctcggttagggagctaacattaaggatgcatggacgtaaatacaggaacactagacactgtggactaccagagggtgagggtgtcggtttaaaaactacgcatcaggtactatgctcactaccggggtgacgggatccatattccaaaccttagcatcaagcaatattctcacataacaaatctgctcgtatatcccctgtatctaaaataaaagtggaaatcaaatacaactaacagtagagctacggggaaggcttaaagggccaacacgggaaacctcacccggcccggacacggacaggattgacagattgatagctctttctcgattccgtgggtggtggtgcatggccgttcttagttggtggagcgatttgtctggttaattccgataacgaacgagactctggcatgctaactagttacgcgacccccgagcggtcggcgtcccccaacttcttagagggacaagtggcgttcagccacccgagattgagcaataacaggtctgtgatgcccttagatgtccggggctgcacgcgcgctacactgactggctcagcgtgtgcctaccctacgccggcaggcgcgggtaacccgttgaaccccattcgtgatggggatcggggattgcaattattccccatgaacgaggaattcccagtaagtgcgggtcataagcttgcgttgattaagtccctgccctttgtacacaccgcccgtcgctactaccgattggatggtttagtgaggccagccccgaattcagcccttccagaacctcacgctgctactcagcctcctcctagccttcactactccctgcatctgtttgagggcatgaaggcgttctaaaggcaatatgaccaagctatggtgcgcctcttccacgcctggctcaacatggaccggatgctgcgctcatccatgcgcctgtgcctgccgagtttcgacaagctgtacttgctggagtgcatccgccggctcatcgaagtgataaggactgggttctcgatgccgccagcaccagcctctatgtgcggcaatagctcatc

SEQ ID NO: 199458 - DNA, 730 bp, Homo sapiens
tgggactacaggcactgccaccatgccctgggtaatttttgtcttgttgtagagacagggttcgccacgtatcccactctggtctcaagcacgtgtgctcaagcaatcctcttgcctcgggctcccaaagtgctgggatcacaggtatgagccaccatgcccagcccattgcaaccatcttagtgtatcaaaatacatgtgaaagatgacatgcatggaatcaccctaagggtgtcttctcaaaatttgcaaatattatacaaagaaaatatccctctgctctttaagaaatatatatatatgcactattagaccagcctggccaacacgggaaacctcacccggcccggacacggacaggattgacagattgatagctctttctcgattccgtgggtggtggtgcatggccgttcttagttggtggagcgatttgtctggttaattccgataacgaacgagactctggcatgctaactagttacgcgacccccgagcggtcggcgtcccccaacttcttagtgtgcaattgcgtctttccttccttccttccttcctgccctccttctctctctccttccttcattccttccttccctctctccttccttccttccatatatccaaaaaacaaagcataatatttcgccctctaaggccctcactttattgactcctagccgcagacctcctcattctaacctgaatcggaggacaaccagtaagctaa

SEQ ID NO: 199459 - DNA, 656 bp, Homo sapiens
attcacatctgacacgttttgtctgatgcgctgtcattgtagttcttgagcatggatacacaagcccacgctgcagctggtagcgcagggcaatcagtggctgggtgttctgcttgtgcttatatgccaaggcatgaaggactgggtcctcgaagagcaccgggtatttcgtgctctacgcatggtcatacgggtaacccgttgaaccccattcgtgatggggatcggggattgcaattattccccatgaacgaggaattcccagtaagtgcgggtcataagcttgcgttgattaagtccctgccctttgtacacaccgcccgtcgctactaccgattggatggtttagtgaggccagccccgaattcagcccttccagaacctcacgctgctactcagcctcctcctagccttcactactccctgcatctgtttgagggcatgaaggcgttctaaaggcaatatgaccaagctatggtgcgcctcttccacgcctggctcaacatggaccggatgctgcgctcatccatgcgcctgtgcctgccgagtttcgacaagctgtacttgctggagtgcatccgccggctcatcgaagtgataaggactgggttctcgatgccgccagcaccagcctctatgtgcggcaatagctcatc

SEQ ID NO: 199460 - DNA, 971 bp, Homo sapiens
ttgcgccaacgcaccgtgttgggccaacccaccgtgttgggccaacgcaccgtgaagtccgtggaagcctgtggctacaaaaaatgttgagccgtagatgccgtcggaaatggtgaagggagactcgaagtactctgaggcttgtaggagggtaaaatagagacccagacggtgcgttggcccgccaacgcaccgtgttggccaacgcaccgtacaggattgacagattgatagctctttctcgattccgtgggtggtggtgcatggccgttcttagttggtggagcgatttgtctggttaattccgataacgaacgagactctggcatgctaactagttacgcgacccccgagcggtcggcgtcccccaacttcttagagggacaagtggcgttcagccacccgagattgagcaataacaggtctgtgatgcccttagatgtccggggctgcacgcgcgctacactgactggctcagcgtgtgcctaccctacgccggcaggcgcgggtaacccgttgaaccccattcgtgatggggatcggggattgcaattattccccatgaacgaggaattcccagtaagtgcgggtcataagcttgcgttgattaagtccctgccctttgtacacaccgcccgtcgctactaccgattggatggtttagtgaggccagccccgaattcagcccttccagaacctcacgctgctactcagcctcctcctagccttcactactccctgcatctgtttgagggcatgaaggcgttctaaaggcaatatgaccaagctatggtgcgcctcttccacgcctggctcaacatggaccggatgctgcgctcatccatgcgcctgtgcctgccgagtttcgacaagctgtacttgctggagtgcatccgccggctcatcgaagtgataaggactgggttctcgatgccgccagcaccagcctctatgtgcggcaatagctcatc

SEQ ID NO: 199461 - DNA, 598 bp, Homo sapiens
tgggactacaggcactgccaccatgccctgggtaatttttgtcttgttgtagagacagggttcgccacgtatcccactctggtctcaagcacgtgtgctcaagcaatcctcttgcctcgggctcccaaagtgctgggatcacaggtatgagccaccatgcccagcccattgcaaccatcttagtgtatcaaaatacatgtgaaagatgacatgcatggaatcaccctaagggtgtcttctcaaaatttgcaaatattatacaaagaaaatatccctctgctctttaagaaatatatatatatgcactattagaccagcctggccaacacgggaaacctcacccggcccggacacggacaggattgacagattgatagctctttctcgattccgtgggtggtggtgcatggccgttcttagttggtggagcgatttgtctggttaattccgataacgaacgagactctggcatgctaactagttacgcgagccccgcaacgagcctctcaaaccagccaccccaggagccacccaagggccggcgcgttgtggatatgggtacggcccggcgcgagatttacaccctcccccccatgag

SEQ ID NO: 199462 - DNA, 829 bp, Homo sapiens
ggatctcgggctcgttgcgtggctcattgtgtggcccttcgcgtggcgctcgggtggcacatcgggtggctcgttggtgtggctctggttgcggcgcctggttgtggttcatcgtgtggctcttggtgccggcgcttggtggagcgatttgtctggttaattccgataacgaacgagactctggcatgctaactagttacgcgacccccgagcggtcggcgtcccccaacttcttagagggacaagtggcgttcagccacccgagattgagcaataacaggtctgtgatgcccttagatgtccggggctgcacgcgcgctacactgactggctcagcgtgtgcctaccctacgccggcaggcgcgggtaacccgttgaaccccattcgtgatggggatcggggattgcaattattccccatgaacgaggaattcccagtaagtgcgggtcataagcttgcgttgattaagtccctgccctttgtacacaccgcccgtcgctactaccgattggatggtttagtgaggccagccccgaattcagcccttccagaacctcacgctgctactcagcctcctcctagccttcactactccctgcatctgtttgagggcatgaaggcgttctaaaggcaatatgaccaagctatggtgcgcctcttccacgcctggctcaacatggaccggatgctgcgctcatccatgcgcctgtgcctgccgagtttcgacaagctgtacttgctggagtgcatccgccggctcatcgaagtgataaggactgggttctcgatgccgccagcaccagcctctatgtgcggcaatagctcatc

SEQ ID NO: 199463 - DNA, 824 bp, Homo sapiens
aatcgagtacaaaagtggatacagcatatctgaacacacaagtagtttatgctgtacagcataacaacaggattgacagattgatagctctttctcgattccgtgggtggtggtgcatggccgttcttagttggtggagcgatttgtctggttaattccgataacgaacgagactctggcatgctaactagttacgcgacccccgagcggtcggcgtcccccaacttcttagagggacaagtggcgttcagccacccgagattgagcaataacaggtctgtgatgcccttagatgtccggggctgcacgcgcgctacactgactggctcagcgtgtgcctaccctacgccggcaggcgcgggtaacccgttgaaccccattcgtgatggggatcggggattgcaattattccccatgaacgaggaattcccagtaagtgcgggtcataagcttgcgttgattaagtccctgccctttgtacacaccgcccgtcgctactaccgattggatggtttagtgaggccagccccgaattcagcccttccagaacctcacgctgctactcagcctcctcctagccttcactactccctgcatctgtttgagggcatgaaggcgttctaaaggcaatatgaccaagctatggtgcgcctcttccacgcctggctcaacatggaccggatgctgcgctcatccatgcgcctgtgcctgccgagtttcgacaagctgtacttgctggagtgcatccgccggctcatcgaagtgataaggactgggttctcgatgccgccagcaccagcctctatgtgcggcaatagctcatc

SEQ ID NO: 199464 - DNA, 891 bp, Homo sapiens
  misc_feature (718)..(719): n is a, c, g, or t
  misc_feature (721)..(721): n is a, c, g, or t
  misc_feature (728)..(729): n is a, c, g, or t
  misc_feature (733)..(733): n is a, c, g, or t
  misc_feature (737)..(737): n is a, c, g, or t
  misc_feature (739)..(739): n is a, c, g, or t
  misc_feature (743)..(743): n is a, c, g, or t
  misc_feature (745)..(745): n is a, c, g, or t
  misc_feature (748)..(748): n is a, c, g, or t
  misc_feature (750)..(750): n is a, c, g, or t
  misc_feature (754)..(754): n is a, c, g, or t
  misc_feature (762)..(762): n is a, c, g, or t
  misc_feature (764)..(764): n is a, c, g, or t
gaagaagttcttactgttagattgttaaagctggacaaaagagtcagggtgcttgtcacttcatcccctaagggagccctgggcctttatgctccgtggcttctgacttgccccttatccccttgaactcctgccacatactcatttctcctgcctcctccagcatcccttttctcagaagaatagtgacctttagtctatatctctaattcttcccaggaacaggaagagaagtccaattctaaggcagcaatgcagtaaagagtcttaggtttagccttaacaggacactggtcagttgataccagatatcggggatccgcaatctgtgatcttaaactaggctgagagaaatctccaagtgtaatgtgaactttgctttgtgcagtaaatatgttggaaggaaatccacattagctcgttatctcctctctctgagtgtcatttgaaatgttgctgctgtcttgcaaagtttagaaatttgcaatggtgacagctccaatcactaagttttacggaggtgacttacttacctattcaatatatccaaaacctcaattgcaattttcccccagagagctctgggttcctagatgaagaacaccattgaaggaagctatctagtgttaaccatttaatgatatggcctgtaccacaggagtggggatttgtggttgtatgctccaatgactcttatcatagatgtttgaacttcccnntntgggtcnnaccnttcngnattngnagngngagncctgggtncnggaagcgacattcgggcggccttccctggagggtggagggtgcgcgcgggcgtctggttggcccatgggcacaggggtttgttcttcttttttcttttgttgttcgtgttattcttctcctcggttc

SEQ ID NO: 199465 - DNA, 1136 bp, Homo sapiens
gaagaagttcttactgttagattgttaaagctggacaaaagagtcagggtgcttgtcacttcatcccctaagggagccctgggcctttatgctccgtggcttctgacttgccccttatccccttgaactcctgccacatactcatttctcctgcctcctccagcatcccttttctcagaagaatagtgacctttagtctatatctctaattcttcccaggaacaggaagagaagtccaattctaaggcagcaatgcagtaaagagtcttaggtttagccttaacaggacactggtcagttgataccagatatcggggatccgcaatctgtgatcttaaactaggctgagagaaatctccaagtgtaatgtgaactttgctttgtgcagtaaatatgttggaaggaaatccacattagctcgttatctcctctctctgagtgtcatttgaaatgttgctgctgtcttgcaaagtttagaaatttgcaatggtgacagctccaatcactaagttttacggaggtgacttacttacctattcaatatatccaaaacctcaattgcaattttcccccagagagctctgggttcctagatgaagaacaccattgaaggaagctatctagtgttaaccatttaatgatatggcctgtaccacaggagtggggatttgtggttgtatgctccaatgactcttatcatagatgtttgaacttttcccatatttttgggtacaaaaccattctcagcaaatttctgaagatgctgtgaatgctccttgagcgtatacctgagaactgcccaaatttcaccaccataagctctccaagatactttcctctacttaaaaaaatcgaggccaggcgcagtggctcatgcctgtaatcccagcactttgggaggccgaggcaggcagatcatgaattcaggagatcaacaccaccctggctaacacggtgaaaccccatctctactaaaaatacaaaaacttagctgggcctggtggtgggcgcctgtagtcccagctactcaggaggctgaggcaggagaatggcgtgaaccctggaggcggagcttgcagtgagctgagattgcgccactgcactccagcctgggcgacacagtgagactccgtctc

SEQ ID NO: 199466 - DNA, 590 bp, Homo sapiens
agccagtgcgtagagactggaatgtgggacgtgctcagaaaagggtagttatcactgctgctgagtaacgagaggaggctataggagaatgttcatagccccctacctctacctttgcccccaagtcagtaagcggcaactaaaggcagggagccatctcggaagtgctggaggcccacactcaaggactccaagtgtgactgatattaaagaacagcaacgtagattttagggcataatctgtctaccccattggtactttgaacacttcaagtaattattatctctgttataataaataatgcaattgaggttgagagagtgtaaatggctatggctattcaaagtgacacagctaaccacaaaaatcaaggtttacacacagtacttcactggccaaggccccccgccccagaggtcactgaccgctagtgttctagtggttaatgttgttagactgtttgttttttcttgccctgtcgcccaggctggagtgcagtggcacaatctcggctcactgcaacctccgcctcccgggttcacaccattctcctgcctcagcctcccaagtagctgggactacaggtgac

SEQ ID NO: 199467 - DNA, 506 bp, Homo sapiens
catatctatacttggatttatatgacacaagaaactgaatgatgtcggcttcttgaaaggtatgcggctcataaaaagcaaccagcaggaaatcagaaacaggaaggatgatgctttgttggaaacaatttttcattctgagtacaattatactccatggacaagaaagctactacatcctgtcattaaatatcacaacctagaagcctctaatgaactgattagcattcatgtatctcttggaagtcagatatatgaacagttggtgcactttgctattgacaaagcttataatcataaatattctttgctgagattagattgcactcgtttgcttttcatcttagttagacatactagtttcgaagtaattaaattcattcattgcgagtctttgtttacattaattaggactgacatgtcagattttgcatattaaatgcatttatacagatcttattaaaatggcaaattgtgagcttcttagatgttaaaaaattgaagaa

SEQ ID NO: 199468 - DNA, 211 bp, Homo sapiens
atactgctgtgctgtcattctcagacggacaatcccaagtgtcagagcccatgtggggcaaacagaattctcatacgctgctggtgggagtggaaaatggtgcaactacttggaaaaatcggctggcaatatctatcaaagctgaacaaacacctgccctgtgacccagcaattccacccccagatagatacacaacagaaatgcatcccc

SEQ ID NO: 199469 - DNA, 645 bp, Homo sapiens
tgcgatggctcacgcctgtaatcccagcattttgggaggccaaggtgggcagatcacctgagatcaggagttcgagactagcctggccaaaatggtgaaaccctgtctccacaaaaatacaaaaaactcagctcggcatagtggcacaaccctgtagtcccagctacttaggaggctgaggcagaagaaacactcaaacccaggaggcaaaggttgctgtgagctgagatcacaccactgcactccagcctgggcgatgagaatgaaactctgtctcaaaaaaagaaaaaacaaaaacaacaacaaagtggggaaggggaaatatgagttttacagggcaggcgcagtggctaatgcttgtaatcccagcactttgggaagctaacatggacggatcataaggtcaggagttcgagtccagcctggccgacaaggtgaaaccccatctctactaaaaatgcaaaaattagccaggcatggtggcgcgcacctgtggtccagctactcaggaggctgaggcagaggaaccgctcgagccccggaggcggaggtgcagtgggtgagatcgagcaatgtggcatccaagcctgggcaacagagcgagactccatctcaaacacacgactcatcacacatgtgaaaggc

SEQ ID NO: 199470 - DNA, 482 bp, Homo sapiens
  misc_feature (433)..(433): n is a, c, g, or t
tgcgatggctcacgcctgtaatcccagcattttgggaggccaaggtgggcagatcacctgagatcaggagttcgagactagcctggccaaaatggtgaaaccctgtctccacaaaaatacaaaaaactcagctcggcatagtggcacaaccctgtagtcccagctacttaggaggctgaggcagaagaaacactcaaacccaggaggcaaaggttgctgtgagctgagatcacaccactgcactccagcctgggcgatgagaatgaaactctgtctcaaaaaaagaaaaaacaaaactacacctatactaaacaaaaaccctcaatggatacctgatttccactgagtgactgacttcatcaccatctcctgaatgacttcctcccagtttcattctgtatagtatctgcacatatacggctatttatgccanatgttttaatgcaatggacataccggcgtgcaatggatctcaggtacct

SEQ ID NO: 199471 - DNA, 583 bp, Homo sapiens
ctgagttctaaattgacaaattttaatttccaagttgtttctgacacggtgagagttgggttagaatttttatttcattccccaagtcattttttctttttctttattttttctttttgagacagagtctcgctctgtcgtccaggctggagtgaagtggcgcagtgttgtctgcagcctcaacctcccaggctcaggtgattctcccatctcaacctccagagtaactgggactacagtcacgtgctaccatgcctggctaattttttgtatatctgtagagagggggtttcaccatgttgctcgggctggtcttgaactcctgggctcaagtgatccatgtgccttaccctctcaaagtgctgggattataggtgtgagcgaccgtgcccagcctcattttttctttcaatatggaaaattggctaatccacctaatacctgctcatcttctagtattctatcctaccatctaccctcagagttattgatgtactctttcatcatgtgctatcatgatttctccttagattagaaagtaagcttcaaatgggagtgtgtcttcatattgttctgaattaac

SEQ ID NO: 199472 - DNA, 351 bp, Homo sapiens
atgagcataacttgaagtacctaatacagtaggggcttaaatattagtcccttccatgtgtacccattttattatttttcttcataaagtaagtctttgtcagaatgtttggccctctaaatttaaggttcctgtaaaatgtcttataactgttgtaccatttacatataatttgcaaaggtaaaatatctgtcccactgaagtattcacagaagcagagtttgtttctgcagccttttcacctcatacaacataggctgcaataccagaaaatcattcaaacatgagcatgctttaacctacacttatatgtgagagataacagaaagaaactttgagaaaagaggaagt

SEQ ID NO: 199473 - DNA, 875 bp, Homo sapiens
gctgttaaaacacccacacgcatgcgctggtctaccgagctccgcgcaactcccggcgcactactctgatccgagccccactgcttccggccgctggtcgcagggctgcgggactacaatcttcgcatgaaatggaagagagggtggtgcggatagcttgaggaagttccgtttccctccagagcatcaagcctcctcccgcccagggggcctcctgctttcctaagctgctgtggaatcggcctgaggtcccagacgctgtccattgtgctgctgctctctgctttctccagccagagtgccagttcatccgcttttgggagaactccgccgcctggcctgcccgcggaaaaggtcacagctttgcagggggtgacatgggctatggcttcctggaaatgtcaccctcactagcgccttttagatagatgtgaattttgagacatgagggagagtaattattggtttacccaggagatgctaagagcagcaggagaaaaccctaatttccaggcatgtgtcctgagccagggacaggctggccagaccctaagcccccagtgccgccagagagcagcctactgccctgatttgtgtggaatccccttcgtgctgctgggccttagcgtcagggacagcccagtcaggtgaaggtggggatgacccatgggcttctggaagtgggttggtggtcctgggagggccagcccatccccccttggagagggtctttgtgctgaaggatgcccacagaggcctgggtaccaggaacactgctctaggcaaggtgcctttcttccagatttggctgaaaggaaggaagacttggtcagcttttccacccagccatctggcccttacagggctgctcccca

SEQ ID NO: 199474 - DNA, 339 bp, Homo sapiens
tcagcatgcgcagggttcaagggtgttgcgcagccccgcagggaggggcagggcggtgttgacctctgtttccaaacccatgctggctactgaatctgtgccacccctggctaaggggagtgagtccatagagggacttgaagggcaggtctgggctgggcagtgaggagagtatgatactgcaaagtgcgcctcgcctttgccaaaatcggtcgggtctcaggctcaccccacctcccgctgctcagttccgtttccctccagagcatcaagcctcctcccgcccccaccctgcctcctttctctgcttgcttctttctcttctcctacctgcctgca

SEQ ID NO: 199475 - DNA, 303 bp, Homo sapiens
gcagtaacattctacacacttggcaatttgtgaaagtctttgggaagcatgatgtgagaatatcagggtcaacttgtataggtcaggagttcaagggatacatctgggctgaaggtacagatttaaaaaccatgagattaacaaatgaaaatgaagtgatcaagaaaaatattaaatacctggctcatgaaactgtagaattaatagaaagaaaaaaaagaaattgatgtcttttttcattgtcttatttcttcattttatcatgtgttttaaaattcttggatttctcccattcccttaaga

SEQ ID NO: 199476 - DNA, 481 bp, Homo sapiens
ttctaatctgaaattattcaagccagagaacaagtgagtaacattttaaagtaatgaaatattttttaaaaccaaagaaacccaaaaacctattaatctagaattatatgcctagcaaaaataacttaaaaataaaagggaaacagacttcttcagactaaaaaaagctgagagaattttctaacgtaagatattcaccataaaagttgttgaaataggctgggcgtggtgcctcattcctataatcccagcactttgagaggctgaggtgagtggatcatttgaggtcaggagtttgaaaccagcctggccaacatggtgaaaccccttctctactaaaaatacaacaattagctgggcgtattggtgggcgcctgtaatcccagctactctgcaggctgaggcagggaggcggaggttgcagttagctgaaatcatgtcactgtactccagcctgggtgacacagtgagacaccctcta

SEQ ID NO: 199477 - DNA, 524 bp, Homo sapiens
tgaggggagagaggagaggacttaagcaactgtgccactcagcattggaaaggtcacctctgtgacattaaaatcaagaattctgatagaagtaagagttctggcatgagtggtgcttttccagagtacacttggatatatgattacattttaataagttatataaatatgcagatattcatgcggcttttcctcatttgggattttggaaactaaaatagtagtaagagcattaaaaaaaagatgtcctggaagttctcgttcattgcaaatgttcttgaaatgtgaaattcttggaaaagtaatcagggacaactattgacagttgtgtgacatttgggtagccctttctacagttaaagtcattgtgacttttagtagccacactgaaacctttggaataatgaaagaccctttcaaaagatcttccatactgatgatcagtttgcgcctttgccatctatggggtatgaaatgtaaaggcacatttagccaggagttaacacaggtgttttgtaatgcgt

SEQ ID NO: 199478 - DNA, 381 bp, Homo sapiens
acgcgtccgcccacgcgtccggggccaaagcctcccagcatgaggcgccacgactcagggcggagaggggctggtcgataccacctgggcccctcctccagcttgagcccgaatctgcagcatcctggtctcccatcctggagggctgcagcgaggctgctgcagagggaagcagaaggttctgttgaccaggagaggctcctgtttacttaccgatggtgcagagctaagcagccagaaggccccgggctccctgcccctgccccacccagggtggggtctgcgtccgtccacagggcaggtgttaggacccatcccaggtacttttcaggcctatgtttccccagcccccaaatgtgataggatgtggggatggggtgg

SEQ ID NO: 199479 - DNA, 1300 bp, Homo sapiens
gaattactcaataaatacaactgggaagttggttatttgctagggaaataactaagccatttttctttgttatacaaatcacttaaatgaaattatagttcctttaatatttatgtaaaaaaggaatcgtaaaatgtgtaaaatataaatatttgatcttaaggtaaagaaaacctttctaagcataaaagcaaagaaagaaaaaactagggcaaagtgatataacccttaaaacagaattaaaaggcaaatgacaagctaatggaaaacagtaaaatatatgacaaattaatttcccctatctgtagagtgcgcttacatatatttcattgtgctcagtagtaaattggggaaatgatataaataagcaatttacaaaaagaagattcctgtgtttcaaaaaattttcaatttaacctgtaatcaaaaagaagaagaagaatggcaatgagatgaacattagtgagatgccccaccaaatcagatactatttctgtgactcttgggtttcaacaggtgacatttcctccagagctggtaggtatggaatacgatcagtttgagtatgtgtatttaaaagccttgaaactgtcataccgtttaaaccagtaattctactttcacaagtttgtcttaaagtaatcagagctgtatatgaatgttgatgctcaaagatgtttattgttcctactattttaaaatagtgattaattggaaatcaccttaatgtctaacagaaaaagattggttaggttaattatgctccttatagaatggactactatgtaatcatttatttaagacttcggaaaatacagtgtatgaaatgaaaatagatttgttgaatattatcccagtttttaaaattgtgtgtgtttgtgtgtgtgcctgtgtgtgtgtgtgtgtgtgtgtgtgtgtgtcttgggagtgaaattatgagcagtatctatttcttttacacttaaaaaaattccagaatttttacagtagtcatttattgtatttgtaatcaagatgaaaatctgaggccaggcgtggtggcttatgcctttaatctcagcactttgggaggctgaggcgggcagatcacttgaggccaggagttcaaaaccagcctgggcaacatggcgaaaccctgtctctgctaaaaatacaaaaattagccaggcgtggtggcaggagcctgtaatcccagctactcagaggctgaggcacgagaattgcttgaacctgggaggcagagtgagctaagattgcgccactgcactccagcctgggcgacaaagtgagactccgtctc

SEQ ID NO: 199480 - DNA, 339 bp, Homo sapiens
aatagcttacaagaacacaagaacagcttttctaaagaaccatcaccaacttagaatttgttaaataaaacagaaccgagaaagaaatccagccttagaacactgaaacatctaagtgcctgacacataacaggcatttatttggcaacggtatgttgactagacacacaatattgataaaaaaaaatttttaaatgtagtaactggacagtacatgtgataatataatctgcccaactggctttactgatttggaagctgaaactcaaaaggttaaaggacttgtccatggacacagatattttggagcacagccatgactaaacaatccttgtctcc

SEQ ID NO: 199481 - DNA, 498 bp, Homo sapiens
aaatcattaatccactttcctttgtcttgtgtttagccttatattcccaaagctattataattgtttaaatagaagcttctacatttattacaatcattacaaaatgaaactggttttgactttcacaatttcacttctcacctgagcaataccttctcatatgtatcctttgaccaaggcagaggtcactatttaaagcaggtagttttgaaaatattatgctaatcagcaatcaacacatttgtaactctccaccccctaaagcagaccaggtggatggttactcaagcctttgcaacagttccccttttcttcttatgggaagtggggaatgtgagaacttaaatattctaaaaaaaattaatagattgggtggggtgagggcttctctgacagttttaacatgcagaggtgtgcttcaatcatccaaactcctgaaaagggcatcaagcaccctctcccattccaaatggagccctcagctggggccaggcaaa

SEQ ID NO: 199482 - DNA, 178 bp, Homo sapiens
actccatcctggctgacagagcgagattccatctaaaaaaaaaaaaaagatacagttgtgaggtttcttgatgaggaagagcaagtcagaagcagtgaggggtgactgctatctggctttcatcatgggaaggcctgctctccttctgattcccttgccaggccatttaagatgcttc

SEQ ID NO: 199483 - DNA, 558 bp, Homo sapiens
gcgcaggtccaggcggccctcgtacatgaagtccagtaggcggccgaaggcgggcgccgtgacgatgtcgccgttgagccgcaccgtgtcgcgactgcccgcgggccggtccctgtagaagagatggaagtagacgctgcacgcggccagcacggcacggtgggccgggaagcgcgcgtcgcccaccagcacggtgcagtcgcataggaagcccagctcgcgctgctgtctcaggcggcccagcagccgtccgccgtgctcagggaactccatgccgccgccgtcatcacctgggcacaaacgggacgcccgtcagcgcgcctggaggcgcccacgaagcgcccttcccggctgcaggcagcgcggaaagagcggcgcgggagtgacgcgcgcaacctcccgtccagagccgccgcgggcacctgccccgagcaggaaaaactcgatcgaaagtaaacagtagcagctccgccgcgggggcgggtcccgggactcaggcgcaggagccggagccgcgcaaacctgcgcgcgtccccgcccgggcgctcctgaacttca

SEQ ID NO: 199484 - DNA, 663 bp, Homo sapiens
cttgagaatttcagaaatgaagtttacctccccagtccctttaaaagataaaaacaaattagctcaaattctaaccacagccataagtggtccttgtgcatggcaatggctaagaatgggcactgcctgcttctgaggtgtcctctgtctttgctgtgagcggcgtgacagctgtgccttccgtgcttctcttcggaggcttgtttctgggtatgtgttcaccgcaatggatgcttagattttggttcaccgaacgacacagaagtcactgcattcgatgtggtgacctcagagcaagtggcctccaggtccagtttatctaagtcagaagctgtgattcaggaaagccactgcagctgtttcctgtagagaggttggccgaggcaaggacctcatcacctgtgggcgtatctgcttgctaataccattgctgcagaggaataggttcctggagacggaggcacacaggcccagagaggaagtgacagggatttgtaacagatcacactgacctgaaggaaggccctgacgtagatatgtccccttttcacattcagagtcgttgctgctgcttctctttatgtcttggataatccaccttggcctcttgagtatactgtacctccctaacctgctgggctgaaaggccaagtgcaggcaact

SEQ ID NO: 199485 - DNA, 450 bp, Homo sapiens
aacatccgattttattgccgctgggtggacagcgccgtctagacgccgctcacccttctcaccttcgcagttgtctgtgtggaagacgggagaggcaggggcaccacgccactgtccccaagaccggcccccaggcactgcgcggaagaggccgtggcctgtgaggtggcccttccctgccctggacaggctgtggaggggctgcaggcggaggctgggcttgggagtgcttgaaggatcactgggctgtggaggggcccgcaggccgcctggggacctggggagggaagctccgggcctttctctggctctgcagacgcacggcctgggttcaaatgccagctccaccacttcctggctgtgtggccttggacatgtgtcttaccctctctgagccttaaatttccttctctggaaaatcaatgcttcatcaaataaaaagtgatcatg

SEQ ID NO: 199486 - DNA, 563 bp, Homo sapiens
cggaaaattaaatacagcatgttctcacgtataagcgggagttaatgatgagaacatatggacccacagaggggaacaacagacactgggcctcctcaagggtggcgggtaggaggagggtgaggatggacacactgcctagcaggtactatgctgattacctgggtgaagaaataatcgcacaccagccccctgcgacatgcacttcacccacataacaaacctgcacatgcaccctctgaacctaaaataaaagttgggaagaaaatgaaaacaccggcttcctgctttactcctccccatgcccagtgccactctccagagcaactattttgggtttttttgtttttgtctgttggtcctcaactgtgtattttcactctcctcattaaagtagagaatatttgtcatcattaaatgaatgaatgaatggactcccacccaaaacccacctgggcaagctcaggaagaatgtctggaggcctggaagactgggggcagccagcagcctccctgctgagcggttccaagcactgcccattggcatgtgggaaagggcacct

SEQ ID NO: 199487 - DNA, 484 bp, Homo sapiens
gcgttggccccaggcgggcatctgtttctggtgggttgtcaggcctcttacagcaagtacttaacaaacttagatttccataatcagatttatctcaaaccgcaaaaaaaagctgattttattatgttaaactgataggagatttttatgagagatgaaagtaagcgattttaactttttaatttttttaatttttgctctgtttctcacacttgaggcttttctgaaattcaccaaaagagttttggcagttgtggggaatttaccagaaccccccattattaaaacaattggtttcttatattaaaatcatcagacaggttttgtgtacacagacatttatgttaagccactgatagaactaaactgtgtgtaggaacctgttttctctaagaaaggactcctttgagttctgtaggatatgtgcttaaaggttttctgtgtcaagctattttatgaaataaaattttacaaacaatgaaaa

SEQ ID NO: 199488 - DNA, 354 bp, Homo sapiens
gctgcagcatgggtgacagaatgagactctgtctaaaaaaaaaaaaaaaaattacaagcaaaaagggccaccaggcacagtggctcatgtctgtaatcccaacactttgggaggtggagacgggatgatcacttgaagccaggcgttcaagaccaacctgggcaaaatagtgcgactcccgtctctgctgaaaatttaaaaattagccaggtgtggtggtgtacaccggtagttccagctgctggacagggtgaggaggagaattgcttgagcccaggagttgaaagctgcagtaagccacagtagcaccactacattccagcctaggccacagagccagaccccgtctcaaaa

SEQ ID NO: 199489 - DNA, 591 bp, Homo sapiens
cctcttcaacatctcatttctgtctcatactagtttttctaaaagccttccttcccatttctaccccgctgcacccggccaagttttcattttctaggtgctgttcattacttgaagaaatacattcactttgtcagcactgtggtttgtcatttggaaagaaaaatacaccctctttaagaaagcgagttccctgtgatgtagtgtgctttctattaggactcaaatcagaatgagtgttcagcactgatgttttcattccgtcctcctcctctcacctcctgcctgctctcagcccactgtcctctctgccctattcctccttgggttgtcttaaagtcaaaagctctcagggttatgttgatttgggcttgcagagaatttacctgttgttaaagaatacctttgagtatagcagcttctttgtttcttgatggtgatttttttcctaccttttaatgtttcaatttgatgacatggttgattaacttgggactataaggacttggaaggcagaatatttatatggtttgcttgcatatctcaaggtagatagcactttgcaaatggtaatatttgtttaataacagg

SEQ ID NO: 199490 - DNA, 100 bp, Homo sapiens
ccatatattcatatatttttgctcgttagtgtatttcttgagctgttttcatgttgtttatttcctgtctgtgaaatggtgttttttttttttttgttgg

SEQ ID NO: 199491 - DNA, 257 bp, Homo sapiens
atattgatagggatgttcattctgatctttcaaatgatcagaaattagaaaaaccccaaatgtctaccaacagagaatatgggttaacttaattgtgatatggtcatgcaatcaatggaatgccttggaatggttaaaaaatagatctatgtattctgccatggaaagacatgtaagagagtcagtttgttttttgtttttgtttttgttttttttgagacagaggtttgccattgtcgcccaggctggagtgcaat

SEQ ID NO: 199492 - DNA, 326 bp, Homo sapiens
agggtaaaagaatggttctgagggccaggagcaccaatcttctcttattttcagttttggaaactggatatactctgtattcagcaattgccttgtaatagacttcaagagtgagaaaaaagaatcccttaataatagtttctgcaaatgtgtgaaagctgagtgtgaggagaaaaagttgttttcaggaactaggagctggttcacctttaaaaagaaaatcagctgcctctggcaaaatggaattgcagcattgtcctggatggtaatttgcactagtaaatttatcaccaacctggcaggggagatgctgaagaaaaagcttt

SEQ ID NO: 199493 - DNA, 494 bp, Homo sapiens
caatcctcccacctcagcctcctgagtggctgggactacaggcgcctgctaccatacccggctaatacttgtttgtagagacagggtttcgccatgttgcccaggctagtctttttcttttttttttgagacagagttgcccaagctggagtgcaatggcatggtctcggctcactgcaacctctgcctcctgggttcaagcgattctcctgcctcagattctcctgcctcagtcccccaagtagctgggaatacaggcacccaccatcaagcccggctaatttttatatttttagtagagacagggtttcaccatgttggccaggatggtctcgatctcctgacctcgtgatccgcctgcctcggcctcccaaagtgctgggattacaggcgtgaaccaccacgcccggccaaattgtggttattttttaaagacagtattctgttttagaagtacttactgaaaaattacagataaaatcatacagtgtttg

SEQ ID NO: 199494 - DNA, 472 bp, Homo sapiens
atgggaaaaggataggcttgagggttaaataatttgtccggatcatgcaggtagtaaaatggcaaaggaatgaaggaaatgaagttcaggcttttagaggattgttttcttcccattctcgtgtcctgcttcctccatgtctgttagatggtggccgtctttgtccagacagtcatgaggccttggagaggggcttttcgctcagccacctgtgctctggggaaatacacgtctcctggtcatgccaccctctccaatgctgtccacagcaaactgacaggctctcctttatgttttcagtagctctagcccttgtctcacagcttttctttattctcagtctctgccctcatcccgggtgactcaatattagcatggatgacccttacagtcttagtctctctttccctcagcttcccccagcccctaaatcatcgtgttcattattctttggaaacccactctttgttcc

SEQ ID NO: 199495 - DNA, 113 bp, Homo sapiens
ccggcgaccatgcaggtaagggggtgctggtgctcttcagggcagcgactgagaacagggctcccaaccagctctgctcgctggtcccttcccttctctgggcctcagactcc

SEQ ID NO: 199496 - DNA, 235 bp, Homo sapiens
aggctggtcttaaactcctgagctcaagcaatccgcccacctcagcttcccaaagtgcagggattataggtgtgagccactgcacctggcctggaaaaatcctatttgaacaaggtgtaaaggattctgactcagagcagaagatgtgaattctagtctttactccgcctcctattaagtaggtcgctggccctttaagcctcgatttcccagcctgctttaacgcatgccaagt

SEQ ID NO: 199497 - DNA, 305 bp, Homo sapiens
gtacgatattgatacatacaacatagatgaatcttgaaaacatgttaagttgaaaaagccaacatattatatgtaacatattgtatgtaagaaataggcaaatccacagagacacagagtagattcatggttgccaggagttaaggaaagtggaataaggagtgattaccagtagacatgaggcttatctgggggaagatgaaaatgttctaaacagtggtgatggttatacaactatgtgaatatgtgaatggaccaaaacccactgaattatacacttaaaagggtgagttttatagtgtgtg

SEQ ID NO: 199498 - DNA, 347 bp, Homo sapiens
ctgattcctaatccatctccctctgtgttctctgtggtgattcatcctatggccacacagatgcacagagagctcttagagccacagatgccagcacagagagctagattttccccaaaagtgcataaatgcacccaacaggtagattttaaagtgtggtttttcagcagttgtagcatttccctgttatttcagggctctgaatatacctctgtgacttgaaagtgatcgtgaaaaatacctgatttactctgtggtgagacaacagatgttaaagacagcttccctgatgttaggctataaagctaggcgtttctccctcctcacagcaaagttttacatatcag

SEQ ID NO: 199499 - DNA, 534 bp, Homo sapiens
tcctaataaactaacataagtatttagaaattacaatcaagtaatttaactgtgtactctgtgaaaccgactcgtgtaccacccaccacgcttgggaaacacagcatgtattattacataagcgatggggatttggttgtaactcccataggcctgggacttgatggtaattcagttcaacaatgtttcctgagtaccagctgtttgccaggcactgtgctaggcacttgtgaagataacggaattaaaatgaataagacggttctgttctggccctgaaggagcttaacatcttaagagaaaaaaaagtctgaataaataactgcaaatatagataatagcttttgtagtacaagtattatatttcaatacagtggcttattagcatagaaaatgcatggaccaagtgcccaaattcctatggctttcagagttatcacaaagcagtgtagaatgcccatgttatgcctttaaagatttacaattaagtagattttagagaacaactagcgaatacttaaactgtaaaaatta

SEQ ID NO: 199500 - DNA, 341 bp, Homo sapiens
agcggtgcctctccgtggcctctgtcctaaattaaacgatgggctaagatgccttgaaatgcctgcagcaggcccggcgagagcttgaatgctcaaaggtgtctatgccaacttctgcttcttcaatcaaacttgaggctttaagagacaggcacgaataaggtgtctctccagaaggaaggcctgggggagacgcctgggctggggcatggtgaggacgccccaatccagaagcacagcctctgccctggacgtgcccagctgccggagccaggcgctgcctcgtggccctggagaaactcgccttggtcttgcagatggagtcatccaggacactgaga

SEQ ID NO: 199501 - DNA, 427 bp, Homo sapiens
caatgcaacaaaactagaaatctgtaaccaaagaaacttttgaaattgtgcaaatatatggaaattaaacagtatgcttctgaatgaccaatgggtcaatgaagagatgaagaaggtatcttaaatgggttttgaagcaaatgaagataggaaaacagcataccgaaacctgtgggatacagcaaaagctgatataaacaccaacattaaaaaactagaaagattttaaataaaccacctaacaatgcatgtcaaaaatagaaaatcatgaagaaactataccccaagttagttggaggaatgaaacaataaagatcagagcagaaattttactaattgagactacaaaacaacaggatgaatgaagcaaaagttgatttttgaaaagattaacataaatttaccaatagctagactcatctagata

SEQ ID NO: 199502 - DNA, 461 bp, Homo sapiens
aacattggtacaggtataccccagagatattgtgggtcagttccagaccactgagataaagccagtattgcaataaagtgagttgcatgaattttttggtttccccatgcttataaatgttatgtttacattatactatggtctatcaaatgtgcaataacgtgttaaatgtatgtatcttaattttataactgtgttgcaaaaaaatgctaacacatcatctgagactttaatgagtcataatcttcttgagtccaggagcaacatagcaagaccctgtctctacaaaaaactagaagaaattttgcaagaactaccaaaacgtgatgcagagacatgaagtgagcacgtattgttggaaaaatggtgctgatagacttgctcactgcaaggttgccacaaaccttcaatttgtaaaaaatgccatgtctttgaagcacaataaagcaaagcacagtaaa

SEQ ID NO: 199503 - DNA, 449 bp, Homo sapiens
ctctccttctctctctccgtagcctccttcttcctttgcttccaggaaacatgctttttcacctcaagaggccccctgaacctgactcttccactttctcccaattcatcagcaccactttggccttccttctttctaaactgagccccatggaaatgatgtgacacatgacaattcagctcatgcaccataccctgcctggtgctaagcacgtgccacacatcgtctcatatggttctcatcacaagcctaagagtaagagttcttcttgtcctcggttgacaggggaggagcttgaggattggggaggtgaaggcagccaaggccacatcgctgagcaagcagcagggctaagatttgatgctggctccccagccagcaccttgctctcttgtcccaccccatctctcccatgagccttcatctctgaaatgtcccataatcatctc

SEQ ID NO: 199504 - DNA, 438 bp, Homo sapiens
ataaaagtatttgttaaagataatacccaaattgatatgataagatctcctaaattccacaatcttatattcaattgtctttggggtatgttcatttaaatggaagaggtccaacaatgacatcagcgtctctccacccaaacttattcttctagtatttcttcgcttggcaaatggcgaatcacctaggtcagaaaccttgagctcatcctaaatgctaacttctctttcacttccaacaacccactggtctctaaaagtaatagagcccacctccttcatctctcacactgaccccttaccttcatcctcacctctgctgccttggttcgagccctcatctcttttacagggatccaccacagcatcccaactgatctggccttaggtcttcttctccaatccattcttcaaaaggctgccactgtgatcttccca

SEQ ID NO: 199505 - DNA, 705 bp, Homo sapiens
ctctagcacgcagtctacactggactgactcctgactctcccgtgactcagcggccctgcaagtcagctcgtgccttgcgtgcacagagcaggttcctccaccccgtgacccaggacaatgacctggcaagctcgcgggcatggcctggcccccttccctgcccttgtgcgttagaaccctcagggtcctatgtgttaattcccaaggaatgaaacagctggaaggacccaagaattgctgggatctcattcccatggcttactgacttcccagacctgatggaacaagcctgaggagctcgctcggctttcctggtggtctttcgtgcctcctgccatttttccatcttttgcaaaaggctgcaggcagcacccacacagccctgcatgaggcttgggtcagaagtaagggaaactgccaaatgcagccttctgggtcatttcaataacacatacctcctcaagcaatgaacgtcagccacgtccaacattgcacttaggtccaaagattaaccagccatttcttaatagaacaaacaagcatgttggctttgcctggtggaactgcagcctccgggcgactgggcaaaatccacgaagaactgaagtaagccctggagaagccttccactcagctggggaaggccaggagctgtcagggggtccgagctgtttgctgtggtgtacgggaggagagtgtagagt

SEQ ID NO: 199506 - DNA, 487 bp, Homo sapiens
tgtcttatgctccacctcggaggccagcaggaatttcagtatttctgtgaaaactgctttaggttatttctcctcttattccaatcagtttgccaaagaaacagctcataatgtgacaggagccggtccctcagcaacctagaagggatgggatagaactgttatctgagtgtcagatagaaaatatacgagcagggaggggtttcttggcacttttggcaaacattggacttctgcctggtaaacagatctttttatcctttctgttctgaaaattcctccttctccttaaccaagcctctgaggacagtaacacccaaagcattctattccaacacctgtctcccctggtatgtctctgggttggtggaattagcatagagattacttttattttcagggagggccgtaagactataggaaattgactttcaaaaagtagatgattgtgattaaataaaatacaaaatgttctattaatctactc

SEQ ID NO: 199507 - DNA, 278 bp, Homo sapiens
aatcactttaggttctcccacgttaactggtttcccgagtttggttcctgacaaagatatcctagagtaatcattctaaaacaaaaatgtgatcacttcactcaccaacttaaaaaagccttacaatagctatgtttctcagcttaaaaatccttcaatgttcctcacttgagaaagctgaagacacagaatgctagaatactcttggtgatctggtggcacttatctacttctccagcctcatctctctcttgcctaacccctaccctaaatctctt

SEQ ID NO: 199508 - DNA, 539 bp, Homo sapiens
cagagttgctaagaccatttaatgggaaaagaacaatctcttcaacaaatggtactgggatagctggatagccacatgtaaaagaatgaagttagacccctatgttttatcaaatacagcagccttttagtataagatctgattggctggatcaacaccctacatgtaagagctaaaactttaaaactcttataaaaaaacatagggttattcttcatgactttggatttgtcagtgaattcttagagaatgatactaaagcagaaataacaaaaaagataaactgaacttcatcaaaattaaacatttttgtgcataagagaataaattatcaagaagtgaaaagacagcctgtagaatgagagaaaatatttacaaattatgcttctgataagggtctagtatccaaaatgtatagaagctgggtgcggtggctcatgcctgtaataccagcactttgggaggctgagacgggtggatcgcccgagcccaggaattcaagactagcctgggcaacataatgagaccccatctgttta

SEQ ID NO: 199509 - DNA, 468 bp, Homo sapiens
tatgaagtccaatttaccaaattttgcttatgagaattgtgcttttgttgtgatagctaagaaatctttgtctaatccaaggtttcaaaagttgttttttcctgttttcttctaggagctttataattttaggttttaccattaggtctattaacgttttttagttaatttttgcatatggtgtgagatatggatcaaattaattttttttgtaaatagacattcaacttttcctgcatcattttgaaaatattatcccttttccactgaattgcctttacaactttacaaaaatcagctgtccatatatgtgtgggtctatttctgaattgcatatccagttctattcatctacagttggtcctctatatccatgggttctgcatctgcagattcaaccaatggcagatcaaaatattctggaaaaaaataataaaaaataatttgtatacattgattttgtatgct

SEQ ID NO: 199510 - DNA, 412 bp, Homo sapiens
gacaaagattgtctctatcctgtgtatacaatgtgattatttgatacatgtatatacattgtggactgatgatgacagtcaggctcacatgttcaccacccacgcggtccgtcagagcctcagaacttgttcatcttataactgaaagttcgtaccctttgactaacatctccccatcgtccctaatggcccagcccctggaaacccccattctaccctctgcttccgtgagttccacttttttagatgcaacatgtgagatttaaaaaaatatccagtgaaggctgtcgatgggacattgatgaacctgggggctatgtgagctctgggctggcgcctacccctcccacccaaggaatctctgcttcccgggctgtgccctcctgtgtgatctgaagtagggaagtggtat

SEQ ID NO: 199511 - DNA, 2038 bp, Homo sapiens
  misc_feature (3)..(4): n is a, c, g, or t
  misc_feature (6)..(7): n is a, c, g, or t
  misc_feature (1540)..(1540): n is a, c, g, or t
  misc_feature (1671)..(1671): n is a, c, g, or t
ggnngnngcagggctgaagttgggaccgcgcacagaccgcccctgcagtccagcccgaaatgctgccgccaggcagcaacggcaccgcgtacccggggcagttcgctctataccagcagctggcgcaggggaacgccgtggggggctcggcgggggcaccgccactggggccctcacaggtggtcaccgcctgcctgctgaccctactcatcatctggaccctgctgggcaacgtgctggtgtgcgcagccatcgtgcggagccgccacctgcgcgccaacatgaccaacgtcttcatcgtgtctctggccgtgtcagaccttttcgtggcgctgctggtcatgccctggaaggcagtcgccgaggtggccggttactggccctttggagcgttctgcgacgtctgggtggccttcgacatcatgtgctccactgcctccatcctgaacctgtgcgtcatcagcgtggaccgctactgggccatctccaggcccttccgctacaagcgcaagatgactcagcgcatggccttggtcatggtcggcctggcatggaccttgtccatcctcatctccttcattccggtccagctcaactggcacagggaccaggcggcctcttggggcgggctggacctgccaaacaacctggccaactggacgccctgggaggaggacttttgggagcccgacgtgaatgcagagaactgtgactccagcctgaatcgaacctacgccatctcttcctcgctcatcagcttctacatccccgttgccatcatgatcgtgacctacacgcgcatctaccgcatcgcccaggtgcagatccgcaggatttcctccctggagagggccgcagagcacgcgcagagctgccggagcagcgcagcctgcgcgcccgacaccagcctgcgcgcttccatcaagaaggagaccaaggttctcaagaccctgtcggtgatcatgggggtcttcgtgtgttgctggctgcccttcttcatccttaactgcatggtccctttctgcagtggacaccctgaaggccctccggccggcttcccctgcgtcagtgagaccaccttcgacgtcttcgtctggttcggctgggctaactcctcactcaaccccgtcatctatgccttcaacgccgactttcagaaggtgtttgcccagctgctggggtgcagccacttctgctcccgcacgccggtggagacggtgaacatcagcaatgagctcatctcctacaaccaagacatcgtcttccacaaggaaatcgcagctgcctacatccacatgatgcccaacgccgttacccccggcaaccgggaggtggacaacgacgaggaggagggtcctttcgatcgcatgttccagatctatcagacgtccccagatggtgaccctgttgctgagtctgtctgggagctggactgcgagggggagatttctttagacaaaataacacctttcaccccgaatggattccattaaactgcattaagaaaccccctcatggatctgcataaccgcacagacantgacaagcacgcacacacacgcaaatacatgcctttccagtgctgctccctttatcatgtgtttctgtgtagtagctcgtgtgcttagaaacctcaccccattgattggtagttcgaagaattggcagaancagttgcaataaactcagtcaaatgtacccagcctaccagagatggaccaacgatcctatgagagaagagagtatggtgctgggtccttaaaaaaaaaaatgatacttggtccttaaaaaatatgctctcccctccctttttaaacaaatggcttgttcagtcacttgtttgtgtttgaattgatttttaaacagcaggttgtgtgtgtgtgcagtgatgtggtgggagcacagctttcctgggtctggattcccgtggctttgtgcttatgtcatttcttctctctgtgctggtgggggcctctttaccatagcttaagaagtatccctgatttattctggtgtctaataaacacagattatttgt

SEQ ID NO: 199512 - DNA, 200 bp, Homo sapiens
gcgtcatacacatttaacatttgattgtacatgcaatggttccaggacaagttcttaacaatgaagcttggcctcagaatggtcacaaattgtattttagtcttttgctctgggacgcctaactgagtgggattatctatgtctttatttaaataattttcattaaatgtttttattttctatgatgggggctaaggaag

SEQ ID NO: 199513 - DNA, 336 bp, Homo sapiens
catatgcattctggcgaccatcactacggactctgacctttgaagatatccctggaattcccaagcaagatgacactctcaccagtgccatgacagttgataatcaccatgacaacaactggaagaagtcataaaaggaaaaaaggaagacagcactactggttcagagaagtttaccaccctattctggaaaaggcatgaatattgctccctttgcttttactgtacaaacccttcattaaagagactctatattttaacctcgtcatccttcactagttgagaagttgatttgcaagccacattcccacttctctattccacctgctattgaat

SEQ ID NO: 199514 - DNA, 297 bp, Homo sapiens
caggagtgctttggagagacagtaatttgcttgtatggaattttgcccaagagacctcattacagtttctaatcttttgatgttatcatccatcactgtccttgtcaaatagtttggaataggtatgatgatcacaataacatcaagcataatatttcattaattctcagaattagagaagatgatgtggtgatggaagaagaggtcagagagggagatttgaagatgttgcagttctggccttcaagatggagtcaggggctatcttcaaggtgagtcaaggaatggggtggcttc

SEQ ID NO: 199515 - DNA, 165 bp, Homo sapiens
tccaggaagagagactgactgggcaacatgttattcagaattagagaagatgatgtggtgatggaagaagaggtcagagagggagatttgaagatgttgcagttctggccttcaagatggagtcaggggctatcttcaaggtgagtcaaggaatggggtggcttc

SEQ ID NO: 199516 - DNA, 559 bp, Homo sapiens
gtgattccatgacactttgtttgtggcctgtcccttgtttccttgctaagtagttctttttatggtgtgaccctcaggaaggttaagtcaggagttcaggagcatcagagttctctagaaatgtgcctacttgttacctggaatacctggtctctaaacaaaccaacaaaaaatccacgtggcttttccacatgatggtgcagactggaagaggatgttatattggactcgttattggggaaatgaatgagcgggagaaaatgtgaatgacgggcaagaaggtggtctttctccctcagaagtcctaattcagctctggagttcatggaaatccgcaacttcagagtgtggcctaaggattattttgttggtcagcctttccaagaaagtgtgtgttctctcaatctctgtggattttctcattttttagcaaatcagtgagataagcataaataggaaggaagataccccaggtttaagaatcaccaatatcattaggcattggcatcattattagaattctgaattatagaataaaaggtacaacaaaaatttcaaa

SEQ ID NO: 199517 - DNA, 498 bp, Homo sapiens
tttctgaggcgaagtctcgctctgttgcccaggctggagtgcagtggtgcaatctcagctcactgcaagctccacctcctgggtccatgccatccccctgcctcagcctcctgagtagctgggactacaggcgccctccaccacacccggttaattttttttgaatttatttttagtagagacggggtttcaccgtgttagctaggatggtctcgatctcctgacctcgtgatccgcccgcctcggcctcccaaagtgctaggattacaggcatgagccaccgcggccggctccatatatgaatttttaaaagactgcctttgaagtgctcccaaaggagagtgaagataaacacaaatgtatatcattaggacatgtataatgtatcaaagcctcaaatggtatgggactgaggtggtactgttagaagaatctgcctgtgcttgtggaagggacatcacagaggaaaaagatacatatgtaagttaggatttaaaa

SEQ ID NO: 199518 - DNA, 489 bp, Homo sapiens
tgccctttatatactatttactgggttgtataagttagcatctctcagtgaaaaatatttgttaactgtttggtttaagctttgaatattgacctcctgctggtatatagttgataattaattctgaaaaaacagaagtccattattcttagctgtaggaggcaagaaagagtgtgccatccttggtaagagagtctttcaagagttgcccaaatttacttcttcttctggtaatacctatagagtagatcgtgttagagaaaaaaagcctcagaaggggctatttttggatcaaacacattagcttttctttctcacatggtgataatacaaacaaaggctcctgccagaagcacctccatggctgtctgcatattgggtttctcaacagcaaatagcatgtctctcaatatgagagcagatttatttcagaccccagtgtgaggcatcacagtagggaataccttgcacaattcccacttttaaatg

SEQ ID NO: 199519 - DNA, 454 bp, Homo sapiens
aaataaatgaacaataatcaccaaaatttttccctaaacctgtgttatagtcttaaaaacattttttcccctatggaggcttttggtaataaaacacaaattgagggattttaattaaaagaaatttttttttcaagaactggtcatgtactaaattgcttataatcaaataatcaagtagcatttcttttattataagagcaaaacctataattaagccaaaattcaaatttgtttttaaaggttgaataatcttttgttttggccaatagtatgtggattttttttttaagtattatctctttgtagtattttctaatggataggaaatgcctttctcaggttgaatgattatttccacatagaattagttcctgcttacaacagtgctccactaatgtaatggctcggtgaattggctttataattcattaatcatagctcacattgagct

SEQ ID NO: 199520 - DNA, 340 bp, Homo sapiens
aggtagatgatttcctttaagctctggaaaaggttggtggtaaaaagaaaacccaatgtctactttcttgagaatactaatctagtttcctaaagcaccactacttatttctttttcattttgcattgcactgttttaagaacagagggagtataaaaccgaggttagaagcaaaagacaggaaaatattttatttataaagctaaatatttaaatacaaacgtatatggaaaataattcctttgctgtgaaatttcaatgagaagctggtaacaagcaaatgagaccgtgctctttcattataatctactggtctttaaattcaacttgtgtctcataa

SEQ ID NO: 199521 - DNA, 689 bp, Homo sapiens
tgcctctgcagcgggtcccaggggtcggggcctggaagggtccctgggaatgctccgcgccgagaaggctctgtggtttctcctcccccacacgtctccctctcctcccctcttcccggggacctcagaggtggcggggaagtgggaagggaggcgggcttgcagaccgtgcaggctggggagccggagctcgggagttgggggagtccgagtgagaacggaagcgcgtggacgcgatggaaggggccgggggaaagggggacggcactggggagggctggggtgcggggcaggcgacagtcccttcccctccgagcggcgcgggggacctcttccccggggaacccccacccagccgttcccaacctcgagaacaaagggtctgggaagcacggtcggggtcggggagcggaggtggagggaggcaggaaggcaggcggtgggggcaggggagggcgcctccccacgtttcctctcgcggccgaatgatggaaagctccctccagcaaacgcctcactgaggccgcttctgaatccgggagggttcgggttcgttacctaacggctgcacttcgctcccttcctcccccagcgtccccaccccctccggggaccggggccccggagctgccaggcccgctgcacgcggcggcgcgggagaaaccacggggcagcagcgccccctgcag

SEQ ID NO: 199522 - DNA, 413 bp, Homo sapiens
tttggttctcccttaaattttgtgatagaaaagttgctcacttacctcttcctagccctgctcttgggttcactgttcccctggaaactttaccccctggaagggattaggcttgagacagaagatgggtaattaacaccttactggacattataggattcacagaaaatgggctttcatttaactctggatactatctaatcagctatatagagtgttgctacaatgattgctactgcggttatgtcttctgtcatgatagccactctcatttacatgagtcttaattcctgacccccaacatcttgatgttaatttgatatcctacaaagacattactgttaatggtacatttgttttcagaacaagccatatatcacagatgagtggcagtggaaacaaggagtagtggc

SEQ ID NO: 199523 - DNA, 329 bp, Homo sapiens
ctgggattcacatgctgaacgacattcatcctcaaatcatccttaaatctaggtggagtggctggagaacacatgtgtgccctgtgcatgcctgtcaataactgatgtgtcctgcatggaatgtgtccaggctgagggctaggctcctttgttctgttatttgtcctagacattgcattgtaaggaattagcccatgagagctgtgactatgtttgttttactcactactaaatcccttaagtctaaaatggttcctggcatgtggcagaggcttaaaaaattgttgaatgaatgaattttgtagataaaaatttcttctcaccaatat

SEQ ID NO: 199524 - DNA, 256 bp, Homo sapiens
cgagccatgatggagcctgcactccagcgtggttgacagagcgagaccttgtctcagaaaaaaaaaaaattctaatatttcagtctctaatacattttgttaattgtagccatccatgcactagcgaagaggaaagagtaaggcttatcctgttgaactgaccagagtgtggccagttggaagactgatcatcaaggtcagaattgtacctatcttataactggctgattgcacacagtgttctgtgaataataat

SEQ ID NO: 199525 - DNA, 274 bp, Homo sapiens
ggatgctttttgttaaaagggaaaccttatcaaggactctgttaccctcactacctgcctaaataatttctttctagctcctgtatcaacatcacttttattgtcattcttaccagactttatttgatggaggatgtgctaattcccttaaaagaaagcaaaatgaatattggtttaccaaaaataactacaagggcccttattgaataacattgagtatatgtttaaaaagcatttttatgatattgacaaatatttaaatgctagaatgttt

SEQ ID NO: 199526 - DNA, 581 bp, Homo sapiens
ctggcaaggactattacatgtagactggcatcggatgcagtccctagaaaataccccaaataggagagacttctatttctggcagttaggcagactagattactggaaagaccctcccaccgggaaaaaccctaaaatgtatagtaagattttttaaaatatttttaatgacatcaataactactcaattagcaaagaatactcataaatcaatgattaagtgaaagaggaaactcagagaaggggtagcatattgaaggtggctttccccttaaggatatttggtgaaccgaataaattctaataactgttcgcacagctttcccaaccataaggaatacaaggaagtccaaggctcctgtgcagtatctaataggagaccctccccatacgagcctgaaacctcaaaaggctaaactctcagtgtaaagatgaacaaaaaatactccccactagaaaactacaaggaaaactgactatctcaaaacatagtgctgggtagggccaggggaatttccctctgagaattcataacaataaaccatccctcacgtgagtttacaacccagtttgattgtatc

SEQ ID NO: 199527 - DNA, 374 bp, Homo sapiens
taacccaccttatctctaatattatctttagtaagtagaattaatgttctcatattaagtgaaaacactgaatttttaagattccctggcacctggtgatagttcaatactgtttgcaaaagaggatatgaagaaatgatgtatgtattgtcttttctagttttgcagtcaggttttatttttcctgactagccatcaacagaatcttctgacctatgcagcatgagaccaaagcccagaaaacagctcttggtcctaaaaccttggcagtctctctcttgcaactacatggctgcccattcaatttggtgccttttcctgtgtgttagtttctgcctgctatgctagggagtggctggtctttttttctgcta

SEQ ID NO: 199528 - DNA, 444 bp, Homo sapiens
ataaaatataaattctacacaaagggattttatccaattcgataatttcagacaatgtttcaacattaacaatttagtaaagaccagttgtaaaactaaaagtacgtaatccctaaatctttctttgtcagattaagaattttatatctaataaaagtgtgaagctggatgccatggctcacacctctaatcccaacactttgggagtctgaaggcaggaggattgcttgagcccagatgtttgagaccagcctgggcaacacagtcagactccatctctacaaagagtaaaaaaaaattagccaggcatggtggctcattcctgtagtaccagctacttgtagggctgaggtgggaggatctcttgaacccagaaagtgactgccatgacctgtaattatgccactgtactccgcctgggcaacagagcgagaccctgtcttt

SEQ ID NO: 199529 - DNA, 679 bp, Homo sapiens
taactgcttttggagaaatccatgttctgacaatccaaggtttcaaatttcattttcttccccaaaatctcttctcttacatgagctgttgcacaagacagaatctcattttttgtgctaatagctccttttgagccattctccatatattttaagcaatataatgtttatgcactctatcgctagttttatacttcaacgaaaaagtacaattctaagactttcctactcaaccacattatgaaatgaaaaaaagtcaattcaatctctgtaagtgaataattttcaaaaagtaattagacattgatttacagtaaatccacttggacatgtagacataattttgacaagatcgtattagatgctttgagttttcatgaaacctagagtgactgactttggaaagtgcacacatgctgtgtgtctggtgggacctgtcccaagcagtccctggcatttgggcagcataaggatcccctgggatgtgtactttacttctcgagttcaactcatgggttgagtcagattaaatcccaagtgagatatgcactcctctattaagctccccatacagcacctaatcatagccacacaatttctaattggatataaacacacactaaacaaaactcattcttcaactttaacttaaagatctaataaaaaatcctaatctgat

SEQ ID NO: 199530 - DNA, 616 bp, Homo sapiens
tgctgacataacattgcaatactacatctttatggtagaataaaagcatgtgccttatacataactttcatagaagatgactgcagagcagatctctgattgtgggaggaacagtgatcttgtttctaagcataaatcacctgaactgctaaattccctgaaatgcaaataaatctcaagaattatttgctaattaaattgatgtttatatatgtagattaatctagatactattgtagtgtctctagctataatacgtgcatgtagataagagttatatatacctgagtatccagtaattttacatggaaaaaagtataaaagattagactgcctatttatgttcctaagatattcgtttcttcctctttgactcatcttttatttactgaatttaattaatgcaatataaaccatttttccccaagttagatatgcagaaaaccaaatcaactgttctgtaaagataaagcaatttcctgaaaatttgtggtaaagctttacaaatgttataaaaatgggccacgctgcatgtcaaaaccacaggaatgtgaagattaaactatacattagagtattgtagtaaatagatcacacagagctaataactagttac

SEQ ID NO: 199531 - DNA, 610 bp, Homo sapiens
ctatcagaaactttactgtttggaattctctgagtaaaaatgaacgtcacacttttgtcaggaagatctaagtcattttgacacagagaactagctttgatttacaacttcagagctttggataaggggttgttaaacacaaaactctgcatctaccctaacttctttcccaggaaataggaccctagttccactctgcagtccagacctgatattgatccctttaacacagttctgtgcttatagtctatcaagatactgcttcatttatcttagttctacccttctccaaaattctgtaattttttctgttacatgagatgcttcacacttctctgatgtgcttgtccttcattgtattcagtcaataaacctaaatttgtcaggctacaggtttgtccctagcgattgagttacacagtttggaagacaccaccgaggtttccaagaccatgggactctactcagtaatttcgcatctgagaccccttcagtctcacacattagaggtttctctgtccccagttgcataggttttacactaaacttccactgggaaaaatctaacctagctgactttatttatcaaatactttatcttatgctcatt

SEQ ID NO: 199532 - DNA, 427 bp, Homo sapiens
ctttttcagccccacatctgaatcctctttcctatgtttggggaatcccccaccttatgaggcagcgcctacctccagatggtgattcaaaagcaaatgactcaaagaagctgggtcctcagaaaatctattctggcaagtgaaagcagcaagcacagcagcttcatccagtttccagagacagtaattctacctacagtgtctagcaccccctgatggtattggcgattcaacctcgtctgtgcctagaatcttgttcctggatgctaacttctcagcctatttctccagccctccaagagattctgtgagccacctaacaccctgttcataagttcctttcccagactcaatttctgttgctcacaactaaaagtcttgactattaccccatttgataaatgtgaaaaaaagctaataactttga

SEQ ID NO: 199533 - DNA, 225 bp, Homo sapiens
aaaatttagtcttggaacagggactgaatcttttttcacagcaactcaaaatgagacaccttttgcattgcaacccagtatacacacacgaaacaaaagtttacaaaacaatacctacccaatatgcacctgatattttcatcctattagataaaaattcttgtcaggacccactatatggctttcaaaattacagtttggaaaaacagcctattgagttgcctg

SEQ ID NO: 199534 - DNA, 464 bp, Homo sapiens
gaggaatggactgggctgcagatcagggcactgcttttataaaaaggctggcacttgcccatatgcaccgttcctgatgtccactggccaccacttgtggccaaccacacacacacacacccttgactaacagaactatttgtgaaataattgttctcattaattgaatattatggttaaatgaaaattgaccaggaaagtagtttttgtttgaagacttacttcaaataaatacctttccagatgtccacattcctgtgtaaattgattataatgatcattattatcttttttacttgaggcatcattctcattttgaacatatctaggttatgttcttgaagggacagtcttttatttgtgttttcttggcacttaatgcatcatatggcccagctaacacttgtaggaagaacatttgtcatttttcaatgaagataaaaaatgtatggtagccttttttt

SEQ ID NO: 199535 - DNA, 199 bp, Homo sapiens
aaggtggcacttgggttctgggctttattccatatgatccccagtaagccatttcagccccaggacttcactttccccatctgtaacctggaggaggggttgtctagaccagtgtttctcaaactacggcttgggatcacccacatcaggatcacctggaatacttccccaaaatgcagatttctaggccttgggctag

SEQ ID NO: 199536 - DNA, 265 bp, Homo sapiens
ctgtaaccactgcctgtcaccccacgtctagacactagcaaacagaacactcaagtttctgctttcctgcttggcagcaacaacagaccaggaagagaatctcttccaaacttctgccttccacatctcctaggtggaacctaattcacatccagctataaaggagtctgggcaatgtagtttttatctttctagcccctgtaatgcaaaaaaatatattagaaaagatttggaatgatgtccagtacagctgatagtatccagc

SEQ ID NO: 199537 - DNA, 279 bp, Homo sapiens
gactccccagtcttcataactgtgagaaatacatttctgttatttataaattacccagtctgtggtattctgttatagcagcacaaaatgggactgagagctacctaacattaagtcctatacaagagtagaagtgggctgcaaaattgactgagcctcctagcaactgaagcaaaaaaggaaacataatcacagttcaatcacagtggccatagataaaaacaagcctgtttctacacatggtatatttagcacatcatttttctgagatttgttggg

SEQ ID NO: 199538 - DNA, 348 bp, Homo sapiens
catcagcctcaggtggcctgcgggtggtcagtggggaattttaagccaaggtctggctcagcaccaacgacaggaactggtctggcctgattgtagaaagggaggtcctatgacactttcacaacatcttcccgaagacagagagtgggtggccgcttccttatcctgccatggccgcctgcttgttttaactctgagtgcatcaggtggccacagggagccccttttgtctgtcggctgggagcacacttaacaaagcttacattcaggaacacatgcccagtagaggtcggaggggtgcgatgttggaaatgagattaaataaatgcctacgtaatattcacagag

SEQ ID NO: 199539 - DNA, 417 bp, Homo sapiens
tcttctgtctcctgccatcatgtaagatgtgcctgcttctcctcctctcatgattgcaagtctcctgaggcctcctcagccatgaagaactgtgagtcaattaaacctctttcttttataaattacccagtcttgggtatttctttgtagcagtgtgaaaacagactaatgcaattaccataatgggctttcaattgatgaacttgcatcactgactcctcaacacgcagctgacttcctactgtaattgttcaccatgcagacatttgtggagccacaagcataaccatcatggtatttaagattcgttctgtatctggatttatgcagtttatgaaaaatcatcaaactgtccttattattggtgtcttttttctgtatatatgttatgcttcaataaaatatttacttaaaatt

SEQ ID NO: 199540 - DNA, 452 bp, Homo sapiens
atgtgggaatggagtatcttaatctctctgaggtcactgactgataggttaagtgtcagctgggctcagcccaaacattagatgttgctgggaaggtattttgtaactatgattaacatttacaatcagttgactttaagtaaaggggattatcctggctatgggtgggccaaatccaatcaggtgaaggcctgggaaagaagaagaaggaggaagtctgccttaagactgtgacatggaaatcctgcttgagtttcgagcctgccagcctgctgcacagatttcacacttgtttgtccccacagtggcagcagccattattccttaaaataagtctttatatacaatatatttctctccagagaaacaaccaaaaatactattggttctatttcgtggaagaatcctcactgatacactcaccctcaagaagaaaattaacagtttttacc

SEQ ID NO: 199541 - DNA, 159 bp, Homo sapiens
aaagtcagctgtgatgcagcagagcatatatactgacagtctttacttcagtctgtccactttggtggttttttttaagccacctttctcagatgagcagctaatcagaaataaatgcaagttggccaggcacgatggctcacgcctgtaatcccagca

SEQ ID NO: 199542 - DNA, 332 bp, Homo sapiens
gctaatttggatagtcataatactactaattaaacactgactactgatttaaccaaaacctgtgatataattacattttcacacacttgagtctataactttgtaatctacctaatacagaggcatggtctcaattcttacaacttctatagaagcattattagccttatatcctttggagcattaaggttctcttctttaaaaaaaggaattaacgctatgaagattggatcctaaagaagctagcacacaaaatggacccaactatgccatttgaatgaaaaggattccaatgcctggatataaaagcaaaatgtgtttcaaattccact

SEQ ID NO: 199543 - DNA, 443 bp, Homo sapiens
cccgaggatcacccccgcaccacgataaccatcctaactcttcaaagtttccccaagggttctctatacacttcacaatgaaggcagctccaatgatgtgagaaatagaaaagagtcattcaggagcttcttagctgggatcacagttaatcaaatatctaactatgtctctaagaaaccccccacctccaacttaagaaataccagacaacatacttgaatttgttggaaaaaaaaatgcatcttatcctagaaaataaaatggatgggcaatatacaacaggaggaaatatgtcagtcactggtagattctcctataaaaactgtggagtgtttaaggaaaggtttgatttagcatagatcgtgttccatatagttacacacacaagtacaaaaaaagactcactcaaaatacacaccttcagactttttttttttgagtc

SEQ ID NO: 199544 - DNA, 613 bp, Homo sapiens
tcacagcagccctgtgaaggagcactgtgccatcctgtgacagggcagccgggtctcattggcactgggtgctgagggtggtgggtgggcgcaggccttgatgcctgactctgaccttgttctccccggcgtggtctgcaccctgtgaagggtgagtgaacgccctcctggcccagttcagccccaggttgtgcctgttgtccccacatcgttaataattatccatagcgtccccttcactcgcagaagcgtccgagcttagacagcaagttccacggccactccaacctgcggtctcaaacccagggcctgcaactcccgccatgtgccccgttctgcttgtcacccgcctcgccctgaggagcctccagctgcttcaggaattgtccctgtgtcacacatccagggcagttgttcactagcatccccgctacccctgaatccatctccacgtgcgtgggcttggacctgcttctctcgcccacttatctgtgtatctctgagtagtgagacttccacgttagcgctgtggggaagaggctgggcttggctcagctgctgagggatcagccgaccccaggtcgctgcggccctttcaggaggacgttggggg

SEQ ID NO: 199545 - DNA, 569 bp, Homo sapiens
actttcaggacaattagttctagaaggacgcattataaggtgatttcttgttatccttccttgaaacagatagctgcattttgtcaaaaataaattcagatcccaagggggcctaagtttagttcaaaccatcagaaaggaggcgactcaagctgtgtttacaatctggcagtttacttccttcgtatgtagctagcagtgggcaagccttgcacatcggattttaaggttaacagtaagaagcattttctaatctcactgagaatttaaggaaataaaacccttttcttcaacttattcattcttttcttcctatggcaaacactccacagtatttttagtaaagaaatgtgaactagtcagtgtctaaaaaaaaaaaaatcagtaatttgataacgttctgagacataggctctcttttttctagaatcttgtattcttttaggtgactctttgaggaaggaggtcaaaatattgagtgtgagcaatttaaataggagacattgagtaatttaaaaatgagacattcagtacaagactcattcatttaaattacatgaaaatccaag

SEQ ID NO: 199546 - DNA, 294 bp, Homo sapiens
agtctaactaaccccttattttattgataggggaactgagatccagaaaagctatggtttattagtagcaatccccttgtaatctacataaatatactgatgtgactaaaaggtttaaaatactgtatttaatattattaaaaggaagagacaacaaatacacataagaaatgcttcaaaattacaaagaaaaaaattacaaaaaggaactctccgctcagaacagctagtcatctgttctgatgttagtaacaaatagcgaattaaaataaagagttttttaaaaataaatta

SEQ ID NO: 199547 - DNA, 318 bp, Homo sapiens
gacctcctttagtgtggtatctaagcgttcagcaggatggctgattttagtaacaaatttaacaaagagccaggaatttggtctgagaagatggctggcaatattgccaacctataaaggtctagcaatcatcttctgatcagatttataggtctgagaaatggattttcctgaatgagtctgattatcttctcaaaatcctggaatcatattagattcctcattgtcttcactcttcatagccaatcaatcactaaagccctgccaattctacatccaaaacatctttcaaatctcctttccttcacctctagtgac

SEQ ID NO: 199548 - DNA, 370 bp, Homo sapiens
ggacataatataaagaatgtactgctgatcccacagtaagctcaaataactattattagatagctattgttacgataatagaacttagcagatgctgatttacaatccaagtatcaaatctattgactcacaatattagtgaaactgtcaaatagattaaaattattatgtccactgtgtattcttttctagttaggaaattttgcctcggaaaggttgcttagagaattaagagaaacagtttgtcataatggctatcatcaccaagctctgatgcctgatgtattagtcttccctaagaggattaaactgtcatgtcaagcagaatttacttgggttccctttaccctggacacttaacaaactcttc

SEQ ID NO: 199549 - DNA, 428 bp, Homo sapiens
acaggctgttgcgcgtcctgagttcatggagggaggatagcatggacagaaaggttggtgaccacatcctcttctggcctgtccttctccatctgcccctaagtgagggaccaagatgtctagtctaggagacttggttcaccatcagcagtccatagtcaggtagtccacaaccaattacggtagttttagttttggaaaacattgaacttaaaattttttttaaattaggtaaatgtctattcacatgcaaaatatatttttcaatcttcatgatttttaagacattgtataactgaagagtgacttcaaaataaggacttctaaggagatgaagctgacaagaagagaaaataaccaaagagactgataaacatttccaggtcataaaatgaaaatggaaaagcaaggacacacagagggagaga

SEQ ID NO: 199550 - DNA, 439 bp, Homo sapiens
gttcacttctcctgccccagcctcccgaatagctgggactacaggcgcctgccaccacgcccagctaatttttttgtatttttagtagaggtgggttttcaccatgttagccaggatggtcttgatctcctgaccttgtgatctgcccacctcggcctcccaaagtgctgggattacaggcgtgagccaccgcacccggccgcattaatattgttcattatgtatttttttataattaataaatctgattgatgcattattattaactgaagtccatagtttacatgcagattcactctttatgttggacagttctatgggttttgacaaacgtataatgcatttacccacgttatagcatcataaatagcagtttcatcgccttagaaatatcccatgctttctctattcatctcttccccttctggtaaccatgatc

SEQ ID NO: 199551 - DNA, 484 bp, Homo sapiens
aaataaaagccatgtaaaattaaggactaagttgtctagtctgtgctgaaaaacttagtccataaaaaataaaagccatgtaaaattaaggactaagtttttatggaagataattttctctcattataaatttgcttaatgggggaataatatataatgtgtatgccacctatccttgcatacattgaaaatattttagcttagaagtttgtagcatacaattcaatcatttataccataccaattatttcttctttgagaccttgacacagtaaggttatattctaaatatatttttagcaattaaatatcaaatctaacccaattagtctaacacaggagatgcgttcaatcacgtgtttatgtttttctctctatgaaaaagaatataaattggccttttttcactatgcagccattactgtgtttctggactgctcccagtctgtcagctgaacagttctgggtgcagcttgtctgatga

SEQ ID NO: 199552 - DNA, 987 bp, Homo sapiens
ttgagatggagtctcgctctgtcgcccaggctggaatgctgtagcaagatttcggctcactgcaacccccgtctcccgggttcaagcgaatctcctgcctcagccttccgagtagctgggattacaggcaagcaccaccatgcctgctaattttttatttttagtagagatggggtttcatcatgttggccaggctggtctcgaactcctgacctcaagtgatccacctgccttggcctttcaaagtgctgggattacaggcatgagccaccgcacctggcccttctaacgttttttcatcatagtcccaaaaaccaatactttacaagtggttttggaaaggcaccacttttgtggcatgttctggttgggagagggagtcacagttcctactccccccaccagctatgcttctgctctgagaaggtggttatttatacaaacatggacatactcactcccaagggctgatgagatgctgaattttctttgggggcattcattaattgtcccagctgcagcgactggagcaagtctggaagctgcctgtgctaagaccacccagctgtccctgggttctcatcctagggccttctttgcttccaggtcaggggacctgcttcaatgagaaagcaactgaattgaggctaggagaggtagggagagctgagttctgacttcacctgtgcagaactctctgcccccatgttacctggactggaacagactgtgaatatagcagaaggttccagaactctggtgtctgacctagaagaggccagtctctctactggagaaaacgatgtgccgatgccaggtgcagggggccctgtggccctcaggacggggaggccgggtggggagcccggctttctcgggcttcgtgaccacttgggtcttgccggttcctgggtggtcggggccctccgtgtcgccgccgcggtgcggggcccccttgtcgccgcccgggttgagcgggggctccct

SEQ ID NO: 199553 - DNA, 339 bp, Homo sapiens
ggattacatatgtgtgtattcagaaagtaaatttgtttttcttggccttttaaaaaatgtttttattagatatcataactatttttcattttattacatgtttttatctgaagatttcaaatctcctgtagatacctacccattatctagaaggattaggtaaggttatttacctgtaaaacatgtaacacaaagaatccttccttttgttctttggggttaataagagtgtcattattaatgttgatttctttctttcttgcatttttgtctcctcttccattactctggctaagattttctttatgatcaacaatattttgaaattgctcttaaact

SEQ ID NO: 199554 - DNA, 308 bp, Homo sapiens
acagaaagtctactgggattctaaatgttattgtagtacatctatagattaatttggtgtgaaatgaaatcttagcaatattgatctttgagcttctaagcacagcatgtctctacattcccctaccatctcaggacttctgattagaatgctatgttgggtgatccccaagactaacgccccgttcagtgatgaactgggatacttcacaagactcagcatgtagttttacaaatggctatgaattgttacggcaaaataatacataacacaatcagaaaaggtaaactacctatggggcgaaggcc

SEQ ID NO: 199555 - DNA, 309 bp, Homo sapiens
ccaccacatccggctaattttttgtatttttagtggatgaggtttcaccatgttggccaggctggtcttgaactcctgacctcaagtgatccgcctgtgtcagcttcccaaagtgctgggattgcaggcatgagccaccatgcctggtctaggaatttctttatagtagtgcaagaacagactaatacagcttctatgtgcaacaaattgtaggaaagtaagtatatggaggaaactagtggaagatgtggattatttaatcagttttattatgcagactcaagttattacaatcttcagtgataagag

SEQ ID NO: 199556 - DNA, 271 bp, Homo sapiens
tgttataatcagaatgcttcagatcattgcaaaagagctgggttttgttttttgtggatgggccaaactaatttattatgagacagaaactatggattcacatgtttttatataaattaaggtattgttgacaaataaaaattgtatatatttactgcatacaatcagaggtttacatatatgtgtaccttgtggaatggttaaatcgagctattacgcatatgtatcacttcacatactttttttttttttttccctttctggagcaaga

SEQ ID NO: 199557 - DNA, 217 bp, Homo sapiens
caagagtctagattaacttctctccttcctagtcatggtcactccttcattcactgaagactttggcagtggtttccactcttcgtctctaccccaattcccatcatcttagggtcaccctggtgacttcgaagtgcacatgggtagccccttcaacactgcatggccacagtttatcacctcatctctaacaaccttcttttccatgtcactttac

SEQ ID NO: 199558 - DNA, 368 bp, Homo sapiens
ttaaaggctataaaatagcagttacgtaggatgaacaagtttagagatctaaggtacaatatgagtactaaagttaataaaattgtactgtattgatggcagcagtggcccatctggagtggctgctgccatgatgctggttgcagtgtgggaggctctgctggggctgcatgttccatggagccagcaagggctggaagcaggcaggagccccactcttctgggcacagctgcagctacccaagttgcggctgcagacctgggcatctctgcactctcgggggcctgggaaggctcccgtgcccctgcaggctcagggtgtctgcttccaatgtctggactctcactgctcctggtgcctgctctga

SEQ ID NO: 199559 - DNA, 408 bp, Homo sapiens
ccaattctttctcctcttctgtccactgtatgattattattagttccaaatctttgggagtgtcattcaaacatgtttttatgattataccatcttgctgttgtactatgtaacacagacatagattgaggtatgggagaagttatcagtgaatcagacatttcactcaactaatattttttgagcacctactaagtagtataggatcataggcccacagggcttagaacagtctaggccagcgctaccaatagaacattggctgtggtggaatgttctgtatctcagttgtctaatgtgtcagtcattagctacatgtagttattggacccttaaaatgtgatgtgaaagaaaatatattaactcttggaggccaggatcgtggcggctcacacctgtaatctcaca

SEQ ID NO: 199560 - DNA, 2199 bp, Homo sapiens
  misc_feature (2)..(2): n is a, c, g, or t
  misc_feature (6)..(6): n is a, c, g, or t
  misc_feature (8)..(8): n is a, c, g, or t
  misc_feature (994)..(994): n is a, c, g, or t
  misc_feature (997)..(997): n is a, c, g, or t
  misc_feature (1014)..(1014): n is a, c, g, or t
  misc_feature (1023)..(1024): n is a, c, g, or t
gncacngncctcactgaagtgaatatgaataataatacaagtaattattatcgtattggattttggaaagttggatggtgatattcctttggcatgcgagactattaatatgactcgtgctggaaaaagtcactcatgttttctctgggcttggattcctcattccttcattcaatgaacatttgctccgcagttacttgtgcgaggcactctaaccggagactgaaggtatagagcaagcttgtccaacccgtggctcactaaccgcgtgcggcccaggacagctttgaatgccgcccaacacaaatttgtaaatgttcttaaaacattatgagaggttttttttttgcgctttttttttttttctcatcagctatcattagagttagtgtattttatgtgtggcccaagacagttctcccagtgtggctcagggaagccaaaagatcggacgcatggtatagagaaaaacaagaagcatccctccatagcgtatgccccacaagagacaatttcccagagaccagtagctgaggcaggtgtaggaagtgaatgggccattagatggatgcctgtggaagctaaagaaggcggatcggaggaagacaatccgacctggggagtggaggagagagggggagaaggtggcatcgacttggattttttaagattgagtcatttggggcacttggaaatgggcattctgggtagaaggttcagtattaacaaaaacaaaacaatactcttgagtgggaagaataatggatagtttgatttgcctagaatgtagagattaataaggatgccaggattctagggcgggggacaagatggggagtcagtggtgggaagccctggaagattccaagcaaggcatgacagtgctgtggcagcggatagttaatttggccaaggagtggaccctcctttgtagcgtgagagtgttggaccaaggatctttgcagcactgagagtctatgaattagccaatctnggnatacagggcttcatggnaacatcacnntgtaggaggattatggatggaaagtgcagctggaatgggaaaaggtcgaaacctaattagaagccttgggccaggggtagcctgtgatcacctgcgattgtgtttcagacttccagtaacattcttgggagtagttgttaaaaaagtgctcttcgtgtttctgtaacttgggtggcctcttaggcatgagcagacgttcagcctgtccctatcggcagggaacatttatttattttgatgcatccccagggaccaacagagagctataaagacagcagcctgttttgccagttggccagttgaaatgggaaatttcttatacaaagattacagacttaaccttcatgccactctttattataaactgttcatacagttctttgcagatggactcaaaatgaagcatttttttaccttaaagattgtagtagaggatgttataaatgtgtctttaattggttctgtgttttctcatacttatgaagcactgcattacacaatttgtctgaatgaaattggtagatgtggtccatgtaaaacttacccaatcagacaggttacagatatttgcctaaaatctgagcctgggcaccttagagatattctaacctcacccggaaactccgcaactggaaaggtgcagggattctggagcgaggttccacttcacattatcttctggttctgcatatgaatatttaaaaacttcctgtggtgttatatgaaatatgtatttgcatgcttttgcagctgctccatctaatagtatttgagaaggggaaaaaatgaaatgttgcttagtagaaattcctttggttaatgatgttaatcaatggtataaaaaaggagcatgaactctggaataagaagggacacctgaaattgaattccagttgtgtcgcttactacctgtgcgactttaggtctggcacttaactcatctgagtctcagtttcctcatctgtaaaatggtcaccacaataatcagctcgcagtctaacagaacaacctgtcaccactagaatcccacttgttggccttttatagccacacctacttccctcccactgcctcctccacttccttaactcatagcaaccactgtgtgttcactatctttttaaataattgtatcatttcaagaatgttataaaaatggaatgatatagtgtgtg

SEQ ID NO: 199561 - DNA, 333 bp, Homo sapiens
taaggacattttcctgctgcagataactagccagagcccatccttttgtttcccgtaaggaatacttttagtaaatcttatcactggcttgctgtcaataaatatgtgggtaaatctctgttcaaggctctcagctctgaaggctgtaagacccctgatttcccacttcacatgctgtatttctgtgtgtgtgtctttaattcctccagcaccgctgggttagggtctccacaaccgagctggtctcagcagtaaatattgaaaaggaatagatacaattgtcattatttacagatagaatttccaaacaattcccagggaataaactgaaaa

SEQ ID NO: 199562 - DNA, 707 bp, Homo sapiens
tggaaagaatctgaagtcgttaactccttttaggtcctgtgagatggcaggcattccagcattacatctgactgatgcggctatgggcctagactgagatctgaaacaggctgttagggaaattctggtcaatcttgaagtctcaacctctttgctctctaaattgtccaccatcaacgaaccccctccaaggtttgctggaaacactgttagcctgtaagtagcagatactccctcctctgtttggtccagtaacctgtaatgtcactattctttttacttcttgttgccgctcccctcctctcccaagctcctcaaaagccaaacataaaacttccagaaatacaggtctagaaacatactcttactagtaaatccaaccctaagtctattttcttgactcttccattactgttaagatcttaaataagtaagactatgggcaagtcgttctaagaaggggtttgtgctagttttcctcctcatgctttcttgcctggtcacgtacttaactacctaaaagtttagctatggctactttctttctcacagaaattaaattattaaagcatttagcctttaacttcatcatagtattatttcattagcagtatttctacatttcttttactcacttctgtgtaaacactagtctctgtttcttacagatttatgctataggaggcgcagcatgggattcaaaggaa

SEQ ID NO: 199563 - DNA, 480 bp, Homo sapiens
aggtcttcatgcggctgtcaaagagccactccctggtcttcctgacgaagtctcccctgccccatcattcttggtcccatgcagtatctgaagttatccgagtcacttttctttctttctctttctctctctttctttctttctctttctttctttctttctttctttctttctttctttctttctttctttctttctttccttccttccttccttccttcctcctctctgtctctttcttttttttttttgagattttttttttgagatggagtctcactctgtcacccaggctggagtacagtggcacaatctcagctcactgcaacctccgcctcccagattccagtgattctcctgtctcagtctcccaagtagctgggattataggcgtgcaccaccacacccagttgatttttgtatttttagtagagacggggtttcaccatgttggccaggctggtctcaaactcctgacct

SEQ ID NO: 199564 - DNA, 272 bp, Homo sapiens
aacatacttcctgtacagattagcatggactctggtactgaatatattgctactgagttgataaatgctttttttttcaatatccattagtgatggcatcaaagtactgtagtctttccatggcaaggactacagtacaccttcaacataatagctttagggctatgttaattttcttgtcataatctagtcctcaaggaacttgattgccttgacattctgcagaacatcacatgggtccattatcttgatgttataataattgcatgggg

SEQ ID NO: 199565 - DNA, 157 bp, Homo sapiens
ataaatgtagtctcagataataggaatgagtggatgaaaggggctgaatatgagagaagaattgatcatgttatagtgaccagcttcaaatttccgaactgaaataatattatgagtgaactgttttaaatcccacccagtgatgttgaaaatagta

SEQ ID NO: 199566 - DNA, 385 bp, Homo sapiens
atttcatgaacctcttccctgggaaaccttatgactcaacagtcaaaggtgtccgaatagtaaagatggttttcagtgatcaggtctgtgcccatgcctggccttggatagactctgaaatgagattctttgtttgattgatggggtgatggtttctgttgtgtacatttgaaggaaaccagtttccccacccaaaatttctaaggagtttaatctttggggtataggggagttaaactacactgagtcaaggaagtaattgattgcatatttcctctaaaagtcagctatggacttgatattgactaaaacaaactagcagttctcttccaccaccaagtcagagcgtctgttcaccattctgcatgattaaaagaacaactaa

SEQ ID NO: 199567 - DNA, 431 bp, Homo sapiens
  misc_feature (27)..(27): n is a, c, g, or t
tcttccgtacccccctaccatctcttntaaatcaaagaaagattaatatatggggactttggcctcaacttaggaactaaacttaaaaaggagtgtcagctggccaggtgcaatggctcgtacctgtaatcctggcactttgggaggctgaggcgggaagatcagttgaacccatgagtttgagaccagcctgagcaacacagcaagactgtgtctctaataataataataaaaagaaagaagaaaagaacgaaagaaagaaagagaacagaaagaaaactgggcatggtggcatatgcctgtagtcccagttgctcaggaggctgagcaggactattgcttgagcccaggaatttgaggctgcacacttcagcaacagaatgagactccgtgtctacaaaagaagaaaaagaaggccttctcccttttta

SEQ ID NO: 199568 - DNA, 613 bp, Homo sapiens
aagcgctaatccgtaccaacaaggaaagatccccaagacatactgttaaggacaaaatagtacacaacaggttagataatgatttacctttcatgtaaaagaacgtggaggggtaagaacatatgttcatatctccttttatttacataaagaaacactgcacagatatataaggaactattaagagtgacacccacaataaggagcaggggttctacagggtggaccagacaggagtggaaataatactcgtcaacatatgcctttcaaaaaaattttttttcatattttaaatttacctttactacctatttatttggttcaaggctccatttcgtccactttgggactaggtaatcaggctttaaactacttacctctgcctgtcagaagtcactaacctcatgacaggaataatttaggttagaggagtagcaaaactattactcaactgtttctttagaaaaggagaaactcataaaacatgggaccctaaaatttgaatattatatgtaagacggggttaaaatgtgttcaaatagtgtcttctaaaaatgtacaaacaacagaggtgtgacagtatgctgaaaaaaatatgaggggggtggaagag

SEQ ID NO: 199569 - DNA, 586 bp, Homo sapiens
gcttataacaccccttggcatacctcttcactaccccagaggtagagttaacacagagtaatctcagagagtaacagaaacctaaggcaatctgggcatgtttcctctgtgcaaccaaaaagaaactaagtagcactgctatcatttattaactacttactattctttcattaatcaaatatttactgagagccaactatgtgctagccattgtaaatggtgaagatggaacaactaaacaaaaagacaagtcccttctttcacaagcttgagtctagttacaatgaagaaaattaaagtgcaactacacatttcatgcatagataggtagaatatacatatcttctaatcaaattgctttcacacaacatatataacttaaaatcctctattttcatttaatatgacattgtaaactctcatctccttccttccattataaatgcatggttatggccgggcatggtggctcacacctgtaatcccagcactttgggaggccgaggcagacggatcacctgaggtcaggagtttgagaccagcctggccaacatggtgaaaccccatctcttctaaaaatacaaaa

SEQ ID NO: 199570 - DNA, 512 bp, Homo sapiens
ccatattgatgccgaacttagtgcggacacccgatcggcatagcgcactacagcccagaactcctgagctcaagcgatcctcctgcctcagcctcccaagtagctggcactacaggtgcctaccaccatgcctagtgcctcatggaaatttgaaaatgtgtttaaatcactcttgttggatataatttttaaaagatggtgatagaaatgtaaaatggtgaagtcatggtggaaaacaggtagttcctcagaaactttcagcatatgccatatgaccaagcaattccactcctacatataaacccagaagaactgaaaacatgttcacataaaaacatatacatgctgtggaaaaacagtactgcaggtcctaaaaaaattaaacacaaattaccatatgatcaacaatttcgcttctgggtatatacccaaaagaattgaaagcagggactcaagcagatatttatacatccacattcatagcagagttattgataatagccgaaaggcag

SEQ ID NO: 199571 - DNA, 230 bp, Homo sapiens
aagtgaaggaatttcacagagctgaagatcaagcgcctgagaaataagtttgcccaaaagatgcttctaaaggcaaggaggaagcttatctatgaaaaagcaaagcactatcacaaggaatatatgcagatgtacagaactgaaattcaaatatcgaggatggcaagaaaagctggcaacttctatgtatctgcagaacccaaattggcgtttgtcatcaggatcggagg

SEQ ID NO: 199572 - DNA, 288 bp, Homo sapiens
gggatgcacaagctacctaagcactactgcgctggcactagtaaagcactgagccaaaaggtccccagaggctgccacatagtctctgcccatcctgagtgaagctgcacacttggctcaaaggccctgctgatccaccgagagggcacaagggggcatgagggaaatggctgaactccaacaaatcactttatgcaggactgaatccccaacacacatcagaggagacaattaaacgagggagagtggacttaaaggtaaaatgtcatcccccaacatgcctgtgat

SEQ ID NO: 199573 - DNA, 193 bp, Homo sapiens
tttcaaggaacctcagactgttttccacaatgactgtgttttacattccttccagtggggtgtaagggtcatggtttcttgtttcttcacgtatcttgtaatttttttattgaaagctgaacatttcaaataatttaatgcgataactttggaaaccagattctccctctgccccaggattctgttgttacag

SEQ ID NO: 199574 - DNA, 600 bp, Homo sapiens
ggcaaactgtggaaaaccagaaccagtgccaatgacttaaagtctcagttgagcttgttatatataaagcacaggccagatgcaacaagactaatgaaaacatgctgtgtccagtttaccatcaatgagaaaaatgggagacattcaatctgctttaaattggggccatctcaaatgatatgtaaaacacagagttatggcctaccattcctgagtgacaattcttgactctgtgctgaatattttggtgggatttgtgttgtatttgtattgagctgccctagatggtctcaccatatattcattcatgaaacaaacatttactgggtgcccatgatgtgcatggaactattgtaggagctcagagttagtccttagccctagagagtgaaggggtgacaaagaagaaatacatacatcttgtaacaacacaaactacacaagtcaaaataggctggcttgagaatgatggaggtagggacatgaggatggggaaatctaaggttttccaggaatggcaaggaggtaagccaggatacaggggtgccagggaaaagaaaagaagaacccatcagagaatatagaggtacagattgtgta

SEQ ID NO: 199575 - DNA, 534 bp, Homo sapiens
caagcagtcctccctcttagcctctcaaattgctgggatgacaggcatgagccactatgaccaacccaggctgtcttgattactgtcactttctagtcagtttgaaatcagaaagtgtgagtcctccaactttgttcttcattttcaaggttgttctggctatcacactgccttttatgtcctgatagcagacatcacacaccatcacttctgccacactctattacaagaagtaagttcctaaatccagcccacattctagaagaggagaattaggatccttctcttgaagggaggaatatcaaagaatttgtggacatatttccaagccactgctaatggtaatatactaaacatttggttctgtggcttgctttttcactcaacaatacatcttggagatagttccatatcagtgtataaagagccacctttttcttaacagccacgtaataaacttttctatagatgcatcacaatttaattaatatttatttacaatattttgctataataatgcttcagttaataatg

SEQ ID NO: 199576 - DNA, 346 bp, Homo sapiens
tacctcagagggattagatgacttattttataaaaagcaaccagaacagtgttagctatgattatgaactatcatttcttggtacaaaagttcaaagtgacaagtgacaggtgattataccaaacttaagctattttaaagccatctcatccataaggcagaaattgtcatttaaaggccctttcaaggaaaaaaaaaataccctaattctatatattttaaagtcttgcatttcttaagtactaaacttagaaaacacaaactcaggtacagtcaagatattttggaattgtttgtgaaaaaatgtaacaacagaaccaaaaaagtgatggttctagtcaaagct

SEQ ID NO: 199577 - DNA, 422 bp, Homo sapiens
ccccaacccttctttaacagaagcacgtcgttaggtgcagggtgactaagtagaactggaactgagaacttgaaccagacctcaggttttccagcttctagcccaggcttttatcttgatgactttccgctttggtttcttttctttcttccaccttaaaaaccctaatttatttgtaagtgggttcttactaccaaatgccactgcccttgtccacattgacatctgtgaaaatgttcccgaagagagtaggtgactggttgttgtacctagaattcattgaaaagagctatgggggagatctttgttttgttttaacattttgtaatttgcatctccctgccatgagccattcattccctaaggatccttagctaggtggggagcacgtttgcatagtgccactgcctgaaccgccagca

SEQ ID NO: 199578 - DNA, 404 bp, Homo sapiens
cattggtaataatggaaacgtattcctgccttcagattgtgtttgcattttttttctcatctttgtggtttgaaatagttaaagcatcagccccaaccaatatgcacttgaatttgaaatttgctgtatgatgctgccgcttttcattttttaccatttcacaccttgtccgcatcttgagcaagcttgtaagtttccagtgcatacatttcttgtgatgatatattgtcctggtggaaaatttcatttactggctgtgccctttgctgaacctgttgctagtcagggaacatgataagcgtataagtagcatgctacttcatttatcatacatcgttttagacactcaaatatctcatatacaattctgcattctgcacaaagggaaactacccaactcacag

SEQ ID NO: 199579 - DNA, 450 bp, Homo sapiens
atattaaattaagaataaataaattgagcaagcaagctaacttatgggtggttgggctttggatatccttataaattttgaggacaactagaaatgttcataattatcagatatcacaaggaataagccaacagaagtaagtatctacaaggctaattgtaaagattataggccaggcacagtggctcatgcctgtaatcccagcactttgggaggctgagcctcgcagatcacctgaagtcagtagttcaagacccgtcttggcaacatggtgaaaccccatttctactaaaagtgttctaaaaattagttgggtatggtgacgcatgcctgtaatcccagctactcaggaggctggggcaagagaatcccttgaacacgggaggcggaggtttcagtgagccaagatagcaccactgcactccagcgacagagagagactctgtctca

SEQ ID NO: 199580 - DNA, 436 bp, Homo sapiens
gcaatccagcctgggcaacagtgagactccgtgttaaaatacataaataaaattcagtgccttcctttgaccctttatatatggaaaagtatgtatttgttttactatccctatataactatcatatatgaatgcaaaaacaaacaagatataaaaacaacattctcactgtaccaaaactagaaaaccataacaaccttgaaaaagaaggaaggaagaagaaggaagaaagaagaagaaatctactgaaacaaaatggtggagatcattgcctaaataagtagtttataaaatagtatatctgggccgggcacagtggctcatacctgtaatcccagcactttggaaggccaaggcaggtggctcacctgaagtcaggagtttgagaccagcttaatcaacatggtgaaaccctgtctctactaaaaacacaaca

SEQ ID NO: 199581 - DNA, 444 bp, Homo sapiens
gcacgagagggtgtgagccatcagagattatcagaagtcttaaaacaacagattgctgtgaaaaggagccatttcatggtcttgtaaataagtcattgaaaaaatagttctaggtgagctgcataattggctatcacctaccgctaaatgaattaggatataaaacgtagatggtcgcccagaacactgaaattccctatggtaatcaagacatgggaaatgtaaaggagaaatgaaaagctatggaatgagttagggagtaagtaaggatgtacaaagcatttgtaaagaaaactgtaaacttttccagaagtcttgaataaatggagacgtgatttttctgggcaaaactcagcattataaaaatgtcagttctccctaaattaatgtgtgtattaaatatactcttggtcagaatcccagcaggtttttttttctcttttg

SEQ ID NO: 199582 - DNA, 239 bp, Homo sapiens
tgtgcattttgtgccctgcactattctaggcaggggattgaacagcagtcagagctggcatggtccttgccctcatggactcatactctgttcataacctgtcactaccttctgaacttctcttgtggtgatgaagtgagagcccctgctcagcctcagatggagcaagctacacctgcaccttcccagagtggttttttcttcgtccttgggttgtggaagcagagcatcacacagag

SEQ ID NO: 199583 - DNA, 104 bp, Homo sapiens
ttaacggcctatgctactttttcaggtcatctattctcatatttttgtactatctataccctgacaattcctaaatctacatctttaggccagcctaactgtaa

SEQ ID NO: 199584 - DNA, 488 bp, Homo sapiens
agcttccagcaaattaagccaggccagtatgtgtcacaaataataagacatactgtattggagaaaccaacaggatatatacagtcatatgccatataacaacgttttggtcaacagtagaccacatgggtgggcatggtggctcacgcctataattctagcactttgggaagctgaggtgggtggatcccttgaggtgatcccacgcctggccttaaataggtttcaatacacaaatgcttaccattgtgttatggttgcctataggtagtcagtacagaaatgtgctgtacaggtttgtggcctaggagcaataagctctacgcaacctctacctaggtgtatagtagactataccatctaggtttgtgctatgatgcttacataatgatgaaatcccctaaggacacatttctcagaacatactgatcattagacaatgcatgactgtaggtatatgtgtgtacatgtatataaagagatttatt

SEQ ID NO: 199585 - DNA, 285 bp, Homo sapiens
ttgctaaaaggtaggggaatcctattgaggtgataaagtgttctagacttgtttgtggtgatggttgcacaactctgaatcagtcgggtgccagtaaggtatgtgaatttattagattggtacaaaagtaattgtggtttacaagtggcaaaaccccaattattttcgcaccaacccaatagttcactatagctgttaaaaaaattataaagtatgggaggctgaggtagggagatcacttgagggcaggagtttgagaccagcccggccaacatggtgaaatcc

SEQ ID NO: 199586 - DNA, 431 bp, Homo sapiens
tttttttttttttaaatgaagaaatatacaagcatgtgcttacattttaacaaaattagaatagtttcactacttttgtatgctggtattttcacttctgttatgcagtatgcatcttaatgatactaattttcagcacttttttattaatggaaaattttgagataattgtggattcataggcagttttacaaaataatacagtgagagcccttctacacttagtttggtttcctccagtggtataatttccgaaaactatagtataatattgcaatcaggatattgacattaatacagtctaccaggccaaacatgatggctcatgcctgtaatcctagcagtttggaaggctgaggctggtggatcacttgagcccaggagttcgagaccagcctgagcaacatagcaaaatctcatctctaccaaaa

SEQ ID NO: 199587 - DNA, 245 bp, Homo sapiens
aaagatcccaacagagattctccttcctagagtaaacagcttatggaagcatgcgcaactagaattgttatctggctcaaagctgcccctaagcacacaccattttagcaaacaccattttaaagtccttatcagggcaagggggacttgattttcttcagtgctttgagacagatagggaaaaggagataaaatcaacatgaaaccaaacaatttcttggaagagaaacagatcaggaatctta

SEQ ID NO: 199588 - DNA, 530 bp, Homo sapiens
gctgggcacggtggctcacgcctataatctcagcactttgggaggccaagacaagtggatcacctgaggtcaggagttcaagaccagcctggccaacagtgcaaaaccctgtctctactaaaaatacaaaaattagctgggtgtggtggcgggtgcctgtaattccagctacttgagaggctgaggcacaagaattgcctgaacctgggaggcagaggttgcagtgagccaagatcgcaccactgcaccctatcctcagtgacagagtgagactctgtctcaaatcagtcagtcaatcaatcaatcaatccggaaagctgaagacaagggaaggagacaaaaacaaggacacccaaggaaagtttagcctctgatacctacatttgcagctgcaacagacaataaacacagcctaacttctaaccagatgaacataaaacctcagcttgaaggcctgtgtacctgttcaccctaaaggactatttacctagtacatcatgcctggctttcaacaaaaaacattacaaggc

SEQ ID NO: 199589 - DNA, 295 bp, Homo sapiens
gccttattgttacaaaggtgcacaaagcaaaatatcacaaacattttcaagtagacaagctgatttacaaatccatttaaagctcaaaacatcatgaggcacaaactaagagaaactggatgctaaacactgaagaagctattgtagttctcacagcactatggacttgaactgttagtgttcctagctgctgttcagttcttgggcacaagctattctgctttctaaaactgataagccttacttccccaaacttacagttctattagtctacaagaactttccactagaatgt

SEQ ID NO: 199590 - DNA, 904 bp, Homo sapiens
tgctgggattacaggcctgagccactgcgcccagctggaacatttttgaaatgctgaaagaaaagaactatcaacttggaatcccatacctggtgaaacaatccttcaggaattggggggaagggctgtgggggaggaaatcatgacattcttacatgagggaaaaactaagggaatttgtcactggcagatttactttatagggattactaaaggcaattctctaaacaaagggagtggtaacaaaaggaatcttggaacatcaggcaggaaaaaaggacaaaaagagcaaacatacaggtcaatacaatagattgtctttttcctcttgagtattctaaattatgttcaacagttgaagcaaaaattacgcttgtctaagtggctgtccatatatgtagaggaaatacttaagatagttacattataatgggagagtaaaaggacacagaaaaaggtttctttctttatttgtaatctggtagaactttccagaggtatagaggtaatgtttctacctttcactcaaactggtaaaatgtcaacaccagtagactgtgataagttactgcactccagcctgggcgacagagcgagaccttgcctcaaaaaggaaagaaaaaaaagaaaaaaagaaaagaaaaaggaacacataccaaacttaaatgtgtacgtaccaaacaacagacttgaaaaataagtgaacctggccaggcgcggtggctcatgcctgtaatcacagaagtttgggaggccaaggcaggtggatcacctgagatcaggagttcgagaccagcctggccaacatggtgaaaccccgtctctactaaaaatacaaaaattaggctgggcgtggtggctcacggctgtaaacccagcactatgggaggccgaggtgggtgga

SEQ ID NO: 199591 - DNA, 162 bp, Homo sapiens
gattctttagggcagagacttggtttgtttgagaaatcccatgcctggtgccaggcctgctccagagcacagaggttgggaaaaagctgcaggagaagttgagccctgaaagaaaacccagcatgcccacccctgttacatgatgccctggtgggtgcaagg

SEQ ID NO: 199592 - DNA, 610 bp, Homo sapiens
aataaataatcaacaaccatgctagctgattgctcccgagataagggtcctagaatgaaattgtgaaagtcaatcatctctctcctatggtatgggtagagggcaatggagagacatcgttgctgtgttgaaagtccaggcagagggcttgtgagccagtcagtcccagttgcttgaggagcaggatggaaggtcaatagctattttgcaaaatattccaggagccagaagtatcccaggaaggtttatatttcaaaataacttgagagaagttttaaaattaccttccctcttgattttccattagttctgtggagaaggtaactttatcttcccatttcagaccttgggaaatctgaaggaaattccctgcccctttcaatattatgattaaattttgagtagcttctgtggccgtagatgaaagaggtaggggacctgaagtgggcactgagcacactctcactttctaacactacagagcagtgttcttggctctgtccattccaccctaatattgtggccatgctgtaattggcaatctagtccattgcttttagttgaacgctgggcagctgtatgctagtaaaatggttcttgggttaaaaaa

SEQ ID NO: 199593 - DNA, 1388 bp, Homo sapiens
  misc_feature (1057)..(1057): n is a, c, g, or t
  misc_feature (1127)..(1128): n is a, c, g, or t
  misc_feature (1133)..(1133): n is a, c, g, or t
ggctaaccggtgctttgaaaagcagtccccctctgcattatctctccagctggcagcgtattactatagcctccagatctatgcccgatggcccatgtttcagggacaagtgccatcctctttacagggctgatcccaaagaactaatcaagatggtcaccaggcatgtgactcgacatgagcacgaagcctggcctgaagaccttatttcactgaccaagcagttacactgctacaatgaacgtctcctggatttcactcaggcgcagatccttcagggccttcggaagggtgtggacgtgcagcggtttactgcagatgaccagtataaaagggaaactatccttggtctggcagaaactctagaggaaagcgtctacagcattgctatttctctggcacaacgttacagtgtctcccgctgggaagtttttatgacccatttggagttcctcttcacggacagtggttgtccacactagaaattgaaaatagagcccaagaccttcatctctttgagactttgaagactgatccagaagcctttcaccagcacatggtcaagtatatttaccctactattggtggctttgatcacgaaaggctgcagtattatttcactcttctggaaaactgtggctgtgcagatttggggaactgtgccattaaaccagaaacccacattcgactgctgaagaagtttaaggttgttgcatcaggtcttaattacaaaaagctgacagatgaaaacatgagtcctcttgaagcattggagccagttctttcaagtcaaaatatcttgtctatttccaaacttgttcccaaaatccctgaaaaggatggacagatgctttccccaagctctctgtacaccatctggttacagaagttgttctggactggagaccctcatctcattaaacaagtcccaggctcttcaccggagtggcttcatgcctatgatgtctgcatgaagtactttgatcgtctccacccaggtgacctcatcactgtggtagatgcagttacattttctccaaaagctgtgaccaagctntctgtggaagcccgtaaagagatgactagaaaggtattaagacagtcaaacattttattgagaagccaannaaaanaaactcagaagacgaagctcaagaagctaaggattctaaagttacctatgcagatactttgaatcatctggagaaatcacttgcccactggaaacctgagccaagttcatcctttctctgaagaatagtgagcaggaacactggaaaaataccagtcactctatgatctgtcccgatcagaaaaagagaaattcatgatgaagctgggggtattgggtagatggggaggtctagaatgatttagagtggtaacag

SEQ ID NO: 199594 - DNA, 289 bp, Homo sapiens
aggaatctaaaaggctgggtgattcattcaagttcagaagagtgcgtgccagagaggcaatgcacctacctgctgtctctttcgacggcgtgtaaaaaagaaaaaacatctgactcaaatagcttaaactttaaaaggggcttattagctcacctaattttaaaagatgaaaggtatgctggcttcaatagttccacttagaattttttctcttcctttatctctgttctaacttcaacttcatcttaacactggttcccctactgttcttcagatagctgccagcagc

SEQ ID NO: 199595 - DNA, 736 bp, Homo sapiens
gtccccaccctttgctcccactccaaggaaagtctgttacatttttagccttcagaggtttgatgtagataggaagagatgagggtgacagaaatcagctcttaagtttataaataaaacagggatattatcggggaagcttttgaaatgtaataggttgtaacccacattttgaaagcagtaaggaaataattgctgcttttttcttcttctttattctgttgactttgttgataatattaggtgactacatcgagcctgggttctctcagtattagcctgttattcctaaagtatcatcctctccttgtatcaaatataaggacaaaaatgtcttaggataaaagtctgtttgtttgcattagactatacatgatttgcattacaatgggccgtggatttggatggatgatgaagctgaaacaagggacctaatcatgggatttaactgttcacttcaggtagataagatatttctgggagaagtaaattggatgagcttttgtgcttcccagcagctccaggtcttgtccctggccagtctgggcagctctgcgctcagaggcctttggcacgatgggtcctcccagcaggggctccagcgctcaccgctgggtgagatctacagggctcagtgcgcttggagtcctggattcctccaggactgctactgtattccaattgagtggtggtttgctcttcacagagcgcttacatgggattcttaccttctgac

SEQ ID NO: 199596 - DNA, 330 bp, Homo sapiens
cttgagtttttgaattgagacttatttatgtgaacctattaattatacattctgcttatactaaagatgtctccatgtagatatttttgtcagacttttaatggaacattctcagtatgattcagagaaacatggtatatcatttttatggcagttcatctttggtttatatcattttaattttattccagtgccccagcaattttatttttgtaacactgtatagttaaagaaattatatggtgattttatgcaggaatgatataaggattttcccctataaaccaaactagttcattaataattttagctggtaatattatcaggaac

SEQ ID NO: 199597 - DNA, 528 bp, Homo sapiens
ataacaaacatatctgttccattagtcagggttctccagaaaagcagaatcaatagaatgtacactatagatagacagggaggggatggagggggaaagagaggcgggagggagagggagaaatagagagagggagagagaaagagatttattataaggaattggctcatgcaattgtagaaactgacaagtcccaagatctgcagggtgagtcagcaagctggagacctaggagagtctatagcatgttagttccagtccaaagtctgaaggccttagaaacaggagggctgatgatgtagttcccatccaaaagccagcaagttcaagacccaggaagaaccagtgtttcagttcaagtctgaaggcaggaaaaagccaatgtcccagtttgaaggcagttaggcaagaggaattcgcttttacttaggggagagtcagcctttctcgttctatttaggccatcaactgattggataaggcccacctatattagagagggcaatttgctttactcattctactgat

SEQ ID NO: 199598 - DNA, 562 bp, Homo sapiens
tcgtctcgaggatcccaggcgttgtcagtggagtgtagggacagaagccagaggggagagaaaggagagttgaggaatgtgtgggagtttagtgtgagttggggaaggccagagggtgctagggaccgggagggctgttttaagatgtgaaaaacttgagcatgtttaagatctgatgagaagaacaaagttgagagtgaggctgaagataatagaaggaaggagggataagtagaatgaaatttctgatcagtaaagagtgggtctaaagcacagggagattggttttagatgtgattagtttagattgagtgattctgatgccaaagttgaggacattccattttcttcttagcctaaatgcttgagggtttggctatttctacttctttcctcctatatctttaactgctttaactcactgctgtgttttagagtctttattttactggaatttcttgggtgaaggttactacagatctccaaaaattgccaaatgtagtagatactgaagtccttgtcttggtctttcccttatttgatacaactccacctctgacct

SEQ ID NO: 199599 - DNA, 867 bp, Homo sapiens
ggccaaggcaggtgaatcgcttgaaccccagaggcagagattgcacccagcactttgggaggccgaggcgggcagatcacgaggtcaggagattgagaccatcctggccaacatggtgaaaccccatctctattaaaaatacaaaaattagctgtgcatggtggcgcttgcctgtaatcccagctactcgagaggctgaggcaggagaatcgcttgaaccagggagtcagggttgcagtgagccgagatcgcgccactgcactccagcctggatgacagagcgagactctgtctcaaaaaaataaagcagagcttgtatggtgatgttgggggtagaaagaggaggcagtcaatgaaggcttttaggtaggtggtgatacttgagctgagtcttaagccatgagtagagtttagccagaaagagaggagggagggagggcacttgaagttgaggaagtagaatgtggaaagatactgatttggtattaattaattaattaatgagacagagtctcactctgttacccaggctggagtgcagtggttgtgatcataactcactgcagcctctaattcctgggctcaagtgatccgcttgcttcagcctcctaagtagaggggactacatgtgcatgacactgcatatagctaatataaaaaaaaattttttaggccgggtgcagtggctcacacctgtaatcccagcacttgaaactttgtttcaaaaaaaccaacacaacaataaaaaaaacacgccgggtttttttgcggggggaaaagggttaagggctggtgttgttcccccccctttttgaaaggggaacccggcccatagggggcgttatcaccgtggtttctttttctcaa

SEQ ID NO: 199600 - DNA, 675 bp, Homo sapiens
gctagtaagtcttagcaatgtggctctagagggatggcatgccaaattttttctggtatggattttagagagccccagaaattgttttctctctgagggaatggcctgaacattttacatgtccacacaccaagtgctaaggatgaaattattaggacatcctaggagaatacagggtctggggcaggggccaaagagagaagatgcatttgttcctgactgccagcaagtctaccaatgtgagtggcttctgtcccaatcatatatcagggtcttctatagtcaagctcccttagtgtttaatgacagaaatgtttttagaagggaaatgtgacatgtcagggcttaaagatatcaagaatgtcttccatccaatttccacgtagctggaaaggaaaatggttaagagttaagttactgttctctaaactctcaccatgtggtcctaatcagctgtctgccagtgatggatagaatgaataatctccttcatacttcagccctagaaggagtgcacagccaggatgtagaggggtctatttcccaagaaaaaaactgcgattgcaaacaacatcatcagtgtgtattttaaaccctagaaatatctgtttcccctctttcacatctttatcaaaatgaaaaaataaatccagcaaaacctgaccttgcactagg

SEQ ID NO: 199601 - DNA, 797 bp, Homo sapiens
gatttctaatttagctaagtaggaatacccaatctgagttttaacagactcattatttttggaaaatatatggagttctcaagaaattctcaaaataaaattaatctaatccattttaaacttttacaactcagtctgccatacagcaatttttaaatgacataatcctttagaaatcaagcagtgatcagtgctcaacttgaaaagtgatgggggtggggggaacaggcaaaaaaaaaaaaaatcacagaactttagaagatactgtctatcccaacggctctcaaagtttggccctctgaccagcaacgtcagcattacctggaaacttgtaagaaatatacattagtgggcccaccctagaccttctgagtcagaaactctggggtgcagcccaataatgtgtgttcttcagtgattctgatacacaccaaagtttgagaaccagagttcaatccaaccactccactgatgagaaagaagtgaagccagtaacatcctcaaactcgaacaagttggtgaccttcaaaatgattcttaaactatatacctgaatccaagtagtcccataggatcttctaggcaaaaatacatcctgatcttttgtagcattaattctaatatcattactatctactcagatacaggcaagtatttttgtcatgagtaatttacatttaatacctaaaaaagaagacttcgccaagcgcagtggctcatgcctgtcaaccaacactttgggaggccgagggggtgggtcactggagcctaggagtcaagtcaaccctgggcaacat

SEQ ID NO: 199602 - DNA, 423 bp, Homo sapiens
tgatcagcaactgatatttattcagagactaccaatgtcctctatttctagtgctttacattatttcattcttatagcaatcctaaaaggtagggaactaatattaaatctgcattttacagatgagaaaatgtaaagttaaaatgaaacatctgactctaaggagcttaaaatctagtttgtgagacacaaagacaaatgtattgataaaagtggtatgtgataaaagttgaaaaagtacaacagcaaggagttgtaagtttcatggaggaaaggagatttgtatagtataatacattccagttgaaaaaaagtaggtagtggaaaggattgtgttcacgtcaaaaagctttttctaaatttgctatacagaatgcttataataatggttttactggttagatattacagctaattatgcta

SEQ ID NO: 199603 - DNA, 505 bp, Homo sapiens
aaatttttagtatttaatatgtatcaggcattacactatatctcaaagtattttaaattcaacctttgtctaaatatgtggtctttcagattttataatagtaaaattaacatttcaccaatataactactcattttcaggcaatttattagacatatactcatagtttatcttaaacaattacagatttcagaagatatggtttgggtccttttattcaagtctttcctgtcactttgtcagtcatctcttttcaagccattttcttttaaggaatttgggctgaaatattagactgtactttgaagtaatgactgtaaacttcatgtatgtaactttggttatttcagtgttgtacagattgttaactaattgtgtgtgtgtgtgtgtgtgtgtgtgtacaggtgcacacaggtgcatgctttaaattgttatttaattggattataatgcttacacatattgtaaaatgttaaacataccaagaaggtttgcagtgaagaat

SEQ ID NO: 199604 - DNA, 340 bp, Homo sapiens
ctaagctactgtacattgtaattctccaagaggggagccacggtgtggtgttgtacctcatttgaaatggagttaggccaatctgggttttaattctgtgccactcttgacaaatcacataacatctttgagttctggtttatctgcaaaatgggtctaaaagcacatatctcatggatttgtagtgcacataaaacactcaacaagactatttgcataataacaaatgttaatttaaaatttatgcgtctattttgctttcttgaagttaggggtctatggtgaagtacccacttgcaccagagtaggagtttcttttttttttttttttttttttggt

SEQ ID NO: 199605 - DNA, 328 bp, Homo sapiens
gaataagccagttttagcttatccatgctttccctgttcactcccttatgtaggttaataaaatattaaagtttagtgacaagccgatgtgcctgagcatggctactgaaaaaaaaaattagaaaacaagatatcctgcattttattgcctcattcagcagtgaatggtgagagtgattttctagtggaataaggagatattctgccaatttcgtagtaattaaggttgtttttggaaatgagagccatcaaatcttccctggcagccacagtctctatattctgaacatagcaactctctcattgtcttatatctctatctgggcaa

SEQ ID NO: 199606 - DNA, 411 bp, Homo sapiens
caaactcctagcctcaaggaatattcctgcttcagcctcccaaagtgttgggatttcaggcatgagccaccgtgtccagctcctgagtctctgcatatgctgtttgcccttactcttcttcccctcttgacctaattcagccttcgagtcttagcctagatgtcgcctccaccaggcagccttccctgaacttccttctaccccggctaggacaggttccctctcttgtactaccacaatggtctaagctcataatgtttgtcaattttcctcatccactaggctgtgcgctgcttaagggtggggcctggggcttattcacccttgtaaccccatgctcagtactgtgcctgaccctctgtaaatatttgatgaccatgaacagaccactctgggttgaagtctaggtgg

SEQ ID NO: 199607 - DNA, 428 bp, Homo sapiens
tttttaatactctgcatctttcataaacatgtaaagcacaaagtccttttactttacccctaaatactccatacacaaatgttcttaattttgagaatggggactctgtctcaaaaaaaaaaaaaaaaaaaaaggcattatgagtctactggtcagagttttagcattcttaatctttttaagaggtgaattttaggatttatagaaagaatctgaattattctttgatctcaagtttaaagattttatttgcaggagcatattctgtgttttgattttatgaaaactctagaaataaagtttcaataaaaagcagataattttcacatgcttagaggctgaccgcaaaacaaaatgccaagaacaactagggaattcattgcatggggtgactctcaagcctgtgactaggctcaatggtaaaacac

SEQ ID NO: 199608 - DNA, 520 bp, Homo sapiens
gatgttgcaaaaggtatgatggaatggtaacaaactgggaggaattaggctcgtttgttcagtttcttcttggcatccctgtttgatatttcttccctgggatacagggcaggacagctgttacatgacagccttctgggggaaaaggagggaaaaggccagagagtgaccctccaagtttttatggtctgcttcagaggagaaaaagggtgaaggcaattctagtttttatggcttgctttaggggagaaaggcacaagagaaggtcaaagagaccctcctgcttctgctatcttctcagttttcaaactaccctatttctggacattatgttctgagccccaacaatgctaatgttaataatagaggaaactggctacaggatatatgtgaactcactctactatcttggcaatttttcagtaaacctaaaactgttattggagaacggataatgtttggttacatggtaagttctttagtggtgattctgaggttttggcgcacacatcacctaagc

SEQ ID NO: 199609 - DNA, 267 bp, Homo sapiens
tccttcattaaaaaaaatctttttttactggtcctttcatgataagcaatctgcctttatttttatcatggcttattttatatagttcggagaataaatggatgtattcagtttcttcagttttaatgttatatgtcatcgaattataaactcacagatctgcaaaaatatcttagtccagctccctgacttaacaacaaattataaaccagctggtccagtggtagtgagttatctcaattgattgttgggacttgactactcttt

SEQ ID NO: 199610 - DNA, 307 bp, Homo sapiens
atagagaaggaagaaaaggggaaagagcctggagaaaagtcagcagcaatgccttccaggcccagctcctcagaagacagtctgatgtctagggcaagctgctccccagctccaggccttggggtcctcctggaaaaaggagagaagcaatccctgctgcctcatagaattgatgatcataatgatcatcgctacctttcactgaggccaagccttgtggcatttgattgtcaccaccctctgaattgggcacagttacagccttcatgtcattgataaagaaaccaaggcacagagttgtaagtgg

SEQ ID NO: 199611 - DNA, 821 bp, Homo sapiens
tccggtttagttacaaagactataactaaaggatgatggttttaaaataatagagatttggaagagttggggaattactattactgctttctgctatagttgacttgataccttctttctaacctcatggcataaatagacatgccttatataggcaagacaattgtatattaatcactgggttgtgagtgcatgcatggatgagtgtgagtgcatgtgtgtgtttgaggggatctcagtcttccgtgtgtgtacaacctataaatgggacacgtggctagggagaagtaataggcagtgtagagccagtctggcctggttctcaccctgactggcaaatctttcctcttctgtgcttcagtttctgtattaaaagaaaggtggggacaggggaggcctaactacatgagccccaagttttcagctttttttcagcttgaaaatctatggtttgaaggtggtaatttgcaaatctatctctgtgttatttggcatcccaggtgtacctctgtaagaaaacatataaaatgtagaatttataaaaccaatcaatgtagtagtgatttttctcatgccaaaaacttagaggtgattgctttgagtggattggtgtgtggaagatcaagaaataagagagccactttcgagttagtgatgaataataaatttgcatcaaaaactcctttgaaattagaattctattctgatttggtgggaaattttttattttacaaaaatttgcttttcaccaactttttggagcccaactattgtgaaaaatggagcagactcatatatcatcgtgaagctggtacaaaaag

SEQ ID NO: 199612 - DNA, 800 bp, Homo sapiens
ctttttaaccacaaatagcatttaagaattagtgttaatgtgttacaaatggctcattgagttacttttccttctcagccccaaggcccaaagttttcttcaagagtggtagagaatctctctctcttcagtttgcattattttcttgtaggaagattgtttttttaatcttagaaaccagaataattgtgtaatgtccccacctaacccccaactcatcaaaattcagagatgccttacatgtggtgctatttccaatatatacatacttataaatgtgtttaaaaattccaactgaatttattaacttaagtatgagactctgagaagatcatatgggttgtaaatgaaatatgtggaagggcaagtaattctaagtgtaattagcttcaatttgcaggaaaatgatgaatacgttttacttttttacatttcttttttacgtttacatttccaaggctgcataaatttttttatgacagcttttgttagaaaacaattggcttagcttgcattaaaattatacaagtccagtcaagtaaaccaaagtaactggcaaagtaaaatgtctcattttccgtcaaaggagaaattgtttgtacataccaaatctaagaacgtgaggctccatcttgaaacaaccatagtttgttttacatgaaagctataaacaagaagtacaacaaaacaaagtttttatttttttctttttaaaacattacttttcaagcattatttcacaaacatcctaccatatcttttacttccaatcaaaattgaacccacttttctctccagct

SEQ ID NO: 199613 - DNA, 249 bp, Homo sapiens
gtcaatcatcaaatcttcctgttgattctacatcactgaccttcctgaccatgatacgctgtcaaaaacaccatgtatctgttcttcctagaacttacacaggtctattttttatatttatttgtataattgtcttctctctcctgttcatcccatccctacaaattatagactatatgtcctttttttttttttgggagggggggaccctcaagagctcgacgggcgggcgtgaaggcggggcagggg

SEQ ID NO: 199614 - DNA, 498 bp, Homo sapiens
  misc_feature (480)..(480): n is a, c, g, or t
ctaggcgcacgaggcgcgtccattattaattgaacataggttgaaaaaacttagcagcatgatccacattttatgtgtatcaatgatatacatgggtatgtgtgtctatacagtctatgtatagacatacacacacgagcacgtgacagagagagagagagacagcgcaagcataatagcctgaacaatgaagcaatttggacaagtattgccaaggtgttaacggtaattctctttcggtggtgaaatcatttgtgctttttcttaatgaaatttatatctactttctagttctatgctgaacacatactacttttgtaagtaaaataaattagaaaccatatgtaagaagttattttaagtgccagggaacaacttccatgtataactcagtgaaagctttcagagatggagacaatcagaaagcaactgtcttttccccacttctgtactcatattttccactgggagggcgcgccntcgtgcgctacggggacc

SEQ ID NO: 199615 - DNA, 460 bp, Homo sapiens
acttgaaaaaccttgtgtgagcaaatgcaaggatgagtgaattgaaagaactcgaggtcaaaaccaccaggtgacccacactttgcctaccaagtatctcctcttgcacaccagaaagaactgattcttccattttcaacacctattcattcttcaaaacccagtttaagcactacagctggcttcctgggccaagctcctgcatcacattgtaacatagccatgccattttgcatttgaattgtgatgtttcactatatgtaaaaatactttctcatccaatctcaacaattgtacatgcagtcacaccccagccctcacaagatggctaaagcaaatcacaagcaaaaattagtttgcccacaaacacttcagtgcttatcaccaacagatcagcacaacttcagtatcacaccccacatcattaccaattccttaatataaagctcatatctcatta

SEQ ID NO: 199616 - DNA, 379 bp, Homo sapiens
tgggattacaggcatgagccaacgcacccggccaagaggattttacctctaggcaaagcccccacaagggaatttcttcaatatgaccattgtgctcagctactgcagaaaaaaatgccctattgatgagggggtataacggtggtccagaaaattcaacagtagaaggttagggattaagaaaatgaaaagtgaaagaaaagagggacatttcaagaaaaaaaaagtttcagcagcatattatcttttaacacacagaaattttaatggtgcttatttctagttgataagactatttttcttcattttgctaaactcatcttttcttgataatgcatatgtgtttgttgtataataaaaaagtttaaaaggtagcagg

SEQ ID NO: 199617 - DNA, 329 bp, Homo sapiens
agcagcccatgtttgagagctcacaagcacacgacaggcgtgctggtcccaagcctccacagacgcacctcacagtaacttgctataatttctgaggagaagccaacacccagagaccaaaaataaccccttgcacagcggtcacatgttcctgccactcaaacccaaatcctaatgacaacagagcccgactgacagccagcatactccgtgtgcccaattccaaacaggaccaggatccaaaagctcagaacagcagcaagaatgctgcgctgtattttttcttactctcataaactcaataaaacataacttaaaatattatccca

SEQ ID NO: 199618 - DNA, 507 bp, Homo sapiens
catctaaaaggatgggcatggcaccatgtgtaggtgcaaaggaccacatagtaagaccattgtgaagtagtttttaaaaaagtcaaaagacagagaacaagcaaaggaactaataactaaaggaacaaccaaaggaactagcagttagaaaggggaagatctggaactcttaaaactaagtcattgtttggcttatgggacaaaccaaacagatagaatggttgcagtccctattaagccaaaaggacatgaaaacataacttcgtcatttttctctgacaccattgcatcttagattgttaacctcttccatgatagaacactgtataaagttcatatttagagtgaaaatgctttctgtatccaaaccatgtaccagatccatgtcttgttatttattacgtttcaactttttatgggttcttttctctctttaagaaaatatccaaaattgcatcctaattataaaacaagttaaaagaaaaaaaacaccattaatagacagtt

SEQ ID NO: 199619 - DNA, 138 bp, Homo sapiens
gaacaggttctacgtatcatgaacagtaatgtattatcacactacatcatgttgtaccatagggagaagcaatcctactaagatactttctactctgaccaaatctctaaataaaggatggaaggaaaaaaggaagga

SEQ ID NO: 199620 - DNA, 404 bp, Homo sapiens
gactaatcttcccgaatcttacattgtgccttaatttgcacatctgcacctctaatgtctgcctatattatctccttggctcacaaggaccttgtgggagagctgctcacatctcaacatgtaaataaaatgtgcctttgggtcaacacaggagaggtgattccaacgttaacaagttggtcaaggaaactgtcagctgtttatttttatttcaatctcttctgttaaactataacacactgattgagcaactaaacactaatatgcagagaggaaaaaaacaaaaaaaatatattgtggtaatacaaacaatacaatgaattccaaatactatggacattggaaaattaagtacagtgatataaaaatagtccattaccaaaagatctgttttaaaacctctg

SEQ ID NO: 199621 - DNA, 121 bp, Homo sapiens
taaaagttaccatttgtacaggttcaccaatctcatagttctattttttaaatcctctggaaaatttaagtttttcataggtcatctggtggcaaaatctgacctgacctaatctcaattc

SEQ ID NO: 199622 - DNA, 414 bp, Homo sapiens
acacagtgtggcaagctggaaagcccctggcacttccagttttcagcagcttccagcttttcgtctgcttatcccacagagcactgggaaatgtggtgaacaacctataggaaaaactggaaccagtcagataaagacaggagggtgcgaaggatggatctgacaaaccgaggtcccaaaggctgcctgtgatgggtcatccactgctctgtgttctccaacatatgctgtagctgaatactgaccagagttacatctgcctggaatattctgtctctgtctaatgtctatgcataaacaccaatcagctatgtgaaaagaatgtcaagtaagactttccttcaaattatgctataaaacaaaacaccatgtgagtcagagtttaaaaattttaaacattaaaaaggtagaaaa

SEQ ID NO: 199623 - DNA, 505 bp, Homo sapiens
aattgtaccacatggggtggaagaacgaagggagaacttgaccaagctcccatctagaaacacacaagataggtgaacaatggccaaaaagtacttcccttaaatacaaaaagcatggcatcaaaatgtgagataaaattaaggaagaatacatttaagacaacttgaatccattttctaactactaaaatactgagctattaaacaactaattttgctatcaaatgaacaaagattttcttttcttttttctttttttttaagattcagggggtacatgtgcaggttagttacatgggtatattgcatgatgctggggtttgggcttccaatgatcctgtcacccaggtaatgaacacaatcccaccaggcatttttcaaccccttcctccatctctccatccccactttgggaggcccagtgtctgctgttcaacgttagttcccacttataaatgagagcacatggaatttggttttctgttagaggaacagagatttaagg

SEQ ID NO: 199624 - DNA, 284 bp, Homo sapiens
ttttgcttaatctactttttaatttgcttttactttgaaaacaagtaaagtttttgtaagcctccaagttgagattaacgatgtgagaaggagaatccataaactttcctgttgaacaaatagcagatggattttttcaggaggtggggaccacacagggctggcctgctctgacgtggcagccgcagaggggtggcatcagcagcagacagtctcatgtcctcagccctgccgacgtccagatcactgtggagtgtagctattactcatgcctttttctttga

SEQ ID NO: 199625 - DNA, 575 bp, Homo sapiens
gcctcgactcatccgtcgtgtcttcctgtccctgccatccctctttactgaggcaaccactgatctgcctcctgcctctacagataagtttgcctctttctagagtttaacatacatggaataatatagcacatattcttttttgtctgacttctttcactctgcataattgcagtgtatccatcgtttatttacttttattactaactatattccattatatggctataccacagtttgtttacccattctcttgttgagggccatgtgtattgtctccagattgtagctatttccagtgaaactgtcatgtactaaataatctttgcatagatatatgctttttttttcccctaggtaaacacctagatacctaggagtggaatggctagatcttttagtaagtgtgtatttaactgttttttttaaaagacaaagttttgttatgtcactcaggctggagtacagtggcgtgaccatagctcactgcagctcaagtgatccttccacctcagcctccccagtagctgggactacagttacacacaaccatgcctggctaagtactttttttt

SEQ ID NO: 199626 - DNA, 355 bp, Homo sapiens
gaatggagagtctggaaatagatccaatatgtatatagtggactttttactaagttgctaatgcaattcaatgtggaaagaaaagtctctgcaacaaatgatgatggatcaattagacatctgtatggaaaaaaataataacgcatacacaacaattaattcaaggtagacaacagatttaaatgtaaatactaaaattatacatctcctagaagaaaatataggagagtatctttgtaatctcgtgcaaaatttcttaaacagaacacagcaagcactaaatatgaaagaaaaaatgataaaactggtcctcttcaaagttaaagctactgctcatcaaagtactgttaagaac

SEQ ID NO: 199627 - DNA, 2328 bp, Homo sapiens
cgggactcgcactcggcggttgttccagaagaaagagacagcgatggcggcagaggcttcgaagactgggccttctaggtcttcctaccagcgaatggggaggaagagtcagccctggggtgccgctgaaatccagtgcaccaggtgtggaaggagggtatccagatcatccggtcaccattgtgaacttcaatgtggacatgctttttgtgaactatgcttgttaatgactgaagaatgcaccacaattatatgccctgattgtgaggttgctacagctgtaaatactagacaacgctactacccaatggctggatatattaaggaagactccataatggaaaaactgcagcctaagacgataaagaattgttctcaggactttaagaagactgctgatcagctaactactggtttagaacgttcagcctccacagacaagactcttttgaactcatcagctgtaatgttggacactaatactgcagaagaaattgatgaagcattgaatacagcacaccatagtttcgaacagttaagcattgctggaaaagcacttgaacacatgcagaagcaaacgatagaggaaagagaaagagttatagaagttgtggagaaacagtttgaccaacttttggctttttttgattccaggaaaaagaacctgtgtgaagaatttgcaagaactactgatgattatctatcaaatttaataaaggctaaaagctacattgaagagaaaaaaaataatttgaatgcagctatgaacatagcaagagcattacaattatcgccttctctaagaacatactgtgacctgaatcagattatccggactttgcagttaacttcagatagtgaattagcacaagttagttctccacaactaaggaaccctcccaggttgagtgtgaattgcagtgagatcatctgtatgttcaacaatatgggaaagattgaatttagggactcaacaaaatgttatccccaagaaaatgaaattagacagaatgttcaaaagaaatataataacaaaaaggaactttcttgttacgatacatacccaccgctagaaaagaaaaaggttgacatgtctgtcctaaccagtgaagcaccaccacctcctttgcaacctgagacaaatgatgtacatttagaagcaaaaaacttccagccacagaaagacgttgcaacagcatcccctaaaaccattgctgtgttacctcagatgggatctagccctgatgtgataattgaagaaattattgaagacaacgtggaaacatgcggcacagatgatcttggggagacacctagatatccaaaaaagcctcttcagaaaaactcatctgttccttttggatcaaaagcagatactgtaacaactgtctgagcttgatgtagtggagtttactgtatgtgtagttctgcagagctagtttttgtaagccatgtaatagatccttgccatttctacattcggaagtattcacaaataaaagacgccaaagtactggagaagaaggtgaatgaattttgcaataggagttcacaccttgatccttcagacattttggaactaggtgcaagaatatttgtcagcagtattaaaaatggaatgtggtgtcgaggaactatcacagaattaattccaatagagggtagaaataccagaaaaccttgtagtccaaccagattatttgtccatgaagttgcactaatacaaatattcatggtagattttggaaattctgaagtcctgattgtcactggagttgttgatacccatgtgagaccagaacactctgctaagcaacatattgcactaaatgatttatgtctggttctaaggaaatctgaaccatatactgaagggctgctaaaagacatccagccattagcacaaccatgctcattgaaagacattgttccacagaattcaaatgaaggctgggaagaggaagctaaagtggaatttttgaaaatggtaaataacaaggctgtttcaatgaaagtttttagagaagaagatggtgtgcttattgtagatctgcaaaaaccaccaccgaataaaataagcagtgatatgcctgtgtctcttagagatgcgctagtttttatggaactagcaaaagatctgatctaataaagttggttgagacactttctcattttttcaatgtttctgtattggaagaagaacttaaagcttcctaatctattttgttggcgtcattcctctgctgaatttttaaatgttcactctggcttacctgttaatggaagaatttgcataatatctacttagaaagatagtgggccccggag

SEQ ID NO: 199628 - DNA, 2187 bp, Homo sapiens
cgggactcgcactcggcggttgttccagaagaaagagacagcgatggcggcagaggcttcgaagactgggccttctaggtcttcctaccagcgaatggggaggaagagtcagccctggggtgccgctgaaatccagtgcaccaggtgtggaaggagggtatccagatcatccggtcaccattgtgaacttcaatgtggacatgctttttgtgaactatgcttgttaatgactgaagaatgcaccacaattatatgccctgattgtgaggttgctacagctgtaaatactagacaacgctactacccaatggctggatatattaaggaagactccataatggaaaaactgcagcctaagacgataaagaattgttctcaggactttaagaagactgctgatcagctaactactggtttagaacgttcagcctccacagacaagactcttttgaactcatcagctgtaatgttggacactaatactgcagaagaaattgatgaagcattgaatacagcacaccatagtttcgaacagttaagcattgctggaaaagcacttgaacacatgcagaagcaaacgatagaggaaagagaaagagttatagaagttgtggagaaacagtttgaccaacttttggctttttttgattccaggaaaaagaacctgtgtgaagaatttgcaagaactactgatgattatctatcaaatttaataaaggctaaaagctacattgaagagaaaaaaaataatttgaatgcagctatgaacatagcaagagcattacaattatcgccttctctaagaacatactgtgacctgaatcagattatccggactttgcagttaacttcagatagtgaattagcacaagttagttctccacaactaaggaaccctcccaggttgagtgtgaattgcagtgagatcatctgtatgttcaacaatatgggaaagattgaatttagggactcaacaaaatgttatccccaagaaaatgaaattagacagaatgttcaaaagaaatataataacaaaaaggaactttcttgttacgatacatacccaccgctagaaaagaaaaaggttgacatgtctgtcctaaccagtgaagcaccaccacctcctttgcaacctgagacaaatgatgtacatttagaagcaaaaaacttccagccacagaaagacgttgcaacagcatcccctaaaaccattgctgtgttacctcagatgggatctagccctgatgtgataattgaagaaattattgaagacaacgtggaaagttctgcagagctagtttttgtaagccatgtaatagatccttgccatttctacattcggaagtattcacaaataaaagacgccaaagtactggagaagaaggtgaatgaattttgcaataggagttcacaccttgatccttcagacattttggaactaggtgcaagaatatttgtcagcagtattaaaaatggaatgtggtgtcgaggaactatcacagaattaattccaatagagggtagaaataccagaaaaccttgtagtccaaccagattatttgtccatgaagttgcactaatacaaatattcatggtagattttggaaattctgaagtcctgattgtcactggagttgttgatacccatgtgagaccagaacactctgctaagcaacatattgcactaaatgatttatgtctggttctaaggaaatctgaaccatatactgaagggctgctaaaagacatccagccattagcacaaccatgctcattgaaagacattgttccacagaattcaaatgaaggctgggaagaggaagctaaagtggaatttttgaaaatggtaaataacaaggctgtttcaatgaaagtttttagagaagaagatggtgtgcttattgtagatctgcaaaaaccaccaccgaataaaataagcagtgatatgcctgtgtctcttagagatgcgctagtttttatggaactagcaaaagatctgatctaataaagttggttgagacactttctcattttttcaatgtttctgtattggaagaagaacttaaagcttcctaatctattttgttggcgtcattcctctgctgaatttttaaatgttcactctggcttacctgttaatggaagaatttgcataatatctacttagaaagatagtgggccccggag

SEQ ID NO: 199629 - DNA, 2158 bp, Homo sapiens
cgggactcgcactcggcggttgttccagaagaaagagacagcgatggcggcagaggcttcgaagactgggccttctaggtcttcctaccagcgaatggggaggaagagtcagccctggggtgccgctgaaatccagtgcaccaggtcaccattgtgaacttcaatgtggacatgctttttgtgaactatgcttgttaatgactgaagaatgcaccacaattatatgccctgattgtgaggttgctacagctgtaaatactagacaacgctactacccaatggctggatatattaaggaagactccataatggaaaaactgcagcctaagacgataaagaattgttctcaggactttaagaagactgctgatcagctaactactggtttagaacgttcagcctccacagacaagactcttttgaactcatcagctgtaatgttggacactaatactgcagaagaaattgatgaagcattgaatacagcacaccatagtttcgaacagttaagcattgctggaaaagcacttgaacacatgcagaagcaaacgatagaggaaagagaaagagttatagaagttgtggagaaacagtttgaccaacttttggctttttttgattccaggaaaaagaacctgtgtgaagaatttgcaagaactactgatgattatctatcaaatttaataaaggctaaaagctacattgaagagaaaaaaaataatttgaatgcagctatgaacatagcaagagcattacaattatcgccttctctaagaacatactgtgacctgaatcagattatccggactttgcagttaacttcagatagtgaattagcacaagttagttctccacaactaaggaaccctcccaggttgagtgtgaattgcagtgagatcatctgtatgttcaacaatatgggaaagattgaatttagggactcaacaaaatgttatccccaagaaaatgaaattagacagaatgttcaaaagaaatataataacaaaaaggaactttcttgttacgatacatacccaccgctagaaaagaaaaaggttgacatgtctgtcctaaccagtgaagcaccaccacctcctttgcaacctgagacaaatgatgtacatttagaagcaaaaaacttccagccacagaaagacgttgcaacagcatcccctaaaaccattgctgtgttacctcagatgggatctagccctgatgtgataattgaagaaattattgaagacaacgtggaaagttctgcagagctagtttttgtaagccatgtaatagatccttgccatttctacattcggaagtattcacaaataaaagacgccaaagtactggagaagaaggtgaatgaattttgcaataggagttcacaccttgatccttcagacattttggaactaggtgcaagaatatttgtcagcagtattaaaaatggaatgtggtgtcgaggaactatcacagaattaattccaatagagggtagaaataccagaaaaccttgtagtccaaccagattatttgtccatgaagttgcactaatacaaatattcatggtagattttggaaattctgaagtcctgattgtcactggagttgttgatacccatgtgagaccagaacactctgctaagcaacatattgcactaaatgatttatgtctggttctaaggaaatctgaaccatatactgaagggctgctaaaagacatccagccattagcacaaccatgctcattgaaagacattgttccacagaattcaaatgaaggctgggaagaggaagctaaagtggaatttttgaaaatggtaaataacaaggctgtttcaatgaaagtttttagagaagaagatggtgtgcttattgtagatctgcaaaaaccaccaccgaataaaataagcagtgatatgcctgtgtctcttagagatgcgctagtttttatggaactagcaaaagatctgatctaataaagttggttgagacactttctcattttttcaatgtttctgtattggaagaagaacttaaagcttcctaatctattttgttggcgtcattcctctgctgaatttttaaatgttcactctggcttacctgttaatggaagaatttgcataatatctacttagaaagatagtgggccccggag

SEQ ID NO: 199630 - DNA, 339 bp, Homo sapiens
tcctcccgcctcagcctcctgagtagctgggaccataggcgtgtgccactatgcccagctagtttttcattttttgtggagatggggtctgtctatattgtgcagggtggtcttgaacttttgggattacaggtatgaaccactgtgccgggcctttaagcaaaatttgcaaacagcaaaatgttcaaattgtaagtgtactgttctgtgaggtttaacaaatgcatatatctgtgtgcaaacgcctgttgaggtacagaacatcacatcactccagaaagctccctcgtgccctttcctagtcagtcctcactcttactcacccagaagcaaccactg

SEQ ID NO: 199631 - DNA, 186 bp, Homo sapiens
ggaaagacagggtctcaaaagccccgtcccagttcctatgcatagttggagccctgcttacagtggtggcacctgattatgattgactggagggtgtaggagcctggagtgggacattcctgctgtcaggtttgctgtctctgtagaagcttcccaggaaagcaggcctgtcgttgcttgcctctt

SEQ ID NO: 199632 - DNA, 425 bp, Homo sapiens
gatgctgtgcacaggctgtgtgacctgaaggcccttgcaggctgaggtctcttggtgataatccacacactgtcctgagccttggttttgcagcatttccaacttgggttgacagagtgagactgtgcaggactgccccgtacagtacggcttctatgtgtgaacaacacagaccactaagagatgtgacaaagctgttccatcagaggaaacatagtctgggggacaaatcctcccattcctgataggacaggagggagcggttggctggggaagacctgagtgagggagctttcttgaggacgggttttgtcggagtgtagttcatataccatgcacagcctgtcagcatacagcttgaatgaactcacgtgtgtaaccagatcaagaggcagaatattactagggtggcagttttgagtccc

SEQ ID NO: 199633 - DNA, 1137 bp, Homo sapiens
ggtttttatatctggctacaggattatcttttcagaaatgtaatgaatagggactacataaggaaagattattttcattgattcaaaaattattttcattgattaatggtagagttgacgcaaataccaactcattaaacatacatgcacagaagatcacagaaaaagcagctactgctgccttaggcagacttctgaggaagtgcctgggctgtgaggcttcttccactagacataaagctaccagctgaagttttcaaggtttcctaataagatatgaataacctaaacaagttaggcatctctttatgaatctcgctaccattcaggtaaatgatgaaatacatttaaaaatcaggaatagttgagttttcagtcaaaaggaaagttgtacaataatagggaatatagtcattatgaaaaacaagacttaaccaaactaccaaaggactaaaatacaacagcaataaatacttaacctgtctcttcctttgaactcaggggtgacaaggtttttattgaactctcagaaagagaaagaaagagaaagagaatgctgacacctagtgtccatttaacagaattttataatgactagccttggtctttagatgcaatcaaagcactagtaagttagttataaggcacctccatctctgccttaggctaaagcatatctcaaaccttctcagtgtaattgtttaaaaaaattattggccgggcgcggtggctcacgcctgtaatcccagcactttgggaggccgaggcaggcagatcacgaggtcaggagatcgagaccatcccagctaaaacggtgaaaccccgtctctactaaaaatacaaaaaattagccgggcgtagtggcaggcgcctgtagtcccagctacttgggaggctgaggcaggagaatggcgtgaacccgggaggcggagcttgcagtgagccgagatcccgccactgcactccagcctgggcgacagagcgagactccgtctcaaaaaaaaaaaaaaaaaaaaaattattgtgctttggccaggcgcggtggctcacgcctgtaatcccagcactttgggaggccaaggtgggcggatcacctgaggtcgggagttcaagaccagcctgaccaacatggagaaa

SEQ ID NO: 199634 - DNA, 941 bp, Homo sapiens
ggtttttatatctggctacaggattatcttttcagaaatgtaatgaatagggactacataaggaaagattattttcattgattcaaaaattattttcattgattaatggtagagttgacgcaaataccaactcattaaacatacatgcacagaagatcacagaaaaagcagctactgctgccttaggcagacttctgaggaagtgcctgggctgtgaggcttcttccactagacataaagctaccagctgaagttttcaaggtttcctaataagatatgaataacctaaacaagttaggcatctctttatgaatctcgctaccattcaggtaaatgatgaaatacatttaaaaatcaggaatagttgagttttcagtcaaaaggaaagttgtacaataatagggaatatagtcattatgaaaaacaagacttaaccaaactaccaaaggactaaaatacaacagcaataaatacttaacctgtctcttcctttgaactcaggggtgacaaggtttttattgaactctcagaaagagaaagaaagagaaagagaatgctgacacctagtgtccatttaacagaattttataatgactagccttggtctttagatgcaatcaaagcactagtaagttagttataaggcacctccatctctgccttaggctaaagcatatctcaaaccttctcagtgtaattgtttaaaaaaattattggccgggcgcggtggctcacgcctgtaatcccagcactttgggaggccaaggggggcggatgccttgaggccagcagttcaagaccagactggccaacatcgtgaaaccccatctctacaaaaaatacaaaaattagccaggcatggtggtgcatgcctgtgaccccagctactcaggaggctgaagcaggagaatcacttgaacccgggaggtggaggttgcagt

SEQ ID NO: 199635 - DNA, 321 bp, Homo sapiens
ccactacaacagccaagtcagacataaaggcagatggagcatacacattggaaagtgagtgctactacaagcttagcattttgacaatttcatgttggaggtctaagaaactttgaggaggaggaaggaaaatggaaggcagaaggaaagggggaaaaaggaaagatagagagggacaaaagaaaatgaggttagagagaaagaaaggaaggggaagtttgtgtctgtgacgtaaaaaagactatcaattctactttcagtctctgaatgttgagacatcataaatctatctagacttagtgatcttattaccatttgccc

SEQ ID NO: 199636 - DNA, 509 bp, Homo sapiens
tagaagaaaagaagaaaggccgaaaactgtgaagtgacagaaagaagggaataaatctaaagatagtagaaggaaacaaataacaaaataataaagatatagcagaattaatgaaatagaaaccaaatattcagtaaaggggatccacaaagcctaaagtgattctttgaaaatattaataagacagataagtgtatagtcagggttctccagagaaacaaaagcaataggatatgtatctatgtagacagatttattttaaggaactggttcacatgattatgcaggctggcaggttccacagtctgcaggttgggtcggcaggctggagacccagagatgagctgatgtttgcaagtcaggtccaaaggccatctgctgctacactggttggtggaggtcactctttttgttctcttcaggcctttgactgattggatgaggccaacttgcattatggagggcaatctactttgctcaaaggccacctgcttaaatgtttttttggt

SEQ ID NO: 199637 - DNA, 358 bp, Homo sapiens
ggagtctggagatgggagtaatccatctttgccgcaagttgcaaaagatcttaacatctcccatcccagcctctgtggtctgcgttgtgtctgacatgagcagccttgagaaccagactcccaactatgtacaagaaaacttactttcaatcttcctgacatcaaattttccattggccagaaccagtgtagtgacaagaaaatagccttgaaaacccagaccctctgtcattatttaccatgtgactttcattttttctttccttcacaagagtagactgtcttcttctccattgtcttgttaaatttttcattcaggtgttttttaatgtgcccaattaaacagtctcaagaagtt

SEQ ID NO: 199638 - DNA, 768 bp, Homo sapiens
gcatatcattttttatttagaaaatatcctaagtaaaatttaaaggaaggagggcattccagatctatatctagaaaaaccaaggtcttcagaatatgagaggatgctgaaagaaatgaagagtttggatgaacatttttttcttccagaccaaaaactatctagaggtatatgcactaaaataatgtcaaagtacttttcatgctagaggtatccatcaactatataaccttgagcaacttataacttctctgtgccttggttttctcatctgtaaaattggagtaattctacttatcttaaagggttgtgaggattaaatgcatttaaagtggtaagaacactgccttatacatagccctgtgttttcatcctcataaaagctgaaaataaggttcaagtagtattttgatactacttatagatctaaaatggatcagggaaaatatgtgattacttgatgtatgttatttttatagctgagattatacaagacagctatcataatctcccttaggtaatgccactgtcaaagataatgaagaactgggtggatcactggtgagaatagaagtgtaaagtgttgctttttattaaaatatgatttacttggttgctttcaaagaacccaatataattttctttgtaaaatgattttgacacgaagtagcagaaaaagctccaaacattagaatatgaccagtgtcctggcttcacagttaaactatctttgctcagtttccctacttgcaaaataaagtgaagtaa

SEQ ID NO: 199639 - DNA, 442 bp, Homo sapiens
tttccaccttttggctgttggaaattcattacctcttgagtcaaggaatcacaagctattttgactgaagtgtcctgttaagaacaggtgaagattccaggtgaacaaccgtgcattccttttatctccttgtgggcttggtctggtgctgagaacttatgtacaatatcatatttaatcctttcaacaacatgatgaagtaggggtcttcaccattgtataatgaggaaactggagttgagaaagttaagagcttgttcagaatcacaaactggctgggcatggtggctcatgcctgtaatcccagtactttgggaggccgaggcgggcagatcacctgaggtctggagttcgagaccagcctggccaacatggtgaaaccccatctctactaaaaacacaaaaattagctggctgtggtggtacactcctgtaatcccag

SEQ ID NO: 199640 - DNA, 359 bp, Homo sapiens
caaaaaaaaaaaaaaagttcatatcaaaaggaaaatataggctgctctgcctgtggagtagctattcttttgtttctttacatctctaataaacttgctttcacttacaaaaaaaaaaaaaaaaaaaaaaggaaaatcctagcactctgggaagctgaggcaggcagatcacctaaggtcaggagttcgagaccagaatacaaaaattagccgggtgtggtggtgcatgcctgtaatcccagctactcaggaggctgagacaggagagttgcttgaaactgggaagcggaagaggttgcagtgagccgagatcatgccactgcactccagcctgggcaacagagcaagactccatctca

SEQ ID NO: 199641 - DNA, 746 bp, Homo sapiens
aaataccctctagaggcttcccattggttacttggttacaccctatgtaaatgaaggagtggcccacaaccagtctgattggttgcagaagacaggaccaatcagagactaaatagtagttaccaagttacgccctatgcaaatatctgattgattgcgggaggggaccaatcagaggtactttccatttttcatctgccacacagtgcaaaggtagtaacctctgatccttttgttatttgggtgtggagagacggggttttccttttgattcagttctaagaagtcagcgggaatggccttaggttccctgcctccagacctattctcctgtctcacctccatttatcactaaagagttcacaatacatgaccctccagaaaagagacatgtgacattaatatgtcagactcaaccagtgtcttcacactggaatgactttattagtgtgaagctggagtaacattttatcattagcacagaacgagaagcattgcagatgatagagccttttttggtcaccaagtgacgcagccagtacactgttgactagcagtgatggtagcaggccttcttgccttggtcctgatcttaaagggaaagatttcggtatttcatcactaagtaaaaaatgtgttgttggttttttgaaacagggtctccctctgtcgcctaggttgcagtgagccaagatcatgtcattgcactccatcctggaagataagagcaagattctgtctcaaga

SEQ ID NO: 199642 - DNA, 511 bp, Homo sapiens
cccaaaagcaggtagtcacctgtgaggctgagtctagggcttttatgggctcagaattggggagtgcatgctgattggttcgtgggcaggcctggaaaaagcaccattcgattggctaaaagacatcgaggaggttcttactctggtcatgtactctacctggaactggaagctcagttttcaggcatcaggctgtctttggcttgaagatcagggttcaacagggacctgttcgtctgcctaggaatttaactgtctcctattgctatcatcgagacaccaaaatgtctacaagtgtaatcatttatcatgatctacatggctgctgatatggtctaaattacccttaagatcccactttaaggtccgtaaaatactgctaagtaaaaatccactgtgacacacttactcctctcttgctgagatgccctgctgcactcttctgcagtgttctttctttctttcttttctttctttcaataaaactttcctttccaaaactataccattg

SEQ ID NO: 199643 - DNA, 190 bp, Homo sapiens
cattttctttaaagaccaagattgtttgcaatggcttcaggaaaacaataccaatacgaaaaccaaaacctttaatccttttagggaatcagttcactgttcctatttcaaggcaaggcaagtcatttagaaatcaacctctgacgtgtctgtttttatcagaacatttccagaaagtaagattaccatt

SEQ ID NO: 199644 - DNA, 807 bp, Homo sapiens
gggatgtattataatgaacagcaaatgcaaacacagattagagtttgataaaatttgtccaaattgggcagagtctaagtgacatgccagtgtgcttgtgcatctcaccatctgagggacccatctgataatggtgttgtgaggaacacagactagactctctagctgcaggcagtggatgcctgggagggaagatctgtggctgcagacagaaatctagtggctctaacctgtcagtcatggtctgtatttccttgtgctttaatttccctttaataaaatgagatggtgggctgggtgcagcggttcacacctgtaatcccagcattttgggaggccgaagcgggcgtatcacgagctcaggagttcgagaccacctggccaatatggtgaaactcgtctcgaataaaaacacaaaaattagctgggcatggtggtgtgtgcttgagtctctcaggctgcaggtggggatggtgaaaccacatggggcctgcagtctggagaagctgaggtggcagggatggaagtctcaagccgctgagctgttgaaatttgcaggatgaggaggcagtcaggacagagctgcacagagaagggactctaaaaacatcaacagggatccaaggaagcttctggacaaatagctgagggtgtcagagagaacatctgcaagacctggcagagaacagctctgggaagcgtgaggaagagaggttctggaggccacacggggcaggagacagacgtgttcccacacccagactggagacaccttgggcgaatagatttaacagagattccacaatg

SEQ ID NO: 199645 - DNA, 464 bp, Homo sapiens
cagttcatgtcaggcaagaatgaacagctcatgtatcccatacttctcctgctgctctaagacatctttctttttcagatgccaatgctgggggaaacccagaaccctaaagtatattgaagccatttataacatggagaataactatctttccttagtggtaaacagcagttatttctaagattagtgtcgaatttttttaagttataacgagagatcctaaatactaggaattaaaattgaaatgttctctttgaagttaaatcagcttattatttaaagttagagggaagaggagaagggaggcagcacggtatgatggaaagaacaatgaaatgaaagtcagaaagtatggctaagtttctccaggtcgggaactacagctctgtgtcccaaatgcctctgcaaatacagtaccaggctccttacaggtttccagtaaacatttgctaaacctagatgtt

SEQ ID NO: 199646 - DNA, 502 bp, Homo sapiens
aaaaatgattgttaaattatgtattacacgtagacattcattcacttaagcatccaggaaatatttactgagcaactagtaagtgccaggtaccattttaggagcagaagttatcgcaggaaatatgccacacaaggttcttggtctcctgacccttgtattctataggaggaaacagtaaaaagaaacaataaacaaatacgtaaaaagctacattttggctgggtgcagtggctcacgcctgtaatcccagcactttgggaggccaaggcgggaggatcacaaggtcaggagatggagaccatcatggctaatatggtgaaaccccgtctctactaaaaatacaaaaaattagccgggagttgtggcgggcacctgtagtcccagctactcgggaggctgaggcaggaaaatggcgtgaacccaggaggcggagcttgccgtcagccgagatcgcgccactgcactccagcctgggcgacagagcaagactccgtctcaa

SEQ ID NO: 199647 - DNA, 175 bp, Homo sapiens
attgccctattgaaaggttgtaccagtttgacattgctgtggtcagagtgcttttccccatggtctcatcattccctggttgttttaaaggcatgctggagaattgctcagcaaattctccaaaatgtctcagcaactggagggccccatttgcatccggaatttggagcagatg

SEQ ID NO: 199648 - DNA, 232 bp, Homo sapiens
gcctccgggagaggaagaggcatggaagggcctccgctgctcggcttgccggccgctccagagctctgcaccagcgctgctcccgccttgtcgcaggaggcagctatgaagacctaaggttcaagacccggctcagccgcgaacttgcttggtaccctttggcaaatcacttctctgaggcctcggtttcctcttctgtaaatgtaaacatcccttcttttttttttgcctt

SEQ ID NO: 199649 - DNA, 631 bp, Homo sapiens
aatcctcctcacttcctgaactcatggcaaccactgatctctgtactatcactttagttttccatcttccatgtcatactaatgaaattatatagaatgcagcctttttgaatcaggttccactttgtaatttgcatttaagattcatccatgtctttttgtggtttgacagcctatttctttttacagttgaataatattctacagtttgtttatccattcacctattgaagaacatctttagttacttccattttctggagatcataatatagctgccatgataaacattcatatgcaggtttttctgtgaacctaagttttcaaaggaaatttcaatatagcagttaacaccatcccttcttcctgaacaatcttccaattctgctacctatccactgaagtcaccaaagtctcttcccaccaaactggtgcatctgcccaataatcctctatttctctagcacaattttaattgcacatgtgctagccactcttttcaaagctgacggacctatgaattctactaaatcgaataaacatttactaagggcctactatgtgtcaggcactgtatacactaggattcaaaggatgaatgaaacagtggtcatggccctctatgaggaaa

SEQ ID NO: 199650 - DNA, 359 bp, Homo sapiens
ctgtacttccagggtcaatcagagtgactatcatgtggcagtttttgaatgataatgcctgaattaaatgattctcacctaaatcatctttacagcaatatcttcagagaccatcctccattaaaataccaccacaaggacattaagcagagtgctattccagaataaaaagcctgcacttgtgaacttctatgcctttgcatatgctcttgccttggcttggaatgccactgtttgttaacaatccagttattttttaagatccacattgtttctgtgatgttttcccctaaattccattttctttcatcaccaccctttccatatttgctaaagagagttattcttttcagtctgtc

SEQ ID NO: 199651 - DNA, 433 bp, Homo sapiens
aaagatattaagaagattagaaaaggttttgtgaaggagagctgaaatgggcctttgaaatacagatgacattttcattgatgagaataggaatatcataaaagtaattcataaagctgacataatgagcttagaaggaaatccataaaataatactactttaaagaaatttcagggaggtaaaatttctgaaaactttagaccctagtcatcagactgtgtatgtgcatgtctgtctctctctcctctatcatttgtttgttttttgttttgtgtttttggaggggatggagtagtaaaggaccataaggagatataacactgtaggaagaaaaaaaaatcttggggaaaatgaaacactgatacaatcattactaaacatttaagaataatatcttctagtgatggaacacatgctttgtgctttccatac

SEQ ID NO: 199652 - DNA, 311 bp, Homo sapiens
acctttaaatactattacaccatttcatataatatcagaaccttactacaatatacttacatttccccatcccatccattgtgttattgttgtagattttatatttaagttataagcctcacaatgcattcacattattttgcttttaactaaattagaaattaaaacgaggaaaatatttatattttcactatgtttactattttcactctcttccttttcatactttcgactttttatttaatattcttttccttgaggtattattttcctttagctttccttgtagtttagatctatcagtattgagt

SEQ ID NO: 199653 - DNA, 213 bp, Homo sapiens
tgacagcagcgagggaggggaagtgcatgtccccaagagtccagacggtccagagacaatgaaaatgctttatagagaagtaaccaagtctttgcatgtcagcaggggctttgtggagctagagaaagggcttgttaacgccctcgctctgagtcagcaaggcttcccggaaggtgtgttcagcaccaggatgacccggcagacccctgcggc

SEQ ID NO: 199654 - DNA, 532 bp, Homo sapiens
cctgtaccatcaaagttttaagtgatagagaatagttgcattgtatttaagttactgtcatcaacagctaatcctaataacaaactaatgcagggaattatcttgaatgtggagactgaggtaaacagggatgtaaggtatgacacagtagtcccaaatgtctcttgagaaaaggtggctaatcaatttaaaccatagccttcttggaactgctctcttaggcagcattgatacagactttcataagggaaaaaggggcagtcctctagcagcatatggaactatgtgggatttcttttcaatcttgataagggtgtcggcatttacttcactagcagtttaaggagggaaaggaactacagagaattagagggaataaccaaatgttactttctcctaatatccccagccttaaatggtaggctcagtccttgtgcctcttctgtatctgcactcactgccatggtgaactcatccagttttatagcttaatatgaatgtaaatatattcaccatatagtgacaactacta

SEQ ID NO: 199655 - DNA, 168 bp, Homo sapiens
tagtggtgagtgacaagcaccttggagacgcgccagcttgcctctccccgagtctgggcactcctactgtacaattcctgattggtggtcatcctaccatgtgctgagcactgccagtggcttggacagacaagcttggcaggactcccccattttgtgttatttgag

SEQ ID NO: 199656 - DNA, 398 bp, Homo sapiens
gtctgtgtgcgcgcacatgcgtgtgaacaaaattgcattttaaatgtcttaagctggatgggaatctaccaaaattgtatctgtaaaatatactcaattgccacagttttagaaatgtctgtggaaatgtccccaccggcctgcctccttcctgagagtttatatctaggtagagtgttaggtgatgacttcctagtcaccggtatgccaggattagttacctggcgaaactgagtctggtctttaattcaagaagttttctctaagtgaatctcctttccctataagttgatagaggggtgttgtttgagggagagttgtccagaggaaggtggaatcaagtgtgaatcatctgtgtgacccagtgagcagtgaataaatatgaaaagtgcagaata

SEQ ID NO: 199657 - DNA, 490 bp, Homo sapiens
tggaacaactgatccctagctttccaaaatatgagaaattgagatgcagggagtagtaagcacctagttaatgagtcaaagcatatttataaagttcacagggtacatagcatatagcagctgttctctatctcagttgagttttgactaggaaatgggcttaggataaaacacataggcttttgagtaatcatttgtaagaaattgtagatagtgaccacagtttaatagcattagataaattatgaaaagtcactgaaataccttctctggaaaatgttagaagctcaagtacaatggcttagttaaaggcaggtgggggagaaacttgaagaatgtggtccagtacaagaataccccatttttcccctaaggcaatgaaaatgacatgaagtaatcatagttatttatacaggaacaatttaggagacttagaatattcacttcttttgccttctagctgagcatcaaaattctctctctgtctctg

SEQ ID NO: 199658 - DNA, 151 bp, Homo sapiens
tggaggacagaaggaaagctgggagggagagactattttagagaaaatggtcagaagactgttaagctgttacttgaaccacaaacggaagtgtagacattttatgtaaatgtgtaagttgatttttaggtatatataacagataatctaa

SEQ ID NO: 199659 - DNA, 335 bp, Homo sapiens
tgttctaagaagtttcattttcctaatagtttactgaggttcattagcaaacacactattaacatgctgaatctctaactttaggatacacatatcagtcattatttctatattatcagttaaccagcatattaatagaccctaaaatggagcatttctaagaaagataaagccaaatctaagctagagattttttttttcccccttgagaccgagtctcactctgccaacccagactgaagcgcagtggctcaatctcagctcacctgcatccttcgcctcccggttcaagcgattctttggcctcagcctccccaagtaactgggatagggtt

SEQ ID NO: 199660 - DNA, 596 bp, Homo sapiens
caaggacctgtcccatctcaattttaacacagcgaaagttggggctataaaaggttgtgaaagtacattacaggcaacccctagtttcacagaagacaaaacagaggtcaggagagtttaaaacttcgctatgcaattttagccaaattagtagcaaaggaaaaggagactcatctctattcctcgtaagaatcaagattgttgaagttcagatttacatgagccattaataaagttcagaatggggccaggcgcggtggctcacacttgtaatcccagcactctgggaggccgaggcaggcagatcacccgaggtcaggagttcaagaccaacctgaccaacatgaagaaaccccatctctactaaaaatacaaaatcagccgggcatggtggtgtatgcctgtaatcccagctactcgggaggctgacgcaggagaatcacttgaacccaggaggggggaggttgtgatgagccaagatcgtgccattgcactccagcctgggtgacaagagcgaaactccgtctcaaaaaataaaaagttcagaatgatactgtttgaatccagctcccattgtaatggaaagccaagcagtc

SEQ ID NO: 199661 - DNA, 756 bp, Homo sapiens
gatggcttatgcctgtagtccagccacttgtgtggctgacgtgggaggattgcttgagcccaggaggtcacgtctgcagtgagccacgattgcactactgcgctccagcttgggcgaaagagtgagactctgtgtcaaacaaaaaaaagaataaaaagatttcagattgttaacagatgctgactggtgatgccgggggtaggggggtggaaagaagaaaaaagtggatttcggattggctgaatattttgttactaattttcactagctttttcaaaaatactataattcatataccatacaatttatccacttaaagagtacaagtcgctattgtttggtatattcatggagtctctacttttcatatactgtgctacatgattcagatcatgtagtgactgctagttaagtaaatggatttatttccttctgcaggatccctctacttaatgcagtagctacattcttgaaagttagcttgggcctggtgccatggctcacacctgtaatcccagcactctgggaggccaaggcaggcagatagcttgagcccaggagtttaaggtcagcctaagcaacatggcaaaaccccatctctacgaaaaatacaaaaattagccaggtgtggcggtgcatgcctgtagtctcaactacttgggtggctgaggtgggagggttgcttgagcctgggaggtcgaggctttaatgaaccgaggtcacgccactgcacaagcgagatcctgtttcaaaaaa

SEQ ID NO: 199662 - DNA, 514 bp, Homo sapiens
aagttcccacagcagcgacactgtttcatgggatctcctcaatggactgtgaaccctttgaagttttcctttcattgtagttgggtttcttgtttctatccagtctcccttctctagaaagctttagctgatttccaagtaagcgacaggacacagaatgacctaccccggcaaatagattcatttcaaatgtttccaaacctgtttccttgtgcaaaacaaaacagccttccttttaacgagaattttcattggcttttttttaattaagtttaaattggcaactaaaattgtgacattcccctgaagttgacaacacaatcatactttgcccaaagtagattgtagcttctcaaaattctacttgattgtatattttggaaactatcataaacactgcatcattgctactaagtgattcatgttttgagattatatgaaaagttctgatttctaagccatatttcttatgtggaatatttaacatttgaattcaatgtttattgacttgaag

SEQ ID NO: 199663 - DNA, 243 bp, Homo sapiens
cgcaaatgtcatagtgttgtcaaatggcagttcaggtactggtatactggataaatcatcttgtactgtttctaggggttgattctttttttttcttataaaatattcattatgaccgattcttgtttacaaatataaatgttttgatgatctacttgtttagccagcaatagaatttaccagtgtcttcattggagagaatttctcccagtggcctaaagtttactggagaactaatgaagg

SEQ ID NO: 199664 - DNA, 278 bp, Homo sapiens
taccaccatcctccctgcttatagtaagacgtggcacaccaggcactcccaaagctctggcctatatcatactctagacaggccctaaaggatggaggaggtctgtcaagagtagaccctatggctctcaagtagcctttagaaagaataaggggtcaccctgcaaggcagttatttggaaccaaaaggcaaaccaagtagttactaagcaggcctgattcagaagtagggctgaaacagctttggggtctgctactgagaggaagagagaaggcagg

SEQ ID NO: 199665 - DNA, 317 bp, Homo sapiens
tatattttccatttagataaaaatgttacctcttgaatagcatcttagagtcacaaataacctgaggttcctttagggaacaaacaatgaaagataagagcacattataagataatatatctaatagtttcccagaggcaacctttctatgactgataaacaaaaactgacagaacaaaatgtcacattttggcaacttattactttagaaagataattatataataggtatttggtaaccacaaggcattaagaacacctacaaatcggctagacatggtgggtcatgcctgtaatcccagcactttgggaggcag

SEQ ID NO: 199666 - DNA, 451 bp, Homo sapiens
tctgagaacattctccatcatagccaattcattcagtcagtggttgccatggttaatactgtagcctatttgattgtcataatttacataaaatatcaaatcaaccaaaaaaacccagatcatttatgttgtggtctagtcacatgcatgaacataaaactcaatctcgtgaccatgaatatgaataaagacaattttccttttggagtggtatcctagcatcagaggatgtccatttgcctggaacacctccaaaagcacctgctgttaaagtaggggttagcaaactatggcccatggaccaaattcatcccactgcctggttttgtaaataaagttttattggaacacaaccactcccacccattcttttacgtatagttcctttcacaaatgacagagttgagtagttacggcagggactaaaatatttattacctggcctttaaag

SEQ ID NO: 199667 - DNA, 450 bp, Homo sapiens
ggctaatggccgagggctggctccttctttctccctaatcagtgtccttatttcagtgtgctcacatgctcgcctaggactgctttagagtacaactctggacccgccctcatcacagtccaatctaccaaactgagtgaccctaaaggacatcatagacaacatttgaaagcaagaaatgcaaaatgttcccatagcatcaggtgagcagggagaggatgcccactgtagaccacatggaaatggcagtccctccacggagagggaatcacaggaacacatttaccaaagccttcccttccattcctggccattccagtagcatcttcctcatccagaagggcttccaatactctctggaggatcctgactcgtttggagtattatccttgtaaaagatgctggcacattgtaggtgctcaataaatgtgttcaattgaaaaatattga

SEQ ID NO: 199668 - DNA, 392 bp, Homo sapiens
tggacctgaaaagaatcccaaagataaccctggacaaagttttttagtttagctttccgaaacaactaatcttattggagaattaacattttgaaccctataaaacctatctgtttggccaggtgcggtggcatacacctgtaatcccagcacttagggaggccgaggcgggtgcatcacttgagaccaggagttcgagaccagcctggctgatatggtgaaacctcatctctactaaaaacgcaaaaattagctgggcgtggtggcgggcacctgtagtcccaattactcgggaggccgatgcaggagaattgcttgaacccgggaggcggaggttgcagtgagctgagatcgtgccactgcactccagcctgggtgacaagagtaaaaac

SEQ ID NO: 199669 - DNA, 368 bp, Homo sapiens
acaagataaataaaaacaggtcacaaacaaattggactcgtgtcagagttctcatcagtactggagatgatcagacattaaagctccgaagataaactattatttagaattctatacccagtaaaactatcaagcatgaggatggtataaagcatttttccacatgtgagaattcataaggcataccactcttgcccccctgttttagaaggtttagaatatagttcaacaaaatgtgaaaactgtgataaaagggaaaaaatgagatcagagaaacagaataatcacacaggataacaatgaatagaaatgccagaatgacaagcagttctcaaaacaggggtgcagagccagtgcggattggagca

SEQ ID NO: 199670 - DNA, 374 bp, Homo sapiens
aaatctttaatctatcttgaattaatttttgtataaggtgtaaggaagggatcattgttaagatgttctactagctctccattatcccttctttgaacttataatcaggcaagtgtctataaaaattgtgtaagactttgaaatggaccagaaaaaaaaagattgtagtctgtcttgcctagttcacccttccaagttctcacaaactttccttgtctttgagctattttacaactgtaaactgtagaaaactgatagtaatgcaggtgatttgtgtccatagaaatgcaaattgtgtttggtggtgatgcacttggttacttctcctgggatattgaccagttttatatctatttgtaaatttacttcagtgt

SEQ ID NO: 199671 - DNA, 2463 bp, Homo sapiens
  misc_feature (49)..(49): n is a, c, g, or t
  misc_feature (488)..(488): n is a, c, g, or t
  misc_feature (908)..(908): n is a, c, g, or t
  misc_feature (1013)..(1013): n is a, c, g, or t
  misc_feature (1692)..(1692): n is a, c, g, or t
  misc_feature (1882)..(1882): n is a, c, g, or t
  misc_feature (2334)..(2334): n is a, c, g, or t
agcaataaaacaagtcatatgaatgttttggtttcccagtgcatataangttttgtttacactatactgtagtctatttgggtgcaatggcattatgtctaaaaacaatgtaaataccttaattaaaaaatactatattgctaaaagatgctaccaatcatcgctgagccttcagtgagtagtaatctttatgctggcagagggccttgccttgatgttgatagctgctgactgatcagaatgtgtttggtgaagcttgggctggctgcagcaattttgtaagacaacaatgaagtttgcctccttgatggattcttcctttcacgaaagatttctccatagcatgccatgctgtttgatagggttttacccacagtaaatcttctttcaaaattggagttgatcctctcgaatcctgctgctgccttatcaacaaagtttatagaattttctaaaccctttgttgtcatttcaacaaattttcacancatcttcgccaggagtagattccaggtcaagaaaccactttctttatttaaccataagaagcaactgctcattcattgaagttttatcatgagactgcagcaagtcaggcacatcttgaggctccacttattctaattctcttgctgttgctaccatatctgcagttacttcttcctctgaagtcttgaacccctcaaagttattcatgagggttaaaatcaacttcttccaaacttctgttaatgttgctatttttacttcctcccatgaatcatactattattattattatttttcttttttttgagacagagtcttgctctgtttcccctggctggagtgcactgtcatgcttatggcttactgcagcctcaactgggcccaagtgatccttgcaagtagctgggtctacacctgantttttttttaaaaactttttatagagatggagtctccctatattgcccaggctggtctcaaacttctgggctcaagggatccacctgccttggcctcccaaaganctgagattacagacatgagccactgttcctggccacaaatgttcctaatgacatctagcatggtgaattatttccagaaggtttttaatttactttgccaaggtccatcagaagaatcactatccatggcagctatagccttaccaaatatatttcttatgaaacttgaaagtcaaaattacttattgatccatgggctgctgaatggtggctgtgtcagcaggcatgaaaacaacattcatctccttgtacatccccatcagagttctgaggtaacattgtcaatgaggagtaatatttcaaaggatttttttttctgggcagtaggtctcaagagtggacttaaaatactcaccaaaccatgctgaaaacagatatgctatcatttaagctttcttgtttcatttctagatgaagggcagtaggattttggaaatggtcagtgaccattggcttcaacttgaagttaccagtggcattagctcctaacaagggagtcagcctgccctttgaagctttaaagccgggcattgacttttgctctctagctatcaaatccctgtatggcttcttccaacagaaagctgatttgtatacactgaaaatccatacactgtttagtgacttccttaatgatctcagctagatcctttgaatatcttgctgtaacttctgcttncgtttttatgctatagagatggcttttttccccttaaacctcatgaaccaacctctgctaatttcccacttttcttttgcagctccctcacctctctcagctcgcaaagaattgaagagagttagggccttgctctgggttaggctttggctcaagagcatgttatggctggtttaatcactcaaacttnctccatatcaacagtaagacttttgttttcttaccattcatgtgttcactggaggagcaattttaattttctttgaaaacttttcttttgcatttacaacttggctgtttggtgcaagaggcccagtttttggcccattttggctttctacatgccttcctcactaggcttaatcatttctggcttttgatttaatgtaagagacatgcaactctttctttcaaacttgaacacttaaagcccattgtagagttattaattggcctaatttcagtagtattatgtctcagggaatagggagtccccaagagagagatggaagaatggctggttggtggaacagttcacaacatttatggatgcagtttgccatctgatatgggccccaatataattataatagtaacatcaaagatcccggtcacaagtcactataacaaatataataatantgaaaaagcttgaagtattttgagcattatcaatatgtgacacagataaatgaagtgtgtacatactattggaaaaattgtgccgatagacttgctggatgcagggttaccacaaaccttcaatttgca

SEQ ID NO: 199672 - DNA, 479 bp, Homo sapiens
acatcatacattttcccgtgcgtcatgttatcttgcctggaattttgaaaatctgtgagtttctggtttttccatggcaaggctcattcctccagaccttagtcactctgctctggctgcctggactgctagagaggggcctcagggcgcacctggagaaattcactggggcccaggtcagagggatgggtgggtgagagcaaccccttccttaatagttcaaaatggccctctggcttaaagagaccgaagccacgtaacaaccaaatgcaatgtgtgggccgtgtttggatcctgattcaaacaaaccaactggaagaggagatttggggataatcaggaagatttgaattgggactgcgtagcagaaaatagcaaagaattattgttaattttgatatgtgcgataatggtgtggtagttatagaagaaaacatgcttatcttttaaatggtgtatattaaagtatttaagggtga

SEQ ID NO: 199673 - DNA, 363 bp, Homo sapiens
ccggagaggccctaagcgactgcatagcgcgcacacctgtgaggccggccgagcagatatcaacatcggccacgggttccgacagggagagtgccagggacttcatggtcttcactgtaagggcctgcaaggtggccagaaagaagtacagcatcctggaaagacttccttgaaaagaggctctcagcccagccctcggtgccctcccagattcccacgctcttggggtttgggccgacttggcagcctctaatcgtttgatttgactcaagcgccacacttggtgggttcagtctccttcttgtaggttgtgtccattcctactcttgagattattttcatcaatctgttttgttattggca

SEQ ID NO: 199674 - DNA, 148 bp, Homo sapiens
ccatcccaaactacttgtggttctcaatgtgccatgtctccgtgcttttccttggacctctgcttgtactgtttctgcttaaatgtttttcctacttcagccatcatttaagatccagttaaatggtgcctcctctgtgaagcctctc

SEQ ID NO: 199675 - DNA, 535 bp, Homo sapiens
tgagccaccgcacccgacctaaaataatcaacattctttattttacttatcaatggtgaaaacacctttatgatctcattgaaaaaaaatagtagtacatttagtgatggtgttgtcattacttcatttagaatatatttgctagactgggcatggtggctcacatctgtaatcccatctaatttttgtatttttcgtggagacggggttaaatcatgtgggctaagctggtctcgaactcccggcctcaagtgatccgcctgcctccaaaagtgctgggattacaggtgtgagccaccatgctggtcccaagttattatatttttatattttcaacaaatgagtaaatcaaccactggaattctgtctgaagatttttaaacaggttagaaaatttggtgtaagtttttaaaatgtgcatacacgagagtttttatggtgccacacttttattgttttggataacaaaatagcctaatgataagacatttccaaatatctcatttcaaaatattttctccactgcataggggta

SEQ ID NO: 199676 - DNA, 477 bp, Homo sapiens
tgcacactcaaataatacctataatgttcaggcagatagttgagatacttggagcagggcaagtgttagattctggaaattagtgaggatcatgacaaattttcatttcatgtagaccaatgaaaactggcagctggatttggtgtttaggttatcaatctgtatttctgccttggatgaatcatataagctttgtatcctgggtttaccttgcttcaaaatgagtgagttaaattagacaccctaaagctcttttaaactctgaaattttaggggcatcttgacagtgattttgaagtgttttggaagctacaggtagcaactcactcaaatcactactggtcccttaatcacaaatcagcagccttctcttctcacactgcccagcttctgtgcagcagttgacactcttatcagccgcttccatcctgaaatcctctggttccttgtttatatatcctgattctcctctgactt

SEQ ID NO: 199677 - DNA, 447 bp, Homo sapiens
ataattttggcactatacatcaagaacttttacactctttgacctactattgttgcttctatggttttcattcctaaaactattggaaattcaaacaaacaaaaaaaagtgtaggaaagtattggcaatattgcatttctaatggtgaggaattagaaacaccctaaatatctaacaataagagtgtttcacttgtaccattttccacttacaaagtaccatacaattattaaaatggtggttatgaaaaatatttcatcacagaggaaaaatttacatatttgaagtaagcactattccaatatgatatatactctcatctcagctgttagtttaaagtgtgtaccaggtgaccaagtacagtggctcatgcctgtcatcctagcaccttgagaggccaaggagggaggattgagtgacagtgagactctgtcttcaaaaaaaaaa

SEQ ID NO: 199678 - DNA, 485 bp, Homo sapiens
ggccctagtaacttctgtaccttcctgtacaaaaaccaagatgaatatggtctaggttgggtgctgggattacaggcttgagccaccatgcccggccgcgtgttggtaaatcttttgagctggcagtctaattaatcctgagttgttaatataaagaacaggtgtggtttattactgtgtaaacccctttgtttagctagaagataaagccttctgctttttgatcatttgaatggcttatgttttggccctgttagggcctcatacaatggcttagcaattctgcaaaatcctgctatacccaggaaagttcttaggttttttttttgttgttgttgttgtttatagaggttttacttctaagtaaacttttgtttgatggacaaggtccagtttcctgagtttagaatatactacaggtatttcacttttggtagagaaatttgggcttggatggagagaactgattttttttaaggaagttt

SEQ ID NO: 199679 - DNA, 207 bp, Homo sapiens
gcgtgagatggtaaacacacatccaagccaggcagatggtggtggtgccaagttctggaaagtggtccatttattatgacctgtgtccccctcttagttagattttcatagtgatggataaagggaggtagaggaaaagattatcaagttccatatttgtggtctcctctctgtcttccctgccactatctcatctcatcttcttct

SEQ ID NO: 199680 - DNA, 295 bp, Homo sapiens
acactcactgttcctatcagctcgtgctgccagaggctgttgtcattgtctgttcatcaaagcataaagacatgcatggcatctccccgcttaccagttctggcacgtttgggctttccagctgaccaccaaggagcccaggctgtttagtttatgtaagtgtatgttggtaaaaaacataaaaataattatgctggatctgaggtgatatgtttctaatattagcatcatcaacatcagacgcctgcctatgggcatgtggttgcctgattttcttaagatgtttcagaaatga

SEQ ID NO: 199681 - DNA, 444 bp, Homo sapiens
tggggacagcttctggtaagccttctgagcctctgtttaggaccagcacgatgctaagaggacctccaggacaagagccggcagggaccacaagccaacaggcctctgacatcaccaggcctccaaagtcaggaatagataaaatacatcgaaacacggtcacaggggaacacaatgctggggaggacaccctctgaaggaaggagggctcggctcttttgaaacatggatggaaaactccagaagacagatatccttatttatgaggtgccccgatccctgagcaggcagtagaaccggccagccctcgaggccccccactgagcttctgcaagctgcatttcctgggcttctgcaagctgcatttcctgggcttctgcaagctgcatttcctgggcttctgcaagctgcatttcctgagcttctgcaagctgcatttcctgg

SEQ ID NO: 199682 - DNA, 242 bp, Homo sapiens
ttttacatatttttaaatttccaaacatccagaatttagaagctctactttcccttataattcttatgttctatggaatcactttgggaaatttatcgagtttttttttctataacctagtacataattgataaccatatttgttccaaaggaatttgaaaaatatgcacattctccatttggggaatgcagatatctatatttatttataatcaaagttattaatcatattttatgcaaat

SEQ ID NO: 199683 - DNA, 294 bp, Homo sapiens
tgtattgaatcaagaactccctggagctatcaatatttttttgttttgtttcagtagttttttgtttgtcttttttcctccttctcataatctttacttgggaaaaattacattgaattcagcaatcaggcttattctactcttcccaaaacaatagtggaaatgaaataatatgtatagcagcatattgtcaattcacagttacagtaatgcttatgaatgtggcatttagattcctgacagatgtttgcctgtgtaattgtttagaattatattttcaattgctttttttgt

SEQ ID NO: 199684 - DNA, 425 bp, Homo sapiens
tacatggtaaaaagttgcactcaacttgaactgaactttggtttccaccaacttccatgggttgttcctggccctgcgtctagaactacacagattctgcctgcaatgtctttcataacacatcctttcaagtgtttaaaaagctccaggtcctcctaaatggcatcttatcaaaaataatcatttcaaatgtggcatcattttgagatgctgtacctgttaacactttttcaatcacaattctatccatatccttgtttaaaataagaattccaaaacctaaaaaaacggtatatatttcatttctgtcacatcagagcaattaaggtagagtgagatttttcctctcttctctattaatggagccttaaccccttagtttctggtttgtttttcatacccataccacccaccctattagctta

SEQ ID NO: 199685 - DNA, 167 bp, Homo sapiens
ctcaactctctggagacctgactccagcctctcatcacactggctagaagtcaagcatgaatggtaacgccctgccctgaacactacttaagacactcaccgctcatccacagcttatcctcaaagctagcctggaaagctccttctggagctcagagtgctctctt

SEQ ID NO: 199686 - DNA, 503 bp, Homo sapiens
ttacaggcatgagccaccgcgcctggcctggaatggaccactttgtatttccattgccattatcctagtctgaaccaccataaccacttgcctggactatttcaacagcctcccatgtagtccctctgtttccatttttggtctcttaccctcatctctaccacaattcattatcaaaacaacaacaaccagagtgccccttttaaaccacaaatctggtctcacaacttctaggttacaaccctaactcttcaagatttcctacctctcttgggatacatccaaaatagtgattatgacctactaggtcctacaagatgtaacccctgcctccatctctctctacgacactttctcacaatagatttcccttcagaaccccaaaggagctcagctccttcctcagcgtcttaacatgcattggccctgctgcccttcccctaatgcctactattttagcctttatatcagctttaagaggttgtctccaatgcctcacagtc

SEQ ID NO: 199687 - DNA, 467 bp, Homo sapiens
agtcaaatgtttccacttagcacagtaatcttcatcctcaactctcatggtagaataataacaacaacaataataataaatagcattgccaggcactgttctaagtgatttacaatactgattaatttaagtcattaaattattttatgggtaatgtaattaatgtgttctaacaatcaggccgggcacggggtggttcacgcctttaatcccaggactttgggaggcccaggtgcgtggatcacctgagatcaggaattcgagaccagcctgaccaacatagtgaaaccccatctctactaaaaatacaaaaaaaattagccagatgtggtcgtaggaacctgtaatcccagctacttgggaggctgaggcaggagaattgcttgaacctgggaggtggaggttgcagtgagcaaagagagtgccattgcactccagcctgggcaacaagagcggaactccatctc

SEQ ID NO: 199688 - DNA, 311 bp, Homo sapiens
taagtaagcgtagtacccaagtagtgctgagagaacaggggatggattggtcagactgaacatgctcacaaatagccccaaggaagcccaaaccttctcagtgaggagacttttaaggccaaatttcactctatattctggaaaaacaaatgaaatatgtactagattagaatgctatttcaggaaattaattatgtacacagacagcaaattaaatatatggtcccatttggtaactacagaggtaagaaagtcttaagggattaaaccaagagaaaagctgctgcatttgggtactacgctttgggccc

SEQ ID NO: 199689 - DNA, 440 bp, Homo sapiens
tgcgcaggacccagatcacttagggcttattgatttttatgattagtacttaggtcgctgctaaaagcagatgggtttccaatacatttctgaaacctaagaggcccttcctccacaatccatcttcaagagcagtggagaactcactgtccccatttcgctgatcaggcaattagtaaagaaaacttgccaggcgcgtctgacgcctgtaatctcagcactttgggaggccgaggcgggcggatcacctgaggtcaggagttcgagaccagtctgaccaacatggaggaaacaccccctccatctctactaaaaatacaaaattagccgggcatggtggcgcatgcctgtaatccaaactactcaggagtctaaggcaggagaatcgcttgaacccaggaggtggaggttgcggtgaccgagattgcgccaatgaaact

SEQ ID NO: 199690 - DNA, 555 bp, Homo sapiens
cacatgcatgcatgcatacatgcacacacatgatcagaaaaaagccctccagaaattgacctaatttggttgtactttcaatttatgtaaaccccactttcatggacactgagggacaagagaaactgtcccatggccatccaagtacttccagattgtatccatgcctcccaaacccaccgcctgcccctctcagggtaaagcagagctaccctcactccagtactaactgcagccaggcctgcctctggccagctgcaaaacctagtgagagtccctttgcttctctgggcctcagttttctcatctgtaaaatgaaggggcgggcctggagagtccctggggccctctgcagttccagcatcaggactgaggaggctgctgggctctcaggtggaggcaatttcccagatcactgagccccacctggccaccattgtgtgaggcctcccctgggcattagccatctggaaatattgccatccatctttctgaatatctggttaaaacacttacctaatcctaacctaatcctttcaatttggggagagaatt

SEQ ID NO: 199691 - DNA, 125 bp, Homo sapiens
gttatcgagacagtatcagaagagaaattgaaaaatctctgttgagactctgtaatttgctaggttctgaggatacgacagtaaataagttattaggtcatatacctcagcttcccatttaatta

SEQ ID NO: 199692 - DNA, 161 bp, Homo sapiens
cttgaggttgttcccccagcagaagctaatgcaagtcaacaccctgaagctaatgaaggccaacacccttgggatcagagtccaaagtcctcaaggataaggatgcaagaagcatccatttatcagaggttctactcagaaaaggctgatgggagaagtag

SEQ ID NO: 199693 - DNA, 124 bp, Homo sapiens
tgtgccgccacctgatggaagattcgatgggcatgtatgtggacatgagccccctgaggccccagaactatcttttcggttgtgaactaaaggccgacaaagattaccactttaaggtggataa

SEQ ID NO: 199694 - DNA, 438 bp, Homo sapiens
tcagccaagcctccttgccattgctatttccactgcccaggaagaagaactcttgtacggtcagttttggatttggtgcagctactgggcagaacttaggagttttctgtaaaactactaggagcatggagacttcaaggcatgtggctgagggaatggttaataggtacaaaaatatggtaatgtagaatgcgtgagatctagtatgtgatagcacaacagggttactacagtcaacaatttattatagagttaaaaataactaaaggggtataattcgaatgtttgtaacatggagaaaggataaatgcttgaggtgatggctacccaatttaccctgatgtgattattacacattgcatgcctgtatcaaagtatctcatgtaccccataaatagatacacctactatgtacccacaaaaattaaaaactaaaga

SEQ ID NO: 199695 - DNA, 444 bp, Homo sapiens
ccccgtcacctcctacagtcctttttgtccacagcaaccagagcgatcttgctaaccccaccttagactatgacactcgcctgttcacttcttctcccttgtgatgcccctcctgggactcctcatcacactgcagtgagagcgagaatcctttattgagcctgctgctccatggaccctctaaacacagcccggcctctaggttcttgcctgtgctgtttcctctacctgggaagtcctttccccagatctgcccctggcttggtctcctcatcatgctttcagttctgtgctcaaattttcccttctcagaagaccttccctggccggccattattttaagccagaccatcccaaacctttcctctacatttaatgagactttctcaccactttaacaggacatattcatagaaatggatatatgggtgtattagtccattt

SEQ ID NO: 199696 - DNA, 221 bp, Homo sapiens
tgatactggaccccttcccactgtgagaaacacgtgatttgggagtgaccaaaggtggaataatatggtctggctttgtgtatccacacaaatttcatcttgaattgtaatatgaattgtaatccccacgtttggggagggaactcacgggtgcttattagatcatgggggtggttcccccatgctgttctggcgagatcttggctcactgtgggcaaggg

SEQ ID NO: 199697 - DNA, 432 bp, Homo sapiens
gcagccactttgttttggccaatttctcccatttgaaatgggtgtatttacccaatgcctgtacccccattatatcttggaagtagctaacttgcttttgatttcacaggctcataggaggaagggacttgccttgtctcagatgagactatggacttagactttttgggttaatgctgaaatgagttaagactttggggatctgttgggaaggcctaattatgttttggaatgtgagaaacacgtgatttgggagtgaccaaaggtggaataatatggtctggctttgtgtatccacacaaatttcatcttgaattgtaatatgaattgtaatccccacgtttggggagggaactcacgggtgcttattagatcatgggggtggttcccccatgctgttctggcgagatcttggctcactgtgggcaaggg

SEQ ID NO: 199698 - DNA, 836 bp, Homo sapiens
gggggacatcgaggtggagaagacgcagcaggcagagggggacatcgaggtggagaagacgcagcagagcgggggacattgaggtggagaagacgcagcaggcagagggggacatcgaggtgagaagacgcagcaggcagagggggacatcgagatggagaagacgcagcaggcagaggggaacatcgaggtggagaagacgcagcaggcagagggggacatcgaggtgagaagacgcagcaggcagagggggacatcgaggtggagaagacgcagcaggcagagggggacatcgaggtggagaagacgcagcaggcagagggggacatcgaggtggagaagacgcagcagacagagggggacatcgaggtggagaagacgcagcaggcagagggggacatcgaggtggagaagacgcagcaggcagagggggacatcgaggtggagaagacgcagcaggcagagggggacatcgaggtggagaagacgcagcagagcgggggaagacacagaggtgcagaagcctccaggagacacaggagagaggatgagaagggatcaagcccattgaccttttgtctgttcgcatctattttcatcgttaggtttttcactgttattttgtagcatgaaaaaaaagaagatctgagtgctaatttttttcattttacttgtccttgtgcgatttaactcatgacttctgtacctggctgctgtgcatgtagaggcaccctctgaataaactccctagacggcggccacatgagttgctctggaaaactaacaagtctgagtcaggcgagtgagaatgccgaagcgtaagacacctcgctgtc

SEQ ID NO: 199699 - DNA, 602 bp, Homo sapiens
  misc_feature (23)..(23): n is a, c, g, or t
tcctaggcaatagggagaccccngtctctacaaaaaatacaaaaatttgctgggggtggtggcatgcacctttagtcccagatactcccggacatcgaggtggagaagacgcagcagacagagggggacatcgaggtggagaagacgcagcaggcagagggggacatcgaggtggagaagacgcagcaggcagagggggacatcgaggtggagaagacgcagcaggcagagggggacatcgaggtggagaagacgcagcagagcgggggaagacacagaggtgcagaagcctccaggagacacaggagagaggatgagaagggatcaagcccattgaccttttgtctgttcgcatctattttcatcgttaggtttttcactgttattttgtagcatgaaaaaaaagaagatctgagtgctaatttttttcattttacttgtccttgtgcgatttaactcatgacttctgtacctggctgctgtgcatgtagaggcaccctctgaataaactccctagacggcggccacatgagttgctctggaaaactaacaagtctgagtcaggcgagtgagaatgccgaagcgtaagacacctcgctgtc

SEQ ID NO: 199700 - DNA, 386 bp, Homo sapiens
acagaagctgctcagtatcaggagctggagctgcctgcaatctggccactcagcaagaattttcagagactgtttctattccatagtggatgctccatccaacaccattcttttaaagtgcgcacatctgatcactttccaagtataaatggcctgaatttattttcctttctttaccaaaatccaacctaagtaatttttttctttccatactccttattcatgaactctaattgttggtaactttgagagcattggtcatcttaatttcttaccactaatgacatgacaagttaatttctgcaataagaacagctaaaattatttttatatcttctaacataatattttgtcatgaatgctttcctagaatcttccttctggaa

SEQ ID NO: 199701 - DNA, 236 bp, Homo sapiens
aaagcaaatgatatattgggggaaatatgatgaaatatgtgacaaagtatagtttcataatatataaaaagtgactgcagtcaataagtaaaaaggttagtaccctaacagaaaatagacatggcatataaacaagaaacaaacaaaataagaaatgcaaatgaccaataaacatacgtaagtaaatattgtttcactagtacccaaagagataccaactagacaatagtcaggtt

SEQ ID NO: 199702 - DNA, 277 bp, Homo sapiens
agccgcgaccccttcaacatctcatttcttgaggtgggagatccattccctcttttcagggcttggtaactggtaagttaggctgatgctcaagactgaacagagatggagccctttggcaacagtgcaggcatcagggctagagctgattcctctgccagcgtggaaaggaatgatcttttttgtgaatgtctgctcctcacccctacctcaccaaactggcaaagcttggtttccttcatctttctcctcttctgcccatatggatctgaagttt

SEQ ID NO: 199703 - DNA, 606 bp, Homo sapiens
gtaaccttggctcctgttcccagtaatttcctcattttcatctgagaccttgtaagcctggccttcactgtccatccttctgccagccttttaatcacaactattcaacaagtgcctacaatcgtccaaaatttctttcatcttcctgtcttctttcaagctctccaaactctccaacctctggctgttacccacttctgaatctgctttacattttcagctatctttgttgcagcctgacaatgtataagaaaaagaagtccattttcagggggaaacttcaagacggcttcagatatttgcattaaaaagaagtccagtgctaatagccaagacgatgggggaaaaagccttggaggcatttcagagatggttgcagcagcccttggtgtcacagaccctggggcctaggagagaagaatggtttccggggccagccacatggacctgctgctgtgtgcagcctcaggatactgctgcctgcatcccagcagacgcagctcctgatccgaccttggctgaaagatgcacaggtacagattgcatcactgcttcagagggtacaagctataaggcttcacggtttccacatagtcttaagacagg

SEQ ID NO: 199704 - DNA, 720 bp, Homo sapiens
cagagaaaacttaatggaagctatggaacttgagccaggaatcaaaccctggttgaaatttagataggctgggttgggggaggaggccaggagagattgtcccttgtacgaaggcatgttctgaaggtggccatgggaccatcaacccttaaagtaatctcagtcttcccagcctttggccacctgctgtaccttacgtctgtctgccatcattactgcctgaaagacctgaatattcctaccttgcataggtgtcaagaaaactcacacctgataaaagggcaggtagagagaggccacaggtcattttagggtactttgtaacttaaagaagagacaagtagatcaatcaaattagggaattcctgtccaggcagacataatagaagaaacaaaagagaacttaaaatagtaataaaaccttgaagcctctagaagaaaaataggagaactttcaaactcagggtaggcaaagatttggacagagcacaaaaagcactgtttgttttagtttgctactgctgccataacaaattaccagaaatttagcatgttaaagcaatataaatgtattatcttacagttcccttagattagaaatccagtgtgctcactgggtctttgcttagagtctcacaacaccaaaatcagtgttagcagggctggatttatttagaaggcctctggggcctatttcctatctatttccttgctcattcg

SEQ ID NO: 199705 - DNA, 855 bp, Homo sapiens
  misc_feature (597)..(597): n is a, c, g, or t
  misc_feature (822)..(822): n is a, c, g, or t
  misc_feature (827)..(827): n is a, c, g, or t
  misc_feature (830)..(831): n is a, c, g, or t
  misc_feature (839)..(839): n is a, c, g, or t
gccggaagtggaagtggaagtagaaggcggtggctgaggcggttccggaggttctagtgtcggagttgggtgcaggcaggtgccatgggcccgcttgaggcacactgaggggacgcggggctgggccatggccggcgctcgggccgccgccgccgctgcctcggcggggtcctcggcctcttcaggcaaccagccgcctcaggagctggggcttggggagctgctggaggagttctcccggactcagtaccgggccaaggatggcagcgggaccggcggctctaaggttgagcgcattgagaagagatgtctggagctgtttggccgagactactgtttcagcgtgattccaaacacgaatggggatatctgtggccactatccccggcacatcgtgttcctggagtatgagagttctgagaaggagaaagacacgtaggacgagtaccgtaacaggggctttggggggccacaaaccgagaaaaacccccaaacacacaacacaacaaacaaaagggcatttaaagggggcaaaaaggaaagactcattccacacggaaaggcaagatggcccggtgcagaggacggttatgtctngcccagtaatcctgttcaagggcaagcacatttgcaggtcggccacactggctggatggggagagctgtatggacgctcaggctacaactattttttctcagggggtgcagatgatgcctgggcagatgtggaggacgtcacggaggaggactgtgctcttcgaagtggtgaacacgcatcttattgataaggtcagaggctatgacatcaagctgcttcgatanctgtnagnncaaatacntctgtgacctgatggg

SEQ ID NO: 199706 - DNA, 778 bp, Homo sapiens
  misc_feature (438)..(438): n is a, c, g, or t
  misc_feature (472)..(472): n is a, c, g, or t
  misc_feature (520)..(520): n is a, c, g, or t
  misc_feature (745)..(745): n is a, c, g, or t
  misc_feature (750)..(750): n is a, c, g, or t
  misc_feature (753)..(754): n is a, c, g, or t
  misc_feature (762)..(762): n is a, c, g, or t
gccggaagtggaagtggaagtagaaggcggtggctgaggcggttccggaggttctagtgtcggagttgggtgcaggcaggtgccatgggcccgcttgaggcacactgaggggacgcggggctgggccatggccggcgctcgggccgccgccgccgctgcctcggcggggtcctcggcctcttcaggcaaccagccgcctcaggagctggggcttggggagctgctggaggagttctcccggactcagtaccgggccaaggatggcagcgggaccggcggctctaaggttgagcgcattgagaagagatgtctggagctgtttggccgagactactgtttcagcgtgattccaaacacgaatggggatatctgtggccactatccccggcacatcgtgttcctggagtatgagagttctgagaaggagaaagacacgtntgagagtaccgtacaggtgagcaagttgcaaganctcatccaccgcagcaagatggcccggtgcagaggacggttatgtctngcccagtaatcctgttcaagggcaagcacatttgcaggtcggccacactggctggatggggagagctgtatggacgctcaggctacaactattttttctcagggggtgcagatgatgcctgggcagatgtggaggacgtcacggaggaggactgtgctcttcgaagtggtgaacacgcatcttattgataaggtcagaggctatgacatcaagctgcttcgatanctgtnagnncaaatacntctgtgacctgatggg

SEQ ID NO: 199707 - DNA, 464 bp, Homo sapiens
atgaaacaatgtgacctaatttacaggactgttataagaattagaaatgacattttaaggcacctagaacagaattaacatatattaggcattaaaggaagatttctgctattattacattaaagggataaggtgcctgctctatcaaagcgtgtttgggtgttttcttggaaatcaagcccactctgcccactgtgtataatgctgtgacctgatcccacacatatatactcctaggcccttactctgctctttttattccatagcatttattaccttttaacccactatataatttacttatttttatgcttattgaaacctaacagaatacaaaccttataaaggcagagatttttgtttgttctgttcactgacattcataccacctagaaagtatatggcaaaagatgggtgctcagtaattatttgttgaataaatattgcaattctgtattactaga

SEQ ID NO: 199708 - DNA, 692 bp, Homo sapiens
cagatggtttgaggtcaggagtttgagagcagcctgaccaacttggtgaaaccctgtctctactaaaaatacaaaaaaattagcagggcgtggtggtgcatgcctgtagtcccagctactcaggaggctgagtcaggagaatcccgtagtcccagctactcaggaggctgtcaggagaatcccttgaacccgggaggcggaggttgcagtgagctgagatagtgtcactgcactccagcctgggccacagagcgagactccatgttaaaaaaagaaatgtttctgagcactaaagacaatttgaacaaggcagaaaagtacaaataggaaaacaataatcttactagattgtttgtttttgagacagcatctccctttgtcatccaggctggaatgcagcagcacgattatggctcactgtagctgcgaacttctgggctcaatcaaccctcccacctcagccttctaagtagctgggactattctgtagtgataatccttgttaaagttttggaaaataccttttttagagtctctctttctctctacacagacacacacacacacatacacacatgcaacttttatgtgaatgacggcatttacaatttacgtaaattactgcaggtgctatcatttatttttttcactcagcaatatgccttgaaattttcgctcagctcgtctttttt

SEQ ID NO: 199709 - DNA, 610 bp, Homo sapiens
taaccatctgcagagacatgtccaggctttcttgtgtctgcagaggtgaagtgcacatgtggaaagggatcaaatgtagcacagtgtaaagaaagacagcaacacaggtagagggacccagtgtgtgctgggaggtggctgtggaaggtaagtatagacctacatctctgtaggggaggtggtcagggcagaatggcctgggtgtttagcagcttctaggggtgagggtggcaggaccccaaaaccaaggccctctgcatcgttgttgtaataatcagttctggcattgaccgttagcccccgagaagctgctggccaaatgactgttaccagaaggtgcccaggcagatgctggggctgaacaatgcatggcgtcttcccaccccagcccccactgctccaggctgagcccagtggctctccagggtctcagaggtcctcacgtggctgcccctttccagactgaggcagggaggtgggtcctaacagaggaggcccgcggggagaggaggaggcagcagggagaggaggaggcaggggggagaggaggaggccacggggagaggaggaggcaacggggagaggaggaggcaggggggagaggaggagg

SEQ ID NO: 199710 - DNA, 490 bp, Homo sapiens
ctgatggggttggtgagaaaatcgtgagggcgtgcaccaaggtcttgggagaaggggcagcgggtgcaccagctcttcatcttgagcccttaggaatgtgatttgcttctttatcatgcccttgttgcagggctcataaccttcagttgtttctggattcagtgtggctgtgggccacagataagcctttctgactactactactaaaatggggctgaggaggcagagcctcttttcccagtctagggcaggcaactctgtgttctgtcctctgttgctgggttgctgccactttttgtaagagggtggtgttcagctcgccctttgtgaaagcctgagtggtcatgggctgacggtggagctaccatgaaaagcacaaaagacactttctttgaggcatgcccactagcctgtggcaggaagaacactgctgactccacaacagtgtactgggggaggccaggagatgaccctctctccacgtctcttc

SEQ ID NO: 199711 - DNA, 668 bp, Homo sapiens
tgaatcgagctcggtaccgcatcgaagtctcttgcatcaaaagaaaaaaaatacaaaaacaaacgtagagggtggactcagtggctcacacctgtaatcccagcactttgggaggccgaggcaagtagatcaactgaggtgaggagtttgagaccagcctgaccaatacggtgaaaccctgtctctactaaaaatacaaaaattagctggacatggtggcatgtgcctgtagtcccagctactcaggaggctgagacaggagaattgcttgaacctgggaggcagaggttgtggtgagccgagatcacaacacttcactccagcctgggtgacagagtgaaactccatctcaaaaacaaaaaacacaaaacaaacaaacctaaaaatgcaaggtaaaatgtaacaagaagactttggaatacacgtgggaatgaacaagaaagtgagggaaattttcaaaagtcagaaatgggggcaactaaaatcctgaactggtaacactttaaggctgctgggacaagagattgaggtggtagttattgctgttgtataatagttttgaggtttgatacaatttaagaatagaagatgaggtcagaggtttgcctgaagcagttaggtggagctaagagccttgaagagctatcaataaaatggggaatttggaa

SEQ ID NO: 199712 - DNA, 442 bp, Homo sapiens
ttagaggaccccggattggcgaccatttcaactttgctgaatctgaaaattacgtgtcttggagttgctcttctcgaggagtatcttgtggtgtactctgtatttcctgaatttgaatgtggcctatctagctaggttggggaagttctcctggataatatcctgaagagtgttttccaacttggttccattctccccatcactttcaggtacaccaatcaaaagtagatttggtgttttcacatagtcccattttgccatacagatttgttttacttttatttgttttaggtatagaccatttattttgtgccttctgggttctgtgtcatacatagaaaggtcatatctagtctcacactgcggtgaaatcattcatgttttcctttaactgtttcacaatttttttgttttatgttgaaatgtctgacctacatgtaaa

SEQ ID NO: 199713 - DNA, 442 bp, Homo sapiens
tctctgcctctcctctcctctgtataaggggacagtaattgtcctctctcccttagaaggcgatgccattgttaagtgtgtcaccacgtgtaaagcactgagcaccatgtctgcacataggaagtgtgcatcctattaactaaaagtcagtgcgggccaggcgcagtggctcatgcctgtaatcgtagcactttgggaggctgaagtgggtggatcatctgaggtcaggagtttgagaccagcttggccaacatggtgaaaccccatttctactaaaaatacaaaaattagccgggtgtggtggtgcacacctgtaatcccagctactcaggaggctgaggcgggagaatcgcttgaatccaggaggcggaggttgcagtgacccaagatcgcaccattgcactccagcctaggtgacaaagcgagactctgtctcaaaaaa

SEQ ID NO: 199714 - DNA, 685 bp, Homo sapiens
cttagttccatgtgggcatttagcaaatatttagcattcttgtattcaggagaacaaagctgagaaactcttgttatcatccacacacacttgatgagcacagtccagaacgtcagtgctggcccagctcagcagctggaggaacagctactgatagcactctacaggcgcttccagtactcgagaaacaggagagcggttagcggggcaggttctagagtcaaaaggcgtggggccaaattctgccatcaatagctgtgaactctgtgccatgatttcctcaactggaaaaatgggcagcaacagaatccatcttggaagatcagtgtgaggactgagtggacacaaggaaagcactcagaacggtgctttgcaccaagtgttcatgtgtgttagtgatcctatcattattcccatagtcagatcaggggccaaatgtacagaagtgaaaacttttctaccagagtgtgactggatacacagaatcttgtttctggaatttatttactagtaggtgaaactgggcaaatcgcctaaaatgaatcctagtttcctaagttcatcactgataaggttgttgcaagattgttcatacatatcacaaagtactaagccattgaggtactcaccctgagtcctttccttctccctagttttagctcaggaaataatttgcaaatatctg

SEQ ID NO: 199715 - DNA, 484 bp, Homo sapiens
catcaggttttttatgggtctatgaaatgggtcaaggggacttagctaagaatgaccgtgggtaaaatgcatgacaaggagggatacagacaggagatgaatctctcagggtccaagagaccagggtaagatgtgcagattccttcctgtgtatgatggaaatgttttacagggtctgaagggggaagtttagaaggacagcctgctgaaatggggacagcttgaaatgcagagcaaggcagaatgcagacaacactccaaggcatctaaggagccaaacagaggcagtgggaatagaacagagtgaatcagagacaggttaggagagaaaatgagcagcttccatgttcatatttgcttgcatatgcataaaatgtcactagaagattctcagttaactaacactggttacctgtggattagtgaaatgggtgacaggggaatgaggatgagagggagtactttcactctagagccatgcgta

SEQ ID NO: 199716 - DNA, 207 bp, Homo sapiens
atacctgaaggcagagggcgaccctttgacgtctcagggccatatatcagttccctaacagtgaagcccacaacaagcaagaatttctgacatgacatgggaaaagctgaagaagtcagtctttggggtgtgttttcatctaggaggtggcttgagatggattcatggcaaatcacaataaattatttatcagataataaaaagtga

SEQ ID NO: 199717 - DNA, 434 bp, Homo sapiens
aggtgaaagaaaactaaagaaataccagtgcagaaaggaagttctttattttcaggttgctcaagctaaaacaataagcagcatttcatggatgactggcatgtcgccttttactcctcaaggcagactcaagagttttcccagaaccagaggacgagccccttggccatgcagccctaagccaggctgatccagccttgtctcgcccctctctgcaagagactcgtgggtacaggatgattgagggggccccagcctccccagcagctgctgacttgcgcttggaaattcaatcctctcaaggcaagaatttctgacatgacatgggaaaagctgaagaagtcagtctttggggtgtgttttcatctaggaggtggcttgagatggattcatggcaaatcacaataaattatttatcagataataaaaagtga

SEQ ID NO: 199718 - DNA, 264 bp, Homo sapiens
atgctttacatctctacattccagttacaacttcctgaggatagagcctacatagaagttcagcaaatatctggtcttttccacacctgggaagatgtgggtataggccactatgtgttttcctttcaaaatggcaagaatttctgacatgacatgggaaaagctgaagaagtcagtctttggggtgtgttttcatctaggaggtggcttgagatggattcatggcaaatcacaataaattatttatcagataataaaaagtga

SEQ ID NO: 199719 - DNA, 437 bp, Homo sapiens
ggctggtcttgaactcctgacctcaagtgatccgctcacctccacctcccagagtgctgggattacctgggcctgtcagattttagacacctctggtaatctgtcagtttcatctcttttagaaaatcaggaatcttatcacctgctctgatttggaagtggccttagcatttcattttcctgtcatcctggagaatccttttgtctctctcattttgagtctcttgtttctgaattcagtgcatgccactttttttattccattggttttgtaagtgcatactaggtgatagatgaataacatagtgaagctagatgacctgattttgaattcttgtctgtcattttctaacagcttacatatctgtaagcaaatatctgtaagtggggtgtaattatagtgcctgcctatgggaaagtctaaaaattaaatgcca

SEQ ID NO: 199720 - DNA, 659 bp, Homo sapiens
gctaattttttgtattttagtagagacgccctgttgtcccggatggtctggaactcctgagctcaggcaattcacccccctcagcttcccaaagtgctaggattacaggtgtgagccaccttgcccggcaatttttgtatttttagtagaggctgtgtttcaccctgttggccaggctggtctccaactcctgaactcatgtgatccacccacctcagcttcccaaagtgctgggattacaggtgtgagccaccgcacccggcccacttgcttaccttttatattattttgaagtaaatccaagatatcatttcatctgtaaacataaccatacacagtattattatcatgctttaaaaagtagtaaacccaggctggacgaggtgactcacgcctgtaatcccagcactttgggaggccaaggcgggcggaacacgaggtcaggagatcgagaccatcctggctaacatggtgaaaccccgtttctactaaaaatacaaaaagaaaattagccgggcatggtggcggatgcctgtagtcccagctactcgggaggctgaggcaggagaatggcatgaacccgggaggcggtgcttgcagtgagctgagatcatgccactgcactccagcctgggagacagagcgagactctgtctcac

SEQ ID NO: 199721 - DNA, 653 bp, Homo sapiens
gctcactgcaacctccacctcccgggttcaagcgattctcctgcctcagcctcctgagtagctgggactacaggcgcgtgccaccacagccgtctaatttttatatttttagtagagatagggtttcaccatgttggctaggttggtcttgatctcttgatcttgtggtcttcctccttggcctcccagagtgctgggattacaggcatgagccaccgggtccggccagaatctacatcttaaactgggtttccaaaggattcagatgcacatttcagttttgagaggctatgtcctaggttccctgttgatccatgccactgtgggtgatagcatttgcagatagtaaggattctgctaggcctaggaagcttcctttgatattctcagggggtcttttggctttctgaactttcctccttcctagtgctctggagatgatgcctttctacctccctgcttagcaggtaggaatagttggacaaaatgtttctgtggcccggtgtatttattcaagacttccccaggagcttctcctagtaggcttcaggcctctgggaagtccctttatgcagacttagagcagcactaaaggcattcatagtctgaattggggtggtagacaggtatgcaattccagtgcctttagaatt

SEQ ID NO: 199722 - DNA, 339 bp, Homo sapiens
tgagggagacagtgctgataccattttcaaatgaatatagagtttgtagaatttgtcataaaagcataatgcaactcatctgagaggggagagctgaaaaggaagttgaaagtctggttgaacagtagatgaacaatagactaagcagcaaaatgaccagtttggcctcattatcagtatttggcctctggccaagtcaaccaagttaagggcagcacacacagaaacagagctcggagttcctaattttcagtcctacagtcctgtgttttccttagataaccaggaggccactaataagctggttttattcccactttttctttttttttttttgag

SEQ ID NO: 199723 - DNA, 538 bp, Homo sapiens
attcattggcttcctggcccactccccatgccatttctcctggccttggtcagtttttaaattttaaactccagcctggggcagagcattatacaaggagttttgataattataacacaggaaactatccatgtgacatttaggcatttggattcctaaggtgccagaaagttatttgtattggaataggtcctaatgatttaattcacctaaaagagaaatagtctcggtccaaatggtaactatttcagaatagaattaaatctggtacctgaacccacagtagcattcacaaaagcctatacttttctggacagaaattagtaatggcaaaccaatcactttccttgaaatacatttgtttacccaatcataaatgaccaattaaattccttattattgagaaggtgaaggtcctatttcaacacccaaactactcagaattctaaggctccttccctcttttcatgccaggcattgacacacacaactcaatttacctttaagaacacttccacatggtgaaattgtcaaatct

SEQ ID NO: 199724 - DNA, 377 bp, Homo sapiens
tttgcacaggttattaatcactctgggctgtgatgtacacagaccaaaagaaagaaaaaaagtcagtgatggtggggggcagtgatggagtgatggggagccatgttgaacttcctcccttcctcattctttgttgatttgtaattaaatccagacttagcaggagtatcattacattgtgaagatgagctggaaactcttttcaagttaaatttcttaacattatcccctgcagtaggaagggcattcacactgtgaccaatctttaaaaacaaaacaatgctaaatagtgcttgcatatttcaagtaaagattcctccttcagaaagacttggcatttgttgtaagtggtgttatgacaccatggtatagaaaac

SEQ ID NO: 199725 - DNA, 526 bp, Homo sapiens
tctatcagaaatacttcttaacgaaaatttttgtttctattgatgggagaagccctaaagaaaatctcccagaaagagtaattagatcattttatgaattaaacttaatttaagcagtgcttaacctttgaggaaattggcaaaaaaaaaaccacattttttaatcagcccattgatccaagcttgcagagttgtaaatatttctatttcaagttgtctgtgtagtgcaaagcagtcatcttccatcctggaatgttctcaaggtgacatctagaggatgttgtggtgatatctcagggagttattgatacttttatattgcagagggaagttttggcaggcagctagtttaagccaggtcccttatcattgatggtactataaaagggagtatccagattctttagaatcacagtgagattcttcattcttgcataattcatggggataaaataaactttaaaattctggcaccaaaataaaatgattgaaatttccatgactgttttgcattacttaagaacac

SEQ ID NO: 199726 - DNA, 388 bp, Homo sapiens
tctagtattagaatatttttggctaaaaaattattttgaagcataaagaagcttttgtttgctctggtgattttcataacatattcacattcttaatgtatttttggtttttcagaaagttacttctggcctgtgttctttcagaatataggttgcagcttgtgttaagtgcaggaactattgatagactgagtttagaagaagggaaaattggtataaagtggttgtgtattttgaacattggggagcttcatagatgagttaaattgttaggatatggattaagaaatgttgggttaggccaggcgcggtggctcacgtctgtaatcccagcactttgggaggccgaggcgggcagatcacgaggtcaggagttggagaccagcct

SEQ ID NO: 199727 - DNA, 572 bp, Homo sapiens
gtgatctgcttgcctcagcctcccaaagtgctgagattacaggcatgagccaccgtgcctggccaggtcctgatacttctaaggccagccactgaagaagagcatgggtcaccaccacttgggaacttaacccacccctcttcttattaatacttacatcccaagaagtctactttctcctcttggggtggccacttcccttgcctctggaagctgtggtcttaaggatgggcaaaggaggccaggattcaaaacaccaggtctttttgccctttctaaacatgggtgaagaggaagaaagtggacactctcatataatgcttttgtgaatgaatctgttaccaaaacaccaggagatggatctaagtcctgctactctctgcacaggaggccaatcatggagatgagcattaccagggaagaggctttatttgggtgctgcagctgatgggagatcagtctcaaatccatctccctgaccaattaaaatcgggggcttatatatacagcagggaagaaatgtaactacgtgcaggtaaagaggaattagggagaagtgaagaaataatgag

SEQ ID NO: 199728 - DNA, 200 bp, Homo sapiens
ggaaatttttttttcgctattgtagttttagagcctggaacagtccctggcacagaagaattccattgaaagagggaatgaatgaatgaatgatgcttctttcttatacaacaataaaatttcctttagggcttgtgctttatctttaaaaggaacccagattttgcaaactactttataatgtatccaactttatttta

SEQ ID NO: 199729 - DNA, 214 bp, Homo sapiens
taacatcctattaatgtggcaccataaatctagcttgaatgtactgtgcttcaagtttgtaaatgtaagtagatgggacggtcagcctttcctaaggacaatgtaccatttgtactcattgcggtgaatccattttaagctaggtatctcgctttgagatgatttgatatgacaatcaaatctggacttaagaaataaaaacttctctccatat

SEQ ID NO: 199730 - DNA, 419 bp, Homo sapiens
ctcaaaaaaaaaaaaagaaaaaaagtttcaatgaaggtttcagagggtgcattctactaagatcactctgatgagagggccaagaaggaaggccacagaagcttttgtgctgttgtctgggcaactgattctcagagtccccagcaggtgctgaggttgggtctgccctagccaggatcttgtcaaggagggagggaaggagagcctggaggaaccactccggtctgcatccagctcctcccttttcactgctgtggttctgtggtttgggcagatgggacataccatacatagtcttcaggaggtgaactgtcactgttttgtatttagtacaagagactatacaggcccagaatgacctggtgtttgaggcagtccaggacaaaggcaacatggagcaggccatccttgagatgaag

SEQ ID NO: 199731 - DNA, 817 bp, Homo sapiens
caatgtgtgaagggactcttttaaataaatgagcaagtgtcctaagctatgtcatccaaagattgtcctttccattctcaaatcctgtgactgggatcactcaacagcactgtgatgtattattttcaatgaggtgcctttcttaactgaccaaatgctgccttgtttggcccctaaatcaataaaatatgttaaaatttgaaaaaaaaaaaaaaaaaaaaaaaaaaaaaaaaaaaaaaaaaaaaaaaaacaaaaaaaaaaaaaaaaaaaaaaaaaaaacaaaaaaaaaaaaacaaaccaaacaaaaacaaagaaggggggggcgcgcgcgcgagcccgccccccccccgcgcgggcggcccccccccgcgcccccccccccccccccgcgggaagagcaacgacggccgccccaagcgagtgggtgagtacttatcacactcaccacgcgcgccgcgagccgccgcactcccaacaaaacaggcgagagagtgggaggaggagacaacaacagcgcgcacgacagacactgacctcctgctgcacaagaacacaaccccctcatgaacgcggggaggtgcgacaccagacctagcgcgccagccacccccccacctcacgcaacgcttgcaagaccaccacacagagaaccagcgatacaaaaaccaacgtagccgagcactcgcatgacgagcacaacaaaccagcacacaagatctcgggcccagaaaaaaagacgacgccacccgcagcgagctcacgcacaacaaaaataacacgagagggagccataaaaaacacacaccccacagcgcaa

SEQ ID NO: 199732 - DNA, 217 bp, Homo sapiens
caatgtgtgaagggactcttttaaataaatgagcaagtgtcctaagctatgtcatccaaagattgtcctttccattctcaaatcctgtgactgggatcactcaacagcactgtgatgtattattttcaatgaggtgcctttcttaactgaccaaatgctgccttgtttggcccctaaatcaataaaatatgttaaaatttgaaaaaaaaaaaaaaaa

SEQ ID NO: 199733 - DNA, 402 bp, Homo sapiens
agttgcctccataaaggagaatgatttttcaccagggaaatgatttacctcctaaaaaaaggggtatacccaagaaagtgaggaattaggaagaaaatgccaacactctttaagcaaattcaattctataggctcaggttgttaagaacagtatacgtttcttagaaaagaaagtaatggtcaacaggggccagctagcatttactaaacttaagttatcctgaactgacctcattttctcattaagtagggtattattagtagttttagagagcaaactctagaaccactcataccctcttagtaattctacttcagggaattgttatttataataaagcttaagaaaaatattttaaaacgggagtaagagcacatcacagctgttttaaaacattagaa

SEQ ID NO: 199734 - DNA, 567 bp, Homo sapiens
ggcttttcccaggatgcatgtctaataattttcactgccatcttaatggggatccctctctgctaagccgaggaacacagcattattatcctttaatttggggcatactgactctgactaagtgaactatttccaagcactctattcctttaaaagaaggcataaagggatactgggtagacagctggcagtttctgtcacaactccttcttgaatgtttttcctcgagcagaaaatatgagctccatgcaagcagtgatgttgtctgtggggtatattgcaacatcatccttagtgcctactgcagtgtctgacaggcacaccataaatagaggtgcaataaacatttgctgaatatggagagagcacagttgtgggttatattttctaagatgatacttaacgatgcacatgcgtgcttcctgtcacattcaggctcttccataagacaggccaacttagtgtcaccattaagttattcacttctccactccactccctgggaaaacctacctgctttaaatctcagaaccacagtatcatccttaccatctacaaggacagtcg

SEQ ID NO: 199735 - DNA, 719 bp, Homo sapiens
  misc_feature (673)..(673): n is a, c, g, or t
tgcttcgaatcatcttgctccttaattttttaacatatatagctaaaagtcacgtgcccaaacaatatctaactaaattcccactagctcccttacggataacatctctgatgtgtgcgtcgctatagtaacggttgcttaaagttgtgttttgggaacttagagttagctcttgtccattttaagccagtagagaccatgagcccttcaagtaggtctgagcgaatgcccgacttcagagggccaaaaacacctttctcggatcacgctaacaatgtctttttcttaaacatatgtcccacgaagaaccatgtagctcaatcgtgttcaggcaaagtccccatgccctcacctttcccaccagcagtcatctttcccacgccttagaccacccacttcttattcctccctaggccctactcttctgggaggcaagtttgagatttgttctgcagtctccttgctcagcagtcttgtgaataaatttttcctcttttgtgaaatccactgtcacagtgactggctgctgctcatgggcacagagcatctggctgggtgtcaccatcgcacccgcacagcctgcagcgacacctggggtacttttccatcaccaagttccgccccttcgacttcccacagatcatctgcatccatccacttctcacactcaccntatccacaaacagtgtccaagagacttcgatcgtccgactcgatct

SEQ ID NO: 199736 - DNA, 516 bp, Homo sapiens
atgttttcaataaattattaatgaaatatttctccaacatacataggacaactgagattcacttccaatcaaaagcaataaccctcatgctggacagttatctttcacattttatatgatagaattatgataaaaataggttttgaagcagccttagataagaatataactaaaagtatgccaaaggatttatttagaattttcagataataaaaaggtaagtttttggttgtgcaatgcacatccatgtaaatatatttgctttttcaaaagcaaatttagtattcttaagtttcctgagtgacaatctcataaattttggtggaaatgacagcaacattgggttatttcaattatgcatggagacctcataaaatgagttttttaaaatgctcgctcaacagcaggtcacctatctctatacaacatcagaaaataatagtacctctctcaaaattgcctcaaagagcaacagtaagaggaaaaaacaaccatgcaatggtttactcaaactgc

SEQ ID NO: 199737 - DNA, 1757 bp, Homo sapiens
ggggaggtaggaaggaccaggggcattcatgcttgtttctagggggccctaactggatctctggatcaagacctactcaggggagaaagactactctgggttccatgttaggactgacgggtgcatcttaactgagatgcagacagtggacaattcgaactctgacctgagagcaagccccagccttggtgctcataaatgctccgcttggtccttcacatttgtgttccacacaggagaagccaagttgtgagcagtgcaccttcacaagcaaagcctcgactgaaatcttctctaacaattggctggtcactcctgagcgtaatctaccccttcagaacactggggatgaatttagagacatcgaagcctcctgatgagaaatacgtgtccactcaccgggagaactgaaataccaggagatttctacacaaatctcacagagtccttctggcgtcctaggggtttgctcacatataagggactttctggtaggaagagagtctctttacattctttattatatgatcctggtggctttgtagagagatggtacagctgacagatcatgtcctgtggggccagggagttgtgtgtgtgtgaatgctctgtgaacttgggcaaactacttagcctctctgagccttagctgcatcagctttgaaaaacaggatgataaaatggagtcaccttatttgacttttataaatacacttacacaattacacaagttgtggggatgggaagagagagttggggaaagagaaatgagagagagagagagagagaatgaatgataaacaatttaaacaacagtggggtgtagaccaacgcccagcctggcaagggtgagcccagagagccttccctcctggctattggcagcctccgcatggaagcctgtcgttgacttcttaatgatgagagatgttctgggggcactccaggattcttggacatgggatcgtcttcacagctgtgtctattgaaagctgaagtttcagtctcccctgccccctgccccctggagtggcttcccaggggaaattcaagggcacctgtgactgcatggctgctttcctttcctttactcaatgccgtcctttggtgacagccgtgtctcatgccaggatacatgaggtgctctatagtagtatgttttccctcctgggaggtaattttatttaaatgtgaagtcaaaaggatcactaaatagaaccatgaggcaaccactctgggcacctgcctggtgatatccacaagagctgaccacaggtgccccctgtgcccagcaagtccttggctgggcagtcacacaacaggcatggggatgtgtggccaccaagccctccagggcagtgctatttgtaatagtcccaaatgggagagatggcaaacgcccgccaatggggcagcatggataaatggatgctgcacagcaacggcgatgagtgagccccagcacccgtgagctcaccagtgtaatattgggtggaagaagccaggaggaagggcattcacattctgtgattccagctacactatgtttaaatatgggcagagctaggctgtggtgctggaagccaggacagtgggatccttgcatgggggtgatggtgctggtaggttctggtaatttcctcttcttgatctgggtgtaaacattttgtgaaaattcaatgagctgtacatttatgactggtacatttatgactttgtatgaatattatactttcataaaactactttaaaatatg

SEQ ID NO: 199738 - DNA, 715 bp, Homo sapiens
agtatataatacacattacaaatgacaaaagacaataaagaatgtgtaagcggttgaacaaataatggattattgctcctcatttagctatcatattcacagtagaagatatcctaaaaagacatgtagtcagtgaggaagaggattaacagagaccagatcatcttcagctccaactaagatggcagagagctgccacctgtggccctttgatgccaggtaatttctctctgatatcctttctagtcatgcaggacctttttgccatattatctatacatatggggcaggatcctaacaggacctttgctctctagtggtaacctgtcactgaaatgggaggctccagtttccagcagggagagtgcctggaaggcttggctcttctggtacagttatctttgtaacttgagaaaatttattccagacctactacaaacattcgtgtgctcacaagcaccacagacagagcagcagccaaagctagctgcagcctgagcatgggtcagtgtagggaaagaagctaactgacctggcctgagtcacctctagaggggaagaatgtaggacttgtcccagcctttgttggttagtttcccaaatggaaaacagggaccagagtaggtggggtactttgaggtcctcatacctttcagaggactggatccttgttttcattcttgttcttattgttaataagtgtaataacagtatt

SEQ ID NO: 199739 - DNA, 341 bp, Homo sapiens
gcattaatgttctccaaagatctaggacaaggctcagctcaggtcttcctgccttaggaacctgcactgacctcgctcccagggttggttccaaaggtgcagtaattgcaccgtgccagcctcttggcactctgtggagttagggtatgtgccttggcttcctgattagagtccaagctcctggaggctagacagtgcagcccagcacttagcgataggaagcactcagtaacatttgatacgcttgaggaacatgaaagaaccatacctgcttcatgggtcagaacaaacaggaaaggcagtcatagaaggagtccagatttcatacacacacacacaca

SEQ ID NO: 199740 - DNA, 385 bp, Homo sapiens
ctttaattaaggagcttggctgccctctcccatcctttcaccttcccctagaggtagagagcatagtgattaagggctctgagtaaaaagcggactcacagctgggtactgtggctcacgcctgtaatcccagcactttgggaggccaaggcagacggatcacgaggtcaggagatcaagaccatcctggccaacatagtgaaaccgcatctctactaaaatacaaaaaattagccaggtgtggtggtgcgtgcctgtagtcccagctactcgggaggctgaggcaggggaattgcttgaacccaggaggtggagattgcagtgagccgagatcacgccactgcactccagcctggcgacagagtgagactctgtctcaaaaaaa

SEQ ID NO: 199741 - DNA, 645 bp, Homo sapiens
ccggttggctgggcatggtggctcatgcctgtaatcccagtactttgggaggccaaggcgggcggatcacaagctcaagagatcaagaccatcttggccaacatggtgaaaccccatctctactgaaaacagaaaaattaactgggcgtggtgctgcgtgcctgtagtcccagctactcgggaggctgaggcaggagaatcgcttgaacctgggaggtgtaggtttcagtgagccgagatcgtaccactgcactgcagcctggcaagagagcaagactccatctcaaaaaaaaaaaagacacccagttatcctatctgttagaattaactatttcctaatatgtgatatccagtgagggtttacattttcccagttgtccccaaactgtttaatagctttttaaatattaaatcagaaagccaggcatagtggctcacacctgtaatcccagcactctgggaggccgaggcaggcggatcacctgaggtcgggagctggagaccagcctgaccaacatggagcaaccccgtttctactaaaaacacaaaatttgctgagcgtggtggcgcatgcaggaaaatcacctgaacccgggaggcagcggttgcggtgagccaagattgcgccattacactccagcctgg

SEQ ID NO: 199742 - DNA, 409 bp, Homo sapiens
tcccagtcaggggtgtggctaaggcaacttcttctaaaagatgaaatattaggtagccactacaatgatgtaacttgagagattttcatgacactggaacacagtgatcctaggtgaaacatgggaacacacaatgacattagccatatgacctccgctatgtttaagaaagcaccgcctaagactttcaggaaataagcccaaaggttaattgcacttctctctaggtctctttttatttttttgacgttatccaaaattttctacaatgtgcaatgaccacttttatcactggaagacgcttcaaaacactacaaggtacatttttttaaaaaaagttaggaacatatcacaaaaacaggcttagttttcttaaataaacaaaatgaatttaccatgaatctattta

SEQ ID NO: 199743 - DNA, 195 bp, Homo sapiens
aataataatacctatccatatggtttttgatgagaaaaactgagataataagtgcaaagtgattagaacagcccccaaataaggagctgaggtgtttctgggtcaaagttagcaacattattctactcctctaagccagtttgttttccatggtaaatagaattccgaccattgttttgggtaatatatttagtt

SEQ ID NO: 199744 - DNA, 496 bp, Homo sapiens
ttcattttagggttttatgtatcgagaactcagataatatttacatgttttaatctggcttcaatattcctttagattatttgttaatgaggcaaatactggaaatactaaaaaaatacacacgaatgtggttagtcctagagttgcacacacatgcaagatgcattcctgtgtttacagcaattaaagttcatagcaattacttttagtaaagattttttttgcctttcattacaaatttgattaggttgaacaagtgaaagtcatagataatctacctttcttaaatagtttgagatttaatgcttacattctgcaaatataacatatttgaaagcaaaaatcatcttaaaatatatttacctgaacttactttagtattaagtttagctttaaattaaaattttagtttgatttaagcattattccccattcaaaattaaaatatcttataggagatagaacaccttaaaacatataattgagttgaaaacag

SEQ ID NO: 199745 - DNA, 403 bp, Homo sapiens
actggagcagacctgaaactgctttcaatatttgcaacagttttaagctgtgcttctctggactgcttacccacttggttctcaaatgccccaggtgccacagcaaattcacacggtaccatgggatatttaagcaatacaagagaaacagtggtattcaccatctgtcagacactgcaggaactaccagtgaaacaatcaactcacagtttcaacattagatcatgctacattcctttggatgataccatatttttgtgaagctgatattttagaggttgctgtgattaaaaaaagtatcatgtgaaagtcaatttgaaacaagaaataaggatgacaatgtcaacttccaagattcgaaaagatgtgtacacatcctactagtaaatatttgtggttattt

SEQ ID NO: 199746 - DNA, 409 bp, Homo sapiens
ataaagcttaagtcaaatgtctttctagtctttctgcagtattcctccccaaccccgtcccccagaatcttagagcaatctcagcttatttctagagtctctaaatgattgctcatggatgtgaaatgtgtgaaatttagaatgtgctccatgtatgtgttttgtttaaagaagcttcagtatagagattgagcctaacatttacttgttgtgaagaagttttgacacattgatgagaagttctttccctaataatatgcttaatagtgtatacagaacatccttcatggtctaagcagaagaaatgatggagttgggggaagaattcgaactctttggtgtggtttcctgttatttatcctcaaaataatttattctcattctttgcttgtacaccattagccttagg

SEQ ID NO: 199747 - DNA, 458 bp, Homo sapiens
gcagtgtgaaaacggactaatacatatgtacatgcatatatacatatatacagatgcttttcacttggctttcaacaaagatgtatttatcacatttgcttttcatgcaaaatgttgtgaccaagtgaaaaaagataataaaatagaacaaataaaatactgaaagaaaaagctcttgaattttgctgaaatgaaaatttaatgataaatgagaaggcctctatttaacataaatgtaaccctgaatgtgttaacattgtcctctttgacataatagataaatatattgagctgtaattactatacataccatactaagtgcttgaattttaatctaatctctgcctacaaaaaaaaaagagagtataaaattgcttcctggtgttcttagaagagagaattaaattcataacacaaccttctgagcactgtgccctgcgtcctgcttccccttcctt

SEQ ID NO: 199748 - DNA, 194 bp, Homo sapiens
gagggaaggaaggaaggaaaaagagagagaaagaaaaagaatgaagaacgaaaataaaaattttttaaaaacctaaggttaaaataaaccctttttcttcatacataaacacatgagttcaaattacagctttgctgcttaatagcttggtgacctaggacaagttatataacctctctgtgcctcagtttcct

SEQ ID NO: 199749 - DNA, 397 bp, Homo sapiens
gtacaaaatacaatatattattatatcataataagataatagctattctttactgaccattttgtagtcatccttttaagcattttacatatattatttcatgtaattttcacatcattcctgtgatgtaggtagcagtatctctacagatgaagaaatggctggagagcattatgtgaatcttctaaggtcatacagctagtaaattacaaactggaatgtgaatctagtctgtgtgattttaaaactcttgcttttgacctctgtgctatacttagtgcttgtgtattgcactcttaaaagttgattgattgttgatggccattactaccctataagtttactgggtaaaagagattttggtcttattactcttaaatatttgctaactatattc

SEQ ID NO: 199750 - DNA, 229 bp, Homo sapiens
attgtggcctaaaagcatacctaacaccagttcctactctcttttaatgaccctagtgtggatcaagagctagtaaatcttgtaaaatagcgagagttaatgacttatgtttatggttacccagttcttccctctcaagtcttcttttttttttaccagaatattagttctgaacaagtcaatatacttgttcaggccaagatgtgaactaaagattgtatgtcctttg

SEQ ID NO: 199751 - DNA, 650 bp, Homo sapiens
ttttaatatataaatatacataaactatttcttaaaatttaagtgtgcttgctttggcttcacatatactaaaattggaacagtacagaagatgagcataaaaatttaaaaataacaaaatacatagtcaagtgcgaacacacaaacatggttgtgtgtcagttgatcatcagtggaaagacatggagacttctttggaattttatattaattttcggaggtgctgcccataactgtgatcatatggaaatggtagctccttcctgttgtgtcactgcttcctggtccagttcctgacacagtataggtgctcagtaattatttgttgagtgtaggaatgaacaaacaaaacatggaaagatttttggaaaagtgtagagttgccaaaattagtcctaggagaaatattaaaattaactttgacttttttttttttttttttttagaacaaattgaccacttgcatctgagtactgccctgagcagtggagattttttaacttcccattaaagacagggatgggtgcagtggctcacccatctcagcaccttgggagggtgaagtgggagaattgctggagccaggaattggagaccaccccgggcagcatagcaattcctggtctctacaaaaaatttaaaaattagcc

SEQ ID NO: 199752 - DNA, 416 bp, Homo sapiens
ctgccttactgatgcccaggttccttctttaatctgttttgctctttgcctacctttgctggttgttgttgttcttcatctttctcttttttttaaattttattttaaatcataccctcctatttgttccaccaaactcatatactactttgcttttgcagctgctgctttgaatctttactcttgcttttttcacgtgttcccttgccttgcctttggtatgttttttgttttgaggtgacatccagtcatgtaatattctggaagtccaagagatccagaaagtcaaacactagacaacttaaggtttattactcacaagtcctttctgtgtagatatttacgttttggggtcacaggcttcgttagtaacctgttatcatatgaatcatacattgaagtgtttgatgaactat

SEQ ID NO: 199753 - DNA, 820 bp, Homo sapiens
tctttgaatttcttttgaataaataatatgaaatgttctgaattatcttactgtcttgcctcacattagacagtatccgtgagatacacaggagtaagctaaccacccatcccaatttgctaaaccaggacttttagtgctaaaatcagcaaagtctggagtaaaccaggacagttggccaccctgtgaggtagagggaaaacagtaccctgtttaatgaaggggaatcagcagtgacacacataactaggaatcaagtctattgaggccaatcaaaataatattttcctgagatccctggcgtttagacaatttttaaaaactattccttgtttttttcttattcccccagtatatgtctctcccttaaataatgagtgaatttaattcccaggtaagaacattgtattctgttgacagtgataggtagtagataggtcccagtatcagacctataatcaggaggaataaaatacgtttaagaaattttattgtagtggaaaagtagtaaagatgagtatcaacagaagaaaatactaggataacttgcataaaagcataataaagcatccccaaagaagaaattgtcttgttgattgagatctcatagttgtttgctgccagtgacttttatttttaagcctttctgccaaggtttttaataggactctgtgcaggagacacaagtttgtagagcaaactaaggggtgactagactgcaagctttcatgatccctaatttctttaagaatgctatttctttgaaacctttaagaaaactgaaattggttcctaaattgttccagagcagtgagttttc

SEQ ID NO: 199754 - DNA, 519 bp, Homo sapiens
ggagtgcagtggaagcgattcaagcgatctcagctcactggaacttccacttcccggattcaagcaattctcaagcctcagcctctcgggtagctgggattacaggcactcgccaccatgactggctaatttttctatttttagtagagacagagttttgccatgttggccaacctaatctcgaactcccaacctcaggtgatccacctgccttggcctcccaaagtgctcggattacaggcatgagccaccacgcccagccaatacattttcatcaatacttcaaagctgtagacttggctctttcaatataaggaaaacgccctccatgcaatctaactggcaaagccaatatcagtgccaaatcagcagcaatatcagactttattgcattcagaaagcggctgactttttacaattgtatcttcacatgtattttatggatattattaaaatactgaggtagaaactaccgaatatattttgcaaactagattacttgtttctgcagccaagatt

SEQ ID NO: 199755 - DNA, 506 bp, Homo sapiens
ctttagttggagaaagactggaaagtacttgtgcaaaaggagatgtggaaactctcagaggtttcattttgttattctgcttgtttatttgtgagtgtttgcaaaccgagtggggtgacaatccccttctcctacctccttttttcttggaaggaggactttttgttgcagttttagacatttctagcagcagaaattgtgggatagggaagtgaaagtgttggtgtcggtggccaccagagtctttctggattccttcctgccaagatctgcaagatcaacactgggattgattgctagagcagcagcccgagtttggaacccatcaatacattttctgtggtacaagctaggtgttttgagctaagagttaccaactaagacagaggttcatcggaaaggaaacgggagtaaaagaaagggaggagggagggaggggaaaagagagatgggggaaggaagagagacagggaaggagagagcagggtttcatttctgtccttctg

SEQ ID NO: 199756 - DNA, 505 bp, Homo sapiens
aaccctatctatatctatgatagaagtcacaacattttttccagtttgtcattttacttttttatcgtttcttcatacttttttatttctaaaatagcaaatgtgtcactcttttctgttattgctgatgggttttgagtcattattagaacacttcctctattcccaaattactaagtaattcacccatgttttcttctaatacacatatggttttgcatttatatctcggatctattaggaatttatcctgatatacattgatctcgcataattttaaaatgcaaaacaaaatgagatcctatattctcgtatcaaaatagaaaatattaagtgcgatactatccagtgcaagcaaaagaatgggaaaactggcaacctctccctctgctgatggcaggctacgctgatgaaactctttggaaggcaaagtagaaaaaactagcaaatatatatgcacgtcagaatttctcctacatgtgcttgtaggatacttacatcacat

SEQ ID NO: 199757 - DNA, 899 bp, Homo sapiens
ccctcccactccccattgtcctcttcccctcctccccctagccttactccttctcctcttctctctccctctgaagcccctttccctcctctcccttctctctaccctcctcaagcctccctcctgctctcaggcctccttggcccactccccttgctcactgacatttggtctcctcttccaggaaactgcttcccttgtgggaaagggctcaggccctaataagtagaagaggatcaggcgagagggagtcagaacccctgagatgcaaaggcagcagaggggcagagaccaagagcaagcagtgaagagacatttgcagaaacagtcttggagactgaaagaacaacatctctggtccttcctttagccagatctgattctctgccccttccccaaaaaatccctcatataagaaaacggcacttctcaccatctaccagggcttaagccagacacccaggagtatcccttgacaccttgttctcaaatccacaccccagtccaacagcaatcctgtctgatccacctgcaaaatagatccactatccacctgcccccaccatgacccccaccctggtcctagccaaccccagaagcaaagaagaaaaatgctaagaaaggtccctcaacaccttacactaagtcatagcttggccctgaagaggaggagcaggaagacctgacaaaggacatggacgagccctcaacaggtccccaatgtagaagaggtgacacttcccaaaacagacaacacaaagaaagacgtcagagtcggacccagtcaaaggcggcaccatgaccgacctggactaacagggaagatgaacagccatgaagacgacgggcaaggatgaggatgacaacagtacgggaacaagggagagcagaccaagaat

SEQ ID NO: 199758 - DNA, 127 bp, Homo sapiens
ctgtaagccaggattcctgatccagagacaatggccccgatgggatggagcccgaaggcgtcatcgagagtaactggaatgagattgttgacagctttgatgacatgaacctctcggagtcccttct

SEQ ID NO: 199759 - DNA, 505 bp, Homo sapiens
gtgtgctagatgttttgttgttactatttaatcctccagatctattctccatcctttaccctgtgccctaggaggctgcgtcatgtactacataaactgggctctttgttctctggctttaaatcgggttcaataaatgagaagcaacaaccagggtctctctggactcccacaactactctctccctttgcccttgctgggccaaatatggtgcaacttcctatcattgctagtccctaggtgctgcactattccttgctggattcccgtaacccttcccataccattgtaaatacctgcttcattacactctttgacctaattaagagtgttacttgtttcctatcaggatactaatagagagggacacctaactcagtctggggaagcctgggaagaattctcagaggagatgatgcttcagctacgttttttggttggtttgtttttgagactgagtctcaatctgtggccccaggctggagtgcagtggtgtgatctcgg

SEQ ID NO: 199760 - DNA, 272 bp, Homo sapiens
cttcacagctttgtaaggcaggagaaaaatcacacaaatttactgactgtacttaccttaaatccatgaccaactattaatatattcagttaggttcttagtgttgcctggcaacttcttgccttttgcttgtctattcactctcccctctagaggactattttatctcttctttctccttagttatctcacctctcctcccagttaaaaagataacttctgcatgcccacagccatttcatctactagcctacctgcatttgcacccatgt

SEQ ID NO: 199761 - DNA, 499 bp, Homo sapiens
gaaaggttcggtgctggaccgcggggcatccaacccgggaccgggggcgacccacggacactgaggaaactaccgcctataagcctatcatcagaacctctggcacaacacaggccagaaacaccagcatccaagatgaaggcaattttctgtttatggactgagtaccccacaaaagatcttattctgaaggccatggaacatgtctacccacatggatcaagtgggcagactggaggagaaacagtttaaaggccctgggggaaggagggagcgccagggagagctcctgaagacaacaggaattccaagtctggcactcgggagaaatcctcccttcagacattattgatgtctggccgaggagttaggaaaaacttccttgaaggagggattgaggttgagatgggcatggaacccagatcttaggcagagaaagcatattcctgtttggaagaaccctgagtacagaagtcagctcaaagatatcagcttggcc

SEQ ID NO: 199762 - DNA, 351 bp, Homo sapiens
gttatttaggttggtatcaggaatggagcagggattggaactcaggtctctctggcttgagataggaatctacagttttctaactcttgagcccacgtacccatctgttacctgccagacaccgcatctgacccattctcatctccagcaatcattcttaaactccatcaagcatcagaacagcctacactgcttcttaaaacacgatcgcagacccttccccagtctcagacttttagattcaatggatcagggatgtggcctgagaatgtgcatttctaataagactctcggtaagtctcctgctgcagctccatgctggaccatgctttgagaaccacaaacaccagg

SEQ ID NO: 199763 - DNA, 572 bp, Homo sapiens
agtgtaaaacccactctcagagcagccttctgacatgcctgaggctgaaccccgaagaggaatctactgaaactggacttgaaagcctttgtcacaatgaaaagcaccttctgtgactgacattcttttgtgatctcctccaaaaaagttatcataattattgaacatttcctctgtagcttattctcaatccaatcagttataatgaaaatagtctgcttgctttttatattcttaagttttcaaaatgattagtgcttccttgagatatcccattaattggacacacaacccagatgaaaaggctgaaacccaagagtatataaaaaaacataaggttgttgcaatttaagtgccttcaaaagatctaatttgatttctaaaagcaattttgcagatgtgaaaattaaaggcacgcagaaacaagatatgatttaatgaacgtgtaggttaagaaacatttagaggtttcagtagctttactctgacgtttttgtttgtttgtttagctgttatgttggaaagattgagtccacaacacaataaaaattactgaattttaaaaaaaacta

SEQ ID NO: 199764 - DNA, 520 bp, Homo sapiens
aatcgagcgctgtaccactatttgtctttggaaatgggcactttagaagctaaacctggaattctgccacctgtaatacaggccaagcaatgaaatctgataggtggagtcaaaggggtccacttttggaggttcctgtgtcacttctccccctcccagatgtctcctcatcctgagtgtcatcaccaagttcttgggcctgtacttaaagcccttccttcaaagatctgctgttctaggccgggcacagtggctcacacctgtaatcccactactttgggaggtcgaggcgggaggatcacctgaggtcaggtgtttgagaccagtttggccaacatggtggaaccctgtctctactaaaaatacaaaattagccgggcgtggtggcacatgcctgtaatcccagctactccggagtctgaagcagaagaatcacttcaacccgggaggcaggggttgcagtgaacccagatcgcaccattgcactccagccagggcaaaaagagcgcaactccactca

SEQ ID NO: 199765 - DNA, 681 bp, Homo sapiens
tgtcaaacactgccattctggctccatctatctcatctgccttggattggaaccagactcccttggggagcaacactgtgtttttaggtagcatattggaaaccacagagaacagtttatttatgttaatttgtgggggaacattttaaagtagtaattttctgtgacctccacaatgtacagccagccaatttgatacatttcacagtaatttggctatatcataacctgtgttattttgttttcaattttatcttaaatgtttttttccctgtgacaaattgaattatgataatcttgcagtatttctaccttgcttctttgtgtttttcaatatttctcgtgcctttttccttttaactttggcattaaaaaaatcacgtacataaataagtttacatgctttaatgatgttttcatatagaacactgaattttctagacaaaaagtgctgagaatagcagtgttcatttatagttatgtttatgccatatttttaaaaagtatattctcagtgaataaaactgatgttcatgtcattgttctgtttgggggagttgattttttttacatgttcagatttcttagatcattccaaatctttgtggatttctaatttttgctatttggagaacttcaaaatgtttattgacttgtagttgttacggtaatagttatctg

SEQ ID NO: 199766 - DNA, 355 bp, Homo sapiens
acacaagggaggaaaatgaggttaggccataagcagatcctaactctccctcctccccacaaatcaaactcttctagatatggcatttgtattccactaaagacacacctctattagcctagagaaagaccataggaggagcaggaattagaaggcatctagagatctgatcccctagaattacagggaagctttgcaaagctcgctacggaactaccatagctactgattatgcttctccatcgtacatcactccacaggttaagtcacctgactgaggtgacacaggcccctctagggcaggatccttccataccctcccctccacccccagtccctttccacttgaatattt

SEQ ID NO: 199767 - DNA, 881 bp, Homo sapiens
agagagagagacctgctcacgccatttaaaggagattgccccctattctcttatctctgccctgcctctgttttctttatagtctgtattacaaagacttgcacatatttatttgggcttttgggttttgactgtccctcttgagaaactctgaggacagagaccatatctatcatttgctgttttatcctcagtgcctaggatagtgcttcatacagagcaggtatttattagattggtgcaacgttgcagctttggccattacttctaatgtcaaaaaccagaattttgcaccaacccaatatttgttaaatgaatgaataattaattcatttgtatttctcctgtctacccacaaaagtcatgaaacccttattgcttgtccttctaaaatctagattgcttcacatatttccacaatctcccacttattctatgaaaaaaaaagattaacctgacatgaattattcttggtgaacccatgctggttcctggagattacactttctcccctaaatactcacaggccctacctttaataatccattgcagaatgctgcccaggatgatgtcaagttcatcagtctgcaggttgtggaaccacctgactccccttatttaaagataagaatcacctctctctggtcttccagcctgcctttcatttgcctcagcacctctgatgacaacctgcagagactttatttggagactcttagttctctggaagaaactaatccaggccaggatattgtaacatacttatagtaactgtgtttttttctagaatcccttcacccattcagaccgttgattccttcttgccagcttttgttctgccttttcccagaaaaagtagaagtgtaataggaattggatag

SEQ ID NO: 199768 - DNA, 501 bp, Homo sapiens
  misc_feature (488)..(488): n is a, c, g, or t
  misc_feature (493)..(494): n is a, c, g, or t
ccattttaccctctttgtggcagggaaagacgtttgctccatttgactgatgggaaaattatggccctagaataggacagaggtgacccaagactcattgttgaggtgtggtctggtgtaggtttggggatttttgccctgtttgaaggtttgaggttttcagagtgagcttccagaatcttttctcattggtaatcagggaggatctagggaagtgatttttcatctctgagtacatgttagagttacatagcggtcttttaaaaaaaatactgatgtccaggcatcctctcactaatgattcagttggcctgggttgcccagtcctctgtattgtaaaagctccctgggcgattccaatttttaaccagggttttttttttgttgttgttgttttgttttttgagacagtcttgtactccagcctgggcaacagagcaagaccctgtctcaaacacaacaacaacaaacataaaatgttactgcancaaannataccat

SEQ ID NO: 199769 - DNA, 698 bp, Homo sapiens
gcagccagtcctcatctctctaccttttccctaactccccaaccttaggcaaccactaatctactttttatctctagggatctaccttctggaaattccatataagttgaatcatgcaatatgtggccttttgtatctggcttctttcacttaggatcgttttcgagattcatccatgttgtagcatgtctaacaacttcattcccctttttttttttgacatggggtctcttgtctaggttgaagtgcagtggtgccatcatcgctcactacagcctcaacttcctggattcaagcagtcctcctgccttggcctcccagtagctgggactacaggcgcccgccaccacgcccagctaattttttgtatttttagtagagacggggtttcgccgtgttaaccaggatggtctccatctcctgacctcgtgatccgcccgcctatgcctcccaatgtgctgggactacaggcgtgagccaccacacccagccacacctggctaatttttagaaagtctgtagagataaggtcttgctttgttgtctgggctggtcttgaacttctggcttaagcagtcttcccacctcagcctctcaaagtgctgggattacaggtgtgagccaccatgcccaaccagaactttattcctttttattgccaaataataatctattgtatagacatatctcattatctt

SEQ ID NO: 199770 - DNA, 348 bp, Homo sapiens
tgagccaccgcgcccgacccacagagctgattttcacttggataatttttaagcctgtatccccagaatattatatacatatgtgagtaccaattttaaatgttaggcttcagtagtatttgctatataaatagaaaataaacatagaggcttcagtgtttgctcctcacaccccagggggcagtgtggcagaccccgtggggacgttcgcaccctgctctggaggttgctgctgtaggcagtgagtattcattgaaggacttttggcaggataatgactggagcacattcacgtttttaaaattccgtctggcagccatgtggaggacgagcaagggatggaggtgg

SEQ ID NO: 199771 - DNA, 461 bp, Homo sapiens
cagagacacaggattggtaagaggcagccccaggggagggccaagctgtgctctcttggcctggcctctgcttcagggctagagcctgatgtccacacagccacccctttccaccaaggaggctggggaggcagccggggactgtgaaaggcagaggggagttgggagcatgcagtgagcgattcactttgtgcaaagaaaggtctggctcttgcctggctcctggtagtctaagcccctagaatatcccgcctgataacagtgtctctgttccagcctgggcaacatggcgagaccctatctctacaaaaaataacaaaaataggtggcacgtgcccgcagtcccagccacttgggaggctaacgtgggaggctcacctgagtcccggaggttgaggctgcagtgagccacgattgtgccactgcgctccagcctgggtgagagagtgagactctgtctc

SEQ ID NO: 199772 - DNA, 303 bp, Homo sapiens
tgaaattgtaatttggttcctgtttttatgtgaacattaaagacaacattatttagtgaaacactaaaggacttaaagtcagaagccttgagtttgagccttgattactcattagctgtgtgaacttagacaagccatttagcctctctgagctgtaaaataatgatgatactacctataattatttttattgaccaaactacaatacaaaggtgacagaaaggctgtaaaacaatgtaattaaaacagtgtaattaagagagtgaactctcctttgaaattctggcctcatgacttgggcgt

SEQ ID NO: 199773 - DNA, 207 bp, Homo sapiens
tcactgaggaatgctgcattttcttaatcttttggtaatgttacattttttaaatgaagcagcttaatgttatctggctaaattatggtaatggctaatcctcgtaggaatatcattttgtttttttgttttttttttcagtaaaaatgagctatcaattttgattttgagttaatttaatttttggggggagggtggggggaggaa

SEQ ID NO: 199774 - DNA, 118 bp, Homo sapiens
aggctggtggtggccactgccacctctcggtgatgtcactcaagacaccacctctaggcatccccaggttgtggtgtcaaaatggtctgtctcagtgcttcttcctcattcctagaag

SEQ ID NO: 199775 - DNA, 493 bp, Homo sapiens
tccttgactgttccatttgttattgctttttaattttgtaaccgtattaaaaataattctacctagacccttatgcatggaggctaaatctatatgttacaaagacattcaagtgaaactctttaaaaagagtcctattgttttcatgtatgtggctccaaaaactatatatttggataccctgagtatagaggtttttaaaaaatatggaattgtttaacttcacataatagagcctaagactttagagatttcaaaagacttatttttcacagagttcttttcagatcttttatctctacaggtgttggggaacatacctatataaattattactctgaacttaaagctggagatgagtacagcactccaaggtcattagctatggacgatggtagtaaacaatgaatatttgcatcatgctttacagttcacaaggccttttcaggagcatgtatgtaatatggattcttaccacaacctgtgaagcagg

SEQ ID NO: 199776 - DNA, 319 bp, Homo sapiens
atctgtttttctcctgtgtgagtaaagcttcacaaagagattacatattaacccaagacatgtaagtgctccaaaaagaagccaaatccaggcacacagtgcctttacagaatgtgcctgatacttataatttactgatttaatctgaagtgaacataatacttagttgttttttttttttttttttttggatccccttccccctggggccctatactttctccactgcaccctatcaagtttgggccaaaacgcagagtctttcgcagcccttttctgtggccaaaacctttctcccttaaaacattccgtggttaac

SEQ ID NO: 199777 - DNA, 352 bp, Homo sapiens
gttaggcacagttccagtggcttttacgctgaagaattcagaacattctctcagaaaatgaggccttttgtcatctaacccaaagaaaattaagcgggtggatggctagaaagagttcatctccaggggggaccctgaaatcctttatattcttcccggttttctagggaaccatcccctacatagatgccccaggcatctggggcttttctggcagctgaagctgccttcagaaggccagggttattttccagttctggggaaggtaagttctagttccacctaagtcaaagcccagccctttccttctccccacccttccccactccagccatctctaaaagcaaaaaaa

SEQ ID NO: 199778 - DNA, 468 bp, Homo sapiens
aaggaggttgtataggcaaatgggagtaattatctctgatcttgatttttgtaggaaataggcgtagattaaggcatagataaatttgaaaaggcatagatacattaattaattaattagagatgaggtttcactctgtcgccctgtctgaagtgcaatggcgtgatcaaggttcattgcagctttgacctcctgggctcaagtgattcccgcaccttagcctactgagtagctgggaccacaggcaggcaccaccattcccagctaatttataaattttttttgtagaaacagggtctcactgtgttgcccaggctggtcttgaacacctgggctcaagggatcctcctgctttggcctcccaaagcactgattggcaggcatgagctgctgcgcccaaccaggcatagataaatttaaagacaccttttactgtagacaatttggaaaatagagaaaaccagaggg

SEQ ID NO: 199779 - DNA, 501 bp, Homo sapiens
ccggtagcacttcctgtacaatcttccttacacacacaaaacaaaacgaaacaaaagttttccccttggccttcaaatctatttcccatctctactaaaaatacaaaaattagctgggcgtgttggcacgcgcctgtaatcccagctagttgggaggctgaagcaggagaatcgcttgaacctgggagtcggaggttgcagtgagccaagatcgcaccactgcattccagcctgggcgacaaagcgagactccatctcaaaaacaaaacaaaacgaaacgaaaaaccttattctggggtgggaggtttgagtgagagatggagaaaatgaaaaatcgttagggtaaggtaagcacacaaagatacacacacaccatgcaacttagagttacaatgaacctgccaaacaaaaattcgaaaatacagaagaaaaactaaacctaaaataaccaagtcaacaccttcatcagagggaaaagagaatgttttctgtgtactgata

SEQ ID NO: 199780 - DNA, 540 bp, Homo sapiens
ttaatgtgtacaatgtaatgatttgatatgtgtatacgttgtgaaataaaatatagtcaagttgatgaacacatctattaccttacatggataaccttttttttttatagtaagtatacttaaggtctactgttgtggcaaattttaagcatatgttacagtattacttactataaacaatgctatctggctaatctaatgctaatgtacattagatttctcagacttgctcaatttgtaactaaatttgtattctttgaacaacatctcatattcccaccctcaggcactaacaaccacccttctactctctgcttctatgagtttacatttttagattccccatctaattgagaacatacagtttgtctttctgtgtttgccttatttcatttagcataatgtcctccaggtgtatccatgttgtaaatggctagatttccttctcttatggctgaatagtattcttctctgtgtgtgtgtatgtacacacacacacaccatattttgtctgttgtaaacaatactacaacgaacatg

SEQ ID NO: 199781 - DNA, 352 bp, Homo sapiens
ggctgtcagaaaacttctggtaaaataggatgctgaatcagacatttatttttaatggcaattgctgaaacatagactagcccacccagatgaaaatatgccatatcacttgactttatggataaaatgtgctgaagtagtctttgtcattttccatttgagatttctgttttagttttcttaatataccctgattcccatcgcttctgttttagcaacttgtttgttgtctgaaaactattatactatactttccattttaatagatacatcttcatttttatttctattatttgtcaagaatcatctagcacagagtagttgtatcaaagttataggcatgtactccaaa

SEQ ID NO: 199782 - DNA, 256 bp, Homo sapiens
gaaagtgaatggaagggaaaggtaagtagcagtggctgaggctcgagttctggatgtgcgcagcaggagaagtgaatgaggaaattgaagaaagtaaaagaaagatgaaggatgtctgcatgcaatgggattgttagaggcatttaaaacaaatatctagacattcaaaaagatgtgccaataactagcctagattatctcctatgaaatgagatgttgaaggtgctactagggctaccttagtcttagagagtgg

SEQ ID NO: 199783 - DNA, 531 bp, Homo sapiens
ttaattgacttacagttccacatggctggggaggcctcacaatcaaggttgaaggccaatgtgaagcaaagtcacgtcttaaatggcgggaggcaagagcgcttgtgcaggggaactcccatttataaagccatcagatctcatgagacttattcactaccatgagaaaagtatgtgggaaactgctcccctgatccaattgtctgcacctggccccacccttgacactagaggattattacaattaaaggtgagatttgagtggggacagagccaaaccatatcagggatattgacctttaattttcttttcttgtagtgtctttatctgactttggtattatggtaatgctggtctcataaaatgagtttggactcaaataacccttcaatttttggaaagaattcaggaaggattgatatctttttatgtttggtagaattcaccagtgacaccatctggtcctgaacttttctttgttggcaggttttgattactgattcaagctctttactcttagtttcattgat

SEQ ID NO: 199784 - DNA, 272 bp, Homo sapiens
cccttatctgtacagattgagtgtcccttatatgaaatttcagattttctagagttttggaatatttttgcatacataatgagatatcttgaggatggaactcaagtttaaacacaaaatttatttgttttatatacaccttatacatatagccagaagatagttttatgtaattttttaatacttttgtgtatgcagccaagttttgactgctttttgactgtgactcatcacatgaggtcaagtgtggagttttccactttgtggtgtca

SEQ ID NO: 199785 - DNA, 259 bp, Homo sapiens
gcgatggtagtggcgatggtagtggtgatgacagtgatgataatggtgatgatggtggtgatgatgtgatggtggtgatgatggtgatggtgatgatggtggcagtgatggtggtgatggcaatggtagtggcaatggtggtgatgatggtgatgataatggtgatgatggtggtgatgatgatgtgatggtggtgatgatggtgatggtgatgatggtggcagtgatggtggtgatggcaatggtagtggcgatggtg

SEQ ID NO: 199786 - DNA, 775 bp, Homo sapiens
cacagatgacgaccagacgcctctggctcctgccctggagggattgtgggctgcaggggatgcccaccaagccctgtggcacctggctttgtctggaccctgctcggggctcctggcgctctccattaaagcctcagccctgggcaaaggctgcagaatcttggaaaatcctcttttccaatctgatttgaatcacacctgatattcactccgcattcatcccaaatgtgtgagtgtatgtgaagtagaacacgggctaggggtgtaaattctttgccttattaatatccatgccagatgtttccagactgtgttccttgcaactggaatgtcacttgaaatttaaatagatgtttttaaataaaagattatctggtcaaatttaagaaatactacatagcctcctcttagagatgcactacacacttaagtatattaaaatacctgagaagtctagcagattcttcagttgcatttgttttcttcaaacttatttggccatttgacattttgaatcacttcttttttatcttatatcttgtaggacactgtctcaagtgtacaatttaggaaaatattgttctatgcacctctgctccctacctcatatctagaagggacaagatcagattgcagatgtgagtttgagtcctgtctctgcctcacgccagctgtgagaccttgcaggaatctctgagcctcagtttccccatctataacaaggatacaaccaaaccaaccagtcctcaatttgcaagtgctacctgttgccagt

SEQ ID NO: 199787 - DNA, 364 bp, Homo sapiens
ggaggcttcacattgatgaaaccaaagtctccacaaccccttaactgacacattcctttctattggctccaggtctttagataataactctgccaactaattgccaatgagaaaatctttgaatctgcctgtgacctggaagcacccctcccccaacctcacgacattatttcagttgtcccacctttccagactgaaccaatgtacatcttacacgtattcattgatgttttgtctccctaaaatgtcaaaaaccaaactgtgacccaaccaccttgggaatgttctcagaatcccctggggctgtgtcctaggccattggtcactcatatgtggatcagaataaatctcttcaaatatttca

SEQ ID NO: 199788 - DNA, 289 bp, Homo sapiens
tttaatcagtgccctttcctcagagtacatgagacagtcggagctggccagctggccttctgacactccatgacacagagggaaccccatccaactccgcttttcatccatctatttttgaatccttttaacactttatgagagagaaagaacagaacaggcaggcaggctgtgtttaaccccacaacaccaccatagagcctaaaagcttgggagtaaatacaatttctttggcaccttgtaataaaacatgaacaatgagtttctcaccatgttattagtctctgga

SEQ ID NO: 199789 - DNA, 561 bp, Homo sapiens
ttcaaaatggccagtttaagccgctgcagtcttgcacatgcaaatctttgctgtgcaaatcttaaacaagctgatctctctggatcagtgcttgactgtgcaaatcttcagggagtcaagacactctgttctaatgtagaaggagcatccctgaaactgtgtaattttgaggatccttccggtcttaaagccaatttagaaggtgctaacctgaaaggtgtggatatggaaggaagtcagataacaggaattaacctgagagtgactaccttaaaaaatgcaaagttgaagaactgtaacctcagaggagcaactctggcaggaactgatttagagaattgtgatctgtctgggtgtgatcttcaagaagccaacctgagagggtccaacatgaagggagctagatttgaagagatgctaacaccactacacatgtcacaaagtgttagatgagaattttaggggctggaggaacatgtacaagatgaaaatgttttccttatcacttttctttctccacccgctcagttgtctagaagaaataacactgtaaggaagtta

SEQ ID NO: 199790 - DNA, 906 bp, Homo sapiens
gtatgtgtatacaatttttgatagatggtattttgttatttcatatctgtgttgaaaacagtcttttagtttgtcagacatctttttcagtacctgctatgtgcaggcaggtattgagaaaggtctgagaatactgagggttaataagagatggtatattctccagagaaataaataccactaaagtataagagcagatgtcctttttggaagaatgcctgtggtgatggaataagaaaagccatatagaggggtgaggaaaagcttttcttaccaagtgtgtgagctgagttttggaggatgattaggcaagagttagttggcctggtggagaaacaggagccagacattcagctggaggaacaggagtgtggaacagtgtgggtaacacaatggggtgtgtctggtttcagaattataagaaatagtctttagggggaacagaaatgaaggagactaaatagatgatgataaattatctgtgaatatgtactggttcctacatattcaaagtgtgctaagtttgtacagccattacttgtaaggttctaggagttgtctctctaggggttggtttgtaccatagtccattatgtacatctagaacaattctttctttcccggaactgagcccaaggtgggctttctacagtgcacctctggctctggggcagctcaagcaatcagaaagaactgaggcactggtagaaaacaactctgaggatgaacaggataatgttcctgaagtggaatgtggtatcccttcatggttaaatggttgcatacttcagggtcacctatggaaaggtgtcctcagggtagctaaaagtggttaatttccttgtgttttgacttacagatcatttctaggtggacttggggaaaataaagttacttataaaaata

SEQ ID NO: 199791 - DNA, 364 bp, Homo sapiens
tacctattaccaagtcctcactgggtctagactaggaatatgagagtaggggcttgtggtggtaggtaggaaaatggaaactgaggaagctaatctacttcctctttctagtcaagatcatgtattttttttttttcttttcagacgctaactctttcctgaactgtcagccagaaggtagtgtttgctagttaagcacgggttttctatttcactgtatcattttctttgtggctctctaggtacttaacaatgaatcaggcacatagtagatgctcagtaaataatcattaattcatcagccacctgggaagggagtgcaacagggacacttctaaaatacctgaagtaagagccaaggtga

SEQ ID NO: 199792 - DNA, 581 bp, Homo sapiens
  misc_feature (3)..(3): n is a, c, g, or t
  misc_feature (33)..(33): n is a, c, g, or t
  misc_feature (422)..(422): n is a, c, g, or t
  misc_feature (455)..(455): n is a, c, g, or t
  misc_feature (478)..(478): n is a, c, g, or t
  misc_feature (487)..(487): n is a, c, g, or t
  misc_feature (489)..(489): n is a, c, g, or t
  misc_feature (503)..(503): n is a, c, g, or t
ggnccgctctagagtatcccctgcacacgccgngccaccatacctggccacagggtacttcttgccttgtagaatgagtttggaagtattccctcttcaattttttagaataatttgagtagaatttatattaattcttcttcaaatatttggtagaattcagcagtaaaaccatcaggtcctatgcttttctttaaagagatacgtttaatttctgctttcatctcattactcatagttggcctgtttaagttttctgtttctttatgattcaattttggtaagttgtatgtgtcaaataatttatctttttagcttgccaatatgctggagcgtagttttccataatagcctctaatgatccgtgagccaccatgcctggccacggggtacttcttgccttgtagaatgagtttggaagnattccctcttcaattttttagaataatttgagnagaatttgtattaattcttcttnaaatatttngnagaattcagcagtnaaaccatcaggtcctatgcttttttttaaagagaaacgtttaatttctgctttcatctcattacctcataggtggcct

SEQ ID NO: 199793 - DNA, 147 bp, Homo sapiens
atttatcaagcaaaataagacataggcaagttgctggaatctcaacaaatatctcttaaaggggctgggaaaaattatccttcagggggttgtagtaaggataaaataaaataagtcacttgcttaacaaagtatctgtcacttata

SEQ ID NO: 199794 - DNA, 124 bp, Homo sapiens
tcagcctcccaaagtgctaggattacaggcgtaagccaccacgctcagcctctctgcctttttaaatcaaaaactagttctattttaagaagcaatcaaagttttactctgatgagtttttgtt

SEQ ID NO: 199795 - DNA, 492 bp, Homo sapiens
aaaaaatggaataagaagtatcattatgacttaagtcactacttgtaatgttttctattatatgcaacctaacagttcttatgtgttacacaaactaacctgatacatccagagctaggtttataatctatcagccctgaggcaaatcccatttcttatagtcagtagcctacagagagtcaccgggcctggggaatgtaattctttggctgccaggtcttctgggagcagagaacattcattcatgtgctgctagatgaaaaaaatatatattcttaagattgtggcaattaacccatggcacaaaaatggggaaaaggtgaatggagagaggcataagatttgaaactgtttcttgtattttcttattctctaattaaactattctgagggatgacagaacaagtggtttcctatgagtgagctcataaagtgaagtttgctgctgaaactcattggcatccaaaggcatttttttggtatctaatactg

SEQ ID NO: 199796 - DNA, 445 bp, Homo sapiens
cagaacttatgtgttccaggtactgcactaagcacattaaaattagtttgagcattttattttgaagaacagccatatatgaagacccttgggataaatgtttaagcaaatatgcaagataaaagttctttgtatatagtatctatttttctaactagaatttaaaaatgtaaataaaatcttgaagagaatacatgttttactctgtgattatgtagttattttagttgattttatttcttctatatattacctttaactttttataatgaaaataaatgaaaattaaagctgaagttttttttaataagactcgtatttttacattttaaaacatgaagcacacttacaaatatatgcttttgaaaaagataataaacaggacaagatggagaaccagcataggccattaactctctttcaaacactgctagagaatatttaa

SEQ ID NO: 199797 - DNA, 424 bp, Homo sapiens
gattgaatgggtttgacagcagattaggtacagtgggtgagagaattagtgaatggaaaacaactctgtccatgataaagagcagagaggtaaacaaatggaaaatacaaaatagactataggctctagagactatagtagtgataaggtctaatatatgtttcattaagaatctcagaagaagaggagaaagtgaatgggcagaagatacaagagcagagaatttgttaaatttgatgaaagacttcaatacctacctatttaagaaactcaaaaaaactccaaagaagataaaacaacaaaagacacattggagtacaaatgttgaaaaccagacaaggatctctaaggtgacggggacgagggcaatgggcagttactttcacagcagcgacaataagactgtcagcagctttcaggagga

SEQ ID NO: 199798 - DNA, 1922 bp, Homo sapiens
ctcacaggacgagtggggacttcttgatgaggctcagagactcctgtaccttgaagtgatgctggagaactttgcccttgtagcctcactgggttgtggccatggaacagaggatgaagagacaccttctgaccagaatgtttctgtaggagtgtcacagtcaaaggcaggttcatccacacagaagactcaatcctgtgagatgtgtgtcccagtcctgaaagatattttgcatctagctgatctccctgggcagaaaccatacttggttggagaatgtacaaaccatcaccagcaccagaagcatcacagtgcaaagaaatccttgaagagggacatggacagagcctcatatgtgaagtgctgcctattctgtatgtcattgaagccctttcgcaaatgggaggttggaaaggaccttccagccatgttgcggcttctgaggtccctggtctttcctggaggcaagaaacccggcacaattactgaatgtggggaggacattcgcagtcaaaaaagtcattacaagtcaggtgaatgtgggaaggcttccaggcacaaacacactcctgtttaccatccaagagtctacactggaaaaaagctttatgagtgtagcaaatgtgggaaagccttccgtggcaagtactcacttgttcagcaccagagagtccatactggagaaaggccttgggagtgcaatgaatgtggaaaattctttagccaaacctcccacctgaatgatcatcggagaatccacaccggagaaaggccttatgagtgcagcgaatgtggaaaattatttagacaaaactccagccttgttgaccaccagaaaatacacactggagcaaggccttatgagtgtagccagtgtgggaaatcctttagccaaaaagccacccttgttaaacaccaaagagttcacactggagaaaggccttataagtgtggtgaatgtgggaattcctttagtcaaagtgccattcttaatcaacaccgaagaattcacactggagcaaagccttatgagtgtggccagtgtgggaaatcctttagtcaaaaagctaccctcattaaacaccagagagttcacactggagaaaggccttataagtgtggtgactgtgggaaatcctttagtcaaagctccatccttattcaacaccggagaattcatactggagcaaggccttatgagtgtggccagtgtggaaagtcctttagccaaaagtctggtctcattcaacaccaagtggttcacactggagaaaggccttatgagtgcaacaaatgtgggaattcctttagccaatgctccagcctcatacatcaccaaaaatgtcataacacatagaggcctcatgaatgcagcaaatgtggaagcgccttcaactcaagatctatcatcatttagctcctgaaagtccacacttaagtagagccttagacctacagggaaagtgctgtctctgtagtattgtagcagtagagagcctttgtgagggagccatctgcctgaagttgaacctcattcttccttgtttctctggtagaaaccatctaccctctaccaccttgcacagtgggcactggtcactcctatgtgctaagacaaggcagacatctgtgtgttctcttaagtctttggaggaaatcttgagcagtctaagcctttagagaaaattcattcttttttctgactgatcacagcatacgtgtgacccagtttgggtcaggagggcccagccttggttctgctggacacttatgtgcaaggattcccttcatgtaaattcttggtctcacatgacacttggtcattcttccagcctccatgtcaccacgtggtgaatggctgcctcacattgctccagtttgtgcactaataaaagccttatatttgaatctaaaaaaaaaat

SEQ ID NO: 199799 - DNA, 1061 bp, Homo sapiens
aaacataaaaatagatcatccacacatattttaaatgagcattattctatccagaaagagaaatgggagctttgtaaactctgtgtgaacaaattgttttatattccttgtggttgcattccaatttacacttgcagatgtcttcacttaaaaccacatcgtgtgggtatcttctccctattgcaactgtcccagcttccaaagaaactggagcatcaaatctcgcctttgaagtcagctgcagtgtcatagtctcattctccattaattaactgagtgctcagttgatctcaatgtgctttctcctgccagctctgcaaggccttgccctctgcagctggttctgcacagaaccagagtctacaaaaaattaaaaatcaaagctaaggaggttttaactttgcctgatttttcttacctggaaaagaagcagacagcacaggctgctttatgttccacatgaaatggtaaaaatagtatgagctgtaaagcacacaaatgaagttttgaatcatggttacctgctagctcttacgttgaagaagttttgtaacgtcgagatcttcaacatccttttccataaaaggaaagaattccatttccataaattgttttgagaattaaatgagttaatgaacttgatagtgtcaaacattactcctaacatgtaatacatattcagtggaaattagtttctttctttctatttgttgagatatcttgagtaaaatttaatttcttctcatcctcacatttgtggcttttgaatatcagttaattacttttctaaagtatgaagtcagctgggtgcggtggctcacgcctataatcccagcactttgggaggccgaggcaggcggatcatgaggtcaagcgtctgagaccaggatggccaacatggcgaaaccccgtttctgctaaaaatacaaaaattagccaggcgcccagctactggcgaggctgaggcaggagaatcacttgaacctgggaggcggaggttgcagtgagttgagattgtgccattgcactccaacctgggccacaggagcaagactccatca

SEQ ID NO: 199800 - DNA, 479 bp, Homo sapiens
actttggaaagtagaacgacagctgtaggtttccagagctcccctaattgttgagtctcaaacaggcatttatatgataaaggaaaatgacttcagggtcattaaatcgttttgttttccactgagggcccagagaagtaaatgtaattaaagaatgtagcaccagattgatctaggcacgtcattcccctgttgaatctgggagtatttctcgtttgtttctggaactttggttcctgatttccatcaggtggttacttcaggtttatttcaggctaccgttgggagaccctgaaaccaaattcattcacagaaaatgagtttctgttctgtttataatttgcagttgtccagaatggattaacgcatctggaaacaggacaggtttctgtaattcaataatacaaatttgtactaggcatgtgtcataacattttcttgtgttgactcaccacatttgaaaccacatacctctgtag

SEQ ID NO: 199801 - DNA, 167 bp, Homo sapiens
gaggtacaggatactgttggggacatttaacagggagtgaacttagtctggggctcagagtaagctatcttccaagagagagatgatattagtgctgcaacctaaagtatgaatacaagtcagctggaatagagcagattcaggtagctgaaaaaatatattcaatg

SEQ ID NO: 199802 - DNA, 193 bp, Homo sapiens
gactctagaggttcccgtgcttacttgaaggcacgatggtctcgatttcttgacctcatgatctgcccacctcggcctcccaaagtgctgggattacaggcttgagcaccgcaccctgccatttagtatgtttaacgaaaggaaaagaaaggaaactgtaatcgagtagtagcctttagcaggcttttggagt

SEQ ID NO: 199803 - DNA, 347 bp, Homo sapiens
aaatagctttcctgtcccggcctgcgtggcgtgggcttgtgggtctttgagacccgaaaattgagagcattttcgcaccccaggggctgctcctggcggctctgcggccgtcaccatgccacagaacgaatatattgaattacaccgtaaacgctatggataccgtttggattaccatgagaaaaagagaaagaaggaaagtcgagaggctcatgaacgttcaaagaaggcaaagaaaatgattggtctgaaggctaagctttaacataaacagcgccatgctgagaaaatataaatgaaaaaaagactatcaaagatgcatgaaaagaaaaacaccaaacaaaaga

SEQ ID NO: 199804 - DNA, 507 bp, Homo sapiens
gcgtacagccatggaaagaatgacatcatctgagggaaatggaaaaggaagtgacaagggtctaagaacaagacctgtgaaaatccaacatttacacttcgaaggagtcagcaaaggagacagagaagaaacagttggagagttgcttcatgatcttaactaatctaggcttgtaacttttttgattcacctctttctagtagcccttcctgattggcctgaattaattctgattatatctttagcccttgaattcacatttctccctattacttgcctgtatggtgccttttactattttgagctattcctatacactgcttagccaagcataagttttcctgggttgctattggaaatagagttgatagaagtattcaagcctggagtttaggaaacagtttttgtaggagaaatgtgaaaacccctaggaaaaactgattgtctcccttctccacaatgtttctgctatcgatgaaatgtgacagtaaagtttagaagcagcca

SEQ ID NO: 199805 - DNA, 363 bp, Homo sapiens
ctcgtgaaagcagccttatttggaaaaaaaatctttgtaaatgtgtttaagttagtgatcttgagataaggtcatcctggataactggtggccctaaatccaatgacacctattcttttttctttttctttttcttttttctttctttttttttttttttttgggatgggggccttcgcagggggcttataaatttgggggccctttcaaaaaaccgacctccgggatctattatttttgggaggggtttttggggtcttattttcctaagggtcggctggaatttaggttttttatggcctcctgcgagcttggaatggtggtccccttcctttttcaggttttttaaatggggaggtgggg

SEQ ID NO: 199806 - DNA, 533 bp, Homo sapiens
ccactttggcctccagccgtctgacccgtccctgaatcgagcaggtcctgtcggagctcccaggagtgagcgagcttccactcacagggtcacagccaggtgtgcagcccccaggcctgggcggttctagggcatgattttttttaggctggaaatgagctctcacttgagatgcacccctcaaaatactgaacgtactgcttctgtgagaatttcccctccttgtgtctggtgtgattgacaacgggtgcagccagtggaagcaggaatgtcggggagcgcggggtgcagggggtgccctgtcacagtcagcggggagcgcctgtccctgctgcgtggtgtggggttcccgtggctggcatttgctgctgtgtggagtcctcaaacccagcgctcgccctgcctgcgttcagaggacagaggcaccaccgggaacccaccggatcctcactcaggctttggaaaggccgagtgatgttttgtgtttgtgaattccacacatactgtaggagtatcaagaacacgtaactgtt

SEQ ID NO: 199807 - DNA, 811 bp, Homo sapiens
caaacctatggagaaaaatcttaaacaaaaataaaagttccaattaatgttgattgcattcttacctcatatacttgttaatttaagggatatgtttaggttattatttagctatttctaattttactgtaaaattcttgtgaaatttttgtttaaaaaaaagtattatatagttcttatctttgccggggcacagagctaaggctatcatctctaaatctgattaatgtatgcaaacacacagaatgaaactagctcagaatatctcttttaatctccctctgaagtagagtgattttggtaaagttttcattatctgcggaaacattgtttaagccaaagctatacaatttccagctgagttgctctgaatttgaaactttaagttgacaatcttcgtgcttgttagcagcaggatcattaatatctcgtctcaatggcccagcccacacatatggatgaccactagcaagtgtaatgatctcaatatttatttctcattcagttgggtttccttgtatttgccacattagtgtttaccctgttcctaatggcaaaatattctgtcatctccttgccttttataaagtttaatatactttctcattttaatctgtccccacagatctctagtcatcactgtttttatttgaatgtctctcatccctctcaactcttttactgcccaatttctgtgattcctgaagacttcaacaatcaacactctctttttttgtttgttttgttttttttttttgagactccgtctcaaaaataaataaataaataaaatgaaatgatgtacactggg

SEQ ID NO: 199808 - DNA, 1307 bp, Homo sapiens
gtgagggtgggtgggaggctaggtttttggctaggagttctgaaataggctcaggccacttttttcagacttttaagtgtgtatgtaagtgtgggtatgtgtgtttttaagtgtgtgtgtttaaaaataatgttttatcttccctccctgttccttaccgttttcattttccaacagtctactagagaaaaacatggttggccttgagaacataaaggaagaggcatgtatttgacatggtatttttccctttctttatgttataattgagtagtagccctctaatttgtagtttgggcaagtacagccaacaccctgactcttaaccttattatgagaacttcctttttacccctttttttgttttgtgcaaaacagagatggggttgaggaaggagggttggcgagcaaggccagcttctgccctacagaattgggtgtgtcttttttttcaagtgaggctttgggaaagtgttcaaatgagagcagtcttaaggtctctaagagatggggaatgtgctatgtatatcctgcctgtgaaagcccaaaccatatgggagaagctagaggatactaaaaacaatgaaattgtgatttggaagtttagaacatgttttaaaaattacattataaatgtaagacatgctttttatgtgtatatccgaagggaaacagctacatcctcaagtttttgcagcctatatgacattgagattggagcttgtgaatttaacagtactggtgccatgagaatgagcaaagcctagccaatggatactattgtgtttagattgttcatctttggtagctttaggttcttgatcgaggttcttaagatttctaagtcctttataaaaataggtcaagagtcctgttgttatggaggcttgattatcccagatattaggagtgaacatttttaataaatctttcagaaaatcttggctagaaagaattctaagttagttgtctaaccactgaaaactacctagccagagatcatttaatgagatattctttgatcttcattgcattttttttgctctggaaaaggtggttcaatttgagtttgttttcatgatttgattgcagcttacttcatgccaaggattttttagggagaggtcgaattatttttcatttggaagtcatagggagacaggagttgtacttatgctgctacttgccaggaacaggttgggaagaaaattgtggctgttggaattgatgatgtactggcctaatatagaaaggaatttgtaggcaggagtaaacgttaactgacggtgggttagtgccctgcatct

SEQ ID NO: 199809 - DNA, 232 bp, Homo sapiens
ccttccccaggtgaaatgagaaaaggaggtggctgtggcagtgcagcctgcaagccccagatgacccatggacactcctaccagcaagatgcacggcacctcacagcacttggtactgccagtctttttacttttcgtcattctggtttgggtgtatgatcgtaaatttttactgaagttaatggagaaaatgacaagatgatagcaagtagtgacagacatcactgtaaac

SEQ ID NO: 199810 - DNA, 526 bp, Homo sapiens
gccaagggggataagtggaaagagatgaaaatatagctgctgttgcatggatgaccccattcactctgactccttcagcaagtttcatttttccttataattctcggaggaatgctttgcctaaccacctaccccaacatctaggatttacttttaagatggtcagttaatattgcttgaacataaacttttggccagagtaactggaaatttaagtttattaaacttttacatacttaactatggtctacagggtattttaaactctgccatttgggtttagatctgcttttttacccccacccccaaatgtgcagcagtgtgaaatgtatgagaactaattggataaagtaatttttttaagaccttggtatcttatttctgccagataatagagaacaaatataaaatattcccatgattaaacacaccagatacagcttgaatttttagaatattaaacaggagtgataatgaggaagaacttaggtccctaattacaaaaggtttacacacacacagacac

SEQ ID NO: 199811 - DNA, 374 bp, Homo sapiens
aaagtgctgggattacaggcgtgagccaccgcgcccggccgccaggcatccttctaagcactcgagaaatatcactgaaataaacaaaggctacttcccagtaagcactctttttaaagtaaaatatacagtatattagaagatagaacatgttatggtttttcaaatgtgcagggcatgggagtgggctgcaatgttaaatgtggtgcttactgagaagatgacacctgcaatgtgatctgaaaatgagaatctaggtatttggcatatttgggggcagaagagtcagcacagaagctctaaggtggagatgggagtgtgcctggaatggctttgaatcagcaggagacagggaagaaggaaggagctgaggt

SEQ ID NO: 199812 - DNA, 164 bp, Homo sapiens
tttatcagccaggtatgatcactttaagctcacctagtccagatcataaagacagcttaaacagatttgatcaaaaccatgaagaaatgggaactagcttgacaatcaaaagagatgagattgacatccattccatagactgaaaataacataactcctattac

SEQ ID NO: 199813 - DNA, 395 bp, Homo sapiens
ttagagaggaaggaaaatgtatgattcagaaagaacagcatacgcaaaggtccaaaagtaaataagagggcataaaacattaagaaaagagaaagtagccgagtatggtatcattttcaagtaatgagaaaagagaaagggagaatatggtataatggaaagaaattcaacctgaacaaagaataccaggtgtccagtctttgttctactgcttagtagtataacgttagggtaagtaattttgcctctatgagcctttatttcctaatgaaaaaaaaaatggggtgctaccatattccccctcaaagggatggctcaaagatcaatttttatctttttttcttaaaatgaagtctcactctggaaggctggagtgaagtggcacaatctcagct

SEQ ID NO: 199814 - DNA, 382 bp, Homo sapiens
aaataattccattaccttctttgcttccaactatgttattaaagtagacaatcttaagataattaaacaactttacaaattattcttctatatgatcttttgcctctaacctgctcactttacaagggaactgaagctcaagcaggcaaatgccttgtttaaagatatacagctagaaaggagcacagcccatgttatgtaaacaggacaatatctgatgcaagcagtacttctttacatgacagcagatgtcactataagcaaatacctgaattcacttaagctgtcaaatatcaagaactgatgcagggctgaaaacaggaacagtaagaccctaagagatgccacatcatcgctatcttgcacagtaagatagagatgt

SEQ ID NO: 199815 - DNA, 282 bp, Homo sapiens
caggatgaccagtaatggacccacaaagtctaaagacagtctacaaagctctgtaactatgctaaatgaaagcaggcttccctggaattttttcttttttgagaacagctataaaaatcccaaatatcactcagtatagaaccctatggcaaacaatggttacatttaattacaggcaaagccaagaaagaacgaaataaaaatgttcatttaatcaactacaaagacatctcctgatttcttatgtttatgttgctttacacagcaaacttaatattggtg

SEQ ID NO: 199816 - DNA, 501 bp, Homo sapiens
ggaagtccagtgagcaagtgaaacacagcagcccttctcaacctcattgtgaatacacatggggagcttgttaaaatatggattttgatccagtaggttgagaatgggccacaaaattatgcatttctaagttcttaggtgatgtctgatgctggtctgtggaccacactttgagtagctaggaaatacgatattcagagggtggcagcaggtatgaggatatcaaggcaaaaaattgttgtcagagagtaaaagtgtgatgggaatatttgtataggtagtgaaaattagtaacaggtgcaaggagcaggtgacattcagatggagagccacagtgtgctatgcctgcatgggatgctattgggggagctgatgtggtgtggaaagaacatagatattgaagccagatggctttcagtttgatgtctgggtcagctttttactggctatttgaccttgatcaatttagctaggctctctgggggagagtttacatattgg

SEQ ID NO: 199817 - DNA, 335 bp, Homo sapiens
atgaagacagagaagaatggttaccagaagctgggaagggtactggggggaacaagcgggggtgtgaggtttggtaatgggtataaaaaaatagaacaaatcaaacctagtatttgacagcacaagagggtgactctagtcaataataatttaattacacatttgaaaatcactaagagtatagttggatggttggtaacacaaagaataaatgcttgagggtatggatacctttttccatgatgtgattattacacattgcatacctgtaccaaaatatctcatgtaccacatatataatatatatactgtatatatatagcatatatatacta

SEQ ID NO: 199818 - DNA, 406 bp, Homo sapiens
actggctggggtgattccctgaataatccctttgcggtgagtgtgggcaggacctacggatatgatgagacagtcacttctatggttacagttaacctatctaagactccatctgagcagacttgagagagagattcttcttctgaccatgaagaagcaaatatctgtgctgggaaagaggcttgagcatgctgtgtggtaggggcattgctggagctgggagcgatccccagtggacagacagcaaaacagccatcttagtcagacagctgcaaggaaacaaactctgccaaaactctgaatgaacttggaagtggattctttccccagtgcctccagatgagaacacagtctggctgacacctcaatttcaattttgtgagaccctgagcaaagaaccctgcca

SEQ ID NO: 199819 - DNA, 823 bp, Homo sapiens
atattggtgctcagaaagttttggagcatttcagatttcagatttttgggttgggtaactcagcctgttgtcttgtgaggagagggtaggctgctaccatcattttatagataggtgaggaaacaggcatagatatgaggtcacacagccagcacgtggtgggctggggcttaaccaggcagcctggcaccgaagtccatgctcttagccacttccagagtctgcctcccatatcaacctcacagggttgttaagaggattgagtaagatgtaattccatgtgttcagtgcttagtattgtgccagcacacagtaggtgctaactgagtgattgtagttggtaatggggataagatcagtggcctttttgggccaagagatgggctggagttgggtcaacagtgactcctctgttcacaaagctggatgcgtcccacatctggttgggcatcttctctcccagggaagttagtgagattcttagttcagttgggggctgaggaagtgtctcacaattaaagaaggtctcattctggaaacctccctttaagcctgacatctctggctcctgccctccaaaggctcctgtttggcaggtggggtggggatcctctttgctctttgggagctccagctctcacaagtaagacccatgggtttgtagcagtagaaaaccatagagcagttgtgaagggggcccacgttagtcacagaataatttgttggctcattgagcaaatatttgagtgtccactgttaagtgttgggggtacagagatgaacagaataatgcacttgactgttgagcaagggaagacagatg

SEQ ID NO: 199820 - DNA, 448 bp, Homo sapiens
gtgattacttttagaaatcagaaaacctctgcaactccgaatggcattcagctcttgcatttggcgcatcatcgggctgagcggaccagctacaccaaggacattagccaagccacccagaggggtggctttgccacaccagttgtcaccttcccatagcaagtggaagagcgcccacagaactctgggagattgcaaaggtcacaatgtgcatatttaccagtgaatggccccgggtggggccacgtgggggtgttcaaagcaagccaaacgctgcaatcattctttacagacacttgagactgacttttttatgaattacttagtcgaaaccaaagaaactttttctgcacctacttctgcaacaaacaaaactgtcccattaaaatgaataaataaatccgtaaatcaatggaaatcaccaccaataagaaggaagcacgccaga

SEQ ID NO: 199821 - DNA, 453 bp, Homo sapiens
tattcatgcttttaaataatggctaattcagtaaatcaactttccaaggatcagtgatagccagcaataacttattttgacatacagagcccaaatgaacagtaaattatgacgaagttatgagaacattcacctcagaacctactttctctggattcctctcactgcatatttcttaccatttttctttttttcagttttttaatttttttatttttaagcactttcatgtctatcttcctatttttcgttctacttcctgttctgtctccctctgcctctctctttccccgtattgtctcacaccatgcaatagagaaaatgtcttttggtattgattttacttaatgtataaaatgtaaaatcttccttcttcaaatattagtagtttttcatttaaatatatgaattttcttccaagtaataaaatgatattctttggaaacaaattat

SEQ ID NO: 199822 - DNA, 506 bp, Homo sapiens
taagtgatgagaacaaaggttaaaaacttttatctgtatccttttcactagcgatgctcccattgttttgaagtgttaaacgttagctattaccacgcatctgcaagtgcagggtgtagaagattagcttgtttaaatcagccaaaaagttggtgatgcaccctgatgacccacatctgttcttctccttgagccaataatgtgcatgagtcagagaaaaacacactggttcagtcaacagcagctctttttcttcattttagaaatgactgggacttaagagctgggaatggcttaaaaatatgtatctagtcctttccctgcccaaaggcaagcatatggtacacagtattttcattatgaaccatatcctagaaaaaaaatttttacagcttcctcgaacacattcaagtgtctagattccacacattgtaatttatcagttctttcttttgccactttatctaaatttttactgctgacatcactctactttgtgctgaaga

SEQ ID NO: 199823 - DNA, 448 bp, Homo sapiens
atacagtcaccactaggcatatatggcttcttaaatataaatttataaaaataaaaattcacttcctcagtctcactaacaacatttcaaatgcctagtagccgcatgtagatagtagctactgcattagacagtgaagatatagaacatttccattgttacacaaagttctattgaacagctctgctttaaagaatgtgttatttgggggatttatattgtcttctatgttgcacaaaaatcacattggtctttatgcaacttgacaacttaagaaggttgcccctcacagaatgatgattttactctgggtggtgatcatataagatcacttaatgaactctgatctgtaacaccttaactgaccccaagctgaattttatagggtgtctgtcccccaaaatgattccccaaagaagtaataaaatttgtttgaatcagaccttga

SEQ ID NO: 199824 - DNA, 430 bp, Homo sapiens
cctgaccaacatggtggaaccccatctctactaaacatacaaaaattagccaggcatggtggcatgtgcctgtaatcccagctgctcaggagacttgagtcaggagaatcacttgaacccggaaggtggaggttgcagtgatccgagatcgcgccaccgcactccagcctgagcaacagagactgtctcaaaaaataataataataaaataaaatgtagtgtttaagagctcagactctgcagctggacatggatttaaatcctagtttaagctgtgatcataagcaagtcaattaattgctgtcagtctcagtgtcctcagctttaaaagggggatcatctgtagctcacaagtagctgtgggaatcctaggatatttctcagttgcaggaagagcctttttccacagcgcctaatgtttcttccacag

SEQ ID NO: 199825 - DNA, 288 bp, Homo sapiens
tgtcttgccaacattcagtagtttctttggatgatgattttcacttcattctgtggctttggttaattgccagagttctaaaatggttgatttgagttggtttgaccatcttttcattgttttagagggaaagtgagttcatcaaagtcctcgctctgccattccatctatctactattactcctgtctttgaaaaaaactttaaatcctcttcatctcacatgcctttgcagttatgacttcatttctcaattcccctaacagcaaaactcttcaaagagttttcct

SEQ ID NO: 199826 - DNA, 333 bp, Homo sapiens
ttgtaactaggagttaatagtctaggttcaatcttaaaaaaatgtcgttaatggtaattggtaaagcctcaaacagtcttcatcctaaatacacatacacacagacacacacactaacataaatcaattttgtgacttcctggcaaataaaactgagtttctattttttatccattaaattgatgaaacagccaggcatggaaatgcacctgtagctggaactacaggtgggcaccaccacacccggctcatttttttgtatttttagtagagatggggtttcaccatgttcaccaggatggtctggatctcctgacctcgtgatccgcctgc

SEQ ID NO: 199827 - DNA, 382 bp, Homo sapiens
tctctgcatctggttttgatctatattttcaaagaaacctgctccccaaacttgcacaatgattccttcacagatgctgagtcagcagagagctagtgcatatttatccagagattctgatgaaaagagggagaaagaaaaatctaaaagcagaaaaatacgaagtatatggaaattttgaggtttcctgctgagttagggagaaggggttggggaatccttgaataaatcatagtgcctcacacaatggcctgctttgtctagtaaaagcacttttggttgaggatcagaaatacaaaacagtttaataatagtgagtgttgtgaggagtttcaagaatcttcgagggcatttgacttaaatgagctcagtgatggagtat

SEQ ID NO: 199828 - DNA, 481 bp, Homo sapiens
taggtagcaaatcctaatgattaatatttaagaggaaagcaaaaaggaaataatgaatcataccaaaagtaaaaactatagtgaccagataaaaatcctcaccttgaaactacaaatctagaaaagatgatgataaaacgagtaattctctgtactgtccattcaattgacatgacatgtgacatgctatttcacagtgggtccttcctggcacccaactccattttgtctgtgactaggctatgatacaacaaacaaattcaatgaataattgaatgtgttaccagaaaaattccctagtcctcccaaatcatcttgacttactcatggaacttaaataacccatcagctgttttgttactaagcaaggaagaagctttatcttccacctatctcctaaacctgtttctgctccacaacacagtttaatttctattcctcacctctgctctcatacacctactttttattctgatgtaag

SEQ ID NO: 199829 - DNA, 536 bp, Homo sapiens
aagcggttctcctgcctcagcctctcgagtagctgggattactggtatgcaccaccatgcccagctaatttttgtatttttagtagagatggggtttcaccatgttggccaggctggtctcggactgctgacctcaggtaatcctcctgccttgacctcccaaagtgctgggattacaggtgtgagctaccacgcctggcctcgacccccttttatgctagcctcagctgaccatcctgctcactagtacactgtgggtcatagggggccaaaaacatgaggctggtaacattccatccctgttattcatagatgatatttaagttaatggttgtttttttattgaatacatttcaatgccaggtattagatggtattatccccatgttggagattaggaaactaaagtgcagagagtttgaataacatgcccgagactataaagcaagaattggaagcctgttctccctgtctctaaaggcttctacttttggtgttattggaaagaccaacttaatgatggggcacttgtttgc

SEQ ID NO: 199830 - DNA, 447 bp, Homo sapiens
actcttctggccattggagacacagaagtgaacaagcatatgtcatccctgtactcaggactggtgtctactgggaagatgagagggtaaactataaatgaacatagtaatatacaatcaggtaatattcagtgcaatgttgaaaaaaatagacagtgtatgggaagagggtgagagaaagctgcatcagatagggtggccaggaagttcttccaacagagacaagaatggagagaaggaatcgatgtgaaaacctgggggaactgtaatccagacagcaggacagcaaatgcaaaggacaatttcaacatcttgtagcaggataagctgcagacaaaacctctcagacactgagttgtagaaggaagggctttattcagccaggagcgtcggcaagctactgccttaaaatctgagctccccaagtgcacaatttctgtccctttt

SEQ ID NO: 199831 - DNA, 312 bp, Homo sapiens
cattttagtttcctgctgtgagaaagctccaaatgctttggaggctgaagaagctgccctgacaaagacaggaaagcgcgggcggggctgatgggtctttttcatctcccccctttgctgatgaagaggcagtgctgtaaaatgacgaaatcaagaaagcacaggactctggctcagaactgttggcaggcacaactgagaagctagaatctaatatcattgttttgctttatttatgacaagcaatattggttttccatttatggtagagatattaagtttccctttgaaataaatgtatttttgaagtta

SEQ ID NO: 199832 - DNA, 1005 bp, Homo sapiens
agcactcttcctaggagagggaggccaggccacagaagagcagataaactcagagagtacttagtgaaacccagggcagggctggcctcagtgtagaacaatgggaacagaacagctggaagctgagcacaggagttgaaatcctgcatccttaggcaaactgcttcatctctgcatcttcataccctcacctgtaaaacaagggtaccaacgccccagagttaaaaacttcacccatcatcctgccactctcagagctatcagttttcatttatggtttattctagttcttatcaaattcacaggcaagtttcaaagttgtaagcagggcttatgtcctgggctagtgtttttgtttttcactggtctgctacactctgaccaccgtgaccactttttcatcctatttcagtccaaatacatataccagctgtttgggtgaaggcagagttagacaaattcttcttctgtaattcaccatatgaatatgtgtaaaaccaaatatacaggtgtggctttttaaaaggcaagatagggcgcacacgtagtcgtaccatcacccttctgtttaccactgtcaccacatttccatattccctagttcagcaaaactgacaaaggggagtgaaggaggcaggccaggatattgcaacacaacacagctttgctttctacacaccaaagtgtcccaacacatgggttaagcaagagcaatctgtatcatcggaagttcctaaggttcacgattgacagcgatccagtcccaggtaagccctcttctctctgaccgttaccagggggcccgggagaatgcaaagaaaaggagactgtgggcaccctgcacccagagcatttgcacctcaaggaaacttcaccagccgatatcaaatagcgaacactgcctgtcatacttccatagctagggaaaggaattttcccttttgcagcttcctggctgccaaccaggaggctacccctttcattaagctgaaatgagagaaaaga

SEQ ID NO: 199833 - DNA, 509 bp, Homo sapiens
aggtttcgcttctgattaaagagcttgccacatacatcacatttatatttgtctgctaaatggattatctgatgtttccttaagagtgagctgtaattaaaggctttgccactctcattacattggaaagatttttctctcatgtgtacttcctgtttttgtgtgagtaatgaagaattccagaaattattcccatggttattagatatatgggttttgggcctacaagaaattctttgggctgttgaaaccaaggaagcatcgtggacagacttcacaacttgattatcaattttctcttcggtctgaaatatgtgcatttcaggcagatgcgaatgaaagcttgatccaagctgatctttaataggcttgtttctagcatgactttgatcatatcgttctgtaatacctgtcaactttttgatttttgtcatgggtgcttcatggccatttctttcatcttcttgccattgaaattcatagtcatgaatatctttatcaacatcctg

SEQ ID NO: 199834 - DNA, 270 bp, Homo sapiens
aacattaagaagaacgtggcaaatgggagcactgttcataacagccacaagggggagcagcccaagtgtccgtcacatgaaaggaaagacataatatggtctatacatataaggtcatattattttaccttaaaaaagaaggaaattccaacacatactacaatatggatagcctcaaagacattatgctgagataagtcacacacaaaagggcagacactgtgtgtctccacttatatgaggcctctagagtagtagaattcaaggaga

SEQ ID NO: 199835 - DNA, 736 bp, Homo sapiens
ctttcaaaataatttcaaccgacggtacaaccagatctttgcataaatcatagatcgaatgaacaagaaaattcaacagttgcagaaatgtcactaactgtggttcatctgatcgctggatggattttgtcctggatagctttctgagacttttctctgggttcagtgtcctcctttctctgggttacctgtcctcctttctctgggtgcgctctctgttctctgggtgcaccgtcatcttttgcagtcttgtcacactcagtatcaaagtgccttccttcaaggacatcaccactttcaatatttgcaatgactgtggcgaatttatgaacgaacatttgtatagccaatcctttggttgttcgagcacattatttaggtattgtatgagcacaggatctgtagttacaagcaaggtgagtctgtactctgcactccaatgaaggcttcaggtgggtatgtgctgtgctgatataaaatgctgttgataccaaatgggaagaactcagccaggattccacgctcctgccagggtgattctctgctcctgggagagctgcatcgcctcagccaggcccacagaccaaggcacatgggtttccacttggccgaccaagagcgcagccgctcccccggcccctcccgcagcagttccccaccacggcttcatagaacttagttcttctgcctcactgaactttgtaccctttgactagcatttcttcatttgccaccc

SEQ ID NO: 199836 - DNA, 452 bp, Homo sapiens
gttactgaactgattactcgatccaaacacagctctaaaaatctttaaaatgtggaaccagtaccggtgcggtggctcactcctgtaatcccagcactttggaggactgaggtggaagaaccgattaggccaaggagtttgacaccagcctgggcaacagtttttgacttctcgactagatccctaaagtccctttcaattataaaatgttttgttataataatgttacatgtaccagactttgaagaattaaacataaatggaattttaaaagcatcttaggttgggcgtggtgactcatgtctgtaatcccagcactttgcggggccgaggcaggcagatcacttgaagtgaggaattcgacactagctggccaacatggtgaaaccccgtctatactaaaaaatacaaaaatcagtcgggtttggtggtgcatgcctgtaatcccaggt

SEQ ID NO: 199837 - DNA, 689 bp, Homo sapiens
aaggtagctgtactgcgacttcagttcttacctctggacggtgaagtagccggacctgaacacaagcttggaactgtgacaattcacctcaaaatttgaacaatccatcaaatgagatactggccactttggcagccaccacagatatagagactattcatccttccataaacaaagcagtgaccaatatggggactgccagttcagcacatgtactgcattccactctcccagtcagctcagaaccatctacagccacatctccaatggttcctgcctccagcatgggggacgctcttgcttctatatcaatacctggttctgagaccacagacattgagggagagccaacatcctccctgactgctggacgaaaagagaacagcaccctccaggagatgaactcaactacagagtcaaacatcatcctctccaatgtgtctgtgggggctattactgaagccacaaaaatggaagtcccctcttttgatgcaacattcataccaactcctgctcagtcaacaaagttcccagatattttctcagtagccagcagtagactttcaaactctcctcccatgacaatatctacccacatgaccaccacccagacagggtcttctggagctacatcaaagattccacttgccttagacacatcaaccttggaaacctcagcagggactcca

SEQ ID NO: 199838 - DNA, 843 bp, Homo sapiens
ggcggtggctcccgcctgtaatcccagcactttgggaggccgaggtgggtggatcacaaggtcaggagttcgagatcagcctggccaacatagtgaaaccccgtctctactaaaaatacaaaaaattagccgggcgtggtggtgggcacctataatcccagctactcaggaggctgaggcaggagaatcgcttgcacccgggaggtggaggttgcagcgagctgagatcgcaccactgcactcaaggctgggcgacagcgcgagactccatctcaaaaaagagaaaagaaaattaatcactcagctaaataacaataaaggcctttaagttaggtaatgagtacaaaaaagatcatgaataagagttagatttaagagacacagaagctgacttgatgtatcacttgatgaccaaggctatgtcagcgcgattggaaatggtatggtaactgagagggtggtgatttgggactattaaaaagaacactttttgtttgtttgttttgggggtgtctgagggggtagtgattgggactattcaaaggaacattttttgtttgtttgttttgggggtgtctgaggaagtcctattttagacaagttgaatctgagctttgtggggcacatgtagaagaaaatgtctaacaagcacctggaactcagcaaagcctggagaatggacataagtggcaagaaagtagatgagatccccagagaagatatcaagccaacgagaagcctgctgctaaaactctatggaatgaatttaagaataaccacaggaaaagaaaccagaaaaagagacagaatgaatattcatagtaagaatatcagggcagacta

SEQ ID NO: 199839 - DNA, 516 bp, Homo sapiens
ggcggtggctcccgcctgtaatcccagcactttgggaggccgaggtgggtggatcacaaggtcaggagttcgagatcagcctggccaacatagtgaaaccccgtctctactaaaaatacaaaaaattagccgggcgtggtggtgggcacctataatcccagctactcaggaggctgaggcaggagaatcgcttgcacccgggaggtggaggttgcagcgagctgagatcgcaccactgcactcaaggctgggcgacagcgcgagactccatctcaaaaaagagaaaagaaaattaatcactcagctaaataacaataaaggcctttaagttaggtaatgagtacaaaaaagatcatgaataagagttagatttaagagacacagaagctgacttgatgtatcacttgatgaccaaggctatgtcagcgcgattccgattaaggatagagagattaaggatagagcgagaaaggatagagagattaaggatagagagattaaggatagcggatcgtc

SEQ ID NO: 199840 - DNA, 497 bp, Homo sapiens
tttgaggaactgccatactgttttccatagcagctgcaccatttgacattcccagcaacagtacaaaagggttccagtttttccacatcctcaccaacatgtgattttggggagggggggcaggggttacatcaaacccaattttgttttaaattttaacatttgattagggatagcattctccctgcgtatctctagagaaacaaattttggaaggctgggtgtggtggctcacacctgtaatcccagcactttgggaggctgaggtgggcggatcacgaggccacaaattcgagaccaacatggtgaaactctctactaaactctctaccaaaaatacaaaaattagccgggcgtggtggtcgtgtgcctataatcccagctactcaggaggctgaggcaggagaatcgcttgaaccagggaggcggaggttgcagtgagctgagatcaagccattgcactccagcctgggcgacagagcaagactctgtctcca

SEQ ID NO: 199841 - DNA, 492 bp, Homo sapiens
cagtcgtctcctctgtgtcacagaccctgtgcccacaatcccgcattccatgccgccagcttcgttctgaagactagtcccagaggagggctgcaaagtgtggccgcaggaaggaaggctcgtggccctgcgggcggatcttgggaagagcttgttcacactcacctagtcctggtgaggaaggaaaattgcaaatcacagaaagtgaactgttcgacccacgaagggatagatgaatcagtgcaagaaagctggacttctttttagagacgagacaccttgagttgttgaatctcagtaacgctgcaggttccggtgccagtgtcccgtttgttctgcctacctgtcaagcgcaggatgccagtttagaggagactgacattgcttatgagatcagatgtacaccatgcacccccggcaccctgatacatgtgcctttgtcctttttaaaaatctggttaataaaaatgcatacgttttcatgtctcattg

SEQ ID NO: 199842 - DNA, 1094 bp, Homo sapiens
ctagtctttctgaaagactagtaaataatcaaaatcaactagtacaatgttagcttacagtgtattcatagcacatggagactctttttcaaagctaggaatttaaagttgaaagaaagaaaaataatttctaatgcaccttttctgctcaacacaaacttattgcagcatcattgggaagcatcatagatattcatcagtagagcgtgtattaaattatggtgtatctgtgccatagaatagtgtgcagccactagaaagtgtggctgttcattatttcaaatggctgtactttatagtactgaaattccatgttagtactatatgagttctaagtggcataggtatatatatatgtttaacgcaaggttttagaaaagttaatataatgtgctactgtttgtgtgataaaggaggaatgtatatgcttgaatacctaagtgctgaatatctctgaaaggacacttgagaaatggataacattggttacctttagggaggttggcaaattttggggttcatgcccattttacagttttatttttcccccgtctttaccacatgcatgttttcacttttttaaaaaatgtttggctgcgccaggcatggtggcttaggcctcccaaagtgcggttctctttatttgtagacagaaagtaggaagttttgcctaaggagttggacattttcctaataaccaattcaaaaaggaaatttaaatgtagatacttattttaaagtatatgatgactcaggtcttagtggttagtgcctgtcaaggtataaaaattagccagtcagaatctgccaaatctggagcaatacggtgcctcacacccgtaatctcagcacttagagtggctgaggtgggcagataacttgaggccaggagtttgagaccagcctgggtaccaaggcaaaaccctgttactactagaaatacagaaattagttgggcgtggtggcacatgcctgtaatctcagctactcaggaggctgaggcgggagaatccactgaacctgggaggtggaggttgcagtgagcctcgcaccagtgattccagcctagacgacagggccagaccctgtctcaa

SEQ ID NO: 199843 - DNA, 380 bp, Homo sapiens
tttacagttttatttttcccccgtctttaccacatgcatgttttcacttttttaaaaaatgtttggctgcgccaggcatggtggcttaggcctgtaatcccagcactttgggaggccgaggtgggcggatcacctgaggatgggagttcgagaccagcctgaccaacgtggagaaacctcgtctctaccaaaaatacaaaaaaaattatccgggcatggtggcgcctgcctgtaatcccagttacttgggaggctgaggcaggagagtcgctcaaacccaggaggcagaggttgcggtgagccaagatcgtgccattgcactccagtctgcaacaagagcaaaactccatctcaaaaaaaaaaaaaaaaaatctggaacg

SEQ ID NO: 199844 - DNA, 192 bp, Homo sapiens
tttattccttctcctggagtgccatgtgggagtggatcagggattcccatcactctcacatctgtcttcaacgtgtttcaggaaaaatacactggaattcagatcagaatctatcttcacctcagaatctgtgttcgccctctcctccttcttccctccaatgcttccgaagcacaaaatggtttacttcct

SEQ ID NO: 199845 - DNA, 425 bp, Homo sapiens
tcatctaatctgataaacaaatttatctttcttcatagtgtctaggcgtcggctgttcctaggagctatcacctcatggtctttattgttaaatttatggtttctggctaattttatacctcctactgagaaaaaagcgggaatgtttttattatgcataatatcatcgctcttagaaatgtgttttttattgaaatggtataatcttcttgctactgcagttccctaataccatgcatttcagactggttacatcattactcatgaccctgtatcatgtgtcacaccacctgtgagtactgacttttaatgactctctcaaaggttgttactatgcttctttgttgaggatgactactaacacaagtcttaaccagagtatacaaaaaaatgtgaccaatcctttgtactatggtcacattaaa

SEQ ID NO: 199846 - DNA, 230 bp, Homo sapiens
atagcaggatctcttatttattggcaggactttctatgccctttactaaaagctctcattgggagaagccagcaccaaggacatattattactcaaactgggcaactaagggagagattagtctaggaagaatacacagacggaaaatggtgttgccccagaaacatttcttgttttttgttgttgttgttccagtttcccaccactgatagctgtctgctctgatttat

SEQ ID NO: 199847 - DNA, 360 bp, Homo sapiens
ccacactgcacattcccctgcagagttaagccactatactgcatttgactcaaggagtcccagtctcaaccccaaggaggcctgtgtgaaacagttaccgtcctagaaaccaaatctatttatttcatccctcttctgcttaactctgtcataggacatcactgccaaaataaaacacctggctcctccaatgacacacacacacacggacacacatacacacacacacacacacacacacacccttaccagcttccgaaaggagagtctcgctcttctccgtgaggtcacaacactttgtagacacctcaatgtcttcactgttgtcatctcttgccaaactgggaggtccccagagct

SEQ ID NO: 199848 - DNA, 518 bp, Homo sapiens
cgagtagctgggactacaggcatctgccaccacacccggctaattttttgtatttttagtagagatggggtttcaccatgttagccaggatggtctcaatatgctgacctcgtgatccgcccgccttggcctccgaaagtgctgggattacaggcatgagccaccacgcccagccagttatacctgactttcaatgtggctgaaattgtagctcaaatgcagatctgaaagcataatctgacaaaagcattcaaagactaccagacaatgctgcggggaactgagctgagaaatcacttggactacaaagatggtttgaggcagactagttttttaccatagttgctgattattttgatcattaacaggaaacatctcagctgtccattacttctaaatttaccttcagcataataagaatgaccctgatggtggtgagaagactgtcacaggaagaattaagacatcctgcagcctgggtcgacgcggccgcgaatttagtagtagtaggcggccgc

SEQ ID NO: 199849 - DNA, 278 bp, Homo sapiens
ctgcacttcagcctgggtgacacagcgagactgtctcagaagaaaaaagtttatttacaaaattaaaaataaataaaaataactgagaaaatcagaatacctctttgcatgaataatagtttcaattatataaacagacatggggggaaaaatggaaggaaatacacaaaaataactggaggtagaatctttggtgattttttttctcattttgttttctaaattgctataataaacaatattcctctaaaaacataaacattaaacactttaatata

SEQ ID NO: 199850 - DNA, 504 bp, Homo sapiens
cagatttgggggtccgccagataggatcctgtgaagagacctcaaaggtctttagtccaatctataaaacatttttatgttgattatatcatttccacaatcaaagatgaagaatatatacagaggtgtatttagtgaataaggttgatggtgcacctgcgctaggcagtgttttagttcgttgagacaccaaggagttgagacaatcctttctttacctcagagttttgtgtgtgtaagtcctgctgttgagaggtgtgtgtgttaaaatgtctgatttgggcaggtgagatctgggccctctgtaaggttaggtaacaggaggttggtgtccagcaaatattcagtgccccatcaacatcccagttcttgtccaccaatcttccaattctaggactgatgcggaggccctcagagcgacttcagaggagaagtagtatgctctgtggctatcttgttttggagtgtaatttgtaaatcctctgcaaacaaaacgttggaaac

SEQ ID NO: 199851 - DNA, 469 bp, Homo sapiens
tctggcacctgccccgcagctccccggagccccgcgctgcgggactgcaaggcagagcccctcggatcccggtaccacccactccagcccgccaccaacatttgcgcagtggggcaggaggagaaatggaggcctatatgccatgtgcccaaatatttaaaagttataaattcagctgccaaagtgtgttctattctcacactgccaattattcttgcaaagctttggcgttcatatgaccaaatgtcagcaaaacatcaaaagtgactgaatttaaccattatcacagaagtctcactgttctgatgatgggctggtgatatctggatgcctaatattctagagacaagcaattcataaatcatctttatgttttttccacaaatttatttttctctaatttagcaaaatcccttaatgtagtgttgcaatcaagattatgctctaatgccaaattggacaaccttcc

SEQ ID NO: 199852 - DNA, 709 bp, Homo sapiens
ccttaaagtcatctcaactcaaaatttactcagatgagattcaaggtaggcattcttaaactgtagtttgcatcctgctatgggacatgaaattattttttattggtagataaaataggagaaacttattaaaagatatcagagagctttccttgctgttcctgttctcagctgctcatgatctagggagtgagttagctataccatcacaagttcttatttgagtagaatttatcaagaaagaagacagaggtgggccttccaggaagaagcttcaatttgagcaaaggtatggagttcaaaatttaaaaatgataatgaaagaatatattttatattaatgggtatacaagtatcaatggcagggcataggccaaaatacgtgccatggaaagatgtttgtattttctactatggacaatgatgtagcatcaaaaacgtatactgagactgagggtgattggcagtctgttgataagggataggtagggtcaggtttaagatggcacaaccctagtccaggaccagatggattcacagctgaattctaccagaggtgcaaagaggagctggtaccattccttctgcaactattccaatcgacaggaaaagagggaatcctccctaactcattttctgaggccagcatcatcctgataccaaagccgggcagagacacaacagaaaaagagaattttagaccaatatc

SEQ ID NO: 199853 - DNA, 450 bp, Homo sapiens
attgggatcttctgtgaatgcagctctggcactgatgccctcaagaagttggctgagagctccctggctgccacgggaaccaggcgccttgtgagactaggtgtggggctcactggggtccccccttcagtgagtctttgcagagaagcaaaaagccgaggcccccaggcacatggaccagagcactctttaagcctgggagtcttgcacagatgggtaagagagaattccctggggacttctctgttccagacaatgatcccttctctaagacacaggataggaccctttccatgagatcagacttctaacttccctccctaggctttcttggcatcaaaggctgcagccagcctatcttaggcctggccaggtgattcatgcaccaccaccaaatgagcaagaatgttcctatgttagatgtaaaacagtgagtgtaacccacaacca

SEQ ID NO: 199854 - DNA, 731 bp, Homo sapiens
ttaccagatccatgatctctgctaattcctcatggtaagcaactcctcacgctacactctctcaatgtaatttactatgatggcttcagacaggacctccatgctgatgattcccaaatctatacttgtagtcttctgccctctagaagagaggacattataccagaggtgtgtttataactgcctaaggttatcctcacgttgttttcctactgacatttgaacatcaacatatctgaaaacaaactcccccaccactgccaaatcttatgcattatatttcagttactggttctagtgactgcagagtcgtgaacactgtaaccaagtttacaacatggttttaaagaagtctgtgctcaacagagttgaaatgacattaatgaaacaacataggaagacagacattatctcatccttatacctataaaccaagttcatagaacaaaagagaagtgtggtctgcttttcttcttatattcctttactatcattctcagcttacattccagcctgaaaatccctttcatatgaatcccatttttaagagtacaatagattacacacaaaaaagaaaaaatttatataattcaacacctatgcccaattgaaaaagaaattaattttttaaaaacctgttgtgtttataattagtaagtaatctgcaggtgaatactttgagactgtgtgaatcacaaaaaaatgcttaaataaatagctctctgtatgtg

SEQ ID NO: 199855 - DNA, 416 bp, Homo sapiens
ggatagcacagcccctcaatctgagtgctcagcagagtgcttgtgaaggcagcaccacagcaacagttgctcagagggaacggattcaggagccttgacttagcaatagagtccagggttttcagctcagtgtctttagcctgtctctgctggtcatgtcagttacgtactattccatccaggaggtgctatttacattgtagtacatacacagtcattgcctaatgagtcatacagagagaaaagtaagttataaattatgtcccccatttgctgcaactctcagtgttaagaatgattcagtgcagctataggagactacttccattggcatgccacctgcgtaaaatacacaattttgttaagatatacaataaaattattatgctaatagcaaatattttatgtagctcact

SEQ ID NO: 199856 - DNA, 322 bp, Homo sapiens
tctcatgttggtggtgacaattctacagcacagtcactttttagccctctgtccggacaccacaatttagtacatcttcagctaaatcagagctaaaatgaggcaagaaaacatgcagtctatgtgagcaggatttgaaagctttcactgcactgatgtttcaatgatactttttattctgttgtatggaagtactcctagttttgaaaaacagagattctatatttctttctcaagacaagcatgcatggtcatatagtagcaagcccacaaatgtttcttttgtaactgtaaagagtaacattttagatttttacttttc

SEQ ID NO: 199857 - DNA, 143 bp, Homo sapiens
ggtgtggtggtgcacgcctgtagtcctatctactcaggatctgaggcaggagaatcctagctactcaggagggtgacggaggttgcggcgcagagatcgcaccactgcactacagtctgggtgatacagcgagactccatctc

SEQ ID NO: 199858 - DNA, 603 bp, Homo sapiens
gcagaaggtcataatatctccaacttaatctagaaaagttcagcaaaaaatgtgtatataaatggagagagagaatgataatgcagatgtgttaaaatgctaacaactgatgaatctaggtgatggttatataggagtttattccactcttactgtctttatgtttgaaatatttttaaaatgaaaattttaaaaggttaggtgactctttcaagagacagggtgctgtcttatgagaaatattatgggcttatatattttcagtttgcacagaatttatgaggctatttgtagagacatatgtgtgttatggtgccatttatagcattgtgtcttaccaaaagcatccgtcttttcaagttaacttatcccaaccatttccaatgatcagagcaccttgttgttttttttttttttttttttttttttttttttaaactaggactatgactttaggggcctagacaagtgtttttgttaagtgaataagccatatgaaaataaaggctcctgagaagacaaagttactctatttttcatgtacaaaatgactttgatctaggaattttggtttaaactagttgtaagaatcacagtgaaggg

SEQ ID NO: 199859 - DNA, 228 bp, Homo sapiens
caccactctgatgatactgcagaaattagaagtcacaaaggaataaggtaaaaagaggactgtgagtattaatcagttcaaaagcatgagtcaacaaagtggttcttaactgggagattctgacctgtgctggagccaacatggctgcatttctaaaggttcctccagtaatcctgatgtatacagctggctggaaccaccaatattcaacaatcatttatagctatt

SEQ ID NO: 199860 - DNA, 304 bp, Homo sapiens
ctgttattacaggatggacagaaggttgattttgatggcaaaggactctgagcatttcaaaggaatttatggtttatcttgggttatatttgcagttgataacaattgactgaagtattttgttgctctttatttaatttttttaattgagccttaataatatgacattttgtggcgctttcattgtgtagagacttcatgggcagcattagaaagaatgaattgaagaacaacaaggaataaaggaaagaagaacaattagaatttaattacaacagtctgagtggaagattgatgagaaact

SEQ ID NO: 199861 - DNA, 433 bp, Homo sapiens
gggtcagggcgtccactcctcgccctgggaactggcctgctccctttccacagatgccgcggctacgctggggagctccggggcctgccggctcacatgcccgcttgctaggttaagagctgcctgccgggcacagtttctcacgcctgtaatccccagcactttgggaggctgaggcaggtggatcacctgaggtcaggagttcgagaccagcctggccaacacggtgaaactccgcctctactaaaaatacaaaattagccgggcgtggtggtgggcgcctgtaatcccagctactcgggaggctgaggcaggagaattgcttgaacctgggaggtggaggttggagtgagccgagatggcgccactgcactccagcctgggcgacagagggagactccgtctcaaaaaacaaaacaaaaacaaacaaaca

SEQ ID NO: 199862 - DNA, 380 bp, Homo sapiens
ggtcagagtaaactcagccagctgagaagatgatgttcccctaagtggaaaggcaatgtttcttcaaataaacaactttctttaactttatgaaatttagaatttagaaaagttacaaagtaaacatatggtattaaatgttagttaaaatccttattttaggtactcctttttattctttttttagagatggggtcttgttctgtcctgtcaaggagcaggtgtccctgagaacccaaacattccagagagtatctgagaacctacctgggaaaaaagtcccataacacacacagtaggcaaagagccagaaaattagtttaaaagcagcatagggatgggaggcagcacgggcctctaaagctgtcctgctgctgtcc

SEQ ID NO: 199863 - DNA, 267 bp, Homo sapiens
acaaagatgagaaggtctggaaggaggatttaggataagctgagaggatccatcttgtaagactatactttcctatgaaatgctgtttcctccttgttgcctggaaaactcatcctcaatcttctagacctacagttgggttattcttcttcagaaccttaatctcttcaaggtggtgcctctgctacaccctataaacccacctctggcacagcacatatcacaccatgttagaattgcttccattggcaactccttcctgatctt

SEQ ID NO: 199864 - DNA, 475 bp, Homo sapiens
acttattctggactggaagagaatgtcggtagacggataatgacttaaaagcgaaaacaattgaattctttgagctacagtgctgtgtcctgagagtgcagttattttccactgcagtaatgctttcaaaaacatttatctagcttctctcactttctcatttgctgtcattggtgtgaaaaatcgagttaccagaaggttcacccatgttccacaggtatgaatactgaacgttttatttagtgtctcattaacagctggcctgtggctcctccttctcggcttgactctgccctgtccagggaaatggggaatcacgcctaaggattagcagggtgcctattttcacttacagtgcttcattcctgtgttcatgttacctattccctttacaaaatactcatgtactgtttttatgtgccaggcactattctaactactttacaaaaacgttatcttattctgtttaactcct

SEQ ID NO: 199865 - DNA, 173 bp, Homo sapiens
cggtactggaggaatcaaccccatgcccgccagtcaccgggttgtttgaggtcatggataaatacagctgaagctcctctgccccgtacgtacggctagcacgagaaacttactgtagttttagttttaacattctccataggtgactttaaacttcatttcttgaaaatggg

SEQ ID NO: 199866 - DNA, 693 bp, Homo sapiens
ctgtaccgtctgttgtcatgaacagctggcatcatccttaggggctcttcatcaagacactattggcagtgtgcatccatactgctgcatgtgtctagagtccactgccatactccatcatgtggttgaatcttggaagaggtccccctgagtctgagctagttcgttcctcaatggtgtcttcacaaaaacacgggactttggacacaggcaaagcagaaatttcctacttgacctgtgtaacgctggtcataccacataacatctatgagctgtaatttctggatcttttaaatgagggacataaaaataacacatagggatattgaaagactaaatgagtaacctctctagtgcatagaagatggtaataaatgttaactttctctacacttgcttcccttcgatattttaagatttcatttccctttttaagactacctatactcatatttcttcttgcaaaataccaacttttacttttctccattttctgcatctttaagtttgatcatttatttcccttcatttcaaggtatgaaaacaataacaaccttttctttgatcgtcctaaattctttatatcacgtctgcattgattggtgttcactttttattctttttaaataaatgttttctattacccgttcataaatatttgaatgctcaaagccatctttggagagaaagaga

SEQ ID NO: 199867 - DNA, 379 bp, Homo sapiens
ttaatgcatgagctttggtcaaagaacttaagatcattagagtcctaatctcgtgtttctttcagcagtcctctaaacttgcagtgattcctagcatacacccatatgtactgaacaagcatacccattaaatatttcgaggagtctgtctgaaaaaactgcatacatactgtatgtatcatagcacagaatgaaagaagaaagaaaaattctcgttttaaaattccagtacactagagcagtttcatcacaatagaaattatttttttcataattagcttaaattcttctttggagatatgaaagaatcaaaaatatctatgccgtgcagttgtgaaaccacacttcttcatatctttggaagtaaatcctttgagac

SEQ ID NO: 199868 - DNA, 743 bp, Homo sapiens
tcattattgttggtctgaaagaggtcctggtactgtgaacaaaggtttatattctattattattcttatttggctgaaagagctcccaggacctggagcaaaggtttatattctatcattattatcattattactactgttattattattactgggctgaaagaggtcacagtaccctgaacaaaggtttatattctattgtcattattattattattgttattatttggctgaaagacgttccaggagatgaagcaaaggtttatattctatcattattatcattattactattattattattattactgggctgaaagaagtcacagtaccctgaacaaaggtttatattctattatcattaatattattattattatttggctgaaagacgttccaggacgtgaagcaaaggtttatattttatcattattatcattattcctattgttgttattattattgggctgaaagacgccccagtaccatgaacaaaggtttatattctattattattaatattattgttattatttaggtgaacaaaggtttctattctattatgatgatcatcatttggctgaaacaggtctagtacctggagtgaagttttgtactaagagccaaaattcccaaacccctaaccaagtgactcctggaaggagaaacaagaagctccctcccacgtctcctgctgtcagaattccatgggattcccaggtaaagaaccgtccacacagtag

SEQ ID NO: 199869 - DNA, 506 bp, Homo sapiens
aaatacctgtaattaattttctaggcccatagtctctactaaggaactctgaagatattaattataaacttatgtaggcacaaaaagacacttaagattcctccttaagtaggtagtttctggactgtcctctggtgctcttgatacctacgtctcttaggagacaggataattcccattatacagagtcacaaagggcctcaattttcaaaaaaaaatttgtcttgtacaatagcatttcaaagtctgacaattaggaatatcagaattttagcattgaacagcttgattttgtattgactattatactttaccaggaaaaattagaatttagagaatttatactttcgacatttttgaagccatgcatgctgtagttctgtccacaatttaatactgtactagggaaactttgtcttctagtttccttttaaaaaaatcattctaagagttttaagtttggacaaactaacaagtttacatttatcagacaaacagttatttga

SEQ ID NO: 199870 - DNA, 330 bp, Homo sapiens
gctttaacctgatgtccccattataataattcagaaggaaaggcctgctcatataatttcctacggcctcaggccagagacagccatacttacaggactggaggctgccaccactgacatgttccaccagattcttgttgggctcaagaagcattcaagcttcatcccccttcgtatttatgaaatccggaggtactggagcagcgctgtatgtccagcatctggcattgttcaatcaagatgttagctgggacagaagacataagtcagaacgctggaagaaactgggtcccaatattataataatcaataaagacaaaatatatttat

SEQ ID NO: 199871 - DNA, 219 bp, Homo sapiens
aatctcagtgttcttaaagttttgttgaaacacagccacatttatccatttaaagcaacgctggtgttttcacactacaacagcagagttgagtagcagagacagagactgcacagcccacaaagcctaaaccatttactatctggtcctttacagaaaatatccgtcaatccctgccttaaaggctggaacaggtcaaggtcatacataacagcattc

SEQ ID NO: 199872 - DNA, 594 bp, Homo sapiens
gttggaaggaccccttttggtttctttttgctcagagctttcttttaataaattccgctctcctcacctttcaatgtgtccgtatgcctaatttttcctggtcctgtgacaagaacctgattttagctgaactaaggagcgaaagatcctggatcattttggtgacccatactggtacatgaggaaaggggtccattccaactaagaaactatgggggaccaggcatggtggctcacgcctataatcccagcactttgggaggccaaggccggcagatcacgaggtcaggagatcgagaccatcctggccaacatgacgccacaatcaagaactcagaagggtagaagaaaaagatagtttcccttccctacacagggtccatgcattcagtggagtaatgattcctgtccatgaaaaaaaaaaaagaaagtagaaaatttcagagaagagaaaaattttccacttgggagcaagggcatgagggcagcggggaagtggtagatatactgacatgttaatatattaggtcttgtatttcttttgtacatagtctttcttctttgactgcctcgttcatgcatctccactacttg

SEQ ID NO: 199873 - DNA, 237 bp, Homo sapiens
gtccattctctgtgggtccagccttgtactctatcagttcattctttgtactgctgccagtgtaagcttagtaaaagataaatatcagcttgtctttctccaacttaatgtactagagcatcttcctgttgcccaatggactgagtccttccatgacacatactctgtctaccattttttgttgccacataatccctgtgctttttcccccaaacatcccagctatcccaaaccata

SEQ ID NO: 199874 - DNA, 213 bp, Homo sapiens
aaagtctaacatcaattctttcttgagtggtttttgctttctatgacctaagaaacctttacctactcctaagtgggaagagattctcttgttttcttctataggctttatggttttagttttatgtgtaggtctatgatccatcttgcataaaagtttgcctgtgatttgaggtagaggttggggttcattttgttttttcctaatggaagt

SEQ ID NO: 199875 - DNA, 394 bp, Homo sapiens
attcttggttcagatgcttggcgtttcacttcctgtccactgagacagtcctaagtcatgcatgccatagcataattcattaagagattctgcctgttaaatcccagttttggtgtccagttgctgcaacaatccccttcctctctgcatttagaaaacaaccctacagggctgggtgcgatggctcatgcctgtaatcccagcactttgggaggccaaggcgggagtatcatgaggtcaggagatcgagaccatcctggctaacacggtgaaaacctgtctctactaaaaataaaaaaaattagctgggcttggtggtgtgcgcctgcagtctcagctactcaggaggctgaggcaggagaatcgcttgaatccaggaggcggaagttgcagt

SEQ ID NO: 199876 - DNA, 487 bp, Homo sapiens
  misc_feature (403)..(403): n is a, c, g, or t
  misc_feature (408)..(408): n is a, c, g, or t
  misc_feature (418)..(418): n is a, c, g, or t
cctgataggtagcatttggttaggctatgaaggatatgcaggacttcaacaagaagagaggaggtttaggctagacagggaacactgtgggcagaaggaacaacctgaggtggaaggatgttttgagcatagcagataatttagaatgatttaactgtggtaatgattttttttttattttgaagaggcagagtcctgctctgttgcccaggctgctggagtgcagtggtcatagctcctgggctcaaaccatcctcctgtttcagtctcctgagtagctgggattataggtgcacatcacttacaccttgctaatttattaatttttcgcagagacaaagtctcactttgttgtccaggctggtcttgagctcctggctagacccaggtcaagattctgccnacgtnggaagctgtngctgcctggggaacaaagtcgtggaaagcctaagagcacagatccttctgaagttattaccatgctgcc

SEQ ID NO: 199877 - DNA, 259 bp, Homo sapiens
atattaatttatagaagacattgttttacacttacctgtttaatatgatctgtacttagtttttaaaaatattctgagcaaaaggtgatctcagtgcactgcagactccgcctcctgggttcaagcaattctgcctcagctattctggaggctgaggcagggagaatttcttgaacccgtgaggaggaagttgcagtgagccaagaccatgcccttgtactccagcttgggcaacagagtgagactatgtctcaaaaag

SEQ ID NO: 199878 - DNA, 215 bp, Homo sapiens
aatctgccccctactctacacaaggatgaaaccaagtttctcatcccaacagcccagactccatgacaacactaacccctctcctaaatggcctcaggttgaagtgaagaattccaacttaaaaagtgccaaatgtgaaagcatctctcccagaccacctcaacttccactgaagctaagaagagagaaggcagaagtgaatgatgctggatgag

SEQ ID NO: 199879 - DNA, 305 bp, Homo sapiens
  misc_feature (15)..(15): n is a, c, g, or t
atgcagtttcagtgnggtagataaaaaagttctggaggtggatggtggtgatggttacacaacaatctgactgtacttaatgccactgaagtgtacatttaaaaatggttaaaatggtacgttttatgttatgtgtattttggcacaatgaaaacagctataaaaggcattcttgaaacaactggggatatctgatattctggaattattattacttttcttaggtgtaataaaagtattgtggttatatacattatataaaaagaggataatgtccttattcttaggagatgctttctgaacta

SEQ ID NO: 199880 - DNA, 493 bp, Homo sapiens
taattaaaaaagcttcagctttaaatttagctttctgactctgggcttgtgccttcaacattttcacgacgacattctgctctttgaaaggaaagcatgcttggtcctgtcgtggatacatttagcagtcatggaaacaccattggtcgtgctgacactttttaaaattttagacaacctcacaagaacttgaggtctcacagcataaatcccttgaagtctgcctgggcacacgccacatgcagacattggtgctttccctaccttcttgatataaaggtaaacaataccagggtttgggacagcctagttttgttagatgctgtgttgtagaaaagcctatgatggtgcgtcaaacactggatcatgctgagtgcctctagatagcatctctggaagaggaaaaacagtctttgctttaaaatgcatttaataacgagagcaacaccaacttttattgagctcttaattctgtaccaggcattttaatctc

SEQ ID NO: 199881 - DNA, 788 bp, Homo sapiens
gtgtcccctcatgggtgctaccagagtccctccccagcctgagactcctgaagccccagactcagggattttctttccactaagctctgaacaagaagctgaagctcaaggaaggaggttctgggactcatctcagatcccatggccaggaagcggtggccactctggaattcttgaccctgcccagaccagcaccttccacagcagagaccccctccaaggagcgggcgacgtgtgacttccccatgggtggactctgggctgcagtgatcggctagcggtgccatctttagtctgggagctgtgtgaagcctgctccccaccttccccctcctgcaaatattgggggaggggcatggaggacaggaagatagaagcaaaagtggcagtgaccggtgcatgagagattgggagatacgtgctggggaggggttccccggagcagagctggctgcccttggcactgggcccaggcggaggagtggcaagaccaacagttcctggagcacaagtccctcagccggtgcccagtgccagccatcgccatgttctcatctgccagcagcaaaatgagaaaaataaggacaatatagtgaggttttactaaagctaggtttactcaatccaaaagactgtccttttatctgagcttgtattttcaatcgtgtgtgtgtctgtgtgtgtgtgtctgtgtctgtgtgtgtctgtgtgtgtgagcacaaaaggacctttccttggacatttccttttaatgacctcaaactcagcaaaataaaaaaactggtgac

SEQ ID NO: 199882 - DNA, 353 bp, Homo sapiens
cctgcatggaccactagaggctcccttgtcctttgcttttttttttggtttagccaatagggtgcccagacagaagatgagagggagggctgagagtgaggctggggatttattctgaatgcttgccctgcagcattgccttaggctgtcactattcctccccagaagctttctaggagactctccttctgtgttctggaaaactactccctaccctcttcccttcaggcttaaggacaggtaacagccctgccattactagctccagggcagagcatcatctctacaacctgccacatctttgcaaataatccctttattaaactttcctaagaaaatcccaatttaaaaaa

SEQ ID NO: 199883 - DNA, 343 bp, Homo sapiens
tttgggcttggagttgggccctgaatggcgctttgctgtgaatctccgcggggaggctcttccaaccaggggctgagcttctgcgctgtggagaagccaggtgagacactgaaataacagaggtttgggtgtgaaaatccacgcttctgcactcagcctggagtctgcgggagcccagagaagaggggagtggaggttaattccaatatgaccgcatcgaggacgctttccgaaagggatagcaccccaaatctcactctattgtaacttaatcttttaaattggaaggcctgtagctattggctcgaaaagatatattaattccctgatacagtaaatttga

SEQ ID NO: 199884 - DNA, 2253 bp, Homo sapiens
ctgtgagatactaaagataaaatatggatattgatacatctatgtttttctacataatgataataataatgaaaatgtttgccagttatgtaggtgaaaattaaacaaatcatagttcttaaagtacccattttccccacttcacatacctctagaaaagttaaatgtacagaaaaccaagtttagatagtaagaatatattatgaatgatctttgataatgtccatgatttataaatgctgttatttcccagatgttgtaaatctgagaatattaattaaattgatattcctcctctgctagaacctgaaaggattatgaaggggctaccatagctctaaagtaagaagagtggtataggcaggaacagctaggtagtatctgtcctagcactgacaggttcacaggttgtcctttaggaatagacccatgagctttttcaactattttccagatttctcagatctgaggtaatttccacagtaatttatattagctgtcacattgtgtcttattgctagaataaactttgcttggaatgctaatgtctaaaagtttttgcttcattaaaaggctgtgtaaccaaaacttggtattatactttcttcttagtatcttgaaatgtttgttaaggagttataattataccactctctactgagagtttgatcagtgctacaacacacatagccctgtacctacatagggattctcaatgaaactcagtgaggaagatacatcatcatcatcatccctactctatcgatgaagaaacctgatgagccttctagcaccaggtgtcacctagaaaggacagaggggcctggcctcccctcccacaatgtgccaagtggagtttgagctggcccacactgccctcaagcagctgaagggtactgtgtgcgatcaggagaaaactgctggtgtacagcttctgcaaacagcccacccagagcgactgcaacatccctgccccttcagcctcagatgtgaaagccaaggccaagtaggaggcatggaatgtgaacaaagggatgtctaagatggacaccatgaggatctatgttgccaaagtagaaaagctgaagaagaatgaggctggctaaggacacattagcaaacacaaggaaagcagcatggctcctctggtacagaatgctcttccttaaaaaccttgatggctgaaatgtcctgaaaccaaagcaagtttagctgagacatcaataaatcacttaaactgcatgagagtgactgtctgctgctggaaaagagaaacacagtgactgtgagtgctcgggaggtgtccaaatgtacaaactggttttttgtatggttttgagtggagttcccagctttcctattataagagttaggtaggcatttggcaggagtagaggggttagggggaaaatgtgctatggaaatgcccaagggctgaggtcagtgagaccattctccagtgacagcctcttgggaggctgaggctccaaccctttacctcttcagggttgattcactaataacccagcactataaggggaaagggactctgtcctccaaaaagctgaagtcaagtccaaaaggccccattggcacacaggccctaagaagttaatgtttttagggagaccaagtttttagtgataatgtggtgaaacaattgatgcagcacaatacagcagatgagaaacaatggagcacatagtgtcaaaataccagcctcagaaagacgcatctatggcctagcaaccaaaattttcttgaggttattctgcccctaactctggtttctgcttggggatgtttgtggaacaatatgcatatgtatgtatatgtgggatttgttacaagaacacaacatacccctcgacctatgcaagagccagagtgtctaagcccaacttctactcctcactgttagttatcgtggaggcatcattgcacaaccaatatgcctggtggctggagtatagactgctaaatggtattcagcgaagcaggtctatagtgacatgagatttcctggtacttcttccttaattaaaaattatattcatagatcatgacatcaggtcagttccagttcttgctgggaacaataatagaaacaacaaccgtaaagacttcagagaacagaccgggcgtggtggcttatgcctgtaatcctagcactttgggaggccaaggtggatggatcacgaggtcaggagattgagaccatcctggctaacatggtgaaaccccgtctctact

SEQ ID NO: 199885 - DNA, 544 bp, Homo sapiens
ggcggcactgcatctgcaggtcgagctagaagaccccctaggaactcgtaccagtccactgactcaaatgtcaatctcctctggcagtaccctcacagacacccctagaaataatactttaccagctatctaggcatccttcaatccaaccaagttgacacctaatattaaccatcacagattttttaaaagataagactcaagtcaccaacatcaaaaatgaaacaaagacgggggacgattgcttgagcccaggagttcgagaccaacctgggcaacatagcaaggcctgtctcttaaaaataaataaataaataaataaacaaaaattttaaaaaacctatctcaacagaatctaaagacaataaaaggataataagggaaaattatgaataactttactgttatgaattcaacaacttagcaaaactaatcaatttcttaaaaaaacacaaactgcccaatctcaggcaagataaaacagatcacctaaatagttctataactactaaagaaataattctgattttgtcattaaatatcc

SEQ ID NO: 199886 - DNA, 354 bp, Homo sapiens
gcatttcctaccttttgacatatatatatatatatatatttttttttttcaccttgaggatatcactattccaattgttcccatatgaatacaggtgtggtctctattgcatataaatgcatcttttattcaattttaggtgcaggacttggttttctgtcccaactgcacacaaatgtcccttttttattatttgtttattagttgtgtgtgttttcctttttgcataagaaatatgtccgtttagtccagaggctcttgctttatccagatgatggagggtacgggaaggcatccgcctcagttccctatgaaggacgtatttgctgaactaggacaagcccactcctcccc

SEQ ID NO: 199887 - DNA, 385 bp, Homo sapiens
atggcactcactgctcaggatctgagatcgacagctgattctgcacatgcaaagccctgctgccatttgtcatttcaggaactgctttatttttgtcaaaatggaaggaaaaaaaaggagagagacattatacagacatcagaattcaaatcatttgcaacctgatttgggtaatgaaggctcaaggcggagttgagatttagggactaaggtggttgtataagtatgtaacttcacaagaatctgttttagacccagagcagattaatagccagattacaatggcatttcctgggcttaggaatctcattatcctcttctttcatatttctttaaagtggaagacccttccactacggtggtgtcatttgaactcaagtgtcag

SEQ ID NO: 199888 - DNA, 724 bp, Homo sapiens
gaaaaatttgcagacttaatcacttaaacatcttacaatactttcaaaattaagaacattaaagtaatgcataattatctagtcttttaaccaaagaaaattagtttattaacattaattaagtctccaactgacactaaaagtaaattaagaatattattaaattgattttgcaagtggataaactgagacagagaaatatcaactgaatttcccagggttatattcaagtcagtagaaattggaacctgtggattttaattgatttttgtatggttctaatgattattaaagtatgtcttcttctaagtataacagttaatgacattagttacataaaaaatctttacaagatctctcttttgaaaaattatgtttcttctgattaactcttacaaaagatttaagaagagcaaaaattaatacatttctcatgcaaagtaacaaaaatagatattttaaaaattatttgcatacataaaataaaaatagtttgtgctgcaagaatagaaaatactgattggagcctgggcacggtgtctcatgcctgtaaacctagcactttgcgaggtcggggcagttggattgcctgagctcaggagtttgagatcggcctgggtaacacggtgaaaccctgtctctactaaaatacaaaaaattagccaggtgtggtggcagcacctgtagtctcagctactctggaggctgaggcaggagaattgct

SEQ ID NO: 199889 - DNA, 253 bp, Homo sapiens
ttagcactcaacaggatttcagtcactcactcattcaattaatttaacaaataatatgagccaggaactcttctaggtgttggagagacagcaaagaacaagacaggtatagtcactgctcttacaatgttaacatgaaggttcacgttcatgttaaagggattcaccaaatgactaaaaaagtgatgaagaacccttctctgtatataatgctctcaactttataaaatgaagggccaacccctattactac

SEQ ID NO: 199890 - DNA, 359 bp, Homo sapiens
attgccactggattttgagtaccctgcgggtggtgttgaggctggtccccaacagttctggggtcttggagaggggagaaaagtttatcacagagaaaaggaagaggagaaaagtggaaacaattagaatatgtgtatccatcacttatgaaatgttagtgaatcaataacaagaatacagtataaaatttggattcctgtgcctctaaaaacagtcgggagatgaaaagttacagaaaattatgttcattgctactctagtcacaataccaaagacatggaattagtccaggtgcccatcaatggtagattgggtaaagaaaatgtggtgcatatacaccatggaatactacacagcc

SEQ ID NO: 199891 - DNA, 734 bp, Homo sapiens
gaaaaagaaatgtcaccatacacattgtatttcctgaaatttaattttgtcttggtttgggtctcttctgagcaaccctcttggattattgacatactacctcacattgtattgaaatttaaaaggtcttaacaaggaaataccacatcttcgcaccctggcttaccaacctaaggaaagcagtttcctaaattcacctgggactagatgccctcgatgacactttctctggaagattttaaagcagcagaggacaaagaaacccctaaaggagccatattcattgtccaccttccctacctcacttaaaagtacctagcttaacatgcctggtagaattgcctggtagaaattagaaaatgtgtctatgaacagggagctgagcaggaaaagagtgctgaggcttcagggctcacccctaggaggctgttctaagcactgcgctgcagaggggagtggggccaggactggactggacctttgttacttgtagggtcctatcctgactttcccacagaaccttgtggctgaggagtatgtttgttgtttttatttttattttttgacaagatctgcactccagcccgggtgacagaacaagaccctgtctcaaaaaaaaaaagaacaaaataaaataaaagtaatcataagacaagagaatcccatcctgacttctgttttattgttcattggagaagattctttctataagtcaaggaaattttgctgtgaag

SEQ ID NO: 199892 - DNA, 201 bp, Homo sapiens
cttggtcgatgtggctgcagcttctgaggtctgccagagcctccaggagccttctactccccttcaagctctgtctggccccctcaactcctgagggagcctgtgagatagtaagtcagcttggagcctgcctcttgcagtctccagctcactcagaatgaaagctagagtctggcctgcacggtggctcacacctatgat

SEQ ID NO: 199893 - DNA, 491 bp, Homo sapiens
tcagggttgaaccacagcgcaaagccactcaccgcacttcaaactgctaagtgggaaatgtccagtagtgcatggaaacacactgcatgccaggctgctcggactaataagtttactacaacaccgagggaccccagcgttatcttagttgaaactcacattccttgtaagtcactaccgaacaattatgtccacggctaacaacatttttaaagcgggattatttgcatttggcattacggcatgcaaaattcttgctcaattacgtctcccgtttattcattgagactatttaaggtgctcttctaggcacaagatacaacagaataaaacaggcaaagccaagcaaacaaaaccctgccctcatccaacttacattctggttttgttttttgttttgggacggagtttcgctcttattgaccagactggagtgcaatggcatgaccttggctcaccgcaacctccgcctcccgggttcaagcgattct

SEQ ID NO: 199894 - DNA, 398 bp, Homo sapiens
taaccagtaaaggggtactggttttttttatttactgctgatgaaactgagtatgagagtaaagttatttcagggtcgtagggttatccattaccaacgttgggcttcatatctgagaagtctggctactcagttcaggccttaaattaaccattagacccaactacctttaaaaagatccctcttaagcagatagatgtttgagaactacttggcctagtctgttaactctgaattaaaatacctactcttcagtttctattccttctcactgccaaaacttcatttcataacttactccaggaaagtcttctgtgacttacacatggctctgttcctttctctgctgggcatatatgtatctaggttgtatagtatttgcttgttaatatggtctg

SEQ ID NO: 199895 - DNA, 620 bp, Homo sapiens
tctcctcccactagaacacagctccacaaagggtgaaatgtttgcctgtttcttggttgactgctgttacccctgggcctgcatcagcacctggcgtatagtagactctcaagaacagctgtcgattaaatgactgaatatagcacatctgggaaaacaaaggcttgatttggtccctgttttcaacactagctctccctcccccaggactggtcctctcctagcactgccagcctctgccagtccttagtgggacatgacctgcccttgcccacacacctactcgatcctcactcagtagtcagcatccatatcccactgtgactgacccaggcacacagtgccagcagctcgtccaaactggaaactcttcaagtctcaaagtcttttatcagtctattacttgtccctgcattctctcttctgtccccctcactgtagaccttcagacactcaccaatttcctgttccctctctcagtccctgggaagaccggcagtggggtaggacgccaatctccccagctgctcttccaggctcccctgccagaggaggcctttggtctgtgatttttctgccaattattagaaagaaataggcctgggataataaaaacaacc

SEQ ID NO: 199896 - DNA, 960 bp, Homo sapiens
ctcagcggctcagcggctcagccgtggtggcatctaccctccctgtttaaagaaggaatctgagatgtacttctggactcacgggcctggggcccacccagcacagatctctgctgagcaatcttgtctccactctgttcctgccctttgcccagccctgggcctccaatctgcattgattacctggtctgatctctctcaccatcactaggtacttaataaatatttgctgttgatgatagcaatgaccttgagactgatgaacagtctggccaagaggatccttgatgtggaagatagaaaaagcctttggggtcaggcagacttggattctaataccagccagttctgcttgctgtgtctgagcctcagtttactcatctgtgaagaggaggtagcaagaatgaaaatgcctgccttgtggtttgttgtaaggacagacactgccaacgtagagggcccagcagctcacagaccagttgctctgagagcagaccactcttgccttgatggtagggaactatttttgtgcgtggcaagtgggaccttaggaaggaaggcaactgtgaggcttctgagaaggaccctacacaagggagtttcctcccagggcaggtgaatggagagggtggcagaagcctacgggaaggggtcacagggatcagctagagagtgccaccacccttcctggggaatgcagggcaaggtccctggtgggagttttcctgggaagccaaagaagcgcccaacaaagacagaatcaacatttgggtacctttggtacccagaggcagcaatgccaactacaaccacactggaagaagaagaccttctccgcatagattctctgatctcttcctccttcatggcaccagccctggggaaccagcatggtggggaaataatgaagctggaatacaaccacttacagacttcacaacctcctcctgtagataccaa

SEQ ID NO: 199897 - DNA, 507 bp, Homo sapiens
gagcgaattattattatctttataattagagtaattctctgtgttttaaattatatttattattagagcttggtccagagtcaactagaaatggaaaatcctcaaggtattataaacttgtcatttaaaggtgccagtaggatcacagtcacattccataaaaacacggctcagatgttacagacatgtttttctctcacattttttaacctggttagagtaaatccagtgccttaaagtttttaataagtcaggtaattaaaaataaaccactggaagcctcaaaaagtttgtatcaggaattgggtgaataaaatcttgtatattttatgcaagaggagtaactttgaaagaaaacacaccaaaatgccaatggtggtaattggtggtatctggattggtgtgagtaggaatgattattgtctctctactttttagattttttataagaaggttacagaacttttactacaaatatgtataataaagtatccgttccttagttct

SEQ ID NO: 199898 - DNA, 140 bp, Homo sapiens
tttggtcgtggtgaaggttagtttgtttgtggcaatgcttaggtttcaaaaaggagtttaaaagtcccaaaagactaaaaatatttatggggttcaatcaacagtcctgaaggcaactctgaaattaagatgttccatct

SEQ ID NO: 199899 - DNA, 877 bp, Homo sapiens
aaccattcctctactaatcgtgttttttttctcaataaggataacctcaataatctacttattttggttacaaaccagagttaagactaactgttacataacacttggcctgacttccaagaaagctaatgttttgcttaagcaaatgaagtaatttaataagtactcgaaaatcttgctctaatttcatgtgggagggcagcttaatcttttttgccccatacttctgatggtgtttttgatgactacccaaaaatctaaccaaactcatttctgatctcttctacatgttgtgtaacttacgtgatgtcttatccttttaaatgccaacgaaactaagttgatttttgtccatcaaatatatctaatccattcactatgaaatgattgtagttcctgtgaatttaaacacttcttatacgctgatacatacaccttggtgtcttaaagacagatgagcccttggggatttctttactgtatatgattctgtagggactacatttggggagtggagacaatttcccaggatggcataccaactagaagcatattaccaaaagaagcaagtttttttcatagaaaaatatctccattcagggtcagctctggtttaactaaggcatctcacaaaacattgttctctaagagcactaaattccatcttgcatgccagttgagagtggtatgttagctgggacttgaaactgggtatgtgagctgagtaatggtatgaacttacatgttatttaaaacagctacacttcttctggctcacgcctgtaatcccagcactttgggaagcccaggtgggcggatcacgaggtcaagagatcgagaccatcctggccaacacggtgaaaccccgtctctacta

SEQ ID NO: 199900 - DNA, 685 bp, Homo sapiens
tcagttcttccctgaaaagtaactgataattgggggaggaaggggaactcctcctgaaaagactttgttctttctgaactcagttgagctaacttgtgacaagctgatagtggtttatttccaggctgacgtcttgtggtgtcagtgtgatgtagcggaaaaaacagaactgaaatttaggtagttgtagttcagtttgtctcccactcccttgctctgtgaacttgggcaaatagcttcatgtctctgagtctcagtttttctcaggagatctagcttccacattctgtatttcattgctatcccagcagttgtctaccaaattgagcagcttattgtaaagccccttaaggctactccttattttttgtctgcttcaactatgttctttgaattcctcctacttccctcaaaacccacatttttcttagctaattactcactctttgtttattctctcttagaaaccccttcccactctttctccttcccaccataagcaagtctataattgtgctagtgtctagaccgagtaccacagcagttagtgcctttctgatgacttcttcctttacaagctgataataagagtttattggtgaaacaagttttagctccagtatgaacagaaatccattcagagactttgcaagagtggaaaaactttttctgtttaaaaaaaaaa

SEQ ID NO: 199901 - DNA, 548 bp, Homo sapiens
taaggaactgtgggtagatggtttgcaggaccacatacacacacaaaatagccgactaaagaaagcggtggagatcgagatcagtaagtttgatttgggaacaaaaccctggagactctataggtaggtgactgttgggggtggacaggcgctgaagacttggattggtttagacctagaaggaagtggcatttgattggttattataagtgaaaagggcccctccccgggtgagatatgccagccccataattaggacctgaaaatctctgccaggcctgcctttgtgacgtggcccagtctacctcagctatggaacaggccttgactggtgaggcccaaagccggtggccccgcagaggcgggagtggggccatggctgaggcgcctgggcccagtggcgaatcccgaggacactcagccactcagctgccagcggaaaaaactgtcgggggaccatcgaggggctgctcaagctccgtgctcagagtgtcccagttggtgctccaggccatctccactcacaaagggctgactctggcagctct

SEQ ID NO: 199902 - DNA, 187 bp, Homo sapiens
tgcacatagagacctctacagctcagaatagggggtgcttacaatacttgagtttcactccagccctctcagcccttctgcctttgaacacaatgacatgggattattcgccttgggtattcccaagaggagtttcataactgccactttgtctctataaaatgactatcttaaaagtttactccaa

SEQ ID NO: 199903 - DNA, 654 bp, Homo sapiens
caaataatcacacaaatagtgagctagtgccctgaaagaaaaggcctttgagaacgtatggcaagggaacctcattttgcctgggaggccagggagggcttcttcagagaggtgatgctgatctgggatgggaaggaagagagagggtaagccaggtgaaggggagatggcaagaatgctcctggcagcaggaatagcatgtgcaaaggccctgaggccagaaagcacacggattgctggggaagagaaagagtgaatatggctggaatgtcagtgtggtgtgagatgagaccaggcaggaggcagggcctggtcaggtaggactttgtaggctgggggaaagaggagaatttttaagatcccaatcctgtgttccccacccgtgggccccagctcctctcccctctgaccaggttaggtttgttaatgaccatggggtctagccgaggccgagagggttgcctagggcagcttgtgtcctggcgtgtcagctttctgggtcgagcatctctttgttccctggaaacctgtcaacagaccctctatgggcccaggtctggctttattcagcagctgttccttagcggggaagaggcttttagctttaataaaaaagggactagagataagaagactgcctcgtcagggagagca

SEQ ID NO: 199904 - DNA, 387 bp, Homo sapiens
ttccacaatgtgagtgagagatgggacggaaggtggggggagaaacttgagtaagtacaaatattaaccaagaatattgactaaacataggaataaaatacccagacatgacaacagtaccactaagagtaatatattagttgaaagtatgtagttacatgctttaaatccctctgctggtttatgcttctctttggctcttactactccttactcaagcatcttaaactatgagttagctggttgcttaagaaaactaatgtgctgttgctctaaagcaaaaaagtaacaggttcaataagtacttttttgaggcagtcactgcttttgaatctgcaaggtaaatttatccaaaatcatctgctaaaggatcatcacaacataaag

SEQ ID NO: 199905 - DNA, 658 bp, Homo sapiens
gtttaaaggacacagggtttccttttggagtgatgaaaatgtttggaactagagatgatggttgcagcactttgtgaatggactaaaggccactgaactgtacagtttaaagtggttaatggcgaattttgttatgtaaattttaccacaattaaaaaaaatttttttttaaaggagagaggagcccctcagggaagagaagagagagttggagaccaagaggagctcactcccctagagactctccagggtccctccaggtgctccatggagctatggtctgtgtctccttctctccacactatactggaactcatgacagatagttctgccctgggatctttgcacttgctgtttcttctgcttggaatgcccttccccagatgaccacatcacccactccctcactcccttcccacatgtcacctgtgatcacaggtagtaagccctttcctgactcctgatttaaaactgccatcctctcaccagctctccccaccccttttctgctgtcccttcctttcttcacgacactcagcaccatctaacatattatctcattacttaattattacatttattgtctgactctcccacctaaatgccagctccagcaggaaagggatgtggtcttttgctccatcccatccctgcagca

SEQ ID NO: 199906 - DNA, 474 bp, Homo sapiens
gaagccatgttcagagaggttcagctcgttacccactcaagcagccctgaacaaacacccttttctgacctccagctgctagtaagaaagtgcagggaggacacaacaaaagctgagggcagactgtttcttcccccacacctccgcagtctcttccctttggggaatgtgggccctgcccactcactgcccacttacctaagtcccactgccaccccactgcctgtacaaaagcaggtgagaagcccctcccctcaaagagcctttccccaggccctgctgaggtgacccccatatcttcacctcccaggacacagactgcttggatcaggggttcccagtgttttggaatgagggtcctttgtaatgtcaacacatcttgaagactcatgggataggttggtatttgttggttgagaaaataactattgtcaaataggtgttataaataaattattgacccttttaaggcaa

SEQ ID NO: 199907 - DNA, 277 bp, Homo sapiens
cttcatttctcttcctatgagaagtaatccattactgaaagcctttcatggtatcctgcattgtaccaacatatggaggaactacatcagtgattaataatatagtggaacaggcatgaactctgcagtcttggactcaaattttcactctggcaatttactagcagtgtgatcttttggaacttcactatccttgtctgtaaaatgggaataatgcccagcttagagccttgttttgagaattaagtaaagcaaataaagtacctagaaactgtta

SEQ ID NO: 199908 - DNA, 465 bp, Homo sapiens
cttgcctctctttatgcttttgaacaaactagccaccagctgggctttccagatctctcagtggttaaagagctggggaagtctcgggaagaaggtggtatgtttagcctggggcacggggaaagtaacatggctgctggtagcaggcacagtggtaggggaagccctacgtggattacagtgaaatggagtttacctaacaaattaacaaataatatgttcaatttctgctttcggcctacctgtctggttggttctgagaactcaagttagttcttccttatttcattcgccaaatttgacaagtccctgaaattcatcactggcaacttaacccagtttgtttcttctaccaaatgcaaggaaccaaaacattttcttttcttattcccatttggcaatgacattttactttggatagtgggacatgtctaaacatcctcctacttattagttacaaaggtg

SEQ ID NO: 199909 - DNA, 364 bp, Homo sapiens
aacctgggaggcggaggttggagtgagctgagattgtgccattgcactccagcctgggcaacagagcaagactctgtttcaaaaaaaaaaaaaaaaaaagaaaagcaacatagtggggtttctgtcaatctgtcctcggctgcccttttcatttgttgatgggaccttgaaagcaagcttgctaggtgccctttgtggctccagcctttaccggaagtgtggtgcatgtttttaacttcagggaagcggtatcctgtcactggggtatgggatgagcatggagaaaaggcaccagccacgattccttcctaagcatttcctgttttgactggtcatgaattgaagaaactgacccttgtgttca

SEQ ID NO: 199910 - DNA, 1181 bp, Homo sapiens
ctggctacagaagactcccctggtctttatttttttccacgttcatttatacagtgaataatgtagttatcacttatagtaatggaataagcccttgcaaactcacctcctctaaacaaaaacaaggaccctgatggcagccatattgctccctgcctttcccctccttaccttgagtaatgtttaaagagcacagagatttgcttaagggaacccatccctgctgccagcacccatttcctctatacctgttgcccctgaaagtgccattctgaaatgactaccctagtggtgtgatttaggatgtcctctaacatccctccagctggggtatcatttctttaaggtttttttccctgttaaattcagtgcttctagagaaggaaacaccttaatatgaatgagttaggtgagagttccaaaagagggtaaaaccataaagagtatgactctggaaaccggcgatgagggcacaggaaggaagacccaaaaaagaggttgctgggagttttgccttttcttttttccttgttggacctggcctaaacttgttgatatttttcagcttatatctggaatcccactaaaacacaacatttatgtctgtccccagggctggatggtacccacaggacttagtgcataggcttgagtccaaactcaagtcatgtttgggaagaaacaggccagattccaccccatgagggcagggaccttacctggttttgcttaccattcaattctcaattcttggcacagtgcttggcacatagtaggtgctcagtgaacatctgatttaaaaaatgaaccaatagactgagtatggtggctcatgccagtaatcccagaactttgggaggccacggggagaggattgcttgaagccaggaattcaagaccagcctggccaacatagtgagatcctgtctctacaaaaaaatttaaaatatgctgggtgcagtggcttatgcctatagtccagctactcagcaggctgaggtgggagggtcccttgagcccaggaatttgagactgcgatgagctatggaaggcactacgctcaccactgtactactaatgctgcacgatgtagaccacggtgagctatgatcgcaccactttacttcagcctgggcagcagagtgagactctgtctcttaaaaaaaaaaaagaaagaaaga

SEQ ID NO: 199911 - DNA, 152 bp, Homo sapiens
cctccttgtgattagtaaattacactctagtgaatcttggtccaaggttcttgcccctattttgcagtgttgactggctgcaactgtttaggcctgtcactgtgtttaaaaaacatttctaaggtgttaactggtcttgctggtactaaaat

SEQ ID NO: 199912 - DNA, 503 bp, Homo sapiens
aaacagaacttcctcttcctgttgatgctttccagcatcacatgaatgttcacttaaaagagtctgttaaatatttaaagtatttatatttactctttgtgtatttttcaaagtgggttttcattttcaatgaaataatttttaacttttccaagaatacacttaagataagtattgacaatgcttatcttactttcttctggttatccccatttttttcctttcagggtgttttgcttctgagaaatcacttttacgggtgtggggataattgttttcctgcttcattcaattctcgctctttctgttgagcctgtaaacaaaagtcttgctaggaactaatgtaatgttggttttcattgcgatgctgaggtgtttaatttatggaaacagaacggactcattccacacacaagtgagtgaaaagccctcaagtaatggtttttcttcagcattgcttctcagggattttccttgtcttctcgttatcttggaaatagaat

SEQ ID NO: 199913 - DNA, 312 bp, Homo sapiens
tggtgtatgtatccctgctgtagtagacgtgggaaatgtgtttagtaactattttaccacatattatctcagtctctaagacttctaaggtcttaaacgtgttactaccttctgtgggaatgtttagctttattacagtttgtaaacatacttctcagaaattcacaagtgaaatatgtatttagggaacaccttccttctgatctccggatgggataattgtcaaaagtatgaggaagttgctggtactgggctactcctaatcactacgttcccttttctccccacccccaccccccaatctcctttctc

SEQ ID NO: 199914 - DNA, 361 bp, Homo sapiens
caagcacttcctgtcacagttatcgaaacagtcttttaaagaatgtctagagggccttacttaaacaaatagcttgtcttgactttgggaggaggatggttacctaagcccatgtgttaaaacagacagatgacacactgaaatgaccaacgagcataataaggagaattcagtatccttggaaaccctggaacggtgccataactaaactaaaaaaattttagcaggaaacagtacaaacaagaaacatcgtgagagaaggccttagtgttcatttctgtggttgtgaagcgctagtaggagtaagtgacaggacctactttgaatagccagagttagaattgaagggggagccactgga

SEQ ID NO: 199915 - DNA, 440 bp, Homo sapiens
agacggcagtgcagcttgttgctgaggtcgactcatacaggatcctcaagcttttaccgctgaatggttttggcacctttgtcaaaaatcatctgaccatgcatgcaaggttttatttctgggctctctattctacttcgctggtctatatgtctctctttatgctactaccatacggttttgattaccatagctttatagataaaacagacaattggacttcatagatatcagaaaattttgtacgtcaaaagacagcataaacaaagtaaaaatgcaatccacagaataggagaaaagatttgcttatatgccggttaagagaataatatccagaatatattgagaactgctaaaactcaacaacaaaccaaatagcccaatcaaaaaattgaaaaagcgattgagtagacatttctctaaaggcggtaaaaatggcc

SEQ ID NO: 199916 - DNA, 392 bp, Homo sapiens
gattttcagtaactcagaaggaagcagtttcccctatggactaaaactatcaggcaagggagttggaaagagtatctcaagttttccatattggttgaatgagccccaagacgttcataatatccacaggcatcttttgacaaaaatctcatttgtgctttcacagtttgtgctaagcactatggagaattttgaaaatatgtttcaaattgttctgacataaatataatatatttgtatctaatttgttgctagtacagtgttctgcctcacagtttcctgctcctggtattcccctccattcgctatgcatacacttaatacctactgagtctaacatgtttattctgtacctaattattacaaagttgagcaagaaccatttgttggtt

SEQ ID NO: 199917 - DNA, 485 bp, Homo sapiens
ttagtagagacggggtttcacaatgtgggccgggatgatctctatctcttgacctcatgatccacgcgcctcggcctcccaaagtgctggggttacaggcatgagccaccgtgcccgacccaggaattcgttttaaaaaagttcttaaagttttaaaaaaatgattctctcattttacttattttggaaaatctccgctggctaagctgccatctccaccttctgactcagtggctttcagcggctttaatctggcactaaaactgaaaaacctcgccctttcaaaatgacaaatgagagggggaaagtgtctcccacgtgcaagtccactcgcatggatcaagcgggatgcccgtgctgcaagggaggttaggacaagaaaccggaagtgaccatagcactgggtggggagagaattggggtatttggggcttgagcacagaagccttttttgctttttcttctggaaatatttaatcgtcttt

SEQ ID NO: 199918 - DNA, 553 bp, Homo sapiens
ctaatttgtctctaatgccaagccaagtatagaaatcagcctcatcgttcttttccctggatggctcgtggagagtcttggtgaatttccaacatgcatgtttgatttggtttgttttcatattgactcttaagagtcataccaatcacaagtttaaaggcagccattccaggagaatgagcgtggtggtccatgctcagcttgggtgcttgatgtcagatgatataagaagttgatccccgtcagttggacttggattagagttccatccaaggaacatggccggaggaagatcttttcatatacatatcataacaagtcataggaaaacagagtcagtccttctctttctgaaggtgttagaaatatttttctgaaactgttatagataggattttaaatttttatgtgtagttttcctcctcctacaaagaatttgaggctataagtaaggatctgtagaacctttcctgaggaacccagtaggcacagggaagcgcgggtgttctaacagaaccttctctcttgtgcatgtgtgcgcccctgcccaact

SEQ ID NO: 199919 - DNA, 425 bp, Homo sapiens
tgcatgaagaaaagaacacataattgccacattcaggagtgattctaggaaggactaggagagaaaactataaaggagtcagttagaaagtaggcatgtctcaaagctctgcagtgggaatttcctcagatccatatagactgatctttctgatactgaccatctcaatcagctggcagagtggttaatattaggtgtcaacttgattgaattgaaggatgcctggatggctgataaagtcttatttctgggtgtgtctgtgagggtgttgccagaggagattggcatttcagttggtgcactggaagaggaagacctacattcagtgtgggtgggcaccatctaatcagctgccagcgtggctggaataaagcaggaggaagaaggcaggataaccttgcttgctgtgtcttctggcttccttc

SEQ ID NO: 199920 - DNA, 492 bp, Homo sapiens
gcttgaggccaggtgtttgagaccagactgggcaacatagcctgacctgtttctacaaaaattgaaaagttagctgggtgtggaggcgtgtgtctgtagtcccagctacctgagaggctgaagcatgaggttggagaattacttgagccttggagtttgaggctgcagtgagctgtgatggtaccaccgcacccctgccctggcaagaacaacaaaacagcagtttcttcctttttgaaggaaattctaccttttaatcctttgagctaggttttgcagctttaatggtgagcaagactcctgtctctgccctcatgtagcttgtcatattgggattattgaaaagcagatggacacttaaattacagtgtaagtgatataatttaagtgaatcctgggaactgtgggagaggatgagaaagacctctgtcttgcataggaaaggaaagcttcttaaggtaaggaatatttaaattgacaggtgaaagacga

SEQ ID NO: 199921 - DNA, 503 bp, Homo sapiens
ccagccaacttcctctcctgggtctctactccaggccctgcccctccctacctgggtgaccttagacaagtcacatcacattgtttggcactgtcacagcttttggttggcgctcagtgatcaggaggttcagaccatcaccccaacccgcagtctcttcccaaggtatccgggccctgcatatctgcctccctcttcctctcccctgcagccggggtcaggctctccctgagcaccccttctgccctctccagattcactattgctgcctccctccctagaacccagggctctgctcattttcttcttcccaccgcattcctctgcttctctcaggcctcagctcaaacctcccttcctccaggaagcctcccctgattgcccccaagctttccttttccagtaccccataaaccccaggaccagtcccagctagggtccaaccggactcccctggaatactctcataattcctgcctccttatcctgccctcctatgtcct

SEQ ID NO: 199922 - DNA, 403 bp, Homo sapiens
tcgaatgagaaatggggatgagaatagctcctaactccaaggtggatggagtaagttcgcacaggttgaatccctgggatcagcgcctggagcctgacaaggtccagtcagagccagaactgctgttactgatactgacccttggccgtaccaggggagaacttggttgccattgccaggtgttctcccaccacgcccagctactgtccctgtttgacatgtggctggaataaagctgtgcacgttgcagcttttggcacatcctggctttgaggtaaaaggtacgtgtgtgtttgagggttgagcctggccatgggaatgataatcacagcccaacccagccgtgaggtcgaaccctacctaggggtgagtcctgagcttgacacccctgagctgtgcggtt

SEQ ID NO: 199923 - DNA, 479 bp, Homo sapiens
tggaggctttaatgcatcatctctatatctactaaaatgttcaatctttcctctagcttcttgaatgtgtttaatgcctttattatcactgtttaagtgtccttgtcttttaattctattatctgtgttatttctggctttctttgagtgactcatttttctcattatggggcttattttatcacttctttgcatgcctggtaatttttgattggataacagagacgttgtgaattttgctttttggggtgctggatatttttgtattcctctaggtattcctgagttttactctgtgacacatttaagttacttggaaaccatttagttctttcaggacttgtttttaagttttctgagatgggagcagagcagcatttagtctaggactaacagcctactgagaagcactctactctatgctctgtgaattgtgaaactttccactcagggtggtggaaaatttccactcaggaagc

SEQ ID NO: 199924 - DNA, 413 bp, Homo sapiens
ctgaggtagattcaattactagtctcattttgtacgtgacaaatcaggcacagacctcaaaaacattatgctgagtgaaagaaaccagttgcaaaagaccatatactgtgtgatcccatctatatgaaatgtccacaacggataaatctctagagacagaaggtagattagtggttgcctatgggatgggagtttaagaggaaacggggagtgactgctggtgagtatgaggtttcttttaggggtgatgcaaacgttcacggtggagactgtagagatggttgcacaactctgaatatctgaaaagacattgaattgtgcactttaaatacataaactgtacagtgtgtgaattatatctcaataaagctgggttttcaaatcttatttagaacaaaaacaaaacaggcaaa

SEQ ID NO: 199925 - DNA, 736 bp, Homo sapiens
gcacttggaaagtgctcctcctgtggggatgcagtcaccctgaagtgtttcagagaggttgtctataggtatacccatgccaagctcccatgggaaaagccccacctgtgtctgcagtggtgaatgagggggaaaagaagtcatcttctccaaggctattcacaagcaccaggactgcctgactgttggggcagagctgcagactttccttgctgagcccagcatggcaactgtatttctcctgaaagaaacttcccaccagtggaaagatctgggactcaaggcctcccgcctgggttcttttgtgccatgggtggtcccttgatgtggtacactctcccttcccctagaaacaggtgtccctaagggcaagaatactgtgaatgctgttgttcctctgggtctagatgcccagtgtggctgccatactctaggctgctgcttggaatgcctgcaaggaatccagagatatggcctgtcctcaagtctcccagcagtgggtaccagtaccagctctgatgggggtggcaggaaagtgacacagactgtgagattccttggttatggatagtcttaatgtgttggctttctgaaatgatggttgtagtagtaatgaaaaggttatgtggacagactcaggacctcctggttggccagggtagtagaggcaatggtgacaggtaaggtcatgcacaagttttctccttcctgggtgcagtattattctacctggaga

SEQ ID NO: 199926 - DNA, 317 bp, Homo sapiens
aaatacaaaaaattagccgggcgtggtagtgagcgcctgtaatcccagctactcgggagactgaagcaggagatccgcccgaacccgggaggcagaggttgcagtgagctgagatcgtgccattgcactccatcttgggcaatgagtgaaactctgtctcaaaaaaatatatatatattagatgctgctgggagcagtggcttgcgcctataatcccagtgctttgagaggccgaggtgagaggatcacgcctgagttggagatcaggccacaagttggagatcagcctggacaacatagtgagaccttatctctac

SEQ ID NO: 199927 - DNA, 405 bp, Homo sapiens
catgactttttctttcccattttaagaatagaagattcattcttagcaacctcagtttatggtttttttctttccttgttgggagatttcaccttaaaggaaggctagatgtagcagcacaggtctgtaatcccagcactttgggaggccgaggcaggcagattgcttgagcccaggaaatagagaccagcctaggcaacaaaaccctgtttctaaaaaaaaaaaaaataaattaaaaaaaaaaaaaacagaaaaattatctgggcatggtggcacacaactgtagtcccagctacttgggaggctgaggtggaaggactgcttgagcctgggaagttgaggctgcagtgagctgtgattgcgccactgcactctagcctaggcaacagagcaaggctcggtctc

SEQ ID NO: 199928 - DNA, 233 bp, Homo sapiens
ctgtgatttactaaagaattatggaaacagcctaggtgtccatcagtggatgaatggataaagggactgtggtttatatgtatatatacaactgaatattagctttagaataggaggagaccctgccatttgccatgtttgtcctatttggacctggagaacattatgctaagtgaaataagccagacacaaaaagaagaatattgtgtaatctcactttcttgtggaatttt

SEQ ID NO: 199929 - DNA, 674 bp, Homo sapiens
ggtaagagggacagggagagataggcccagaacagaagagtcctgatatctacagccaggctctgaggctatttactgtcaatgttagttcctttgtgactgaggggttgggggaccagggactgcatgggcaaaaggaaatgaaacgttgcattattttttaggggaaaactttgagggaaaaaaaaatcaccaattagccttttaaaaaagaaattggagtcagaggattttgaagactccagatgctctgttatatttctcctttagtttactggggaagggaggaaaggaggggcctcaggtgggcttggggaagtgcaatccaatctgccaagccagctttgggggagagtgatttacaaagcaaaacctcagatgctacttcctgagaagtcaccagatcaaaacaccctactctaggcgtttatgaccctgtctttactcccaacaggaaaagcaccctcaataaaacctcagcctgtgcccccatcctccacccaggggatggggagagacacaacataaaatgaaagacctgacccttactactccctaaacacacacacacacacgaaaacaatgggctatgagccttgatttagttgtgggttttcaagtggcccagaggaacaaaacatcaaagtgaaatgaatggcctgatgggataccat

SEQ ID NO: 199930 - DNA, 546 bp, Homo sapiens
ggtgctgagaaaggattagaactatgactctcaaggcacacggaacataggagcaccggtgagcgttataaagtgcccctagccgcccccattctccacccactgaatcatgttatctggccatgggcaccccacgtgattcttacgggtatcaggtttgaaaatatcagagttttaggaggactaaaatcctcccaggttcctgtgacatcgcaacggaaaaagccttaggaatgatctagacgatcatcatctgagattgtgggctcctccgaagttaccacacaagtcccagatcagaaactgagacgggggcttgctcagtgccgcgtggctggcaatccgcggcggcctccggagcatgcgcaagatcttctctgcacggcggccttgcagccccgcttccacccaccgcaggaatgcctctccttgaccgagacacaaaccttttcctcctccagccgacagtttcagcccattacctctaaaactgcacactctcacaggtggtggactccataaatgtgaccatctgcctactcttgt

SEQ ID NO: 199931 - DNA, 832 bp, Homo sapiens
acaccataaaaagatgttcacttcactttgggttgtcctggattttttttttttaatgtcataagtttattgacaaacatatctagtatgccatatgagttcaagtttgatccacttccagaggctgtacctcttaaaatgctcttcatatctgttaatggatgaactgaaacatccttatgttttaagtagttgttgtcttactacaagaaagggtgtagcaaatgcagatccaaagtacaaacacatcttagctagtaacgaccacttgttttccactgaaaatggcaaattcttcccagggccctcctcacagtggctcctacggaccacagaggttgtgaacctctggatgctctggcccaacgtagcgctgctggaagctctgcgaaaggcacagaaaccgaggacggatgaaatggcggcacctcaccaagaccttttttttttcctggattttttttttctttgtttgtagcagttaggattttgcctgttatgatccactttaaattgtgatttccagaaatacagtgaatcaaatgtaagagtgctgaacaactgtatcgttgcatttacatgttctttttgttctcatttatttacattgctcagcctctatacacctagaccaagtcattagatactatgaatcttctgaaggttagtttattcagttagatttatatacagatatatcagagaaggattaacttctaaaatttaactcacatcatactagttttagtagtaagttttatgactagtgaactttattcttgaatcacacatttagcagtgtttatttctatgaaatgacctatttcctgcc

SEQ ID NO: 199932 - DNA, 778 bp, Homo sapiens
acaccataaaaagatgttcacttcactttgggttgtcctggattttttttttttaatgtcataagtttattgacaaacatatctagtatgccatatgagttcaagtttgatccacttccagaggctgtacctcttaaaatgctcttcatatctgttaatggatgaactgaaacatccttatgttttaagtagttgttgtcttactacaagaaagggtgtagcaaatgcagatccaaagtacaaacacatcttagctagtaacgaccacttgttttccactgaggttgtgaacctctggatgctctggcccaacgtagcgctgctggaagctctgcgaaaggcacagaaaccgaggacggatgaaatggcggcacctcaccaagaccttttttttttcctggattttttttttctttgtttgtagcagttaggattttgcctgttatgatccactttaaattgtgatttccagaaatacagtgaatcaaatgtaagagtgctgaacaactgtatcgttgcatttacatgttctttttgttctcatttatttacattgctcagcctctatacacctagaccaagtcattagatactatgaatcttctgaaggttagtttattcagttagatttatatacagatatatcagagaaggattaacttctaaaatttaactcacatcatactagttttagtagtaagttttatgactagtgaactttattcttgaatcacacatttagcagtgtttatttctatgaaatgacctatttcctgcc

SEQ ID NO: 199933 - DNA, 481 bp, Homo sapiens
acatttattttcctatcaacattatcaataacttagataaaggaggtaggtgtagtagaaagagaaatagtgaatcttttgaatggtagaatcaaacacccacagatttggggcaggctggagtgagggactaaatctaacatgatggaacctaggatagatgccctgcttttagatattgaaaactaccacagaggtgacaggaggagcatcaagcacttgcataaaagggatttgggcaaaatgtgaattaatggtatacctagatcactagtaactggatcacagaaggacccagcgatatgtgagatggccatgacttggccatctgtctgctcttctccgttctagaaggccatgagggcttgacccaaattagcaggtagttcacaacccagtttctcaaacaaatgtctgtacatgtacaaacacttttttaaaaacacttcacataataaacgtgaagatatcatctaatttg

SEQ ID NO: 199934 - DNA, 470 bp, Homo sapiens
tcacttttgtttaatatatgtgagagctttcagcttccgtgtttttctaaaggctttaacagcttggcctgtggacaagcaattatttaattaaaattggcacagatgtccaaaattttccattgttcttcagactacttgttttttgttaggtagacacattgttatgaactggacaggaagcaaaattggaagggcaggtaggagcagctgttaaggccacggacatgtaagtttctgcattatatagggttggggtctgcttatttgtcatgtgattttaagccatgttatgtaacctgtctgagcctcagtttccccctgtataaaacagggataattatcggacctgcctcctccagttgtgaggattcagagggatcttgtctgtcaagtgtttacattttagatttttattgagtcctgtgaggctgatactcttttctttctagcatgacattgcagtcgtt

SEQ ID NO: 199935 - DNA, 494 bp, Homo sapiens
caatcacatggtaaaacattcaagcagaaaaaatatgtggtgaaaaataattatcccatcctagaatccagtttccccattgcctagaagtaaatacagttacaaatttcttacatgtttttctagaaatagtctatgagcatacaagtatatgaatatatcttcctcttatttttctttatcacaaatgagatcttgctatttatagtctccaccaccttgctctttatatttaacatattagctagtataggtctacctctttctttttgaacacctgcatagtaatctagtaaagatttttaaaatctaatttaacaattctttattgatggaaatgtgtttttaaaagtcttttgccattatagtggtgtaataaatatcctttatgtatacatttaccaatgtgtttgagtatatttctaggatatatattcctttgaagacttttgagtaggaaagtggtaatactaaaaagacaaacctaatgtgag

SEQ ID NO: 199936 - DNA, 702 bp, Homo sapiens
ctgaattctacatgaaagagcttttacaacgtcaggaaatgaagctcctctcatgcatctgaagcatgcaatggagcagagaaagagcacacacttatgacattagccatggcatcctaaagacgttcaagactacccagaaccacctgagaatcgatttcatgtaggattacgtatctctgcctcgaattacactatattggtatatacagtaatatattttaggaaaattgcgaatactttatttttataatttgaattgttttcccattaacacataccaccatttatgagacgctctgagtgactggctgttgtaaacgtcttactgactgcctccccaccactgccacctacctggctcccttccttacgttttcaaactttaatacattttatgatcaaaactttggcaatgtaatgaatatttttgtaataacaatttcttttcattgcttctcaaagtgtgaatgatacacctttcctatcctttttttttggaaataaaagggaaataagcttgcatgtcccttaaggagaacgctcaggaaagtaagtatttccgctcccaggaagtctgcattatgcttactggcacggcacctctaacctgaccatttgagatcctccaatgactatttccttggagcatcacgttggtgctcaaaaagcttcagatcttggagcattttggatttccag

SEQ ID NO: 199937 - DNA, 364 bp, Homo sapiens
gtcacccaggttggagtgcagtggtacaatcacagctcactgcagcctcaacctcctgggcttcagattcttgccacctcagcctctcaaagtgttgcgattacaggcatgagccactgtgcccagcctaaacaatttattgttttaagtgactgtcaggcagtcaaatctatagcaatggtcacactacctccaccattagctcttctggcatgccaaccactaatatcacctgcacctccagtatctagcaaacagtaggttacagtcaatactatactgctgagttctgtactgctttgaggaaattagattcctgtcttttacatctttaatattaatagactcatacaatcaaaattcc

SEQ ID NO: 199938 - DNA, 373 bp, Homo sapiens
cttccccgtgctcactccatcctagccatactggcccccttctgttccttgaacaaagctctcacctgtctcagggccttgatactggctgctctctctcagtggtatgttcttccccaaacctcccaagactggctctatgctacactcacttttcgcctccaaagtctctcttgaagaggtcttctggtcttttagaaccagtcagtttctagcattcatggaactatcttaaatctctgccatagctcttatcactctcagatgttctgctgggtatttttttttttttttttttccttttaatactttttttggctaattgctgttggaaaacacttggaggaaaacaaaacccgaaaagcctggtgct

SEQ ID NO: 199939 - DNA, 279 bp, Homo sapiens
tgcctgggtcccgtctccagcccaagcctgctcctctccccatgctgactctaagcttttcagactgtgggagcagtgtctgagaagccaccaggttcagtcctgttgtgtagcctccatgcctgtctctggggagggggctgcagcagggcagagccttgtgtctggtggaagggacagagtggccatcctcaaagaaggaagcagcctgccctagaccacaccacctaacgccaggctggaaaggaactgaagtttcacttgagccatgatttgtcc

SEQ ID NO: 199940 - DNA, 147 bp, Homo sapiens
tccctggactggagaactgctgcactctggtaaagacagacaaaaacaaaacaaaacaaccactactactcacaagaaacaacatataaatcgtaattgcaatcactaacagataagagaaaaagaaaagctaaatttcaaaatctg

SEQ ID NO: 199941 - DNA, 264 bp, Homo sapiens
atagctttgattttctcactggtgtttcattaacttggttttaaatgttgacaatatttacaagtggaaataaaatttgtaaatatatgaaagatgcctttccttgtatataccatcaagcaagcactttgttttcaaagcaagtggtattttgatcagttttatttaaatgtgtgatcagaaagaatggcgtacaaatcttattatttctaaaaataagaataaaaaggtaaaactacatttagacttctttctcaagaaatc

SEQ ID NO: 199942 - DNA, 554 bp, Homo sapiens
gcctggtcattgttactgttgagactgctgtacttaacagtcagaggaaggcagctggtcaccacgacccactcggccattcccatgctgaagactcgctctcacttcacacttgtttggactccactatgacttgctggtggcccatctcctggatccttctgttggagctgttctagaagatgcttgtggcaggctccagtttcagtccttggctgaaataagtgtagtgtggctcttcggttttctaatctattccacctaaaaaggttaaggtgacaaacaggtggtgggtacagtagagttgtttttggcccttggtaatattaaaaacttggaatgcattccttatattactacagaattaggagaaacggttgaaagaggagaggtttttttcttggagtatccaaagggattggattcgactacactgacttggtgtgtaatggttgagtaggaaggaagatgaacataaaactgctattaattatgctcttagatgtgaggcaacattgaggatgtattgcatgtaacccttgactgcagaatca

SEQ ID NO: 199943 - DNA, 357 bp, Homo sapiens
cagagttcctccttggagtggtaaaaaagttttggaaacagatagtggtgatggctacagtacattgtgaatataattaatgccaatggattttacacttaaagatggttaaaatggcaaattttgtgttagatattttacaacttttttaaagaattaggagtttggaggatcaagaattcttaaatcatgtttttctattttcatgtgtatattttgcaatgtaagtagatgctggtacatcatctgtcaaaagagtataagtgattttgagctttgggtaaaaaactggataacatgtaaatagaaccagtcataaaaatattgagtgtttgaagtgtatctgagtgaaaacac

SEQ ID NO: 199944 - DNA, 368 bp, Homo sapiens
cctgaggtccccaagctaccacttcatctggcccctgcttagctctgcaaactcagcttgtaccacacagatcttactgttccgtgaccacgcccagggtgtttccacaccaagcaggtgcctttcccagggtttttgcacttgctgttccctcttcctggaggaaccttcctctacctcttcacagggctttgctctctcacttcattcaggtcatggcttaaatgctacctcctcagagagccttccctgaccacttggcctaacacagctccttgtccatcctcaatacttgggcttactcttacctgagggcacttaccaccacctgaaattatctttataatggatttagtctatacttctat

SEQ ID NO: 199945 - DNA, 402 bp, Homo sapiens
gattttattctgataattattttctactcatatttttgtctccctttccttctgcccatcactttaacttaggatcctgcttctcaaatagtagaggctcagaaataatctttttaatgaattgagcctagctagcattaaatttgagagaccaaataagcagtcatttgttttattttattttattttatttttattttactttgagttctgggatacatgggcagaatgtacaggtttgttacataggtatacaggtgccatggtggtttgctgcacctatcaactgtcttctaggttttaagccttgcatgcattaggtatttgtcctaatgctctccctcctcttgctttcctaaccctgccctccggggggttaataaagttttagcaagggtccca

SEQ ID NO: 199946 - DNA, 375 bp, Homo sapiens
cagactcagttatgacagctatgagactgggtatttaaaataactatgatgtatactcctaagggttctaatgggaaaagtgtttaaaatgcaaggaaaagatgggtaacataaccagagatggaaattttaagaaagaataaaaaagaaatactagaaaacaaaacattgatgggaatgaagagtgtctccagtgcgctcatcaatagactggacatggccaaggaaagaatcggtgagcttgaagaaatgtcagtagaaacttctaaaactgaaatgcacagagaagaatgaacgaaaggagcagaatattcaggaaccgtgggttaattataaaagttatgcatataatggaaatatcagaaggagaagaaa

SEQ ID NO: 199947 - DNA, 456 bp, Homo sapiens
tctagaggatccccacgcgcacgacggtcaaagttctgggattacaggcgtgagccactgagcctggcctatttttattttatagagataggatctttctatgtcgcccaggctattctcaaactcctgacctcaagtgatcctcctgcgttggcctcccaaggttctggaattataggcataagccactgcacctggcctggtacttttagaaataagaacacttttcagacctggatttcgggttgttttgtcaataattgtccttatttgcatcatattttttattcttaggctgattatgctttgtacttttagataactaaggtcaacaacagaaaatgaattatgatagttagatgcttagaaagaatccaatattctgcagcttccttgtaagcggatggcctgaccaaggtcccattgctctgtctcttttttttgttaatcaattca

SEQ ID NO: 199948 - DNA, 374 bp, Homo sapiens
gagatcacgccactgcactccagcctgggcatggtggctcatgcctgtaatcccagcactttgggaggccgaggtgggcagatcatgaggtcaggagatcgagaccatcttggcctctcaaagtgctaagattataggcgtgaaccaacatgcctggacaataatatttttaataagatccagtccagaatcacacattgcatttagtttcatgagattttagtttcatgtagtcttgaacaatttctcagtctttgtctttctgggccttggcgtttttggagattgttcaattatttttgtataaggcactccgatttcagtttgtctgatgtttcttcatgatatgattcaaattatgcagtttttgggaa

SEQ ID NO: 199949 - DNA, 215 bp, Homo sapiens
gtagcactagtagatagatttatctcttatgactagagcctcagagcaatttccaaggtagaaacataccaaaaaaataaaagagagaatgccttagccaatggttttatctataacctagatttaaagccaaattagaagtgtcagtcatctaaaatcctgtggttagtgtatttcattttaccaacagaggaacttttgtttttgaaggcaat

SEQ ID NO: 199950 - DNA, 226 bp, Homo sapiens
cagagtaggactcaaaacacagaagagcataaactaagaaatctttcctggtgaccatcgaaacagccatttccatcaagggaagccattggatgttagattgcaaggggtggaggaattagtgagacataagacatcgaggtacttatataaggtgatttaatgaaatgaagaaggaagacagggaaaaggtaataaaatcaaagaagtgtttttcaggttattg

SEQ ID NO: 199951 - DNA, 251 bp, Homo sapiens
gtacgtgtcgcgtagtaacgatgtctagtgatgagtttgctaatacaatgccagtcaggccacctacggtgaaaagaaagatgaatcctagggctcagagcactgcagacacatgaggctcccactgcccaaagtgctgggattacagacatgagccacctcacctggcctgattccatttttattatctaagtttatatgtaatatcagatctttttattttacatcctgtcctatttattcctgtactt

SEQ ID NO: 199952 - DNA, 780 bp, Homo sapiens
cgacagttcagggactctggcgataaagctgccggagtccgcggcggcggaggcggctgcggcgagcaaggaggctgacgacgcacaatgcaaagacggcttttcagagcagccagtggggcaggacaatgtttttcatcaaatgtccttagatttggaggaggtttccccagtgtatccagtggttgtcttcctcttgattaatattaaaggaggagaaaaagtgtgtattggggtcagtgcagaaaacaaatcatccaagcacacgaagtggaatttgctaatagcattactactcacccagtgacttcggagtcacaacccaggacacggttttccgcccatttctacagacacagtgagattcttcattcttctctgttggaacagccaggaaagcggaagagacctccagctgcacaacgacctgtcccccaacccaaccacaagtttatgaagggatgcagaacagcatgaatactgcaaaagatgctctgtgcatcaggtaaatggactgagggacaatgtccatgagtccagaggcgctgagaagctgtgcaaatatggtcagctctatcagacactttgtagtttaggtgtttgaaacaagaaaattgaaaaactgacaggaattaggataagtgtttaggatttagccttgtgccaacagaagaaagaggtgtttagtgaaaaacatgaaacaatcaggtggacataatgtctgaatttaggaatacacagatataggagcctgaatgaatataaccttaccaacttggg

SEQ ID NO: 199953 - DNA, 499 bp, Homo sapiens
ggggactgatgcccaactttgaatcatcttgatccttgagcttgggttaaggcgatcccagattgcaagtttctctggctgcctgacagaagcaaaggctgaatttgtctctccattgtccctaccctggccccatggcctctgctgtgacagtccacacagtcctggctcacaaacatgatctccaagagtggaagggtcctgataccttctacgagatttacattgtcaactcggccctattgttttacaggcggtgtgcagaataggtggtgagccatgtggaagagatggcagaaagagcctcttgatctgtgagacttcatactggctgtggaccaactcttctactgatgtgaaagaataagcctcagcctactcaagccattctatctggggcttcttattacataatccttttatttttattttttttatttttttgcccttaaaattattggtaaagagatgggagtttattttccaagtgagaacaata

SEQ ID NO: 199954 - DNA, 542 bp, Homo sapiens
ggggactgatgcccaactttgaatcatcttgatccttgagcttgggttaaggcgatcccagattgcaagtttctctggctgcctgacagaagcaaaggctgaatttgtctctccattgtccctaccctggccccatggcctctgctgtgacagtccacacagtcctggctcacaaacatgatctccaagagtggaagggtcctgataccttctacgagatttacattgtcaactcggccctattgttttacaggtaaaataaagcatgtgcagattcaacactgcttttttccaaaattaatttctgaatcaaaaattaaagcagaaaatacactttcttaaaaatctatattcctgtaagttttctcattcacatctttggagctttgagcatctgttaaaatggttctattatttctgcctacctaatctaataaaaagtcatctcttttctagcttttacttcttctcctaggccacttactccagacatcatgatgtaataccttgctgtgttcacaaaaatctagtacaaggtctta

SEQ ID NO: 199955 - DNA, 258 bp, Homo sapiens
ggaagcaaccagcaaattaactaatttaagtacatttttaaaaaaagagctaagataaagactgtggaaatgccaaaccaagcaaattaggaaccttgcaacggtatccagggactatgatgagaggccagcacattatcttcatatgtcacctttgctacgcaaggaaatttgttcagttcgtatacttcgtaagaaggaatgcgagtaaggattggcttgaattccatggaatttctagtatgagactatttatat

SEQ ID NO: 199956 - DNA, 1014 bp, Homo sapiens
actctgcagtcttcagggctggtgcccttcaccgatgcagcttcacagcttttccatttcgggtcacccttacatcgtggtcctttccccggccctggactggccaccactggacagcaggatgggggcctggggtgagcacctgtcagtgtgggcatggctgggtgaacacaagggacccttgtgtcctgcttagctattgtctgtgacctaccctggggatcagagcttcaaggttctcagaaaccttcttaatattacattccccaggcatcttatgacaattctatgcacatagggagtgtgccaacattttattgtgaaagatatctggaagacagagggagagagagagacagggagagtcaaacgtggagtttccaacttgaagacacttttatttctgagaatactgggaaagccttttcagggacagagtgacaggaagagcagggaatttatagtaaccaggtaatgctattgcacataataagtagaactttagaagatgctgggggttaagtatcattttacccatctcacttgagagctgaacacgcattctgtataaagataagcctggtcatgttttggatggttgtgttgtccacattcttttctttagaaggccagaatgaagttggcttatgtggactctaagactctaagtttcttcccagtatgttagggagtgtccgtgaagcgtttgccaatttaagaaagatatttgattgtattctataatgcatctgccggcactcatatctgccttccacatacttcattcagtcttttcgctttgattttccttttgctgcatttaggctgtttggataattgcttctctgaggtttttcagggttgtaattctaagagtttaaagagatttaggagttggcgccatttggggtcctgaattcatgctgttggctgaagctgattccagagaagcatcctaacgcctttctacaaatggttgtaaccgaatgtgaaataattaactgggaaacactg

SEQ ID NO: 199957 - DNA, 698 bp, Homo sapiens
tgctgttgtatactctggatattaattgcttgttggatgaatagtttgtaaatattttctccctttcaatagtttgtctcttcactctgttgattgtttcctttgctgtgtaaaaggtttttagtttaatatagtccatttgtctatttttgttgcctgtacttttgaggtcttagctataaaatctttgcctagactaatgtccagcagagtttcccttatgttttcttctagcagttttataattttagtcttttgtttaggtctgtaattcattttgagttgatttttgtaatggtgagagataggggtctagtttcattattctgcatgtggttatccagttttcccagcaccacttactaaagagggtgtccattccccagtgtatgttcttggcatcttgtcaaaaatcagttggctgcaaataagtggatttatttctgggttctcttttctcttccatcgatctgtatggctgtttttataccaacatcatgctgttttggttactgtggccttgtaatatatgattttttttctgtttctatgaaaaatgaaattggtgttttgatagggattgcactaaatctgtaggtttctttaggtagtatagtcattttattacattaattattctgatccatgagcatggatatctttcctcggtcctcatcagtttctttctcagagttttg

SEQ ID NO: 199958 - DNA, 397 bp, Homo sapiens
tttccaataaactcagaggcgtgaaaaggcaaatcaattttatgaacacccatgaaattggttggttgtgaccactatgggtggaaacactgagcttcagtggaatttcccttaatattaaaccaggaaactagagtccctggttatctctctgtcgtatacagcagctgacatctattcctcctggggattgggcagatcttaaagttgatgtcctaagcttctgactgggatcacagctctggataggggttgggtcaggccatcgcctttagaaaaccagttatttagcctctctttccaatgggatttctctgaaaccttgttcatgatgatgccaacttgtgtctccttgaaaaatcaaaacaatggaattaaacttgggtgttctcctata

SEQ ID NO: 199959 - DNA, 1081 bp, Homo sapiens
atgccatctgggttgttgggtaatccaggatcatctcctcagctcaagagccttcacttaatcccagccgcacaggcctgtctctctgtgtaacgtagcctccacacccgagccccaggatgtggacacctctctgtcagggccatcattcaaatctccgtggagctgctaaaagggacagaaaccctccaagctcgtctgagccatgaagtactcctggagtaaaggtagaggggcatctcatggaacccaagagcagaaagcccagtggacctcaggaagcagcgcctgagaaccagagccttccagaagccaggcatctgtccgtgcctgggtccaccccacctcgctgcccacctgtcctccgcaacccctccacagcgcctgggattccatgcctcaggttctagccaccagcagaaacggaggaactttctccaaatttccgggacaaagattcagattgactccgcatagatgagatcgtcgggtcgcctgtggctcgtgtgtgtgtctggggctgggacaggcaggtcctcacagtacacaggaggtgctgagggcccaccccagtgggcatgaacttggcagaaaccccagaacgtacctagagtagctcaaaaaccagactgcccctttcggggtgaaattcacccttcaacgactccaggctgtcacttcacactgtcaggggcagcactgagctcacgtcacatccaggttctcggggcaggcctccccccagcccctgagtaataataacacttcttagcactagcccagtgtccagacttcaaggccaggcctggcctgctgctcaaagcatgggacctgtcccctcagcaggcaccaggtttgctgtggggcatgtggagctaatcactgggcccctccggaaaggctctttcagatccacatgataaagcccccagcgtcaggctagcaggagcagcgggggaacgtgcggttcctgctgctgggaagatgggctggggccggctcaggttccaggcctcagactgcagcattgggaaacgctcccgaccccgctcccgccccacgcggatcagcctctccccac

SEQ ID NO: 199960 - DNA, 2805 bp, Homo sapiens
ttggggctcattcagggcagattatattcttgtcatttttcctcatgcagataacagcaggaaggacttaaggtgtataagaaaaagaaagtattcatacagaaattacctagcagttgtgccctcagagtagaactttgaaacaggactgaagccctttttacctagaaccatttaaaagcctgagcaaggaccaccaccccctccccaccaaattattcggtctctttctggggggcccagcttactgtatgttacaagtctttgaaatgggtctggtgtcttcagctcctgaaatgctaatttaccccttacctaaggagtgtagttataatacagagttggtttccttccttccttccttccttccttccttccttccttccttcattcattccctctgtccgtctctccttccctccttccctccttccttcctttttgtctttgtttctttctctggccccctgtcctctctctctgtctcatccccttttcccactttccttctgtctctccttcctcccttcctttacagtttaaaaaaaaaatctaaaaatagttaagcactgtgtcaaagagtgtttcaaaagaattgtttgttttctcatttcttaaaccagaagtttatgacaaataaatatgccatgtaatatgaaagctgcttcagctttttatgagctttcacattccttgtttgtccttttaatttgtttcttgatatatgaagactataaacttgaaacaaagagttagctgtcagctcttgataatataattggggaaacagaatagatattttatgatatgataattctgatgatctaaagataatgtcttagacaattacctttacatttcaagctctgggatataaattacgtagtcagcattaagatagtattatttttaattgctactaagtggtaacttttgtattttaatatcttgcaagggcaaagaaggcatttttaaaattctaaatgcacacctcctaaggtaaatagtctttcaaaaatatcaggcgtgccaactcttgctgagttttgttaaatcctccttaactgtctgcagtgccccctgacttcttttaaatggatgtgaatatatgtggaaaactaaatccatttattataaatgccttatctttaccctttgggatcttactaaatgcattttacctgctactatttattaaaaatggaagctgtcttgaattagagatacctcacgtaaggtaggttaagcagtcaagtatttctttaggcttatgttcagcacctcagccccctactgagaagttaattaattcagtccaaaatgaaattatagggcagtttggtgcaatttatgttaaatgccatttgaatgtaatcacctgtgttaccacgaatgaggcacaactatactacatggacagagtactgcattgcaccatgagcaagaactgctctgcaagaaaaatatctgtccctgtggtctgaatttatcaaaactcattttcttgttaaagagtgaattattgaatagtaattaaactttaactgatgaccatttatattctagtagccatcttcactgttagtcttaaattataatgtaaagttgacattttccccttacatttcaaaggcatcactatttttaaatgtttacatatgtttacatgtttgtgtgcaactgcttcattgctattaatagttaaatgaaatctgcatattctggatcatagatgttcttagttaactctgggaaagatgttacctttgggtttttaaaagacaagtcatcatttgaaaatatattagggtgtgttgattttctgacatgcttgtgtaattggctttgtttataatttttattttttaatatgggtcagacttttggattaaaaagtattatatcatggacatacattttttaaagtaccaaaggtatttggtaagcgagcccaagtcatgtaattgaaacttctgtacattaaaagaactgattcatgaagacgttttctaactttttctctttaagtgctcctctagactagactgattgaagtagacagtgtggtggaatcagtttaatcagaaaaagacataccaagtagctggtgctaattattataagactaacattctgataagccatggtataattaacattattaaaatgtttacatataatccttcttaaagtatactcttttaaaaatccattgacataaccttacttttagtttagtgatccagaatttccccagagcttaagccactgcagtaaattaggtacgtaggatattcagtcgctactagccacaaggagtctccttattttaatgtacctccctcagtactttattcctgcagagcgcctcagagtgggggagagaaatgagcaatcctggctcagttggattatttcagcattttatttctaaatctgtagtgtgatcagaaatatttaaaattaaaaaaatactttacagagagaggcctactaatcaatgtgcttagagaaacaaactacctttacattcaattaacaacaaaaaaagttacagaaattttaacaaacatttttctttatctgagtatgggagaaaatactaatgctgacacgtttaataattagaaaagatcattccagatcttatggaaaattgtgttttaaattccagcagtttgctcttgagacatggtaatctcttaatgtaactactaaaggagaggtagattgaaaagatcttgtatatacataattatgtcagatggttcaagatatcaaaataaattgttttgttgaaaatga

SEQ ID NO: 199961 - DNA, 2808 bp, Homo sapiens
ttggggctcattcagggcagattatattcttgtcatttttcctcatgcagataacagcaggaaggacttaaggtgtataagaaaaagaaagtattcatacagaaattacctagcagttgtgccctcagagtagaactttgaaacaggactgaagccctttttacctagaaccatttaaaagcctgagcaaggaccaccaccccctccccaccaaattattcggtctctttctggggggcccagcttactgtatgttacaagtctttgaaatgggtctggtgtcttcagctcctgaaatgctaatttaccccttacctaaggagtgtagttataatacagagttggtttccttccttccttccttccttccttccttccttccttccttcattcattccctctgtccgtctctccttccctccttccctccttccttcctttttgtctttgtttctttctctggccccctgtcctctctctctgtctcatccccttttcccactttccttctgtctctccttcctcccttcctttacagtttaaaaaaaaaatctaaaaatagttaagcactgtgtcaaagagtgtttcaaaagaattgtttgttttctcatttcttaaaccagaagtttatgacaaataaatatgccatgtaatatgaaagctgcttcagctttttatgagctttcacattccttgtttgtccttttaatttgtttcttgatatatgaagactataaacttgaaacaaagagttagctgtcagctcttgataatataattggggaaacagaatagatattttatgatatgataattctgatgatctaaagataatgtcttagacaattacctttacatttcaagctctgggatataaattacgtagtcagcattaagatagtattatttttaattgctactaagtggtaacttttgtattttaatatcttgcaagggcaaagaaggcatttttaaaattctaaatgcacacctcctaaggtaaatagtctttcaaaaatatcaggcgtgccaactcttgctgagttttgttaaatcctccttaactgtctgcagtgccccctgacttcttttaaatggatgtgaatatatgtggaaaactaaatccatttattataaatgccttatctttaccctttgggatcttactaaatgcattttacctgctactatttattaaaaatggaagctgtcttgaattagagatacctcacgtaaggtaggttaagcagtcaagtatttctttaggcttatgttcagcacctcagccccctactgagaagttaattaattcagtccaaaatgaaattatagggcagtttggtgcaatttatgttaaatgccatttgaatgtaatcacctgtgttaccacgaatgaggcacaactatactacatggacagagtactgcattgcaccatgagcaagaactgctctgcaagaaaaatatctgtccctgtggtctgaatttatcaaaactcattttcttgttaaagagtgaattattgaatagtaattaaactttaactgatgaccatttatattctagtagccatcttcactgttagtcttaaattataatgtaaagttgacattttccccttacatttcaaaggcatcactatttttaaatgtttacatatgtttacatgtttgtgtgcaactgcttcattgctattaatagttaaatacaacaaaaacacccaaaacccacacaacaaaacaaaaacacaccaaaaagaatgtttgtctttgggtttttaaaagacaagtcatcatttgaaaatatattagggtgtgttgattttctgacatgcttgtgtaattggctttgtttataatttttattttttaatatgggtcagacttttggattaaaaagtattatatcatggacatacattttttaaagtaccaaaggtatttggtaagcgagcccaagtcatgtaattgaaacttctgtacattaaaagaactgattcatgaagacgttttctaactttttctctttaagtgctcctctagactagactgattgaagtagacagtgtggtggaatcagtttaatcagaaaaagacataccaagtagctggtgctaattattataagactaacattctgataagccatggtataattaacattattaaaatgtttacatataatccttcttaaagtatactcttttaaaaatccattgacataaccttacttttagtttagtgatccagaatttccccagagcttaagccactgcagtaaattaggtacgtaggatattcagtcgctactagccacaaggagtctccttattttaatgtacctccctcagtactttattcctgcagagcgcctcagagtgggggagagaaatgagcaatcctggctcagttggattatttcagcattttatttctaaatctgtagtgtgatcagaaatatttaaaattaaaaaaatactttacagagagaggcctactaatcaatgtgcttagagaaacaaactacctttacattcaattaacaacaaaaaaagttacagaaattttaacaaacatttttctttatctgagtatgggagaaaatactaatgctgacacgtttaataattagaaaagatcattccagatcttatggaaaattgtgttttaaattccagcagtttgctcttgagacatggtaatctcttaatgtaactactaaaggagaggtagattgaaaagatcttgtatatacataattatgtcagatggttcaagatatcaaaataaattgttttgttgaaaatga

SEQ ID NO: 199962 - DNA, 2912 bp, Homo sapiens
ttggggctcattcagggcagattatattcttgtcatttttcctcatgcagataacagcaggaaggacttaaggtgtataagaaaaagaaagtattcatacagaaattacctagcagttgtgccctcagagtagaactttgaaacaggactgaagccctttttacctagaaccatttaaaagcctgagcaaggaccaccaccccctccccaccaaattattcggtctctttctggggggcccagcttactgtatgttacaagtctttgaaatgggtctggtgtcttcagctcctgaaatgctaatttaccccttacctaaggagtgtagttataatacagagttggtttccttccttccttccttccttccttccttccttccttccttcattcattccctctgtccgtctctccttccctccttccctccttccttcctttttgtctttgtttctttctctggccccctgtcctctctctctgtctcatccccttttcccactttccttctgtctctccttcctcccttcctttacagtttaaaaaaaaaatctaaaaatagttaagcactgtgtcaaagagtgtttcaaaagaattgtttgttttctcatttcttaaaccagaagtttatgacaaataaatatgccatgtaatatgaaagctgcttcagctttttatgagctttcacattccttgtttgtccttttaatttgtttcttgatatatgaagactataaacttgaaacaaagagttagctgtcagctcttgataatataattggggaaacagaatagatattttatgatatgataattctgatgatctaaagataatgtcttagacaattacctttacatttcaagctctgggatataaattacgtagtcagcattaagatagtattatttttaattgctactaagtggtaacttttgtattttaatatcttgcaagggcaaagaaggcatttttaaaattctaaatgcacacctcctaaggtaaatagtctttcaaaaatatcaggcgtgccaactcttgctgagttttgttaaatcctccttaactgtctgcagtgccccctgacttcttttaaatggatgtgaatatatgtggaaaactaaatccatttattataaatgccttatctttaccctttgggatcttactaaatgcattttacctgctactatttattaaaaatggaagctgtcttgaattagagatacctcacgtaaggtaggttaagcagtcaagtatttctttaggcttatgttcagcacctcagccccctactgagaagttaattaattcagtccaaaatgaaattatagggcagtttggtgcaatttatgttaaatgccatttgaatgtaatcacctgtgttaccacgaatgaggcacaactatactacatggacagagtactgcattgcaccatgagcaagaactgctctgcaagaaaaatatctgtccctgtggtctgaatttatcaaaactcattttcttgttaaagagtgaattattgaatagtaattaaactttaactgatgaccatttatattctagtagccatcttcactgttagtcttaaattataatgtaaagttgacattttccccttacatttcaaaggcatcactatttttaaatgtttacatatgtttacatgtttgtgtgcaactgcttcattgctattaatagttaaatgaaatctgcatattctggatcatagatgttcttagttaactctgggaaagatgttacctttgggtttttaaaagacaagtcatcatttgaaaatatattagggtgtgttgattttctgacatgcttgtgtaattggctttgtttataatttttattttttaatatgggtcagacttttggattaaaaagtattatatcatggacatacattttttaaagtaccaaaggtatttggtaagcgagcccaagtcatgtaattgaaacttctgtacattaaaagaactgattcatgaagacgttttctaactttttctctttaagtgctcctctagactagactgattgaagtagacagtgtggtggaatcagtttaatcagaaaaagacataccaagtagctggtgctaattattataagactaacattctgataagccatggtataattaacattattaaaatgtttacatataatccttcttaaagtatactcttttaaaaatccattgacataaccttacttttagtttagtgatccagaatttccccagagcttaagccactgcagtaaattaggtacgtaggatattcagtcgctactagccacaaggagtctccttattttaatgtacctccctcagtactttattcctgcagagcgcctcagagtgggggagagaaatgagcaatcctggctcagttggattatttcagcattttatttctaaatctgtagtgtgatcagaaatatttaaaattaaaaaaatactttacagagagaggcctactaatcaatgtgcttagagaaacaaactacctttacattcaattaacaacaaaaaaagttacagaaattttaacaaacatttttctttatctgagtatgggagaaaatactaatgctgacacgtttaataattagaaaagatcattccagatcttatggaaaattgtgttttaaattccagcagtttgctcttgagacatggtaatctcttaatgtaactactaaaggagaggtagattgaaaagatcttgtatatacataattatgtcagatggttcaagatatcaaaataaattgttttgttgaaaatgaatactttttggtgtcttgcttaaaaatatttttatattttgtttatctactcaaaattatgaatggatgcatttttgtagaacttaatcttaataaacatttaactg

SEQ ID NO: 199963 - DNA, 1241 bp, Homo sapiens
ttggggctcattcagggcagattatattcttgtcatttttcctcatgcagataacagcaggaaggacttaaggtgtataagaaaaagaaagtattcatacagaaattacctagcagttgtgccctcagagtagaactttgaaacaggactgaagccctttttacctagaaccatttaaaagcctgagcaaggaccaccaccccctccccaccaaattattcggtctctttctggggggcccagcttactgtatgttacaagtctttgaaatgggtctggtgtcttcagctcctgaaatgctaatttaccccttacctaaggagtgtagttataatacagagttggtttccttccttccttccttccttccttccttccttccttccttcattcattccctctgtccgtctctccttccctccttccctccttccttcctttttgtctttgtttctttctctggccccctgtcctctctctctgtctcatccccttttcccactttccttctgtctctccttcctcccttcctttacagtttaaaaaaaaaatctaaaaatagttaagcactgtgtcaaagagtgtttcaaaagaattgtttgttttctcatttcttaaaccagaagtttatgacaaataaatatgccatgtaatatgaaagctgcttcagctttttatgagctttcacattccttgtttgtccttttaatttgtttcttgatatatgaagactataaacttgaaacaaagagttagctgtcagctcttgataatataattggggaaacagaatagatattttatgatatgataattctgatgatctaaagataatgtcttagacaattacctttacatttcaagctctgggatataaattacgtagtcagcattaagatagtattatttttaattgctactaagtggtaacttttgtattttaatatcttgcaagggcaaagaaggcatttttaaaattctaaatgcacacctcctaaggtaaatagtctttcaaaaatatcaggcgtgccaactcttgctgagttttgttaaatcctccttaactgtctgcagtgccccctgacttcttttaaatggatgtgaatatatgtggaaaactaaatccatttattataaatgccttatctttaccctttgggatcttactaaatgcattttacctgctactatttattaagatcgtcgacgcggccgcgaatttagtagtagtaggcggccgc

SEQ ID NO: 199964 - DNA, 144 bp, Homo sapiens
caagaagaaagaagtggttggcagtcttggccaaaaaggaattaaggtatgaaatcagtttctccaactatgctctcacaacacggaaaacttctgtgaccaagtgtgtgtttttcctgcactcaccaagcaattctacggcaa

SEQ ID NO: 199965 - DNA, 363 bp, Homo sapiens
ttatagggatgtctcaaaacgacacaaaagccagcttaaagggactctcactggccaactcagggacaactgagcatcgaaataaataatgacagtaatattcactgactaaaataaaaacccataaaaataaaaattttctataccagattataaataaataaaggagataaagaaggtctgcctcatagtaaaatgacaataaatacagaagaaataataagagttagaaaattgtcatttggcacccatcacaataactgattcaggcaagattaatcaatggataataatactaattggtgaaaagtttgatgaagaatgggacaattatgtaacctcaaagtatcatccacaaattag

SEQ ID NO: 199966 - DNA, 86 bp, Homo sapiens
ttcccacgggagggacggatctgcccagcttggttcaggcacttgttcctgaaccagtcaactgtttcaggggtggggtcatgtta

SEQ ID NO: 199967 - DNA, 236 bp, Homo sapiens
aaatctactattatctttgccactgatacaccacttcatcttcatttcaactcatacatgatgagaaagtacagattcccctaccctgcagcaatgaaggaaagggaatcaaaacttggagggcccttgatttttcatgagtgccaggtagaacatccaaatctagaaaacatccaagaaataatgagcaaggaatataacttaaattctttggttttaaaaactttcaaaaagga

SEQ ID NO: 199968 - DNA, 449 bp, Homo sapiens
gctgtcttccctaccttggtctgatttgagaattagatggcacagactggcaaactcaaaacagaaactcacaaaactttgatatccactggatcaagtactatgccaagtcaaggggatgcagaagaaaaaaatagccatacatacacgaagaactacagtcacattaacttcaagcagatgaagcctgtaacttgctggttctataccctgaaaaaatggacctgtaaatgaatctgtttgggttaacaaggctgccaccatatagctggttttcattctctgccccatcaagctcctcaactttctgtattatctgaaccacaaagcaccatacacctccctttggacttttgtacaaaattcccttactgtaagacatgccctttgtctaatttctgatgctgaatcttgccactgggaacactgaatgtatcttcacctatggg

SEQ ID NO: 199969 - DNA, 631 bp, Homo sapiens
gcaaagtaacagagctggagaatggtggagacaggactcaaacaaaggattgcctgattctggaatccacagttttaatcatattgtctattacactagaaaaactgatgtccagagtgactgtgtgtatttagtcatgtatattgatttgtgtgtatttcgtgtgccaacaaagtttgctagactgtgacccttggaaggcaattaatgtgttttatttctctcagtatttgtagcatccattaccatgcctagtacacagaagatcctcaacagaagctgtttgaattaaatttctacagatacgtagttatccatctctataaacattcacagataaatatatacagaggacatctcattttcaggtagcatctgagaacaagttgtgacaactagaaaccttccctctctatcttgaactatttcaatcaagcttttgctagcattattccattgacatggctcttgtcaaggtcaccagtaacctccatgttgatgattccaatgatcaattctcagcctccagcttgtctgacccctccacagctttggacatagggctttcttccctcctgcaactctctctcacttcctttggcttccaggatattcctatctctttgaatgc

SEQ ID NO: 199970 - DNA, 502 bp, Homo sapiens
accaggaaggaagacagatttataaaaatgaaaaaattcactcaagatgctgatcaaacttcaaatgtgtagctttaaaaaaaaaatcaaaagcaaaaaaacaaaaaaaataaaaatttaaaaaatcacatgatcataatataaatcagaaaatctagattgcaacattgtctttacagatgcactaaatatgtattaaattaccaagaaaattcattctataactttggttgtaaaatggaaaggctaaaaagctgagatgatttaagtatttgttttttccccatgacaagtttaaatgaaggacagaaaaagacttaaaataacctttattagtagtggctcactattattagtagtggcacagtcagatcacacaatctcaggggtattgtattttcaaacgtgtcaatgtcacaaaagacaaagaaagtctgtaaacagtccagattttaaaggaagctataagaaaatgacaactaaatgcaatatttgatcctag

SEQ ID NO: 199971 - DNA, 924 bp, Homo sapiens
agcaaacttccttactgaataaggcaaaatgtcaacatagaagtgactaaataaagcaccaaattgtcaggataattcttgaactgttgttggattgtagtatttatatgacaactccgtggaggcattacttaatcagaagagctaatgtaaagtacctctgggtgacattcaaccacaagaggaaaagtgatataggataatgacgtaacaattgaagaatagaaggatgtaaaaataagggtgtgtgtggaatgctcatttatttgttagtgaaatgaaatgtttgagcatctacatgctctgagagactgaaaaggagagaacgaaaataagtggaagtaagcctctggagaagttcagagggaataaaatttgtagaaaaacgtaggtcagacttgaataggggaatgtcatgtcatcctctaaaaagaaggaaaagagggaggttggagcagaaccagagacagatctttggttatttttcttttctctgtggagtgtgaggcaagatcatataatgttaatttaaaagttgcaagtaaaggaaaaagctcctggaaaggggtaaatatttataacaactccttcagatagaatagaaaacacaccagaaaccagcaaagaagctgaaagcagcagagtatccaatggggatagcgatggatttgtaccatctccatttcatacacatacttacctggtttttctccagcaacgcctgactgctggtggttggagcaggaaaaatcgattattggcaagatccaaattgggagtaacaaataaaaagggtaggaatagaagcagttggcaagggtactcttaaagtaattgacctaggctacacagagaaggaagcaagatccagaggaagctcattgactatgagaaagtgcatatgtttatctgtatcaggggcag

SEQ ID NO: 199972 - DNA, 249 bp, Homo sapiens
ggaccagtgtttgttgacatgctacaggggagatgaggtaggcagcatgagcccatttggcccctcactctgacccccaaggcctggccatcagctctggatcactgtccctgtccttcacatggggaagggggactcttgtccagcagcggggtggtagaccagaggagccccagtgagctgggtacacactcacaccacatcccatcaattctagacacacatttcagtgtctccaaaatcaagatg

SEQ ID NO: 199973 - DNA, 690 bp, Homo sapiens
tattagttcagtgacattgggcaagttacataacctgtctatgctgcagttttctcatgtgcaaaatggggataataattatgcctacctcatagcgttattctgagaagtaaatgagttcataatgtgaaggccttagactaataactggtgcatatgagtactctatgatcactgttattacttcttttgataaaggaaatgaaaacactcaggacaagtgttgccttcaggaaggtcatattccagtgaagaggatgagtgtgcaaacaatgataatgccatgcagcaaatggtatgatagatgtatgtgtggaacttaggggagtagtcatggaagtctttgtagaagaggtggcatttgagcagtcttgaatgttttaggcaaataatcagggaaggaatacaggaataaagaacaaattactgttataacaatgtggatcaatatcaaagatactatattgaataaaagaagcaaagccaggcacaagagaatacatcctgtgtatggaatcacagaatgggcaaaactaagccatggtggttccctctggggagaggggagatattaactgggaatggcacgggaaacatttttgggtgagcaaaatgttctgtatcttgatctgagtggtgctcacatggctgtatatgtatgtaaaattttgttgaactatacacttaaaa

SEQ ID NO: 199974 - DNA, 545 bp, Homo sapiens
aaagttagaatggtttaagaatgtctgaaattctacaaatacttttcttcatcagcagtaagtgtcacttgcatctttctttcccttcgtatctcaaatggtgacagccacaaatgacagagctctggggtcagtcaaggcaaacagcttgctggagtgttggaaaggaccctgttgagaggagcccaaatggccgccttagagggcgtgggaagaactgcaaaagttgattcagctagtaatgctgtcaagacagctctgtgtctgatggagtcaggggcatgctatggtaaacagagtcagctgttgagaggatgccttgaagggtgcccagcccctggtttggtgcttacatccgatggtggtgggagcacctgttctcttgttatacagttgagacctgatggtgcaagggtcagggctggctgcagcaataatttactagatgagcaaggatgcaataatctccttggagaaggacatttgcatatgacatgtggacatgcctctcccatctttcatggtgggtggggctacaaactctg

SEQ ID NO: 199975 - DNA, 421 bp, Homo sapiens
tccgctccttttcttttccttgcagttgatttggttgaatatttttttcatatgccagcactggctggttgatatcttttaacatgttcctgtaacccttttatttcttgtaaactaatatttagatacagatattgccctgcattttgtaaagttctgcacaaagtctgcaaatggaaatagggataatttcagcctccactgtgggtgactcagctttgcgtctgccgcccttgccctctgtctcccctccccatacaaaagacttttttggctgggtacggtggctcaggttagggtcattcctgggcttgtggagaaacagaactgtgttctgatgatccccacccctcccaggggaaagttctaatcttgccttggctttgggggcctctctcatgacctgccttccatctcttgc

SEQ ID NO: 199976 - DNA, 364 bp, Homo sapiens
aattgtttcggtaactggggagctgctgtccagcgcacgcctctatgaaggcttaatgttctgtctcccgcagagtcttctttggtctgagagccacttgtttcttacatccttgtgctaatctcaccatctgctcctacataccccaggcatttgccacatgctggtcctctctttcctgacaggcgggccatctctccagcttctgtgaggacagttcaaattatggaggagggggcaggtgcagggcagcagtgctgaggggagtaccatgcagttgggggagcagggactcatttttctttgtagctcagattcctaagcctgtgactttgagtatcggtgtcttccttgcaatgtttca

SEQ ID NO: 199977 - DNA, 336 bp, Homo sapiens
tggtaaaagatgaggataaaccaaggatgtgcccgaggcaatggctggttagggttttggtgaattttatttttggcggttaggctagctgttgtcttgccatgtagactatgtaagtggataggatgttggagaggtgacgtaggggaagagagcagaatgcgcatgtttgagaggctgaagagttctgagaaaaaaggaaaagaggacaaaagagagggaagaaagatgtggcatttgtgacagggaatggaattcgggggaaagagaaagatgactacagaggagtttaacattctttatcatgtgctgtgcaatataaaccactctcctctc

SEQ ID NO: 199978 - DNA, 398 bp, Homo sapiens
ggctgagcaagactcatctgaaagaaaaaaaaattggcaagacaactatatggttaagaatttaagaacttccagtatgaccacacccaataactgtattagattgttaatggattattgtgttataggtgacatagttaactgtaaagtaacctgactcagtatagttactggtaccacagtgaggtgaataaaacaggatttttcagaagttagcctgaatttcactgtacttttaaatttaacctccattaactaagcatcttttctttgtggtagggtctaccttctgcttccctggaaaggatgaacttacatcatttgacaagacctgttttcaagttatttgttgtttgtttgcttgtttttgtagcctaaaataaaaatttcaaatacaa

SEQ ID NO: 199979 - DNA, 413 bp, Homo sapiens
atgggggcacttccttctaattcacagaagaagctatatgggccccagactgcccatcctgctaaaactggcaaaggccttttcccagcctgagcagtagtgattcagccaactgcagaagtggtatttggagctcacccttaaaacataaagcaagttatgttcagactatatacaggcaatgagaaaatatgatgaaatatgactgcgtatgaatagccccagacttctagggcctttgagtgtgtctgtcttgggcaacatcttctccttttagatttcaggctcagtttactgtcaggaaaattaagttgctgagagcgtctcagaattttggcttaaaagagaatatacacctggaacaaagacttgaggggtgctcctattaaaaaaaacaaacagtgtgtgagctt

SEQ ID NO: 199980 - DNA, 352 bp, Homo sapiens
cgattccatgtgatgattccattcaattctattcaatgatgtttccacttgattccattcgaacatgattgcctttgattccattcaatgattccatacggttccatttgatgatgattccattcgagtgcattagatgattccattcgagtccattcgatgattccattcgattccaattcgatgactccatttgatcccattcgatgatttcctttgattccctttgatgatcattccatttgattcaattcggtgatttcatttgattccattcagtgatgtttccattcaactcctttcgatgatgattccattcgactccattcgattatgatttcattcaattcca

SEQ ID NO: 199981 - DNA, 858 bp, Homo sapiens
agccattttaaattggatattgctactcgagggtcaaggcatcctaaggaatctctatcttcttacttcaggtccaatttcctgagctgactcaacattatcagcgtctctaccttgtgcctagtccttcattgacatgtctttcattaagaagcaagcgcaacataattatactcacatatatgcttcacctaaagtctgtttcttctgcaacacctctagaatggtcaaggagaaggtactttttgcttctctggtgtatttttcagttatgtctgtttttaacagcattatagatgtgccccaatttttaccttacacttcccttcttattatcctctaacaccataccgaaattacaattgatctaaaactttcaaaaccaaaatgctcaagataggataaagattttcttttctagagggtggtccacatcattaaacagagctgaatggcaaggcatcttgaatgatgaacaactgaatgtgccatactttatatataaagaaaacaaaaaacctgacctctattttaaaataaagattaagagaggcataataaataacatacaggtgagatcagaatcctaccttagtggctgggtgtggtggctcacacctataatcccaacactgggaggcggaggcaggcggatcacaaggtcaggagttcaagagcagcctggccaacatggtgaaacctcatctctactgaaagtacaaaaattaggcgggcgtggtggcaggcacctgtaatcccagctactcgggaggctgaagcaggagaatcacttgaacccgggaagtggaggttgcagcgagccgagattgtgccactcctctccagcctgggcgacag

SEQ ID NO: 199982 - DNA, 303 bp, Homo sapiens
catgcgtaaagttgctcatttaatcctcacaacaacccaggaagtagacactgttgtaatctccattttacagaagggaaaactgagaccctgagaggtttcccatctaataaacggcagatctaggatttgaacccagagcagtctagttgaatctgcctcctaactggtctctctgcttccactccagtctctctgcccttccattcgcctcccatctctactaaacatacaaaaattagctgggtgtgagccgggcgcggtggtgcatctctgtaatcccagctactcgggaggctgagg

SEQ ID NO: 199983 - DNA, 522 bp, Homo sapiens
ttttattgttttttatgtattttgtcttttttgtgtgtccaagcctatctgggaaatctgatctctgttcttttaccttgactaaaagtgaaagctctatactttcttgaatgggagagaaataggtggccttatacttgtcttggcagacagacaaataatgcacagcctctctaaataatgcacagtctctactaaaaatacaaaaaaaaattttttttaattacctaggcatggtagtatgtgcctgtagtcctagcttcttgggaggccgacgcgggcgggatcacttgaggtcaggagtttgagaccagcctggacaacatggcaaaacccgtctctactaaaaatacaaaaattagctgggcatggtggtgggtgcctgtagtcctagctacacaggaggctgagataggagaatcgcttgaacccgggaagcggaggtcacagggagccgagatcgcaccattgtactccagcctgggcaacagagcgagagtctcaaaaaacaacaacaaaaat

SEQ ID NO: 199984 - DNA, 429 bp, Homo sapiens
gttactgtacagtctgatagtcagacgttgagcagtggaggggactcgaggcatctgaggaaaaggaaacgtagatgaaaatctttcagattgaatggagaagttactgagatagaaaatactggaaagggccaggcgcggtggctcacatctgtaatcccagcactttgggaggccgaggagggtggactgcttgagcccaggagttcgagactagcttgggcaacatggcaaaaccccatctctaatctccacaaaaaatacaaatattagccaggcacggtggtatgcactggtagtctcagctatttgggaagctgaggtaggaggatcacttgagcccgggaggtcgagattgcagtgagcaaagattgtgccagtgcactctagtctggatgacagagtgagaccctgtctaaaaaaaaaaaa

SEQ ID NO: 199985 - DNA, 711 bp, Homo sapiens
ctactaaaaaatacaaaaattagccgggcgtggtggcgcacgcctgtaatcccagctactcgggaggctgaggcaggagagtcacttgaactccagagacggaggttacagtgagccgagatcacagccattgcgctccagcctggaaacagtgagacttcgtctcaaaaaaaaaaaaacatgcttgtctgctggttcttccttcactgtaacagaaatatctagggcttttttttttttcattgttgttcttcctttatctcttatgaggctttccaaaaaagattttgttctaggaatggaataaactgtagggcgtttaaggcttcagaggtaattttgggcaacctggagttgcaggtaatcacaggctggggctggaattgaaaatgcagtctcacccataatttgagcctcttttgtcgcattatggggctgtgccttggacaggcagcagacgcagatggagatggaaccctgactactgagagagctttgcttttaacatagtccttttctgaattaccaaggccaattgggaagaaaggacttgccgatctttccagctctccatggtagccatagaatttaggaagatttacagcagaacgtgggcatctagggatttctttcttccttttcttttttttaaattttaaattcagaagggaatcttgggctcttgagtgttattctgtggttagggattgc

SEQ ID NO: 199986 - DNA, 521 bp, Homo sapiens
caatttaaaaacagtcatgtagaataatgatgctattatttataatgctcatttgattctcacaatcttgttaagtggacaaagcaaatatcaccatcctgtttgctgaataatgaaactgagtctctgggaagctaactggtaggtctagaacccgtccagttatctttcctgtgattcctttacctttatcatcatcatcgtggtaagcattacattagacttagctatgtgccagacgttgttttagtattttacctgtattaactcatttaatcctcttaatagaggattttttgagtttgttctattactattacccaattttccaaaaaactgagacacacagaggttaagtaatttgtccagttatagagcttagtgaatggtggagccagaattcaaacacaggtagtttggctctcaatatagtctgtgctcttaactaattcactatatttgtctctcaaatatccaaatcacatttctatgaaagttgtgtattaaaagttaatagattt

SEQ ID NO: 199987 - DNA, 1113 bp, Homo sapiens
ctcccaaagtgctgggattacagatgtgagccaccgcacccaggctgccatcctttttaaggttgaagaatcttccattgtctggagagaccacatcttgtcatccgttcttctgttcatggacacttggttccttcccccttttggctattgtgagtaatgctgatatgaacatgggtgcacaaatatctctttgaatctagagaatatattttatctttgccagtaagtgtacccaaagggaagggaaatcatctttgcctggggtgttctgattgtgcctacatgtggcaggcgccctccaagtgagagcagagaaaaggatgaaaagaggaatgaaaagaagaatgaaggttggttgggagggttggggtgggggaggtgaatacacactattgagtgctccctagaagcatccccttatggaatggaatgatttttacatgggcagcccgaaaagcagaggcatctcctagaatttcatccaggtaacacccctccaaatacactcaaacagaagcatgctaggacatgaggaattacaacaaggctatatatacacacacacacacacacacacacacacacacacatatgcatatatatacacatatacatacatatatacatatatggacatgtatatacacacatatacatatatatacgcacacacacatatatatggtctggggtgtggtatatatggtaaggggtggcgtgtcgagagaggattggctcttgtgccaggctggagtgaaatgctgagatcgcggataacacaaacctcagcctcacagggtaccacgagaattctccgagactcagcctccgcgagtaacggagactaccaggtgtccgcaacacgcgtggctcatcggtctcgcggagacagggtccacacaggccaggcgggacaacaccccaacctagatgacccccccgggcaccacaggcggggcataaggagacacactggggcaaacaggaacgcaagccagcctggctgcgtacatctagggccccaaagaaggtcggggtggtgcccacaggaataggagcagcaacaccggtggcaaagactatccaagccaagtgcgccgcgccacacag

SEQ ID NO: 199988 - DNA, 325 bp, Homo sapiens
cccccctcactggataggagctaagtatagggttccaaaagcatgtggcaggtactggtttttagtccgcaggtagctgggacatgcctctccttttccaccctacagaacatccttcagttgctaaatacagggaacttgtggagatatttaggcttcagcgagaagaaaagttaggtagcagtgagttccacattacttcatcaggccaccacaatactgaccgtatttataacctgcctcttctcttaacacttgctgtatttgcagctgggagaaaataccagaaggagagatgattgttgagaggggccctgcctgtgag

SEQ ID NO: 199989 - DNA, 499 bp, Homo sapiens
tatacgtccacacagagttcaagaaaactgagaatagactcacataatcctgaacataggtcaattttgaattccagatggcaagaataaagagaatgaggcagacagtaatggctaagtgatttccagaattgaagaaaggcccaagttctccagctgaagatgttcactgagtcctaaataggatcattaaatagaaatgcacacctgggcccaatgttggacaacaaaaaggcaaacaaagcatttttaaagcaaacacagaggaaatacaaattactacaataaagagagaggggaggaaggaagaataggaagagaaagaagaagaaatttaagaggaggaggaagaagagaagaaggaagaggaggaggaggaagaaaaggaagaggaggaggaaaaagaggaggaggcagaggaggagaaggcggaggaggaagaggaggaggaagagggagcagaggaagaggcagaggaagaggaggaggacccggcgga

SEQ ID NO: 199990 - DNA, 397 bp, Homo sapiens
tataagggtaacactaacctcataaaattaattagaaagtgtttcccctcttctataaaagagattttattgaattggtgttaattctttaataatttggtagaattctctagagaaaccatctggcctgaaggtttccttttttgaatatttttaaattattaatttcattttcttaattataaagcaattcagattatctgttacatattgggaaatgtggcagtttgtgttttttgagaacttggttcatttcacctaagctttaaaagttatgtgtgtagagttttcatggtagtttcttatagccctgcaggggctattaagtctgcaggggctacagtggcatccctcattcattcttgagattgataattgagtcattcctatttttttg

SEQ ID NO: 199991 - DNA, 799 bp, Homo sapiens
gttggagttccacttccctttgtttagacctcagatctaaatgtcctcctgagcaagaggagaggtggggagggaggcagaggggcagggagggaggagcagatggctttgctgaaatcagagaggaggctcaaagtgccagaaaggtctcagattagacgcagggagtcagttacctcgtggctgattccttggggcaggggaggaggcagaaaagagtggcatatttattgtacagcaagagacagaaattagaaagtcagaaaatagatttctccagactttggggtgtaacagaatgggcaggtgtggggaagggaccagaaatgcccagtgacccacttgatgtttctggaggagaaagcctggagcagaacaggggcaggagcaaagccaggggcagagcaggacctagggaccctcttcttccttctgtggctccacagagcatggggtggacacaccaaaggggtggtggagctcagatgaagctatggcgtcaagagccctgggtctgttatgaccctgtgctaactagttgtgcaaccttcagcaggggaaccctttttctgtgacactggtccctccattccttatgcatggagataatgcctcatttgcgcacagggtctcattgcacacaaatgagaccgtgcaagtgaagggctttgaaaagcaatactgctggggctagaagggacttcagagacccttgatgacagagtatttggctcaactaaagaggaaactgaggtctagagaggggaggtgacagggagccaaaggcagtcaggcccag

SEQ ID NO: 199992 - DNA, 517 bp, Homo sapiens
atgattagataaataatgtagcttctaactaggtattttcctttggaagaattggacatttaagcagaggcatgaaggcagtgtgagggcaaggcacgtgaacacctggaaagcagtcacttggtccccaggctctgaggcggcggcatgcttggcatgtggaagaaatagcaagaaaaactgggggactggagccaagtgaatgagggggaggaggtgtgagggtacatgctcctgagaaatgcatctgtgctttctgtgttgtcaaaatctgatttctaagcctgcaaggtcaaaggctagaccttggacactggtaaattcaccaaagcaataaatcctgtcctatgagacctcttggaagatggtcaacctttgccatgtaggacccttcccggatatcaggtggacaggcaggcttctgaatgtatgcccctcattacctcttggtagccttatgtcacagttaattgaatattgtcatattgtattattcataatacattgttattaaagt

SEQ ID NO: 199993 - DNA, 620 bp, Homo sapiens
gatttacaggttgtttactttcctacagttactggtttgggtaattaatgccacataaaacataatggaggccatcattaccagtgagaaaggagggctggatgccaactgtctggtaataacggtagatgcagaaagcacaatcctgaactcatcgtgcccagcacacacggctgaccttgtctcttgcacatgtgcaatactaggcaagtgtctgttgacacagagcgctcacacagaagaagatggtatgcttcagggaaaaggctttgccagcaacacaccctaatcctgagcctgatggactatcacctgcatgaccttgggcagggcatttgaccttctttttgcagctgcttatgaatgccacaggctaggcatcatgtctggcgtaagatgaatccaagtaaacacttggaagatagttactgggggctccttagagaaaggactgtttacagagctggggcaggcagaatacaagatgagacttaagcatctgtagtgccaaaaggtgaggaaatgctcaaaaaagaatgaagccatgtcagagcaacacaagcaccaacccaaaggagctctcgatggccacagctgaacaatgtaaacaacacaataaa

SEQ ID NO: 199994 - DNA, 395 bp, Homo sapiens
ccccattgaacacacaagattatcagatgatagctctgaaaggtaatgccttaggagcagggaccaggggctttaccaacattgaacctgaccttgattcagcttagtcactgatttggtaaaggtgatctgcccctacttgatctgcctaacagagaaaacagtaaattctctctgagggaagatagcatcatctggagccttttaaattatttatacacaattggatggcattcattgaaaactttctaggaaatataagagatgaggccatatgactgaaaacctagaaggaaaaaaacagacaataggaaaaaacccatgggtgatccgaatatataagttagcagacaatgcatttctaacaactatatattcagataatagaggaaaga

SEQ ID NO: 199995 - DNA, 185 bp, Homo sapiens
ttatgttggaagtgttgtaaagggttggaaacagtgctccatctccagcctcgtaaacagaaaatgtcaccacgtggtgagcactggcatccaatgggcctcaccctgtgcttttcagcgcattagtacaaaatgtcatgtctcactgtcctggagcagtgactttcaacatacctgaggacacg

SEQ ID NO: 199996 - DNA, 278 bp, Homo sapiens
tacagaaagagatcaatcacttcttggccttttggctaagatcaaatgtagaaagaaatcagtttggggagtatgtatccctgagaaggtggtaaattctgatgggactatggaagttcagaataccaaactgaactgggaggatagctgtgaagaaaaaagtcatattaagggagacagtgcctcaagattctaaaaggaaagagaacccaagagaagttgagactggaattaatggactaggggtataagggagattttggaaaactgagttaaga

SEQ ID NO: 199997 - DNA, 354 bp, Homo sapiens
gctgggactacaggcacacaccaccatgcctggctaatttttgtattttttgtagatgcagtctcgccatgcatgttgcccaggctggtctcgaactcctggcatcaagtgatcctcactcctcggactcccaaagtgctgggattacgggcatgagccacggcaccgggccaacaacctttgaaacatatataatcatttacttgccttctacggatgtggaaacgggcacagagaggttaagcaacctctccaatgtcccacagccagtgcaaggttgggccaaatttgaacacagggcagtgccgtgagaagcccttggtctgaactacacttagactcctcttctttggt

SEQ ID NO: 199998 - DNA, 363 bp, Homo sapiens
tcagctctgctaagccagggttctaaagctgctactctcccccatgacaccctagatccccatttcaaacccagctcgccaatcagccttccaaactccttagattctcaactaatcaccctctgcagaagcacagcagaccaccagctctgtcttcttcagaagtgtaaagacacactgtccacacgggacttggctctggccaccactcatgaagatccatggcagagcatccgcgcagacccttggggcctggcctcatttctcaactcctcccatccactcacacttctactccttgttagtactactcttataagcaaactcacaagaggtctgggtttcggttctgatcatttggct

SEQ ID NO: 199999 - DNA, 309 bp, Homo sapiens
aagaaggagctttggcaaaaagaaatgaaagaactttatcatcagaagcccaacagttttgcagtattgaagagctgttcaagagaggtagggacttcctctcttgaggactgggtttcacgctaagcaagtgagtgaggacttcaaacgctgagattcagatttttgtattagtaattcatggtatagtcccagttactcgggaggctgaagcccgagaatctcttgatcccgggagaagtatgttacagtgagccgagattgcaccactgaactccagcctgggtgacaaagagagactccatttca

SEQ ID NO: 200000 - DNA, 509 bp, Homo sapiens
ttcaagcaaaggatgaaggagagaaacatgtcaagaagggtctcattggggaatacgagtgttgtcttgtagtccatgaaaaaacaggcagttactaagccgagaattacctgaaacaattactctggcagcagtgaagaggatgaagggaagtgggagagactggaggaagggtagactgagagctgacagtatccagagaggagatgaagggcagtgacagaatgacatttatgactaggtagagggtggggacatttataaaatggccctgtggtttctagcttggtagagtggggaaatggtgagtcattagtcagtatgagaaataaacacagagagatggaacgaacaaaggaaagcaagagaaataagtttgtttgtatacaaggtccttctgagtcatgtgaagtagatggtatggattggatagggtgcttgttagaaaagtggagaatggcatgagagatttgggagcgtgtgagtaaaaccatgaggacataatccag

SEQ ID NO: 200001 - DNA, 370 bp, Homo sapiens
tctcatagttactgagtcagaatcttagaagtgaagtgggactaggaatagcatttgaaaaactccccaggttactttaagcacaatgccaatgagaacaactgtcttgggtttttctgtcacccagtgacagaatctgtcagatgcttggagaaaactcttgctagtagatctggaaaacatagaatgaacataaagcatgcatcagagaaaggacagtcatgccatgccagagataaactatttgacaaaattacagacacaaaataatacatgaagttagtgagaaatatcccttagaacacagtacctaagtaacaattaaaactatttatcacagcttttcttttttccagagtgagttggtgaa

SEQ ID NO: 200002 - DNA, 557 bp, Homo sapiens
tacgagaccactgttgtacatgtggtctgtcatcgactgagacgtcatggggcacgtgaccatatcacatgttttagaatcaagattagactctaaactttccaacaaccctattgtcctgttacttgtttcagggctcaaaacattgttgaggctgtggcatgttttgtgctatataatctgctcctattccctgagatttctcttgtgaaaaactgtccatggctttgttcttgggcatgctgagccacaatgtggaactttcccataatttactatgccagtcactgcagcccttctgagaggctggagagaactctgtttctttttctgttgttttttttttctactgatattttgttaaaaatgtaggtagactttcccatcttaaactgatagcaaaaagaagaggcaaataacagaaggaactatcaaccactgttgttgtttccattcatgcttattctttatgaaatgtttctgtgcatggagggaaaaaggctctgagaatacagctagaacccaccgtgcccacggagacactggctgtttcctgg

SEQ ID NO: 200003 - DNA, 235 bp, Homo sapiens
ttgccaaggtgtgccccacacagtgaggggtggggaaggagtgggtgttggccagatgtgggccctgagttttgaaagtatagccggcagtttggcatggtgtggtgggaggtaaaggcccatacccactatgctggtcacaattaatgaggggcgtgtgtgtaggaccctagagatttctcctgagatccagcccaatagcattccaggttaggactctcctttgggggtaggg

SEQ ID NO: 200004 - DNA, 294 bp, Homo sapiens
agactgatcttctgaactcaagggatccacgtaccttggcctcaccaagtgctgggattacaggtgtgagccactgcccctggtctcagatttgtatttttaaaaatttactatgcccccagagggggatggatcaaaggagagctagcttgcaggcagggaaatggttaaagatgttagtggtgtaaatttgggtaaatgctgtgtgactgggaagtagcagaagtgagggggatttaaaattgtttaagacttgatgattcagcctgggcaacatggcaaaaccccatctct

SEQ ID NO: 200005 - DNA, 458 bp, Homo sapiens
agcatgtttgtttctctctgcctgttcctctagaatttgaaaactaactgtaattgtgtctctgtactacgtgacactcccattggatgcatcctccaatctggaaagagttaatttcctaaaccttaaactggttggcttagtattgggctcaggggaagggaacccaacagtcatgaaactggagcctctgatgattgtcccttctgctgggaacccttagataggcctccgagggagatctgactgccgtttccccaggacagcgccacctatcaacaggaaacagtgacaacagtgaatagcagaaggaagaataatacaatttttaaaaaggagactctagagatgtcacaaaaaaggatataagtacaagagtgagttttctctgcaaaatgtgtgtgaaacttaacagtcacattaattatgtcacatatattatgcaaatacaatttaaa

SEQ ID NO: 200006 - DNA, 294 bp, Homo sapiens
ttttgtatatagtctatagatggtaagattaactaaaaaagtcagtactacgtcccagcactttgggaggccgaggcgggtggatcacgaggtcaggagatcaagaccatcctggccaatgtggtgaaaccccgtctctactaaaaaatacaaaatttagctgggcatggtggtgggtgcctgtaatcccagctacttgggaggctgaggcagaataattgcttgaactcgggaagcagaggttgcagtgagccgagatcgcaccactgcactccagagtaagactctgtcaca

SEQ ID NO: 200007 - DNA, 141 bp, Homo sapiens
acgagtggaaacgcggcatttaatattattcggaaaatgtaatgcaaactcatgtacttggaacagcacttcacgatataattctactactttcgacaaaacacataatttcagcaccttttccactattataaagagaag

SEQ ID NO: 200008 - DNA, 283 bp, Homo sapiens
taaggatgagtgtgatgatggtggcagagatggaaaggactgaacaggaagtgaactgaacacctccaatgaaagccatgtttattattgattaacaaaatcatggaaggattcttgaaattttcgtttaaaatcaaaagagcttgtgttgacctataaaatgtatttatttatttagagatgtagtctcgctctgttgccaggatggactgcagtggcacgatctcggctcactgccgcctccgcctcccgggttcaagcaattctcctgcctcctcctccc

SEQ ID NO: 200009 - DNA, 376 bp, Homo sapiens
tttaatcaacacatacattattctgttctgtatgtaatattgttcttgaatattaagcagccagtgattcagtaccatctggcacttcctggttaagcacagctctgatacagtaagaatgtgtcaagagtccaggaaagcagtttccaatgaggacaatgcaacagagtgaatcagacaggctaggtaggagtgggagaaaagacacactcttccttcacccaggatgaatgtccatgcggactataaagatgcactttctgagtgctatggggggatttttgtttttgttttttatccctcagtaatgatgcaaagtgtgggagagtacatcgggcttagatgacaaaacatccacgactcacacagaccaaac

SEQ ID NO: 200010 - DNA, 405 bp, Homo sapiens
gagatggggtcttgctctgtcacccaggctggagtgcagcagcataatctcggctcactgcaacctctgcctcccaggttcaagcagttctcctgcctcagcctcctgagtagctgggactacaggagcgcaccaccacacccagctaatttttgtatttttagtagaaacggggtttcaccatgtcgcccacctcagcctcccaaagtgctgagattactggtgtgagccaccgcgcctggctggaatgctcattttttacaagcagcaaaacattcgaacaggagaggagcagatgaagtgactgacttctccctctccttccagaacctgcattgtcccagctctttgtcccaactgtgcacgttagtataaccaggggagctctaaagctctcctctcttc

SEQ ID NO: 200011 - DNA, 659 bp, Homo sapiens
ggcaaccaaagcaaaaatggacaaatgggactgcatcaagctaaaaagctcctgaacagcaaaggaaacaatcaacgaagtgaagagatagcttacagaatgggagaaagtatttgtaaactacccatatgacaagggattaataaccagaatatataaggagcccaaacaactcaacaggaaaaaggtctgcatagacatttctcaaaagaagaaatacaaatggtcaacaggtatatggaaaaatgctcagcattactaatcataagggaaatacaaatgagatatcatctcaccccagtaaaaatggcttttatccaaaagacaggcaatcataaatgctgacaaggatatagagaaaggggtagaatgtcttcaaagctcttctcagcctttcattcatctttctgtgtgcttacttttaagtaagcacatacatttttgacttctcctgtcacttccattgtgatcattctaaaataatgtatctctagtcctgacttgtggtccagtactattgctagaaaaagtttctatttttagtgcatcaaaattgttataacacaagctgatctttctctactcccaaatgagcaacatttcccaatgactttagctttagtacctcctcttgcccaatctcccaatgaaattataaa

SEQ ID NO: 200012 - DNA, 433 bp, Homo sapiens
ccaagttgggcctttgctccttgtgatttcagtgacacattttgtccccacttatctccctcagctttgtagtgagtagttaattgtctaaatgtttgtttcatctacttcataagtttctttacaagaggaacctggggccgggcgtggtggctcacacctgtaatcccagcactttgggaggccgaggcagatggatcacttgaagtcaggagtgtgagaccagcctggccaacatggtgaaaccctgtctctactaaaaatacaaaaattagacggatgtggtggcgggcgcctgtaatcccagctacttgggaggctgaggcacacgaactgcttgaacccgggaggcagaagttgcagtgagccgagatcataccacagagattgtgccactgcactgagattgggtgacagagcaagactgcatctc

SEQ ID NO: 200013 - DNA, 438 bp, Homo sapiens
ttcatcagccaatgctgaatgcattagagcttttaacttagaaaatggaggaaaaatattccagaataagataatataagaaaccttttacttgggccgtcttgtcatgagaatgccatggtggtgggtgtgggcatagcttgaagggggatatagaagaaattagagtcttacagaactgtggcttataattgtggaagttttcctctttgagttcagctctgactgagacattgcctaactcccaaggcatgctgacttccacatagtcaatgacattgtgtgggtgtgtgattttgaaagctagtgttttcctcagtatctacaaagatgatggctactaaaacagaaaaagtgacctagaataaagaacatcgcagatagcatgtagggccatcataggggccctctaaatttggagataaaaatcagtgactg

SEQ ID NO: 200014 - DNA, 441 bp, Homo sapiens
attttagtaaacagatgagagaataatccagtcagaattcccagaatccacagttctgtttcttccaatggtagaaaaggcaatgcagcatcataaagctagaaagaacttctgtcccgtggcatcaaacagctctgcttcacttaaattgtccccataaatatactattcttctatttaacgtctctgagcagaaaaccctgcattccatcaattaccatacatacaggctcttactaccctaatcaccaagaactctcaatgtctaagaacattttaactctaacatgggttttgttctttcccttgcctcaatttgagcttgaaatagagaatatatctgtcaccgcagaaacatactatcattatgcctccaaagcagctaacaaatattagcttgaatgaacaaccaaataaatgttcacagtcatatacttggat

SEQ ID NO: 200015 - DNA, 282 bp, Homo sapiens
ctgctcccatcagtgtagttcaagtccagagcactcattgtctagtttgacaggttcagcatgcttgaataagctgcatcaaggatttacagtcatgctttaacccaggattgtgttcagtggctgagagcagtgtggcagggtttagagccatggtggtttgtagggtgatatttggatcatataagaggatggcctggtatctgcccactcaccccacagtgagccagtagcctcccgtttgttctagcagagtcagcacctgatggggtacaaacaagg

SEQ ID NO: 200016 - DNA, 1149 bp, Homo sapiens
gtttggacagctgaacgaataagcagcgatgtgatagagctccaggctgttcacaaagagataaggataaccgagatgttgccagttgaggttatcgaggacaccaaagagaaaagaaccatcatccatcaggctatcaaatctctgtttccaggattagagacaaaaacagaggatagggaggggaagaaatacattgtagcctaccacgcagctgggaaaaaggctttggcaaatccaagaaaacattcttggccaaaatctaggggaagttactgccacttcgtactatataaggaaaacaaagacaccatggatgctattaatgtactctccaaatacttaagagtcaagccaaatatattctcctacatgggaaccaaagataaaagggctataacagttcaagaaattgctgttctcaaaataactgcacaaagacttgcccacctgaataagtgcttgatgaactttaagctagggaatttcagctatcaaaaaaacccactgaaattgggagagcttcaaggaaaccacttcactgtgtgttctcagaaatataacaggaactgatgaccaagtacagcaagctatgaactctctcaaggagattggctttattaactactatggaatgccaacgatttggaaccacaggtgtctctacgtatcaaggttcggcagaggtatactacacaattcctgtgcagaagtcatgggttcatatatgaaccgcgggtctggagattaccagagaataacaggtaaagggtattacataggtaacaaaagtatgtgtggcataacagggtaacgacgacaaggagaaaagaaataggagggaaaacacagattccagaggaaccggatcaatggagagcaaggacacataattagaggaagaaaagagcaaaaaaaacaatactaaagaagggaagaaagcacaaagacagataagaaagagacaccaaccgaaaaagaaaagatgagagtacgaaacgaacgccaaattagacaagagaggacgagaaagacgaacaaatatcgagacaagaaaaaagatgtaggcatagacagcaagaaagtagatacgaagaataagaaaatgtcatgtttccttctctatcctctctcctctcttctatgagg

SEQ ID NO: 200017 - DNA, 621 bp, Homo sapiens
aaggggtttgcagtgggccaaaatcataccactacattccagcctgggcaacagaacgagactgtctcaaaaacaaaacgaacaaaaatcaaaagctctactccataaatcagttgcatggaaaaacatttggaggctccttgatcaaagatttgatgtgtgtgaaagtgttctgaagacagtggagtgctgtgcaattgcacaccactgtgttctggtgacagtaacacccaatgttgagaaataactctctcacctcttaaaattcgagttaaaaagtgtataattgaacagttcttagaatattcagagctgtggaactatcaccactatctaattttagaacattttgtcaacccctgaaaaaaatcccaaattcattaaccaatcagtcaccatttcctcctctccctaacccaaagcaactgctgatctgctttttttcctctatggattagcctgtttcagacatttcatgcaagtggaatgatacaagatcggtcttttggcttttttcacttagcatcatgttttcaaggctcatccatcttgtagcatgaattggtacctttcccattgtttgaatgataccgccattgtatggatgtgccatgttttgtt

SEQ ID NO: 200018 - DNA, 333 bp, Homo sapiens
tcatctgtattcagcagtagtatacacctgtaatctctctgttttcatctcattctccttcccctgtggctagaatcatgctcagaaataaaaggaaattaatgctttccctggattctgttattttttaaattgctctccaatggttctttttccagagttctctaaaggaaggctattcccttgctattcagagctgtgtccaaggaccagcaccaaaaatcacctgagtactcatgagaaatgcagactcccatacctgctgaatcagaatgtgcaccttccagaagctcttcaactcattcatgacaatttgaatgccctgttctacac

SEQ ID NO: 200019 - DNA, 446 bp, Homo sapiens
caaaaaaaaaaaaaagaaaaatgtaattgtgttttaaaatctctcgtgaattagttatgtcttaatgtcattagtcacattttcatataaacagactgtacaatatggtttactgagaaaaggataatgactcaaaatgctgagaattatgttgtagcatcagttcagacactgatgaaccatgtactcctgggcaagacatttcccttctctgtgcctcacttttcccttgtctgaaataaagagttgtgttagttgagtgattttcagttttcagattggtctctgtaagatggtctgaggaggactaagcagaggcaggagaggggaagctcgggcagcagaacagtgattttctctccctaattcttcccacgcttcacaacagagaagcttgacatttatgtgctttatgtttcttggggtttcactcaagatttgcttgg

SEQ ID NO: 200020 - DNA, 422 bp, Homo sapiens
tagtccagggcacaagctcaccaagaggctgagaccttggacttcggagactcagaggggtgaagatgggcgggagacgggataaaaaactatatattgtgtacaatatgaactatttgggtgatgggtacactaaaatctcagacttcatgagtatataattcatccatgtaaccaaaaaccacttgtacccaaaaggctattgaaattttaaaaaataaacttttaaaaaaaactacgacctaatcagaggactatacaatgcttcccttctccccaccccttaccacggcaccactaaaggcctatttgctgcagttctttttacttagtacattatgtccttctttcagcaagaaattacaaggcaaaaaaaaaaccctagtttgaagaaattgaccaagtatgagaatcagagtcag

SEQ ID NO: 200021 - DNA, 423 bp, Homo sapiens
gcctatattggaactgtggagcacgggtgtgtcggcacaggcatatcagctaaatagacagaggcgtgtgtgttaggaacaatcaagccatccttctttctaattcctctaaagcaaggggaactcttaggatatccagtttataatgaaaatttaaaaaaaaactaaaaaaagcataatcgcaaaaatgacacaaatgtcaaaaaaatgtagacataaaagactggaaagataataacggccgagctgtcatagaaatcacagctaaaatgcgcaagttagcccatgttccagttcagacttgctccagataatccccggattccttgtttagaggatggttctcaacctttaaaagattcaaaaccctcattggtgggtttttgtttattcttggaatctgcctcatcctcccttgacttt

SEQ ID NO: 200022 - DNA, 123 bp, Homo sapiens
gcatcgttcctcagctctttttctttcagtgcctgcttcttattctctggaagatcttcttccactggctctggcttggtctcctttttgggaaggggtggtggtgaaggtgttgcaacctgt

SEQ ID NO: 200023 - DNA, 476 bp, Homo sapiens
agcattcaggatcagaatccatgccctatagaagactgactcttagtcaatgtgggaccttcagggaagtcctctactattcctttaactagttccagatattctatggttgaaaaatggtaaaatatggctaaaagaattattgccttctaaaagcaaaactggcatgatttgaggagaaaaagcatttgatttggaatgcagatatttgagttttagtatatgtcttaccattagctctgtgaacagaggcaagttactgtgcattttggtgtcctgaactgtaagacagggttaatatttttcttataggtttgctgtgagattaaaatgaaacattatgcatgaaaacacttttaaaatgagaaaatgctatataaaattaaggtttgatcgctattaagacaggagtttttcttacctgagacttcttcaaagaatatggcccttaactaagaataaactgcttgaaatta

SEQ ID NO: 200024 - DNA, 540 bp, Homo sapiens
tagcaaaaccccgtctttacaaaaaatacgaaaattaaccgggcatggtggcacacacctgtagtcccagctactgagaaggctgaaatgggagaattgcttgaactgaagaggcggaggttacagtgagccgagactgcaccaccacactccagcctgggtgacagtgagaaccctgtctcaaaaacaaaacaaaacaaagaatccctgttgcctcaccatacttcatgcatcctacccctatagcacttctgatgaaattgcgtgccgtagatttagcaatttagagaattctagcttgtttgtatgggtttaaagtttgcatgacatttatgtttctattgttggtctaaagttagcccagagattagcagggagcagcaggctcagagagttgtcttccttctttacttggtactgcatctctaggcttggtagctcttcagtaaatactctcaaaaaatacttatttttaagaagacatttatgtgatatttataaacaaattaatcctcagtggttagaatatgcagtgaaata

SEQ ID NO: 200025 - DNA, 324 bp, Homo sapiens
aaccaccatcaccaacttttatatagcatgtactgtgtgtcaggggctgttctaagtgttttccatttctaacttacaatccttcccaaaacccaggagggaggcattatgagccccattttgcagatgagaaaattgggactcagagatgctacgaagtggaggggccaaaccatagcttaggatttctcactccccttccagcgcttcctttggtggcccatcctccccctttcattcaacagatattaatggtgactggtgctgtgttgctaatgcttgggagtggggatggcaggaagcagggttgggcggtcctggcca

SEQ ID NO: 200026 - DNA, 336 bp, Homo sapiens
aaagtggtggggttgcagtggggagggaaagaaagggctagaacaaggcctagagtacaggaaaagctcaattatgacagctatcagttttaaaaaaataaggtgcgaaaaggctctgtgtagcgaaatgatctccagatattacatgaaaaaggtgaggtgtaacaggaggcagtgataagaatttacatttttattataattgcataaataaacattaaatgcataaagaagaaactaataattatttctaagaggtaggacaggggacagaatagtctcattcatgcttgcatataccactgtaacacaataaacacacctttacacaaagga

SEQ ID NO: 200027 - DNA, 493 bp, Homo sapiens
tcttacatttttctgcaatttggatcatattatagactaaagtacagtatctcctcttggttgttttgttgttattgttttatttagtgagtccccaaaatatcttaagtgccaaagggagagagaccaccctagcatttttttttataattatgcaagattggtgtgtttgtgcctctggtacatttaaaactaaatggaggctgggtgcggtggctcacacctgtaatcccagcactttgggaggccaaggcaggcggatcacctgaggtcaggagttcaagaccagcctgcccgacatggcgaagccctgtctctactaaaaaaatacaaaaattagctgggcatggtggcatacacctgtaatcccagctacttgggaggctgaggcagaaaaatcacttgaacctgggaggtggaggttgcagtgagccaagatcacgccattgtactccagcctgggcaacagagtgagactctgaatcaaaaaaag

SEQ ID NO: 200028 - DNA, 364 bp, Homo sapiens
ttctatttcaatgactcctatgaacattaacttgagaagattgtaattggaagcaattctttcagtgctacagaatttgtgtgtgtgtgtgaattactatttttttcttctgaatacaataagagcctgagattttaggctggaaaatggcttcaaaatcacagatctctagcagccattcctctcctagccctgagaattttctccagtgttcctaggcttgtccttacactgaacaaaggcatttctcagttcattctttaaagatactatttagcaaatggtccagagcattcaattgctactttgagatgctcgaaatgcaaaattgatgtggggaatgcacagctggttctcagaaggc

SEQ ID NO: 200029 - DNA, 374 bp, Homo sapiens
acatgggaggcagaggttgcagtgagccgagattgtaccactgcactccagtctgggcaacaaagtgagactccatctcgggaaaaaaaaaaaggatccaatctgaagaaaataaagaaaaaagagaacagaaactcaatgtcttatggaacaatatcaaaaggtttaaatatatgaataactgatagaagaggaggaaagagagaaaaggataggagcaatgtttttaaaaataatgacagaagagtttagcaatttaattaaactgaaaaaaaacaaaatttggggccgggcgcagtggctcacgcctgtaatacagcactttgggaggccaaagtgggcaggtcacctgaggtcaggagttcgagaccagc

SEQ ID NO: 200030 - DNA, 162 bp, Homo sapiens
cagaccctctgtgacaataacccttcctgcagacaaaagcagaggagtcatgaggcacaacacgcctcattccaggtgaactggagacaatgtgttccccagcagcggcagcggcttctgatagttggcgctgactgtatgcacgtggggtatggggctggg

SEQ ID NO: 200031 - DNA, 337 bp, Homo sapiens
gtgagcctaccggacttcctggtgtgttgacaggaggagatgagggacgtcagaaaatcagtgcattgtggagtcacttttctgataaagggcacatcagactgcaaatggtccagacagccagattcaggacactgatgagtttctggggtcaccatagcatccctggagtcagctgctctgcagcctgaaggagggctgacagtgtggagtcactgctattacttaatgaaattatatagaaattctataatgattatgtaattgcataatgaaaactctccatatcagagttcagaatatctcccaatttccagtacagaatattatccataac

SEQ ID NO: 200032 - DNA, 582 bp, Homo sapiens
ctcaggtctgcccaggcctcattcccacgcacccatcagacttccttcagtcactgcccaagtgactgtccacacaccatccaggaacggcgttctgagtgtggaagcagaagtcggtgtggatgaattttgctggaggcctccagaatctgaactgatgctccaactattattgctcccaagtgtgtgactgcgagagcccatgtcagtgtgtgtgtgtgtgtgtgtgtgtgcgcgctgaggtggagggagggtgatctggattccaaattgcagtttccaacattaaagttatgctgtaatgcttctgattcataaaatgagctcatagtctcacagtatcctgaatgttgcttcgaatgcaaatgcaggtcccttagtaagaattggggatttcagcctactccaccctagccccggcccagcatgcaatttttcagtcccagagtcaagagttctcatgtgcagaaagaagcaattcctccaacagaatgcggccactggctctgcttcctgccacctgcagtgagtcagggaagaatggagccccaggctgcttctgtactgatgcatgcacgcctg

SEQ ID NO: 200033 - DNA, 697 bp, Homo sapiens
tgaaaccggtccctggtgccaaaaaggttggggacactgctgtagaggaatacctgaggctgggtaattctaaagaaaaaaggtttatttggctcacaattctataggctgtagtagaagcatggcacaggcatctgtttctggtgagggcttcagggagcttccaattatggcagaaggcaaaggtggagcaggtgtgtcacatggtgagagacgagaaggagaaagagagaaagagaaaaggaggcgctgggctctttaataatcagatctgaggagagctaatagaatgagaactcactcattaccttcaggacagcaacaagccgttcatgagggatccacccccgtgacccagacacctcccactaggcctcacctacaacactgggaatcaaattttaacatgagatttgcaggggacaaatatccgaactacatcaacatcttatatttcttttgttaaattatttcctaaatattttattttttgatactgttataaatggaattgttttcttaattttttttggaattttcattgcaagtgtgtagaaatacaattgatttttacacattgatcttgcatcctatagccttgttggtttcatttatagttttttggtggattccgtaggactttctatatgaaagattatgtcatctgcaaatagagatagttttacttcctttccaa

SEQ ID NO: 200034 - DNA, 590 bp, Homo sapiens
ctattatatttcccaagttgacctttattaactcctggtttcaagcaacgctcccaccttggcctcccaaagtgctaggattacaggtgtgagccacggtgcccagctgcatggctctgcattaggcctcaccatgtcatgagataagatactgcccagcattggggaaatgaggagacactgacctcagtgttggactcagaggctacaaactcacccaagaatgggtcacagcagagagagccaagtcactggaaagatggaaaagctgtggtgcttcagtcccagactaatggctttaatgtggctaaagagcatctcaaccagcctcaaggcttcaatccagaaaggaagaggccaagctggggacaggccacccaaaccctgcctggggcaggggccgctctactcctccacctccaccctagcccccttgggtatctgatcacatctgcaggtggccgtcggagctggggaagggtgtggcagctatcacagctcagggacgtcaacctgttaaggccatctgtccacttcctgtccctagtgctgagtcaccaaaaaagcaaaacccccagcaccgaaaactt

SEQ ID NO: 200035 - DNA, 320 bp, Homo sapiens
gcaatgtctggagacatttttggttgtcacaactgaagggggtgttattggcctctagtgggcagagggcagagatgctgctgaacaccctagaaggcacaggacaccccgcagtgaagacctggatagctctaaatgtttgcgatgctgaggttgagaagcccagctctaaagagacgttccctgcagggccttctgtggttatcccatgtaaattttacttctccttccccactcccgtatttcatgtcctcattttctgctttactgcttttctgctgtacacttaatgctatctaataaatgacatatttcattca

SEQ ID NO: 200036 - DNA, 521 bp, Homo sapiens
atcccactagagattttgctttaatactgacttgttttaaaataagagcaagagaactgacatttattgaccacctgctgtgtgccagctgccgccttagtcaccaccaagacctctctcatggcggtgtcaagagaattatctgcactcttggtgcctagttatggtctctggagcatgtggggctgttttttatcactcccattttttagaataggaaatcaagattcagggaagttggccgggtgcggtggctcatgcctgtaatcccagcactttggaaggctgaggcgggtgtgtcacctggggtcaggagttcaagaactgcctggccaacatggcgaaaccctgtctctactaaaaatataaaaattaaccgggcatggtggcacgtgcctgtagtcccagctatttgggaggctgaggcaggagaatctcttgaacccaggaggcggaggttgcagtgagccaagaaggcgccactgcactccagcctgggcaacagagtgggacttcatctc

SEQ ID NO: 200037 - DNA, 362 bp, Homo sapiens
aaaagaatgtgtactctgcagctttgggatgaaatgttatgtatgtatctattaggtccatttggtctgattaggtccatttggtacagattaagtctgatgttcattgattttctctctggaagatctgtccaacgctgaaaatgggatgttgaagttaccagctattattatattggggtctgtctctctttttagctgtaacaatatttgctttatgtatctgggtgctccaacactggtatatggatccagtgttgggtccatatacaattacaattgttacatcttcttgctgaattgccccctttatcattatatagtgaccttctttgtctcttcttatagtttttgtcttgaaa

SEQ ID NO: 200038 - DNA, 401 bp, Homo sapiens
ccaggaaaaattgagctacacagtcaataccactatatcctaataaagttactagatatgagagataaagggagaatccctttgggcagacaggcaaaaagaccaagtcaataataggaaaaaattcaatctggcttcatataacatttaatatcagaagacatttgtataatacctgtaagatactcaaaaaaaagaaagtgtgaggcaacatggcaaaactccatctctactaaaaatacaaaaattagctgggtgtggtggtgcatgcctgtaatcccagctaattgggaggctgaggcaggacaattgcttgaacccaggaggcggaggttgcagtgagctgagaacgcaccactgcactccagcctgggaaacagagtgagactccatctcaaaaa

SEQ ID NO: 200039 - DNA, 412 bp, Homo sapiens
taagaagattcagaattcaatactgcctttaattactattttattaattacagcagcaacatatccttaaagataatatttacaaaaatgtgaaaagttattaagtatacaatatttgaagcacaaacgagatttctttacatggtaagttcctgaggagtctataacccatgaattgggaatcactggtctatgttctttaaacaaaaataaactcttcctgatgtttaaggggtttccagaagtggtccttcaatgatgtgaccatatagatgctattcaatcttagggatttcagaaggccagaatgttagacattcttttttttctttttctttttctttttttttttgagatggagtttcgctcttcttgcccaggatggcatgcaatggcacgatcttggttaccg

SEQ ID NO: 200040 - DNA, 131 bp, Homo sapiens
cagcttgtaagtctgaatctctcttctgagctccagatccacatatcagctgcttattcgagttctctgtagactcctcaaatgcaacccgtccaatactgaactccttctgtgtacccccatctctccac

SEQ ID NO: 200041 - DNA, 355 bp, Homo sapiens
agccttggggtttgtcctgtgcccgtcattgaccgggatcgcttccttttctgtaaatcaaggtcatgggcgcagctgacttgccaaggctgttgccagctctgcgctgccttctgaggaacttgatggtttgcttcctgtgaaaacttgatggtttgctttaaggtatcactagataccttggggtgatatctaatcacaccaatgaagagattgggtatttgtttttcccaaatccctaagtgctgatttctccagggcagtacacaacctcttatctttagcactcactttgacttgcataagtttcctggcttggatgataagctatatggtcaccctgcttattcagaga

SEQ ID NO: 200042 - DNA, 500 bp, Homo sapiens
tacattgtactatttgtatataacccctgcacatcctcccatactctttaaatcatctttagattacttatcatacccaacaccatgtaaatgctatgtgaatagttgtcatactgcatcatttagggaataatgataaggaaaaaaagtttgtagatgttcattcagtacagatgcattttttaaaaaatattctcaatccactgtcagttgaatccatggatgcaaaaccatggatacagggggttgactgtacattaactttgtaactttttactctctgattaaatgctttcattactgagacttcctaaaataaattcctgaaaatgtaaaatggttattttaagtttgagagaagcaatgtaattaagaataatttaaagtctatttctgggactggaagttattggatgtgatccttaatccctaataagcaactatgtatcttcaaatattgaaaattgaaaataataataaagatcttgaaaatgtctaaa

SEQ ID NO: 200043 - DNA, 371 bp, Homo sapiens
tgccagaacatgctgtcattgaccaatttcccatctcccctgggaagagaaacattctttaaggaggacattttgaaatggctccatagtgtgactcactggaggacaatgccaaaggctttggggcaaaaataaacaaaagttaaaaaaaaaaaaaaaaagtagattctatcaaaaaaggtttggagtgatgttgccctggaaaatggaagctgatcttggactggatgaagggtggattttgtttgctccaatgaggtagtttcttcagggtaaaattccactagaatgtgtcttccttgttagggcagaggaaaaggaatctctaatcagtcacggttcccttaaattagctcctctgtccccgaaaa

SEQ ID NO: 200044 - DNA, 438 bp, Homo sapiens
ccattctttttttgaagttcttaatattattaacatacagctggctttgtttttcattatcccattttgcggaggattggttgtgaatttaagggtgtcacctcaaacaggagggtaagttgcactttaagtgatgtaaaatagtaagaagctaaaaaccttaaaaaatgtttagttctcggccgggcgtcgtggctcatgcctgtaattccagcactttgggaggctggggtgggcggatcacttgaggtcatgagttcgagctcagcctggccaagaaattaaaaaattagctgggccttgtggtgggcgcctgtgatctcagctactggggaggctgaggtaggagaatcgcttgaacccgggaggcagaggttgcagtgagccgagatcgtgccactgcactccagcctgggcgaccgatcaagactccatctt

SEQ ID NO: 200045 - DNA, 457 bp, Homo sapiens
ttatgagaaataataagtatttttctatttacatgagaatttaatctcaaaacaggaatcagaaacatattaagtccagggcataaaacctaaaccactgctcatatttattctttctaaatagagcaaagtgtaaaatcttctccataaaatgcacattgtgcttatgaaaaggccaaagtcttagtgagaatcattggtattccatagaagagtgaattaaacacagccaagggaagacccaagtctcatacttctcttgtatattccagagttccaggggaattccaggtgatagaggtgatctcccatactgttaaagcaaggttgcagacacttgggaattttggtcccagtactctaggaggtcacacctctgtcctgcaaaatactacaggaatgtatactcttcctatgactcattctggtcattcttccagcatcacaaaaaccaaaa

SEQ ID NO: 200046 - DNA, 468 bp, Homo sapiens
agcaaagaacaaaataagcaggagaaaagaaataataaaaattagagcataaattaatgaaacaaacaaggaaatcaacagagaaaccagaagctggttatctgaaataaatcaataaaattgatgaacttctagccaggttaactaagaaaaagagacaaggtacaaatcaccaataccagtataccaacaatgaatcattgccccttgatatataaaaacatagtactactaacattagcaccaaaaaatggaacactttggtattccaaagtattcatttaagatctgtatgaggaaaactacaaaactctgatgaaataaatcaaataggctgggcgtggtgactcatgcctgtaatcccagcactttcggagtctgaggcgggcaggtcacctgaagtcaagagttggaaaccagcctggccaacatgatgaaacgccgtctctactaaatatacaaaaatta

SEQ ID NO: 200047 - DNA, 427 bp, Homo sapiens
tgacattgctttagctgtgagaacagctgtcaatcttcagtagcccctaagacttttctctagctcctacttaataacagtttcttagaataataacttttaaaaagctacacctgcctgcggatttagtaagaagacatagcctcaaatctccaaatgctcaaagcttattctgagcgtgtggtggctagatgttgataagaggaaaagaaaggaactgtttacttggttgggaatacttatttgggggtaacaacaatgtggacaatggcacaaagttattagaaggaaaattaaaccctctgtctgggcgtggtggctcacgtctgtaagcccaacactttgggaggccgaggtgggcggatcacttgaggccacgagttcgaggccagcctagccaacatggcaaaatcccatgcctactaaa

SEQ ID NO: 200048 - DNA, 456 bp, Homo sapiens
acagaccccatttctaaaaaggaaaagaataacaacacttcacttctgtggtcttcctccctaaaacacgtatcctcagtctaatcatgggaattacatcaaacaaaacccagttgagggatactctacaaaaggcctgaccagtactcctcaaaactcagaaacaagcaaagtctgaaaacccccctagcccagaggagggtagggggacctgataactaaatgtaaagtgggatcctggaacgcaaaaagactagataaaaactaagggaatccatttaaaatatgaagcttagttagagtaatgtaccaagactgattccttcgttgtggcaaatgtaccatactaatataaattaactataggggaaaaggatgtgtgacacacgggagcattctgtactatctttacacttctctgtaaatgttaaactattctaaaattcacagttgact

SEQ ID NO: 200049 - DNA, 202 bp, Homo sapiens
aaaatctggtgtatgtttaattaagaattcccatatccctgttataattatagaatgcacagcctctgttaacacacagtatgcagaacacgtttcctaaagcaagttctaaatgggggtagactcagaggtccctgaaggcagttaccaatcagctgactgctaaatggaataacctcagaattgcattagaggctttgat

SEQ ID NO: 200050 - DNA, 669 bp, Homo sapiens
ggcaagaaaatggaagttactgctagaagagaattgttattaacaaggatatattgaatgtctgcttatatacagtattatattaggaaagtgtaggaatcattaatactgctttataaatagttctgttgttggctggtccatgtgcagtagtgtttacaactctttgatcacaatcaattacagttcttctccactcccactgcttcacttgactatccttaaaaaaatagctctgatgaatttatgaaaggtatgttagtaattttttaaattatgcttacttttataataaatatatcagtgtacttattttcagtgggatgagattgttgaagtaaacatgttaacccagttgcataaactacaatctgaaagtactatgtaaatattcaaaagaaagatactgaataaagagatagcttttaacctgcagaaagaaaataaaggtagtacctttcattatcctgaaagccatggatagaattgacatctttaaaaatgtttgtcaatcttatatgacaaatattgctcacagcactctcctgagagtctaccaatctatgtgattctgtgctgcaggctgtgtgaggttagtgcggggtgctttgaaaaggcttcattaaaacattcttggaaactatcattctcagcaaactatcacaagaa

SEQ ID NO: 200051 - DNA, 600 bp, Homo sapiens
  misc_feature (464)..(464): n is a, c, g, or t
  misc_feature (496)..(496): n is a, c, g, or t
ttaatttatctttgtaatttattcttctgtctttcaaagaggctatgcagcacatgccttgctgagagaaagcaagtgcttctaccctagctggtttagtatcatcacactgtacaggaataggcaagggctgtttccagttgcaggcaggaagaataaacactgattagcaagccctctcgacaattagtggcaaaagaaagatgatggctgaggagccccaatgcccagcctgggacctcacctatttcacaaactgcctctcatgctaacactaccaagctttaagtaggaaaagaaatgaccatcaactgggttagattagtccccttttgaacagattttgttccccgaaggaaaaatatccaaaaaggaagggaaggagtcaagattatcccaaatggaaatttctagagcaaagcttctaaaatcgcccttctctagaaaacatttttattctacanaggggttaagaagctttttaacttttactggntttacttttcggtattaaggaattaaacagaacagatacgtaactgttggcattttcttgtgtctgttaaggggctccaaggctctaattcacagggacatgtg

SEQ ID NO: 200052 - DNA, 584 bp, Homo sapiens
tatattaatgcactttcattagtgctgaattactaacaaagtacataataacaatttggtagaaaaaaagtacatttatcctgaagtgaaggaggaaagtaagaaaaaaaaactaataaaatggttagcctttcaattgcaactgtatttggtaaaaagagaaaatacatataacattatgtattaatcttactagaggttccaatccttttactgtccccagcacaatcagatagcattatcaggtacaatgtcatcactatctttaatccaaagaggaagtcatatttgccaaggcagaactgcattttgaaagaaaccctttaaatgccagctaacctaagcttgtaggcaggacaagctccacagagattgcttcaaactcttaatttatatggtcatatttgtaaataaagaaatatgtgcagggtttaaaaacacaccacttaatattggtgaaaaggccacattgattatatattattcttagtcataaatctatgttcactacgcaaatttttaaaaatctgacatcttaagagagagaatatgctgtagtgagtgacttgacaatcagccaactt

SEQ ID NO: 200053 - DNA, 439 bp, Homo sapiens
aaatgaaggaggaggatgtccttaagttccttgcagcaggaacccacttaggtggcaccaatcttgacttccagatggaacagtacatctataaaaggaaaagtaatgtcatcactatctttaatccaaagaggaagtcatatttgccaaggcagaactgcattttgaaagaaaccctttaaatgccagctaacctaagcttgtaggcaggacaagctccacagagattgcttcaaactcttaatttatatggtcatatttgtaaataaagaaatatgtgcagggtttaaaaacacaccacttaatattggtgaaaaggccacattgattatatattattcttagtcataaatctatgttcactacgcaaatttttaaaaatctgacatcttaagagagagaatatgctgtagtgagtgacttgacaatcagccaactt

SEQ ID NO: 200054 - DNA, 854 bp, Homo sapiens
aggcacccaccaccacgtccagctaattttttgtatctttagtagaaacagggtttcaccgtgttagccaggatggtcttgatctcctgaccttgtgatcttcccacctcagcttcccaaagtgctgggattacaggtgtgagccaccgtgcgcggcccccttgtgctgcagtttttaacacattgcagctaacacttactgagcactgaccctgtgtcaggcgttgtgcagaactgataatcctcacagccactctatgagatgtgcactattagacttatttctgatggagaaactgaggcttagagaggttaattcacttgtagaagctcacacgattagtgagcgaaggagcagagagtcaatctccacgctggctttaaaaaaaacacagatagagtcatctcattctcctactttgtaaacattattttttttaacctcacaatattgggattctccaccctggcttcatggtagaatcatttggggtctttttacaaaataccattgcctagaatccacccacgactacttaaaaagaacaataataacaacgctaatgacagccaacattacattgggcttactctgtgctcaatataagtgttactatgtgccaaggctttctttaaccatatatggacacacacatgcacacatatattctctctaatatatataacactaacatatacatatattcagatgagggtgtctctcaatatattctcatttaatcctcaaaataaaccttggatgaagataccattgagtatcaccaatttacaaatggggaaggtgagactcagaagatttaaaagcctagctcatatgattcaagagacatgca

SEQ ID NO: 200055 - DNA, 280 bp, Homo sapiens
gggattacagccatgagccaccacacccagcctggtggagtaggttttctaaaggtttaaaagcatgagggtgtttgtgtaaccctctttctttagcttctaatttgatcaaaggtggaaccagctgctgtcacagcttaccacaagcttaggggcttgaaacaacacgcatttatcttaccatgctggagtcagttgtccaaaatgggtgtcactgggccaaaatcaaggtgtcgctgctacagtacgaggaacccccacagcgtggaggcttccctct

SEQ ID NO: 200056 - DNA, 133 bp, Homo sapiens
taaggaaagtacacctccctcgtctcccctctgctggctgccaaggccacaatttgaacccccaacaaaccctcatgaccagagttgttgcattggtggcattggtggtttactctcagactcccgtgctgcg

SEQ ID NO: 200057 - DNA, 243 bp, Homo sapiens
taatggggttcatttcatttgaatagtaaataaagaggttaaagttcacctctatagattcacttaagaattctgaagcagaaacgttaaagggaaaatattcaattgtactctgtccatctaatagcctacaaagtagaacgggaatctcatagatttataattataatggtgattgaaaaataacagcatgcatttttattgtgtgtgtctctgagtatccagacgactgggcaccgcaga

SEQ ID NO: 200058 - DNA, 352 bp, Homo sapiens
ccatcacagccggccctgtactagattctttattgcaaaattgtttataatagactggaaacaacctaagtgtccaacagtaggggattgcctaaggaggtgcattgttaggatgatacagcatgaggctgcaagaaagatggaaaaagctctttaagctttaaggtatagagaagaatttccaggcccagtatgatggctcatacctgtaaccccagaactgggaggctaaggtgggagaattgcttgaagccaggagttcgagaccagcctgggcaacaaagtgagatcctgtctttgcacaagatttaaaaattaactgggcaaggtggtgtgtgcctgtagtcctagc

SEQ ID NO: 200059 - DNA, 369 bp, Homo sapiens
aagttgcaagatattaagaagcaggaagtagctttttaacaacctcagttttgtatttccacaacaaacacctaattttttgaacagtattttctttgctacattttcactattgggtatctagtttggtcttgctgtatctgaaaactggccaatttatatccgtatcacaatgaacaaatatattccttcatgtatgacagtttcagcatacagaatgcaacctcagctaccaattatagctgcaaatgagcaatagtgtggaatgagacagcctgctggctttgttagtattctgtctcctttgggatcccatggggaaaggggaggctctgatgaagagaagcccttggctcatggtttattgtg

SEQ ID NO: 200060 - DNA, 267 bp, Homo sapiens
atgctgacagcaggtgagaaactcacatatcttgcatcagtcatagaatcagggtttctttctttttaccactggagacagttgagcacattctcattgtcacatctcgttgaaatatttcataaatctgcagggtaatcatttaaaatttaagttatttccttctaaaaagtgttcagagaggatgtgaaactgagcaaaatgcaaaggctttttttccccacatcataaatgtgcttcctcagcaactaatacctttcaaatgat

SEQ ID NO: 200061 - DNA, 181 bp, Homo sapiens
tggaattgatacaggttggatatgggtccctatccaaatctcatgttgattatagaatatttgcatattaataattcataacacccaatcttgtctgtggctcctcagattatagtctttcaagcaacttcttttgattagactaaagactgattaaatcatggagactgggagaaaggca

SEQ ID NO: 200062 - DNA, 180 bp, Homo sapiens
aatctgggccaaaactcgccaataaggaaactaaattttattgtcctctatacccttccttaagttaaacaaaaaaatacaacaaaacaaagaaaaaaaatccaaggtgctccagcgtgagtgtgatcgctgccccactgacctgtggagtagcattgctgggcaggctaccatgtgacg

SEQ ID NO: 200063 - DNA, 315 bp, Homo sapiens
gcttggtcttgaactcattaacatctgacttctagtaggcactggattcaggcactggagggatggccttgggcacactgtgtacacatgaaagaggatttgtggggaagaaaaaagcagaaaagagaaagatgctatcaagaactatgggtggggatgcagggcagaattggttaaggaactggtttgtgctacagatacaggctcaggcagcgctatgttctgacttattcctgtgttcatacaatcagaagagattatgatcaggtagtccaagaaacctgggttggtgaaaaaaacaggttcccgatagag

SEQ ID NO: 200064 - DNA, 443 bp, Homo sapiens
tcctctgttcagtccacttacatttctaaaaattaagaaaaagtctagagaagattaaaatgacacatcttctaaccttttactcctacttctgaaatctatgtggttcactagtacttccatttgctactaaatcaacttaagtcttaccactaagacgatgctacacactattccttttccttactcttaactactcaaggtgagcctttttctacacatgcttatagcagtttattgtcagtacttgtcagctacaaaatggtaaaaaattttaaaaaacaaaaaataaaatcgaaaaatgagccaggtgtggtggcacgcacctgtatttccagctactcaggaggctgaggccagaggatcgcttgtgattgaggctgcaggtgagctgtaattgggccactgcactacagcctgggtgacagagaccccatctccag

SEQ ID NO: 200065 - DNA, 407 bp, Homo sapiens
ctggctcctggttcttcctcctgctctggaggagccagtggggaagacagtcaggtagccactgctgccctccctgccccagtgggtgctttgagccccagggggatgggccttaagtgttcaggcatcgctgtgaggctttcctgggacctttccccatgtcctcattggcaggtggaggagtgttggtatgcagatcctggctgcccctttgccatgcacagcccaatggggagggagtggtgctggtatatatcccggtacacaccccagtgaagatactgggcccggcccctgtagtgcccaggggctaaagcaatagaggggattgctgccccagccacagcgccccagccttcccagggcctgcacatttgtatgtccacaagattgtgcaaccatcactg

SEQ ID NO: 200066 - DNA, 382 bp, Homo sapiens
agtacattgcttttatgttgactacaaataagtgaacaaatgctaaaataaagaaaaaacaaatgaaaacccccaaaatgcccccacaaattatagtctctactacatgcgaggtatggttctaagtactttaaatgacagtatttataatcctcaccataacctcatgagaaagaaagtaatgttattaccattttgcacaaagggaaactgaggcagggtgtattcgcctgcccaagtggcatcggatttgaactcagatctgaactcaggcagcctggctctacgggctattcctttaacctttgatatatactgactcaccaataggaacaattcacctggtaaaatgaaacataatgaacgtattctatttaaaact

SEQ ID NO: 200067 - DNA, 149 bp, Homo sapiens
agtctccctgactgtcccctaaatgcccctaacacaccacagggcgacctcaaaggcaaatcttaccacagcgctgttctatttccagtttttcaacagctccttagcaaaactgggctctttcatgtttggggaaggtggcttgtcca

SEQ ID NO: 200068 - DNA, 169 bp, Homo sapiens
tttcttagtatctattttttattggtgtgttaaagtacaaaataagtaaatcaaatcctaccacaaaccagaaaaattaatggaatcattggaaatcaagtattcaattggagcttaataatccatcagcttctgaaaacactaagcagtgaagaagcagctcatggat

SEQ ID NO: 200069 - DNA, 227 bp, Homo sapiens
ggatgactgcaggaggcccctcagggctctccctgtttctttcctcatctcctggtgggtgctctgtgccccaccaagcactcagaatcgtgtcagaaggtctgagtagagccactccacttacaccctccaccagggtcccattgtgcttagagtaaaaggcaaactcagacttcctcacctacagtccaacccttcctcaggtccctccagtctccctggccacc

SEQ ID NO: 200070 - DNA, 565 bp, Homo sapiens
gtaagcttataggttaaagtaatctattattatgtaatcatggagactgtcaaacattcgtctttaaaaaaagaccattattccagcagcattcctgaattgttttcatcttagccttaccagaataatctaagaaattaagaaggataattatttcaaatcagacatatcagtttaatgttggttatttatgaaagtgacttcatgttttcagtgtatcattatcattgctgcctccaaaaggaaatggcagcagttctcctaataataaactgtaagtatttattacttcaggtatacaagcccttttaggttgcagaaaataagtggaagtaatgttttttattttaactactgttttgattgatcgtacctaaagagttgcgtttgtccttgtaagccagtgagaaattggtaagacttgcttaaaagtttcatggagccccttttagttggaaacaatattttcatcaatattccaaagaacaaagcattcttcttaattttgcttataaaaataattacttctgatgcatattaaaattcaagctattccactttcctg

SEQ ID NO: 200071 - DNA, 555 bp, Homo sapiens
cacttgataggtactcaataaatatctgttgaatgaatgaaatagaccctaaaataatctaaataactttttatactatataacaatggccaatcctcacataatcataattttgatttaagaaatcttattttaggccaggtactgtggctcatgtctgtaattccagcactttgggaggccaaggcgggcagatcacttgaggccaggagtttgagacctgggcaacatggcaaaaccccatctctactaaaaatacaaaaaaaaaaaaaaattagccaggtgtggtggcacacacatgtagtctcagctactcaggaggctgaggcatgagaatcacttgagcctggaaggcagaggttggaggttcacgggaaggaagagatcaaaatcagactgaaaaaggagagtcagaaaaggcttcacagaagtttgatgaatggataagattttgagggccagtggtagggataataacatttaaggtgggaagaacattatgaataaaggcaaaggcagaaaagtcctgggcttatttgaggtaatccgtgaggg

SEQ ID NO: 200072 - DNA, 469 bp, Homo sapiens
tggttttggcttaaaagggcaggatatcttgaaggggcttacagatcgtaggtacatttaaagattttctattttaattggttaaggaagagaagctttgtttaaaagtctggggtcagtaactggctcaggggtatgactccctccaagtccactaggaagaaatttagaacaaagaacgcaggtcagggttttgtacttaattttttcttatctgaggtttatgtgccagtgaatctgttgggtgagggtcttcagagtaggggtccaagtttctgaaagacaactcagggacatacgttaagatgttatctttagtttttatagggaaaccaaacacctctggattctaacttttttggctattgttttaggttactgcctttttaataagttacttactttttaggactaggtagcaaaagaaaaaagacaagatggtaactttcccatggtggatttaagcaaa

SEQ ID NO: 200073 - DNA, 124 bp, Homo sapiens
tgttaggattataggtgtgagccacggcacccagctgactatagatttttgaccgaaatcttacctttgcagaattgatcactccctatatgtggctcccactgcctccaatccaggctacaat

SEQ ID NO: 200074 - DNA, 112 bp, Homo sapiens
ggaaaacatggtgcagaccacacacaactgttggaatgtcctccactgatgtaaagattatatgattatattccccagacccttgcatttaaatacaccctactcttcttgc

SEQ ID NO: 200075 - DNA, 629 bp, Homo sapiens
tgaggatttaaatgattttaaatgagttgttgttgcctaggaatgtgctggggattgactgagatctttctgtcctccatcagcagccccatggagtgagtgatgtctccccctacaaatctcctaataacaaagctttctccacagacagtagaaaggatgaaccacataagcctttatcaattacacaaagcacagcagcttcatcaatgggacaaaacccttctgtacagtttctatgtacaagatgaatagggccagctctaagaccaaggtcacatggggatgtcttgcaggtttgttttctatgttcacagcatttgaatctttttctctactcagcaccacccttcctcagccacaaccactcccaccccaaacacacacacccagaggcaccctgtgggagtccctcttaagctctccccactggctcattcgctactgatgacttgtggacccagacactttcatcactctcaaccagtcttttatgtgtgagtcagataggctcttacctttcctaaagaaatttcaggcaacagctagagaagagtgagtcctctcacttcccctttcgttgacgaaccacgagaggttgtcccttctgaccctaaagggactcctta

SEQ ID NO: 200076 - DNA, 196 bp, Homo sapiens
tttatttataactactaatgtggcctagatttttaaacagaaaatttaagttattcatacctttctttcaattaacttaaaatatgaatttaaaaatataaacaaattaaatagttcaatgaagtgcaatatttactatgttaccaaatgaagaaaaagggaatatttaaaaagataaaaaacttaagccttaata

SEQ ID NO: 200077 - DNA, 119 bp, Homo sapiens
ggattaccagcatgagccaccatgcctggcctcaaaagttacttaagtatattgtgtaaagtgagccactatagtcttataccaggaaataatcactgttaacaattgggagtaccttt

SEQ ID NO: 200078 - DNA, 133 bp, Homo sapiens
ctatttttaattttagtcattttgataagtgtgtagtgttatctcattgtgctttcaatttgcatttctctaatggttattttatttttattttgagaggcagtctcattccgttgcccaggctggagtgcag

SEQ ID NO: 200079 - DNA, 303 bp, Homo sapiens
gaaagaagggttttggaagataaatggaagacttcaagtgaatctatagttttgtttaaaaattctgaagcaaaaataagaaatactgagtttgatctcttcgaggtattaggtacctaatgttttctcagttctccattgttttttgtttgtttttgtttttttgagatggagtctcactctgttgcccaggctggagtgcagtggtgcaatatccgctcactgcaacttccgcctcccaggttcaagcgattctcctgcctcagcctcctgagtagctgggattataggcacgcaccatca

SEQ ID NO: 200080 - DNA, 244 bp, Homo sapiens
gccggagtcgcacgcctacgagactgcgcggacccgcccaaaaggaaaatggaagtagtggcgtgaggctgcgacagtgaaggttatttttctctttttaaagggccgctagacctcccgtctaaaggaagcgcccgacgggcctccgaagtacacgcccaggcccccacagcgcagccgcccgaccgcctctcttcacaccggccagagtccaccctctcccactttcccctcccctcccctc

SEQ ID NO: 200081 - DNA, 453 bp, Homo sapiens
aatacaatggaaatgccatgtaaatagttatcatgctgtattgtttttctgtttgtattatttttattgttgaatggttattttttactgctttttttttcaaatattttccatccacggtcggttgaatataaggatataaaatctgcagaggggagggcccactgtgtcaacaatgcaagtaaaaaaattcaagacagatagccaggactatagaatacagagtcagaattcaaaatgctgtcaacattctcatacaccagctgaaactgatggaatgaatctcaacggagaagagatgtaaagtcttatatttgctctccaaaaataaatcacagaaaaacagaatggaggatactcaggttggcatagactcctatgaagaagatgggaggattcagaataactagaatgaatgcacaggaagaagactgaacaggatatgttctgaaa

SEQ ID NO: 200082 - DNA, 256 bp, Homo sapiens
agaagaagtaaatgtcagaaatgaaggaaaataatagcaggtaaaggaaagaaagggaggaatcgcagaaatgagaaaaactgaaaagggaagaaagcagagaccactaattagaagtcgagcatcttggaggatgaaattatgccataattttcttcccttgtaagtgatatatatatatatatgttggattgaattttgtctattttatcttccttaaggtttgtatgacaagtgagggatcaaaagaagggag

SEQ ID NO: 200083 - DNA, 635 bp, Homo sapiens
cctgcctcagcctccccagtagctgggattgcaggcgtgtgccaccacacccagctttgtgtgtgtgtgtgtgtgtattttagtagagacggggtttcaccatgttggccaggctggtctcaaactcctgacctcggcctctactaaatgcttaataattgttatctattattatcctcatcaaagttccaactcctagtacagtgcctggcacataatagacataattcaatgtttgctgtacttttagtatgaatcaagaacatcatttctaaataatcacttgaagaaaccactttctcattgaatattgagtaattcattcacacaacctattatggagaactcactgtatgccaagcactgtagtgggtttggggaatataaaggtaaacagtatgtgttctgcccttaccaaaataatgattttgtgggggagatatatacaagtaaagcagcaattactatagcttgataagtatagggattaagcaaagggtactatcaatgtgccagcacatagctggatgtggtggtgcatgactgtaatcctagtactttgggaggctgaggcaggaggattgcttgagaccagcctgagcaacataacgagaccccccttctcccaaaaaaaa

SEQ ID NO: 200084 - DNA, 650 bp, Homo sapiens
taaccctgagttgacacagcacatgtctcagagagcacggggttgggggtaaggttataaattaacagcatctcaaggcagaagaacttttcgtagtacacaacaaaatggagtctcctatgtctacttctttctacacagacacagcaacaatctgatctctctttcttttccccacagtgtggggggtggaacacaagcttagaagtcacaaaatcagtattctgggccctacatgatgagctgtcactgagtgatgctggcattgcaactgcttctgtaaacagtggtgtgagcactgtcatgacatcctctgttgactggcactgtggacagacatactcatcaatgagctctgcctcactctgcaagatgccaatgcagcacccatggtaccaattctgacaccgatcatggccaataaaaaatctgcaagatccgaaatggaaatgataacttcctgctatgagtcagctaaacattcctgaatccaaccattctacccctggcaaactccagtatctgatgctctatcacatgtggaaacaaagtcactcacatcggtttcaacaagtacactgcttagtgaaatatgggtctttaaaaacatactggaatttgaaaaaataaaccacacactgatggtaatg

SEQ ID NO: 200085 - DNA, 421 bp, Homo sapiens
accttcaatcaacaaaagcctaaaatttttattttagaatcatgatgttggaagatctttagattgctcataccataaagctgtttctaagattggtctcgggaaggtccaagatcaggattgaagtatgaaaaatcttggccaggtgcagtggctcatgcctgtaatcccagcactttgggaggccgaggcaggtgggtcacaaggtcaggagatccagaccatcctggctaacatggtgaaagcccgtctctactaaaaatacaaaaaattagctgggtgtggtggcggacacctgtagtcccagctactcgggaggctgaggcaggagaatggcgtgaacccgggaggcagagcttgccgtgagccgagattgcaccactacattccagcttagtgacagagtgagactccatctcaa

SEQ ID NO: 200086 - DNA, 525 bp, Homo sapiens
ccagtcctactctgccagccagtaggatggggatgcaggtcccgccagcaaggactggctgaaccgtgcgacccatgcagtagggcccttgggtcagctgtccccacccactacactgatggtgaatgaggccagaagacagggggctctgcgtgaagcccaccagcccctgccacgtgatggttggaacgcgtaccttagagcttccagttccgtcttaggacattttcaaagatgagcgtcctcaggaggggcggtggagggggcatgtctggagggacctgaggcacggggagcgctcggtgcccaggccgagcagtgccacacgtgcgcacgagttatgcctgcaaacacgggttacgcctgtgagaccagtgggctccttccagccgggctgcctgaggccactgtctgtgtgttggtgcccattgtgggctccggggcgctcttcccttgtgctgacgtgagtggagttgaattgccctgaatcagattagactgaaataaactgaattgaaaggccta

SEQ ID NO: 200087 - DNA, 384 bp, Homo sapiens
atatcacatgttcttacttgtaagtgggagctaaacattgggtacacattgacataaagatgggaacgacagactctggggatgactagagtggggagagtaagggggtaaacggctgaaaaactacttcttgggtactatgctcactacttgggtggcagattgatttgtacaccaaaccttagcatttgtactccaaactttgtaacaaacctgcatgtgtaccttaattctgaaataaaagttgaagaaaaataaaattatttaaattttttttctgatacctctctccaatatttttctcagtttgtggcttatcttatgatactattatctcacagaagtctttccatttgtgtggcaaattctgcatatatttttctc

SEQ ID NO: 200088 - DNA, 350 bp, Homo sapiens
gtaatgatagcttatcaaatctgtactttaaagatggttcatcaataaatggtacttgggaatgacataaaaatgaatgctaagttatatcccaactggattaaagagttgagatttaaacaactgggctaggaaagaaccagaaaatatacataagaatttttatatcctaagggtctaagcatgacactaaaaggagaattcacaaagacaaaaattactaggtcttaaagaaaaaagctgtgagccttatactatcagattttacaacttaaaattaacccctacgagccttctagtttccaatgcagcaagaaagttgcttggaagtcatcactgtgtcttaacaa

SEQ ID NO: 200089 - DNA, 763 bp, Homo sapiens
atagttagagacatgacaaaactggcacatgtgcctgcgcaagtgtggcatggatttaatcctggggccatgtttgaaaaatggttcccagcactaggaggatttaaaactcttatagtaggagttataatagtaataaaaacatgcttactgctcccttgtttgctatgtacttcttcaaatgataaaaagcttcatcgctaccttagttcaccaaaatgcttcagcacaagtgtactatatgaatcactatcgatctgtcttacaggaagacatgagtagtgaggataaaggtgagaacttccactaatgagagaggttctcaaacggggggaaaaagggaggagaccacccctcatattgtcttatgcctagtttctgcctccaaagaaagaagaagtgaaaactgaaaggcagaaatggaatccacaggcagatagcccagcatcatgccctgggcctgctagttaaaaatccacccctgacctaactgcttgtgttatctatagatttcagacattgtatggaaaagcatcatgaaaatccctatcctgttctgttctgttctgactagtggtacatgcagcccccagtcacataccctctgcttgctcaatcaatcatgaccttttcaggcggaccccgttatagttgtaagcccttgaaagggacaggaattgctcactcagggagctcagtttttggagatgtgagtcttccaatgctgccagctgaataaagccctttccttctgcaactcggt

SEQ ID NO: 200090 - DNA, 557 bp, Homo sapiens
  misc_feature (544)..(544): n is a, c, g, or t
cctacttagcatagaggcaggcagcgtaactactcgaataggcctgtgtgttcttgcttagtgaaataatgtatgcacaatcataatgctatcagggattgagaataatttgtttaccagcgtgggtgagaaatattagcactaccatttccatagaaaccattttgcatttaaaaagttctggcatgtcaaactgtaaatttcagtatttaaaaacattctcttatgtgaatccctgtattgcaaaagatactggtcaaaggaagtgctatttgtacactttcgtcaagtcatttttgaattttcttatttaaagaaagtttgccatggcctgtcatactttgggagaagtggttgatatagacacaaaaggacctggtttgtagcaattatccattcccttggcctcaaaggaatactagtatataaaggcagaaactttctctttttcttttgagactgagtctcaccctgttgtctaggctggagtgcagtggcgtgatcttggctcactgcaaccttccgcctcccgcgttcaagtgantctcctgccttat

SEQ ID NO: 200091 - DNA, 466 bp, Homo sapiens
  misc_feature (453)..(453): n is a, c, g, or t
atacaaggatcacataagacgaatgtttttaaatacgaaatttacagttgacatgccagaactttttaaatgcaaaatggtttctatggaaatggtagtgctaatatttctcacccacgctggtaaacaaattattctcaatccctgtattgcaaaagatactggtcaaaggaagtgctatttgtacactttcgtcaagtcatttttgaattttcttatttaaagaaagtttgccatggcctgtcatactttgggagaagtggttgatatagacacaaaaggacctggtttgtagcaattatccattcccttggcctcaaaggaatactagtatataaaggcagaaactttctctttttcttttgagactgagtctcaccctgttgtctaggctggagtgcagtggcgtgatcttggctcactgcaaccttccgcctcccgcgttcaagtgantctcctgccttat

SEQ ID NO: 200092 - DNA, 494 bp, Homo sapiens
gctgaaagctcaaggctcccgaggacacctgggaaaagattcggggggccacgatggcataggcatgggagactcagccctggagtctggcagggcttgaccaagtcacttggtgaccttgaacacatgactttccctacatgacttccccttcctgggactccgtatgctctgtaaagatgggaacattcatggctgggcacggtggctcatgcctgtaatcccagcactttggtagacgaagacgggcggatcgtggtgcccacgaggtcaggagttcgagaccagcctggccaacatggtgaaaccccgtctctactaaaattgcaaaaattagctgggcgtggtagcacgcacctgtaatcccagctccttgggaagctgaggtaggagaatcgcttgaacccaggagggagaggttgcagtgagctgagatcacaccactgcactccagcctgagcgacagagccagactccatctccaaaaaacaaac

SEQ ID NO: 200093 - DNA, 634 bp, Homo sapiens
attgatagtaaatcaagcatacaggacttcaggaaagctgatagggataattctttcaattaaaggaagctatacttccatatagacttggactataaatgcaatacataaattgcaatgattatctcaatgttcttcattctttaaagttaatttatgcattttctaataaaagaaactaacatatgcaagtgacatatctcagagatagttattttgtaatttttttgcaaaaagttacacaaaagtgcacataattgcataaaatattaaccaatgccatccaagtattatatgcatttgtgcagttattatagtcaaaatgatataagggtttatgtatgaattcagtaaggtagttttctcagttagggttatgtttgtcatatttgcacctttttaaaaacatggtttcttgaaaatctccaatgtctctgaaatcagaatatcgctggggtaagcagggaaggtatatataatttttagtgttacaggtgattcttctgtacacttcctaagatcatagatttaagacttaggaaacaaagcaaactgttgctaactcttggaacatagcctagaacaacattactatttagcacatatagtaatagacacaaagataaaaccaata

SEQ ID NO: 200094 - DNA, 789 bp, Homo sapiens
aaagcgctgggattacaggcgtgagccaccacacctggctgaaatgaggaaatttttaaaagtggcaaatggattatgaacatcttattcagaaataaaggtaaaaaacagctaaaatggcaaaagcagttgggttctggggaaggtggggccaggggactttttgaagccttaatatttgctttgttaaaccatgttcttgcattattaagttgtgtcatgctaagaactctattttgtcaagccagattatgatggcttaacatgagtgaaccttccagcttctcatgagatgcaaatctgacaggaatagggactcgtgttactttatggcaggtaaatagcacccttcagatacaaaattgggttggtttcgggcgtggtggcgcatgtcgtagtctcagctactacagaggctgaggtgcaaagattgagcacaggagttccaaggccagcctggccaacctagtgagacctgacctgtctgaaacatacaaccccacccgcacccccaccaaaacagggatggtgcttcctgtcccttaaggagacaagacaccaaaggagaaagtacgtagctagtgatgagtgaattgagcattgtattactgctctcatttttgtcttaagttgtcacaactaacagggaggctgagtactctgtccactgggagctggtggttccattgagggttgtgtgtgcctgctggtttgagttcctctgtccaacatcagaattgtttgtattcagatatgcaacaagatgggacttctcagtttcacaacgta

SEQ ID NO: 200095 - DNA, 748 bp, Homo sapiens
ctggagtgcagtggtgcgatatccgctcactgcaagctccacctcctgggttcgcgccattttcctgcctcagcctcccgagtagctgggattacaggcatgcaccaccacgcccagccaattttgtatttttagtggggacggggtttcaccgtgttggccaggctgatctcaaactcttgacctcaaataatccacccacctcggcctcccaaagtgctgggattacaggtgtgagccaccatgcccagccttcattcctttttgtggttaaataatatttcattgtatggatggaccacatttggtttatccattcacccattggtagacatttgggtcgtttctaccttttggcgactgaataagctgttttgaacatttgggtacaagtatctgtttaaagacctgttttcagttctgttgggcatacacctaggagtggaattgctgggtcatacggtaactatgttgaacttcctgaggaactgccaaactattttccttaacaactgcaccattttacattctcactagcaataacgagggttccagtttctccatgtcctgattcttatatttgaagtgttaaattcttgcaaacatttttctcatgtcttggtgctcctgctttgctggtgcctgaatctgtgcgtggccaccaggttagcctggtgtaggtctcgtggttcaagattggcaacagaggaccggagaggagacaagcagctgggagcccccagaggtg

SEQ ID NO: 200096 - DNA, 478 bp, Homo sapiens
gggtttgctttttcaggccctggcctccaagaaggtccatgcatttcttccttgctggtagagaaacttggttgaattaggattttcttaaaaacagaagcaaagtgtatctaaaccctggtcacttaagaactccagagacagaacttcagtagtaaaagctgttttttataagaagggaatggacagtcggaaacaatatcctttttaggcacactgaatttgctgcatttagtataaccctaggtcagactgtgaaagcagagttgctaaaggccacattctgacctcagatcgtgggcgcgtatcactgtgcattttataaaattagctacagtgcagcctctctgtgtgtgtgcgtgtgtgtgtgtgtgcgcgcgcatgtgtgtacatgcagtgaagctaacttttaaaaaataaacagcaacatgtacccatgccatttaagattagtatcaagccaaagtctgattttaat

SEQ ID NO: 200097 - DNA, 800 bp, Homo sapiens
ccacttcccagtatccaccaccagactggtacacactgtcatgtcaaattaaattaatgcaagagctacccaatttcaccccactgacatgcacaccccaatccaactcacgcccccacagatgatcttaccaaaacacaaatcacatcaagtccccagctccgacctaaaacactctcctatgttcttatgaggaaaaccaaattcttcatgtggccagcaagaccctttgtggactggccggccaccagccaaggggtccagcctcacagtagctcttctctccccttgatcttcctcagttacttgatttcattctgttcccttctgtaaagggcctctgcacaaatggcagttctctctgctttctggaacacttttcttcctaccctatctcacattctcctactcatacttcagatatcaatcaagtgtcacttcctcaggttcctattatataagcccacaaaattctactgttctattcagagcatttacctctgcctgtaattatacataattatttgttgatgttgttgttgttgctgtcgtgtgtaaattttattagggattgtcttcctcctatactcttcactccatgataatgcagaccaggaattttttgctcattattggatctctggggtcaagaacagtgctaggtacatggctgacactgaatgaatatttgttgaataagtgaaacccaagagctagaggtcactgtcaaatacatagataaaaaatttttccactaatactgaggtaaagctggaggcaaagatattagtgaaaatcta

SEQ ID NO: 200098 - DNA, 448 bp, Homo sapiens
tgctgtgttattccatggtggaaggcaggaaggtgagggagggagagagcaagagagactggggaaggaggctgaactcatcagaggctgaactcatcattttatcaggacccactcccacaatcagtgacccactctggagacaatggcattaatccatgcatgagggcagagccctcacaacctaatcacctcttaaagatccaacctctcaacactgttgcgttgcggattaggtttacaatgcatgaactttgggggacaaattcaaatcacagtgataatacttgaaagagtaaaagaggcttgtttgttcctaaggtttctccttattaagccaagggtcaagaatgtggagcaaatgatgatttattgttttaagactgaattgtggcttaatcttggttcaaagagaatggaaaaggctgttacaatgtcagaatggtag

SEQ ID NO: 200099 - DNA, 196 bp, Homo sapiens
tcagctacactgaagatatcttaattttatttaaaaaacagtcacgttcatctgaagggagggagtaccactaggtaggatggatagataaccccatggggaagctaaacagtgaggtcgggcaccgcgactggcccagctcccacaggaaccccatctgtgcagtgggtgctccctcaggccacccaggacccgg

SEQ ID NO: 200100 - DNA, 615 bp, Homo sapiens
ctcaaggtgattaagctactaggtagtggaattctagtgggtctagatctggacttgatggctgagttcttactaatataccttgctactttggaagaggaatagagtttcaacatgtgttgggcagaatattcaaagctaaagaaatagcttgcacaaggtagggagatgggaaagtgaagtgtctgtggtgatgaactgaagagtattgaaagtggacaataagactagaaaggtaaattaaagccagattttggaggcctttcaaagctgttcacaatgtttaaactttaatctgtagatgaggggagccatcaaaggatttttcaactagggagtgacactaggtttcaggtttgcttcattagcagtatggagtatgtgtttggaatctccacaggggtcagtacagaacaggatgacactgctaggagttggttctcaatatgtttcttcatttggtatattgaaatcagtaaaagtaaaatattttggaaatctcaggtttcctgtatttcaatttttttatgatgttatttggttagaactccccaaggcattttatttcatatcatgtttctcagcccatttgatatcttccaggatttttctaca

SEQ ID NO: 200101 - DNA, 543 bp, Homo sapiens
aagtgtctgacatccagccaggctctgaccccacaaagccagatgccacattggtggtgaagaaccatcagctgattgtcaccaggggctcccagaaagactacagaaaggatgtcagcatcggcacgaaggttgtctgctggttcgtccacaacaacggagaagggctgattgatggtgtccacactgactacattgtccccaacctgttttgagtagacacaccagctcctgttgggatggatggcccggattttatggcatctggaacatgggcacagagaggggcctgtgggaggggctgggaaaataaagtccaaggtcgagaccagacagctgccagcctctacatgccttcatgagcctctgctccagggaacaggcaactgggacccacagcagctcaaaagaggggatggctagcaggaaggcaacttcttgggcctctccactgacacagctgagagacagagttggttggactagaactttagggattcaaatgtatgacagcttgggggaaaaaataaagaactgactctg

SEQ ID NO: 200102 - DNA, 539 bp, Homo sapiens
tgttgttaatttccatattgctttttgaaaggagaaataagatattgttaaggggcccaaaaatatacactaaccactgtttttttcaagaaaaaaaagccatttttttctcttagataaatattttttagctggttttaattttaatgtgcatcattgctaggtaggcaagaatgatcttgaaaaagaaagcttttgtaatattaagccaacaaagacattgcctgcaggataaatgaatagttgaacatattcactggttacatggtcaagttttatctttaacttattttaatataagatggttactatgtttcatattaagagtgtacccttttaacagtaccttataaataattcttaagcccaggtagggtgagttagaagtatctagttttacaattagaaatatgaaatgagaaatcagtgctcctttgtatgactaagctcaagcaggatttaaggcagggaggggtcaccactgattgatcttcaaatcttaccatgtctaagactgttgctgctgccatttgtctttc

SEQ ID NO: 200103 - DNA, 400 bp, Homo sapiens
tatatgattccatttatatagcattcttgaaagtgacaaaattagcggtttccgggagtcaaggacaggttgatgtgggagggaactgggtgtggctgtaataaggcaacatgagggacccttttgatgatggaaatgttctatatcttaactgtatcaatgtcaatatcctgggtataatattgtcctgtagtttggcaagatattatcattgtatagtatcttgtattatttcttacaatggatgtgaatctataattatcaaaaaatgacaatttaattaaagcatatagtaaataagtaaaaaaataaaaacagactacaaaaatggtcaaaaaagcatgtatgtggacatttaatcttttctgtatgattaaataattaaaatattctcatattt

SEQ ID NO: 200104 - DNA, 264 bp, Homo sapiens
atagcaaaagctaatttggtcgttcactagcactggtagtcaatcctattttacccatttcaaccaagctgagtgaatttctgagcatacaaatctaatgacctttccatagttaaagtgcatagaatatactatgtgaaagagtatacgtatgtgtgagatggagagaaagaaaaacagagcgagaacaaaatcaggtttatatgaaatggaattaataaaaccttgtgcataaatggcataaccaaagcacctaagtgcata

SEQ ID NO: 200105 - DNA, 523 bp, Homo sapiens
attaaacctgatttctttataaatcacccagcctcaggtgtttcttcacagcagtgtgagaacggacgagaacgccatgtttaagcggaaattatcaaggaattactgcttccgggagagaagcagtaggactgggcactggcagccactttgggggactggtgacgaggcagcgtggggctgcagggaggacacattccccagctggagcctcatgatggtcagggtgagttcgcagggccactgtcaccaaggcaaggtgagcccacaacatgcctggcagcccgggcactctcctgcatctggcaccgtccgccaacacagcagtgggacgtctgggaaggaacagaggctggagcgagagagcatggcagacctatcagtaaaccctctcagggccactctttggtccttctagaaggatccagagaaggaatgtgtgtgtgtgtgtgtgttgcagaaaaatgaagggcctccaggcacaggtgaggattaaatctacacctttatagcattaaaatct

SEQ ID NO: 200106 - DNA, 817 bp, Homo sapiens
ggtcttttctggcagattacttctattttccacaggtgtgggccccattagctctggccacctgagaaagccctcaggcaaagagtcgcaggtgaaagccagcagttagaggttcacagaaatgagtgcagaagcatcttcagttggagagccattgcctcttgctgtgaaatatttgggaatcttcagaaaccatgaagaataacctgctaaagggttttattttgtcagtcaagctggaatgcagtggcgtgaacattgcttactgcagcttcaatctcctgaggtcaaacaatcttctcacctcagcctcgcaagcagctaggactacaggcatgtgccaccacgccccactaattttttaatttttcttttgtggagacgcagtcttgttatcttgaacaggctggtcttgaactcttggagtcaagcaatccttctgcctcagactctcaaagtgctgggattacaggcatgagccaccacattcagccaggaaaagtttttgtacatttacacaaacttataggatattgtgtatatagctttgctggtttgacttcctagaatagctcccaggaacacaaagtacttaattgattagtataaaatgattatgtcatactcacatgttggttttctaaatgcacttaattttcctgattaagaactgaaaatatgctgccagggacactgtgacctggggctcattttgcataaaggtatgtgtatgctgatgggcaagccaaaggcaatgttatcgaagtgtcaactcaaacgcagactatttgactggtccgcaatggagagagtcccc

SEQ ID NO: 200107 - DNA, 953 bp, Homo sapiens
ggtcttttctggcagattacttctgtgagcaactgggtctctcagttctttgggagcaccctgggaaacagtgtggctatgacttggagctgctcaccagttccagtcattctgtggttgagagctgctccctatggatgttaattcttctctattttagattttccacaggtgtgggccccattagctctggccacctgagaaagccctcaggcaaagagtcgcaggtgaaagccagcagttagaggttcacagaaatgagtgcagaagcatcttcagttggagagccattgcctcttgctgtgaaatatttgggaatcttcagaaaccatgaagaataacctgctaaagggttttattttgtcagtcaagctggaatgcagtggcgtgaacattgcttactgcagcttcaatctcctgaggtcaaacaatcttctcacctcagcctcgcaagcagctaggactacaggcatgtgccaccacgccccactaattttttaatttttcttttgtggagacgcagtcttgttatcttgaacaggctggtcttgaactcttggagtcaagcaatccttctgcctcagactctcaaagtgctgggattacaggcatgagccaccacattcagccaggaaaagtttttgtacatttacacaaacttataggatattgtgtatatagctttgctggtttgacttcctagaatagctcccaggaacacaaagtacttaattgattagtataaaatgattatgtcatactcacatgttggttttctaaatgcacttaattttcctgattaagaactgaaaatatgctgccagggacactgtgacctggggctcattttgcataaaggtatgtgtatgctgatgggcaagccaaaggcaatgttatcgaagtgtcaactcaaacgcagactatttgactggtccgcaatggagagagtcccc

SEQ ID NO: 200108 - DNA, 1079 bp, Homo sapiens
ggtcttttctggcagattacttctgtgagcaactgggtctctcagttctttgggagcaccctgggaaacagtgtggctatgacttggagctgctcaccagttccagtcattctgtggttgagagctgctccctatggatgttaattcttctctattttagattttccacaggtgtgggccccattagctctggccacctgagaaagccctcaggcaaagagtcgcaggtgaaagccagcagttagaggttcacagaaatgagtgcagaagcatcttcagttggagagccattgcctcttgctgtgaaatatttgggaatcttcagaaaccatgaagaataacctgctaaagctgagctgggactctgcctggatataacttatggcctattctatatggaaagttggttttctcacagttccactccctttccagatatcagcaaatggccctcctagcccagaagtctccagagagggttttattttgtcagtcaagctggaatgcagtggcgtgaacattgcttactgcagcttcaatctcctgaggtcaaacaatcttctcacctcagcctcgcaagcagctaggactacaggcatgtgccaccacgccccactaattttttaatttttcttttgtggagacgcagtcttgttatcttgaacaggctggtcttgaactcttggagtcaagcaatccttctgcctcagactctcaaagtgctgggattacaggcatgagccaccacattcagccaggaaaagtttttgtacatttacacaaacttataggatattgtgtatatagctttgctggtttgacttcctagaatagctcccaggaacacaaagtacttaattgattagtataaaatgattatgtcatactcacatgttggttttctaaatgcacttaattttcctgattaagaactgaaaatatgctgccagggacactgtgacctggggctcattttgcataaaggtatgtgtatgctgatgggcaagccaaaggcaatgttatcgaagtgtcaactcaaacgcagactatttgactggtccgcaatggagagagtcccc

SEQ ID NO: 200109 - DNA, 643 bp, Homo sapiens
ggtcttttctggcagattacttctgtgagcaactgggtctctcagttctttgggagcaccctgggaaacagtgtggctatgacttggagctgctcaccagttccagtcattctgtggttgagagctgctccctatggatgttaattcttctctattttagattttccacaggtgtgggccccattagctctggccacctgagaaagccctcaggcaaagagtcgcaggtgaaagccagcagttagaggttcacagaaatgagtgcagaagcatcttcagttggagagccattgcctcttgctgtgaaatatttgggaatcttcagaaaccatgaagaataacctgctaaaggccaccaagttctattgaacatcatgaatcctatgctcaagtgagatcagctcaagtgagaccagatatctgaagaccttttcattttcgccaccctcaaatgaaggcatgcaaggtaggagataaaaactatcatgtggaagatgccctccctgtgccaagagaaaagaaacattcttccatgaagactcatagccgagataattccgtataaacagaccttgttaaaagaattatctccctttggcctccccacaaaatttagatacttttccacaattgcctctttaca

SEQ ID NO: 200110 - DNA, 360 bp, Homo sapiens
  misc_feature (316)..(316): n is a, c, g, or t
tccgctttctctttcttgattgcctattaaacctctgctcttaaactcacttcttgtttgcccaggttttctatttctctaccctgagttgatgacctcgggtatttatcccagacaatgatgccacttcacctgggaggctgaggcgggtggatcacctgaggtcgggagttcgagaccagcctgtccaacatggtgaaaccccatttctactaaaaatataaaaaattagccgggcatggtggggggtgcctgtaatgccagctattcaggaggctgaggcaggcgaatcgcttgaacctgggatgcagatgtngcagggaccaagatcgccactcactgcacctggcaatcagctca

SEQ ID NO: 200111 - DNA, 888 bp, Homo sapiens
gcaaaacaccaaatggcggatgacgccggtgcagcgggggggcccgggggccctggtggccctgggatggggaaccgcggtggcttccgcggaggtttcggcagtggcatccggggccggggtcgcggccgtggacggggccggggccgaggccgcggagctcgcggaggcaaggccgaggataaggagtggatgcccgtcaccaagttgggccgcttggtcaaggacatgaagatcaagtccctggaggagatctatctcttctccctgcccattaaggaatcagagatcattgatttcttcctgggggcctctctcaaggatgaggttttgaagattatgccagtgcagaagcagacccgtgccggccagcgcaccaggttcaaggcatttgttgctatcggggactacaatggccacgtcggtctgggtgttaagtgctccaaggaggtggccaccgccatccgtggggccatcatcctggccaagctctccatcgtccccgtgcgcagaggctactgggggaacaagatcggcaagccccacactgtcccttgcaaggtgacaggccgctgcggctctgtgctggtacgcctcatccctgcacccaggggcactggcatcgtctccgcacctgtgcctaagaagctgctcatgatggctggtatcgatgactgctacacctcagccggggctgactgcaccctgggcaacttcgcaaggcacctttgatgccatttctaagactacagtactgaccccgactctggaaggagactgtttcaccaaggtctcctatcaggagtcactggacacctcgtcaagaccacaccagagtctccgtgcagcggacccaggctctagctgtggctacaacatagggttttt

SEQ ID NO: 200112 - DNA, 568 bp, Homo sapiens
gcacgcaaaatcagcaagtgccatacagtaagtactgatctacaacagaaagaaatcaaggcatacctgcagacttaaacgacatactgaagagccacgtccttgttcaaataattccattccaattccccagagaacagaggtggcatgcggtaggattagagtttcactcagctaagacagaggtttgagtccctgctcggcttagctgtgtgatcttgagctcgtgaccaaacttcttacagtcttaggagagttagaaataacaaatgtagattccagagtgattgaaacagagtaggccttcaggaagtcacagttattatttgtataagcctttcagtttagagtaattttagaattatagaaaagttgtgaatatagtacacagagtttccatgctgttattttattttcaacaatattgttattctgattgtgaagagaggtaaacaatttctaaattacaccttaaaaatccatgacaacaaagaatactgtcactctaggaaacttctgatttatgcacttaaacacaccactccgcatcaggtgaactgatttccca

SEQ ID NO: 200113 - DNA, 791 bp, Homo sapiens
agaaccaggaggcaacaaaggcttgctgcacaagaagggctaagggaccgcttttgtcacatggaaacacaaacagtaccccttcctctataggaagaggccaattcagagggttctgtgcatggaaggacctcattgactgccggccagtttcttcacttcctaacgtagtcaactgccaagcataatgctgtctgcaggagtgacatccagaaggtcaatatttgcccttcctggtgccaaggtggggacaataaattcctttgccagtggctcaaagatttgggtacgccttgcagtgtatatccaaatgggtggaagggctgggtggaggaagggagaattactagggagagcagcagaaacccatctgggtaactatccaggaacaccaggactcccggttgggtcacttgtgataagatgtgggaatccatccaaggacaagctatagatgggctggggatccacagcccctctggacatccccaccccctgcccataacttctctgtaacagtagcaaatctggcaaacttggaggcaatgggtatccagtacataaaccaggagggagataaactagggaaagatgggaataggacttgaaaagattttcttttttttcgcaaaacttagcattcatgtctcaacattttatatatgtatcctgaatagagataatagaaatatagcagaatatacttctgatcctaaaaatgtaagggggggaatggtatagatagcaggtggtggctattatatttaaaagctttactgagtagcatgtgt

SEQ ID NO: 200114 - DNA, 432 bp, Homo sapiens
tgtactgcagtttcactaaaaatgcaaggtttttgtgcctgctgctgtaactgcagtgatggcttcatgaatttccttttcattctttacagtggtccttatgctggattcatttatcttaaaatggcaggcaactgcagctgcagacctcaatctatggttacattatatcaagcagttcaggtgtttcgtgtaatgtcacgacttttttctgcttcgtggaagcactttcagcatcactagtggcactttgtatgtgtcccatggtgttattcaaggtttacaatattgcactaaaaacaattaaaaatatgcaagaatcagaagagattactctttcctgtgatatgtaatttactggagagacagagataatgatctcaagcagagataattcacatcacatgttattttaagtggagcaacacttga

SEQ ID NO: 200115 - DNA, 199 bp, Homo sapiens
cagatcttgtgagaactcattcactgtcacgagaacagcaaggggaaagtctgcccccatgattcaatcacctttcaccagacccctcctccaacacgtggggattacaattcaaatcacatttgtgtggggacatagagccaaaccatatcagactccaaacccacaccccagaaccagattacccaaagtgctgcca

SEQ ID NO: 200116 - DNA, 374 bp, Homo sapiens
ttcacgttatacatttcaaatttcaacatacaaagccatgaaaaaaatttcaaagctccgtaacttgactcctccctcccagccttctatgccccaggtaggtatacttttccattgaaagaccttttattattaagaaggtaaacaccttccctcccctgaaggattcctccttccatttaaggaggtacactttaaacggctgtaaaaagttttattctcagctctagcacaaaagagttgcattttttacccaataatttgattttttcccttttctatagagacagtatatcattccattgcccaggctgaagtgtagcagcacaatgaataagctcactttaactcaactcctgggctcaagtgatcct

SEQ ID NO: 200117 - DNA, 550 bp, Homo sapiens
atcaacaaattatcaccatgggatgtgaggcaagtactggtggggaaaatacctcagagttgtctcacaataggtgtaaaaacaggtagggtatttatccaccaaatcctggcctatcattgaatgaaagctgcttcagtctctctggcatttcaacttgccctgcaagtgagctgagtgtgctctgagcatgccagaacagacacctttcagcagagtgctgcaggtgtccacaggaagcagccttcaatctggagaagtgagtgccaagggtataagagcaaaaaacagtatctgctaaattgcaaacagttacaaccatgaatctgaaaatagatgaactgtcatttgctcaaaggaatattatataacagttcagatggacagtgtagctctacaatagtgaacatcaataaatttccaaataagatattgagaaaaaatggaatttgtatcataataattaatatatgtaacatttccatgcagtttaaaagaatgaaaaactatagcaaattcaggaagagcaggtgcatttagagaatagcaa

SEQ ID NO: 200118 - DNA, 466 bp, Homo sapiens
ccatttgcttttttaaattaaaaataattattaaaaaaaggaaaactttaaggaattcacaatcaattgcctgactcattttgaattccttaaagttttcctttttttaataattatttttaatttaaaaaagcaaatggaaaatgtatattttgatgagcttagggtgttttttttttgaaagtcagctgaaggatggttagacagcacagcgaagactgctaaatgcactgaccccccccattagaatgtgatttttggttcctttttatttctcatgtgggctttgttttgtttttgtttgggtagatcttcaatttggatatttggaggagtgaacatcgttgttttgctggagggaagatcttgatggtgtttctttccccaaaaattgacttagatattaaaattggtgcttataagagagagttaaaaaaaaataggattgcttcaattaaaattacaa

SEQ ID NO: 200119 - DNA, 958 bp, Homo sapiens
aaccaggtttactttgtatctcaaattaattatacccttgtgtagttttttagcttttgtctgcagttggggaataagggtaactttctgtccttaaatatgtagggctgggagaaaacttaaaacttggtggaagaagtattctgcctttgagggagatctccctacgcattcatttcctgttctagttaacttcttaggaactatccagaacagcccagactttgtccttgtcctttgtagaacaggatgtcctgcaatggtttaacccagtgaatctagtatcccctggagtataaaacctagagtggaatagtttcagctgcagtttgatgtggggcatgcacagaaaagacttcatttctcccaggcagctttcctgacacttggggactggcttgccatggattttaggcttctcttgcttcttgttgcctgtctgtgagtaataaagttgctttgcttaacttgatgtgacagtgttctgtctcacaagactcatccttggcgtatgtgcaaaactgagcttgtgtaaaaacctcctgtcagtgatagactttagtagacattcatgagggctttagagtcctcctctgagagtgatactggtgcatagtattggcgaggtatttagaatcctcctctgagattgatattggtgtgtggtaatcccctctcagggattgatactggtgcactgtattctacttcacattaggggccttataaaagagtgaggaagcaatgatttatattcttaggaagcttacaacgaaacataatacagatatgtgaaaagaactaacgtggatggtttcagatggttgagaagtcattggaggaactgcagtcagcgtgtcttcgagggagatatctactgatgggattggtgtaggaagacagtctggcagtacagggcagcagggacagcactgaagcagaaatgaataatcttcat

SEQ ID NO: 200120 - DNA, 371 bp, Homo sapiens
caatactgcagccactagtcatatgtggatcttgagcgcttgagatgtggttggtccaaaatgagatgttttgttagtgtaaaatacatactacatttcaaagacttagtatgagttaaaaataaaattcctcaataattttgtattaattatgtatgtgttggaatgatgtttttgacatactggattaaatttaaaatgtattatcaaaattaattttacccgtttcttttactttttaaaatgtggcaactaaggtcagatgtggtggctcaagcccataattcagcactttaggaggttgaggcaggaggattgcttgaggccagaagtttgagaccagcctggcagcatagtgaggcctcatctct

SEQ ID NO: 200121 - DNA, 390 bp, Homo sapiens
gcacctctgagtttttgctacggtaggttggccacttagaaatgactgcaaacaaagattgcaagggaaatgtaaaatccagacaccctaattgatttcctaggatgtaaatgttagttctaaaaggaaaccattttaaagctgttagtttaatggggtgcccaaccgatgcctattcaaagttatcagtacagattaaagataaatttttcaccgtgaagcaaaaacttctttaaaataagaatagagatgacttaatcactaattttttcttcgttatcatggcttaaaacctcaagactgctaatattctcaagaaaacacagattaaaaaccactttttaaagggttagtatttatcaattaggtatctcgactcagcatctctca

SEQ ID NO: 200122 - DNA, 352 bp, Homo sapiens
tgtcagtatttgagttttcattgacttcaggaatagtcactaaagcggagtgaatttctggatcttaacctcatgagagaggtcaatagacctcatttgtaatataccttatgtttgtagaatacctgtcaggtctttcagcaaacttttaatgtggcactttcatttcatagatttaagcatagaacatactgttcaagaatgtgtgcaaataaatgtctgagtggggtatctaacccaggctttttaatggattactctgggatttatttcagtcagtaagattaggtttttttccattactgtcgacaaacttaaggaaattttcatggaaatcccactctgcgagtag

SEQ ID NO: 200123 - DNA, 561 bp, Homo sapiens
tctgctgctttagaatttggcccttgtaccatggacctcattgtcctgtgtgtgcattgctcaggaaaacaccttggagcaaggcagtgccctgagggctgcctggagccagtgctcttgttttaatgtaggtaaaaatctacactcttaccccacaggcatgatttcatctcacaatagagagcccctgtatgctttgtaagtggtttctgaattcaagcaagcattttctctcttgagagaagcttacaggtcatgttcttgccagactacagacatgactctctgatcctcttaggtagcagggccagttcaggctgtatatcctaaaactaaaagtggggtactaaggtgggagctacaaggaatgaagggcaatgactaacagacataagcagaaaaacaaacgaatgggctctgcttgactctgtttatccacagtcatgatttacacgtgaagaaagatgcttaagtttattttataaaagattattttcagtcagagatagggatggaatgttagacgttaatttaatatggaacagtttatgcagactccac

SEQ ID NO: 200124 - DNA, 151 bp, Homo sapiens
cctgtaaatgaacctatactacctcatgcaccactatacttctagcactgagcacttctagactgacacactgtgagttgttgattggatgcaaaaatcacgaaacaaaagaacatgaaactacattagtgtgagtaactcacatgaaata

SEQ ID NO: 200125 - DNA, 157 bp, Homo sapiens
gctcattcagtgtttggcacttgggcccactgctgagggagagaggaatagagtgaaaagggggcaggtctgggggaaggggctacactttgcccaggaagagtcaaaagtgaccaaaggtagattcagatgctgagacacatgacacggaagtcaa

SEQ ID NO: 200126 - DNA, 743 bp, Homo sapiens
gagataaattctgaaatttttacagctgacattaagttaagcctggcattttcaaagtaatcccacagagtaaggaggagggtagaatatgagggtgcatagatgaaacataagttgatgttagatatacatgggctttcccttgcttttgactttcatatatatttgaaatttatcataatcaaattgtaaactaaaatttgcttcaaattttaaaataattggaagacaagtcacagaaaccatagactgagatcaaaatatttataaaagtcatacccagtgaaggactattaaccaaaatatacaaagaactcttaaagcttaacagtaagaaaagaaacaatccaacttaaaaataggtgaaagatctaaacagacacctcagcaaagatctacagatgacaagctgtaaaatgatgcctaccatcatatattattagggacttgccaataaaaacaataagataccattacataccaattaaaatggccaaaacccagagcactcaataccaaatgctcattaagatgtagacagagcaatagaaattctcatttattgctggtgggaatgcaaaatggtacaaccactttggaaaaccgtttggcagtttcttataacactaagcatgctcttaccatacaatccagaaatcatgttctttggttcccaaatgaattgaaaacttaaatacacacaaaatgctgcacacagatgtttatagcatctttattcataa

SEQ ID NO: 200127 - DNA, 413 bp, Homo sapiens
aggactgggtgaagggaggacaaatggcagggggaccagaccagccctgggaggtggggagatcacagccaaatgcctctttacaagcactgtccctgcagagagctaggccaggtgagtttgggaatttgggtaggagccagggatagctcaaaggttaagtgtggaccctgaagccagactgcctggttccacgctgtgtgaccttgggcaagtcacttaacctcactgggcctcaattttcttgagtgtaaaagggaaataatgggccgggcacggtggctcatgcctgtagtcccagctacttgggaggctgaggcaggagaatcacttggacccgggaggtggaggttgcagtgagccgagattgcgccactgcagtccatcctgggtgacggggagactctgcctca

SEQ ID NO: 200128 - DNA, 304 bp, Homo sapiens
atatagtgcatgagttaagaatgtgggctgtgtgtcacacagactgtttcccatgttgccatgcccagccaaggtctctcaacttctctgagcttcagtttttcatgtacaactcagtttcgttgttggcttttagtgaaataatgcataccatgtcttgtgtggcacattaaataaagactcagtaaacgttcaagatatgttatcattgtttttgttattattaggaattccatcatactgacataactgatcttatagatagaaagcaagagaagagggaagtggccattgactttgtagt

SEQ ID NO: 200129 - DNA, 301 bp, Homo sapiens
agaatttatttttccccaacagctttctgagttgatttaagagattatttccttaatttgttgtctattgggtttaatgttggctttttgaaataattaggtaaaacccatttttatattcagagtcatgaatattctcatgggccacagttctctttctaaaagcctaaaaatctattctaaaatgaattgattgaaatattttagtgctcttttgttcatgcttcgtttttttaaacttgaactttacctcgttagatttcataatactttcttggcattctagtaagacggcaagcgg

SEQ ID NO: 200130 - DNA, 371 bp, Homo sapiens
ggggccttgagtcgtggtggctggaagctaaacctgccacctctggaatattctctgtgctggatctaatcttgaaattacatttcctctgctcaaagcctgtctttgaaagtgggggtgtttccggtggtttgctgcagtttggagtactgggaactaaataaagcctttgctactttcatctagtctccgggcacacccctgagtaatccaaaggccatcagacggattctcgtgctggactttcccctaccttaggccacatctcactatggagtgaggatcaagaagtaaaggtctgggaaggagagagctgcaggggccagggagactcttcgtgagtcggagagccatcagcggcccaaggaaaa

SEQ ID NO: 200131 - DNA, 739 bp, Homo sapiens
cactctgttgcccaggctggagtgcagtggcgcaatctcggctcactgcaagctctgccttccgggttcacgccgttctcctgcctcagcctcctgagtagctgggactacaggcgcccaccaccatgcccggctaatttttttgtatttttagtagagacgaggttttaccatgttagccaggatggtctcgatctcctgacctcgtgatccaacccccttggcctcccaaagtgctgggattaccggtgtgaaccatcgcgcctggccaatttttgcatttttttgtagagacggggtctcacttcgttgcccaggctgaacttgaactcctggccttcagtgatcctccctcctcagcctcccaaagtgctgggggtatggatgtgaaccgccacacttggccagaactgggttcaaattctgacactgttgctttcttgctgtgttacctcagacaggtgactttacttctctgagccccagttttcctatctgtaaaatggcagttaacattattgattcctcagaatcattgaagatccagtgaggtgacgtgtgcagagaactctatacactataggtgcttgagatatcacgtctctctctctctggcatcccaggagcagttctgtccctcccttggtagtgctagaggagggtagtcggccctgatttatgtgccctctcctgcctcctcagatgctggggacttcccctcccctggaacttgctcgcc

SEQ ID NO: 200132 - DNA, 234 bp, Homo sapiens
ataaaaggaatccagattggaaaggaagaaataaatatttatttgcaggcaatatgattgtttatatagaatatcctaaaaacaatgtcaatgagaaaagaaaagaacttttatctgaggaatgtgagaccttttaaattatcaggcccatagaaatgttaaaatgatacagcaatcatatcctacttcctcctttaactatatattcatccttaaaactgtttgctgttgcca

SEQ ID NO: 200133 - DNA, 524 bp, Homo sapiens
gagctagaacagagtaagattgacagtgtaaaaaatttgaaaaattattatgtaaagtcagtgtattgtcaggtctcacaggattcagaagaccagacaataccttgataaagatgagagagatgaaaacaagagagagcagagaacagaagctttaaaatattagttgcctcctccaagacacaatagagatcaaaattacaattaaataacattaggccgggcatggtggctcacacctgtaatctgagcactttgggaagccaaggcaggaagatcacttgaggccaggagttcaacatcagcctgatcaacatagtagaaccctatctctatgaaaataaaaaagttaaaccttatctctacaaaaaataaaaaagtaaggtggtacgtgtctgtcatcctagctacttgggaggcagaggcaggaggatcgcttgacctcaggagattgaggctgcagtgagccttgatcgtgtcactgtactccagcctgggtgacagagtgagatgctctctttcta

SEQ ID NO: 200134 - DNA, 428 bp, Homo sapiens
tttttgaaagagcacaaaaaaatcataactgtacggcttgttaattttcacaaataaatactcatgaatccaggatttagatcaagaaccagaacattaccagcacccagaaaccttcctgcaccctcttccactgagtggccctttcaacccttacaaagccggagagctcaagttctgggccctgtggccttggtgagcaacaccctggaccgatcagaacgacccagtgagttgggaaaacgctccttttaccgataaacttgaagcaactcatgactgtggctctggcaccacctcagcggaggcggaagtgccatagaacttttaaaaaatatatttaccaagaattaaaaccaggtgaaatagtcttgtatttggtagtttaagggaaagcaattggctggattaaaatgtattcaaatgtc

SEQ ID NO: 200135 - DNA, 350 bp, Homo sapiens
agggaaatctgaggactaagtcaagggtactccaaagtttagcatcactgaaaggaggaggaaccagcaagaggaacaagcagtgaggaagaaggagaaccaacagagggtgtgtcctagaagcggagtgaggaaagtgtttctagaagacgggagtgacagattgagtatgatatgcactgaggactggctgttggatttggcaatagggaggtcactagtgacctggacaaaagccatttcacaggaaggatagggaaaaatctgactagtgagggttcacctgagaatgaaaggagagggggtgacctaaaggggaacagagaaatggagaggtagctacaggggga

SEQ ID NO: 200136 - DNA, 334 bp, Homo sapiens
acgggcacaatgtgcttattaataccagcttagctgtgccgagctgttctcatgaaacttcaacctcctggaaaccaatttaagtcatccaggctgactgcagatgagtggcatgttgctattacactgtttccattaggactgctagacttgaatgcttcaccttcagaatctttcccctggattttgtccagagttcccaaattgcagaggatctgctaattctgatgagaggttacagataaaatgaactcatgagattatgtcattagaagttggttgggtaaaaactgaacttgtaggtatgtgaattgagccctacatctgaaaaggt

SEQ ID NO: 200137 - DNA, 371 bp, Homo sapiens
ataaacttcctaagtgatgttgaaatgtttacactaccctgctccaaaatgagtcagctaaattccagttaatatttaaagagacagtgtcaactaaattaatactgttgttaaaagtaagttgtggatcttggtcactccacacaagctagattgtcttaatatttgtatggtgcacttttacttacaaaagggaagataaaatgttttggggaataattaccaggggtctggccaggtcaaaattggttagtccccttctcccatcttctaattttggtagttaatacttgttaaaacatcgttttttaataactcactaaaaagtgtattctagtatgtagttggaaaaaatgactgaccacaagtta

SEQ ID NO: 200138 - DNA, 617 bp, Homo sapiens
gtgagcatttcaccagcagatgtatttaaagtatgcctggcagagagtatttaggaatgcttagctattatttatctcatcctcatcaataaaaaacaatgataaacctttttacttaattaaatatgtacaccattaagcacatatccttaatttaccaagttttatgtaattaatatatttacaaatcattgcttttccactttaattagctaacagttaatttctaaggtaccaaaaattgagactcttactgagaaagattctcatcctattttatttattaaattagaaaaacagtacctcttaagagtttaccaggtgaatttcttttagatgaaaattctccctcagttattcctgggttggtatcttgactgagtgtcttttcttctttatttatctcaaaggtgagttccatctgcagactctaataaataatgattagtttcaaatcatagattccattttaactcttaggaagggaagtgtgacaattcaggaatgtggtgttcatggaagtctgtgaaaactttgtgtttgggtccattcgtttgttcacacactgtttaagacttttgtctcctgatgccacatgtgacagagaaacttcttca

SEQ ID NO: 200139 - DNA, 514 bp, Homo sapiens
caatagaactctttttacttaaaaatctcaggatttttgggatctgagctcttgtcaaaattcactcaaatttcaccttttccaggacatgatgctgcttatatgtagtcttttctctcccttctaaaatgtataccccataagggcagagatttttgttctcactgctctccagcatctggaacactgcttggcagatacttgatgccaaaaaatatatatattttttaattaattagtgaacaacacaattaccaagcacttaactacgaaccaacagttctacttcacaattcacaaatgattcagttcttaattattatttctgtaatttatgatgtatgaattttttaagtgttattaaatactagttgataagctggatatcacattaatcttgtagtttttcttctcacagtatggcagagggtcctattctcaaaggtgctattggcctgtactcccagcatagatcctccctgcatctttctagtgggctctgtggggcttagta

SEQ ID NO: 200140 - DNA, 359 bp, Homo sapiens
ggactctctagcctcacctttaaaatcttccaggaaccctttctctcactaatccccttcaggcgcaaatactccagcaaaacttaatcactggtttttcacacttgacatgaactttttccattttctgacttttctcaaagtttaccttgtgtagaataatattttatctaactgacacatctaaatataactattcttcaatgccagctaaaagcttatctcttccagaatgccttctttctgattacactaatctctgatcacacctacatttacttgacttatattactcagcatgtttttactataaagtaaatcttgtgtcatcttcctcatttacactgcacattcatcaa

SEQ ID NO: 200141 - DNA, 815 bp, Homo sapiens
aaagtctgtttccatggcctatagacttggagtaccttaaaatgttacctatggggctgggcgcggtggctcacgcctgtaattccagcactttgggaggccgaggcaggcagattacttgagctcaggagttcaagaccagcctggccaacatggtaaaaccccgtctctactaaaaatgcaaaattagccaggtgtggtggcacacacctgtaatcccagctacttggggagactgaggcaggagaatcgcttgaacccgggaggtggaggttgcagtgagccaagattacgccactccactccagcctgggcgacagagtgagattccgtctccaaatagacaaatgcataaataactaaaaattacctatggaatgaaatatttctgatcaccaccgatacttttttttgttaaagagctgaaaggtacttggaaagacagatgatgccactgactcatttaaccaacaaaagctggtggcaatggaaaaggcgcggtctgtccacggtcacgtggccagtgggacccagccccgcccactgcaagctcagaggtctttcctacaggccctcacggggatcagggccaggggttacacctaagccaggcagttggtgcctttgggaagaacacatcctttagcaccagagagaaaaaaaacaacaaaaaatcagcatttctctaccatttacatggcacggagccatttcatttccaaaaaggatggcctcttttaccaccaggaagagcacccaaattcagtgaacctgataccccacacctcccccctcgccctctctgcactcctcca

SEQ ID NO: 200142 - DNA, 541 bp, Homo sapiens
gctgagcacattgggcccgagagcgggtgaggggaggaggcagagaggactcagagtcagaagtgggttggttggagagagttgggggcaggtgaaggtccctggagttgagcagataaaagtgcaggaagggtagggtgctttaaaggtaatccacaaagacaatgacctctaaagtagattcgagactgcagtttcagaagcacgcacaccaagctgtgcatggtggtcatcactggagtagggtgcagatagataagattatagagggattttattatagtagttttttttttcaaggatacagtttcactctgttgtccaggctgaagtgcagtggctatttacaggtgcgatcataactcactacagcctccaactgggttcaagcaatcctcccccctcagcctctttcatagctgggactgcaggcatatgccatcatgcacggctaatttttttagtatttattttttgtagatatgaggtcttgctatgttgtctaggctggtctcaaactcctagcctcaagaatctcctg

SEQ ID NO: 200143 - DNA, 432 bp, Homo sapiens
acatctattttctgaaacgtatatttaaagagaagaaaaaccacagcccataaaggttaagtgatctccattcttcaaagacctaagcagtaatctcaggtttcctggatccatccctaagccctccactaacagcgatgtcctatatagagaatctgctaagatttctagttgggctcccaattatttccctggcctagataaaatacttccttgtttttagcaactaaaatgaaattttccatagtaacaatctggcaatagtataaacttttggtaacgcttaaataggttaaaacctatatgttcaaacagtaaatattaaaagacaactcaatggaaagaaaatactacataaatttaaataatttgaacttactaaattagtcaaaatagcaaaattgataagggataaaattaaaaaccaccgtt

SEQ ID NO: 200144 - DNA, 195 bp, Homo sapiens
aacatggtaagtgaaaggagccacaatcaaaagaccacatagtgtacgactccatttatatgaaacgtccagagcaggcagattcatagacagcaagtagattagtggttgctagaggaaggagggaggagggagagactgctaaagctgggtttctatttggaaagatgaaaatattccagaattagatagtgg

SEQ ID NO: 200145 - DNA, 680 bp, Homo sapiens
gtaaagccggaaagtatgtgggtggctggctgggccatggcctttgtgttagaggtgacctgagtttcttcaaagcacctgtgttagtttttcattgctgctgtaacaacttatcaggaactttgtggcttaaagcaactgtttttatctgacagttctgcaggtcagaaatccaatacaggtctcaccaggctgaaatcaaagtgtcagccaggctcattctctgtagggactctagagaataattcatatccttgccttttccgttttctttcttttcttttcttttttttttttttttggcgggggggaacggagtctcattctgtcgcccaggctggagtgcagtggcacatattggctcagtgccacctccgtctccaaggttcaagcaattctcctgcctcagcctcccaagtagctgggagtagcccagcaccatacccaactaaattttatatttttactagagtggggtttctccatgttggccaggctggtctcgaactctcgacctcaggcgatccacccgcctcggcctcccagagtgctgggatcacaggcatgaaccatcgtgcctggcccacctttttccattgtctagatgccattgtatttcttggctcctggccccttcccctatcttcaaagccatcaatgttgcatctctctgtgctgtg

SEQ ID NO: 200146 - DNA, 524 bp, Homo sapiens
tttgaaaacaattggccagatagaaaaactggtaaaaattactgagaatgtcttgaagtgggtttttgaagattaaccaataagatcagctgcatatctcattacctaacaagtcctcctatgtccattaatctacttatgtatggatagataagcgtttatccacttattcatgcagaaagaacttatcactgtccactatgcaaggactggttttcagtaatagtaatataggatagtattagtaataagtcatatctcaagacgtgtcttgaacaatttgctgaatttctagaagataatcggcaatgtagtacagaaatgattgtaattgtatctaccgtttacttctatgaatgttggccttgtgtggaaatagacaaaaatagatacctgtctctgacaatgaagttacaaaattgaccacaaaagtagatgcaaatgggtaggacattgtcagtgttggtgagtgcaaacttgtatctccttcagtgctaaatatcacactgttaggtattttcagt

SEQ ID NO: 200147 - DNA, 355 bp, Homo sapiens
cagactgagaccctgtctctaaaataaatcaacaaacaaaaccaaaagaaatgtctttcctctcttacacacatgggtatatgagtgtgtgagtatgcgtatgtctgagtgagtgataaaaatccactcccttaatatcatgagtatgtgtgtctatgagtgattaaaactcaataatttaacaaatttgttttatgaaatgaagagtgattgagaactgtgtgggaccctggtgcttccgagagatgatggagggtgcaaactggtagaaaggatgtgaagactaagagaggaaatctgggccacttggaaatatgtagccattgtgagagtagaaagtcttctgctactcatt

SEQ ID NO: 200148 - DNA, 389 bp, Homo sapiens
tagagtggcccatgctctaccttgcagtccacggggctgcaagacgtgaaaatcctaaaagaacgccaccaaaaggcctagggcctccccgagctggaggggcctggggaccccacctcctaagtgtagtggccccatcccaccccctccttcctagcccctgtttacgggagaggttcgcccaccacttatcagacatccaaggacccagagctggctcagagtggggccggcaacttctcagaagattcttagagtgaattccctttttaaaatgaataaggacatgaagagatacgtgttgaggacaaaggctcccagagaaggggagtcaggatggagagttggacctcagcttcctatggccatgacacaagccacagcaggca

SEQ ID NO: 200149 - DNA, 232 bp, Homo sapiens
gtcatcaggacagcctgtgctggccgctgaggccgggatggtgacctccacacaggcggcctgcagtaaggcgagtcgctgttggaaattatttatcacccgagcaggtcattccgtttcagactccgaggcctacgcatctaattgacacagcaataatggcctatgaacttttgatccaattaattgttaatgagaggtttgattagcaaataaaaggcctattaggtga

SEQ ID NO: 200150 - DNA, 216 bp, Homo sapiens
aagtcagcctccatgtaagtgaagaacagcgtaaagcccttaacaaagggcttatgttcaagttaaacttaaggaaaaagcactgagacctgcacaaaggatgccctgaaatcacagagaaaggcgggccggtcgggaggaaaactcaaagactgaagcatatgaagaaaagaccatcaggctgtctgaacagccctgcataacacagcaatgtta

SEQ ID NO: 200151 - DNA, 588 bp, Homo sapiens
caagtggcctcacaaaggcatgtgggatggcaggacagtagtgctcagaggaaaggcagttagcttcttgtctcagctgcccagggaggagatgaagatcataggagaggccaggggaaatctctgtccgaatcaagctaaggagaggtcacatgttctttctagggtgggctgtggcagggccacaggtccctgggccagactgccagagttgttttgctcttttctgtgccttggtttctctcctgccaagtggctgtaacaatacctatctcacagacctgttgtgaggataaatgttgtggttttggccagggaccttgcaaagtgcttttgttaacctgacctgtatggtctgtgtttctcatggtgaatgttgtatttctcaaatggctcaagtccttcaactcaggtccccgagttcagaggagatgctgctggaggggtggcaaggtggggtctcccctcatgcccttggctctgtccatactgacgttgtcaagtgtgacctgtttgttattgcctaaaaacacttaacgagttcaaagcaaagggaacatactttttaattatttctctgcttgtctc

SEQ ID NO: 200152 - DNA, 319 bp, Homo sapiens
tggaacaaaacaaggaggcccactctcaccattcctcttcaacatggtattggaagtcctagccagaacagtcagacaagtgaaagaaataaagggcatccaaatcagtaaagaggaagtcaaactgtcactgtttgctgatggtatgattgtttacctagaaaaccctaaacactccagtttccagatacaaaattaatatacacaaatcagtggctcttctatacatcaacagcgaccacactgagaatcaagtcaagaactcaaccccttgtaaaatagctgcaaaaataaataaataaataaatgaaaaccaaaa

SEQ ID NO: 200153 - DNA, 210 bp, Homo sapiens
atatttttagaaaagtgtttgaaatcttttataaacttcatattttgtttgctcctttatattctgtgttacttaaatatgctctaaaaagcagtggtaaaacagctatttaggaattgaggctgttattcataacttccatgtgagactgccacatattgaactcatattgaactcatattgaaaatatgtcattttatccactgggtt

SEQ ID NO: 200154 - DNA, 254 bp, Homo sapiens
tgcccacctcagcctccaaaagtgctggaattataggcctgagccactgtgccctgcccagagctgccttcttaagtttacataccttacaaggagtgtcatggctgctaaggtctggtttgcaacagtagatggaagaaggatgcagcacggtgcagtggaaagtgagggcattggagtgaggcagatctgagtttcccttgcaatcttggttaggatattcaaacactcaacctgtttccccgcatgtaaaa

SEQ ID NO: 200155 - DNA, 248 bp, Homo sapiens
gaggaaggctttgaaatcttgtaagcagagcagctcggtgatatagagcttccaatgtagccataagctagaagtcaatatgttgtagagatgcaagtcagtgaaatcaaggaagtcaaagaaccatgaagagaacgtgtcagaactgtcatcagtatctattcttgaagtcaccatgaaggataaggatggagcacagggaagaaagggagaagggggtgagcttcatgctaaagctgtctagggca

SEQ ID NO: 200156 - DNA, 662 bp, Homo sapiens
aaggaaaaattgaattaaaataaatataaataaaatattcagaatctaagttgaagccttaggcactgaatatccccattaaaatgcctttccttaaaccttcaaaagaaaggaaaccaagctttgctttttgaaagaaccccccgaccccacatttcaatagctatgtataattcctttaaggagcccagtcagcgtgtgtgggagttgaaaatgcttttaatcatttcccctcaagtttgacagaagtgtggcaaggagggccatctgttttgcttgaatgagaagcgacccagcattctgatttcaattagcctctttgtagctttctgtttgggctggttccatgggtaacggttcagctaagtgtggagaggagcgggccaagttctgccggtgctgatttgttttaacaactgtcaatgaacgtagaacaagcgtacgaggcgatgttgtggacgcacagtgaaaaacataattttacggaatcaagatggcacgtcctagagcctgagagctaaacaaaatattgaaatggtgtctttaaatcatcctattaaacgatgattgagagatttaaaatcagtatcacttctcatctaaattcctagtttcagtcaataaatacgcgcctcctatgtgtaaatacgcgcctcctatgt

SEQ ID NO: 200157 - DNA, 701 bp, Homo sapiens
cccgcgcctttggggacctcgagagcctgcgttccctccaccttgacggcaacaggctggtggagctgggcaccgggagcctccggggccccgtcaatctgcagcacctcatcctcagcggcaaccagctgggccgcatcgcgccgggagccttcgacgacttcctagagagcctggaggacctggacctgtcctacaacaacctccggcaggtgccctgggccggcatcggcgccatgcctgccctgcacaccctcaacctggaccataaccttattgacgcactgcccccaggcgccttcgcccagctcggtcagctctcccgcctggacctcacctccaaccgcctggccacgctggctccggacccgcttttctctcgtgggcgtgatgcagaggcctctcccgcccccctggtgctgagctttagcgggaaccctgcactgcaactgtgagctgctgtggctgcggcggctggcgcggccggacgacctggaaacgtgcgcctccccgcccggcctggccggccgctacttctgggcagtgcccgagggcgagttctcctgtgagccgcccctcattgcccgccacacgcagcgcctctgggtgctggaaggccagcgggccacgctgcggtgccgggccctgggtgaccccgcgcctaccatgcactgggtcggtcctgacgaccggttggttgg

SEQ ID NO: 200158 - DNA, 150 bp, Homo sapiens
caacacaaggtcgagcttctgtgccacagcattagaggcagaaagacaaacaacacattagggtccctattctaatctctgctactgaggggcaggagggagcctgtaacagcttccagaaggaattaatacagcttcagagaaacaact

SEQ ID NO: 200159 - DNA, 1795 bp, Homo sapiens
gaggcgcgtggtagtgatggcggcgctcagtgagactttcctgtcactggctactactactcccaaccctcctcaaagccgccggagcaacccccaggtctttactttacaatcggcaatttgacttgctctgctgcatgtctggagggaccaaggaaagtgtggagacgctccaaggattaggtgatcggagcttgaaaagaaaaaaagccaaacaaataaacaaaacccacccaccctaacaaatatgaggctgctggagagaatgaggaaagactggttcatggtcggaatagtgctggcgatcgctggagctaaactggagccgtccataggggtgaatgggggaccactgaagccagaaataactgtatcctacattgctgttgcaacaatattctttaacagtggactatcattgaaaacagaggagctgaccagtgctttggtgcatctaaaactgcatctttttattcagatctttactcttgcattcttcccagcaacaatatggctttttcttcagcttttatcaatcacacccatcaacgaatggcttttaaaaggtttgcagacagtaggttgcatgcctccgcctgtgtcttctgcagtgattttaaccaaggcagttggtggaaatgaggcagctgcaatatttaattcagcctttggaagttttttggtaagtaaacatagtttaacttgtctattacaacttttgctgtgatattgtgtatatgaaagatttagtgaaagctggatttgttttactctttggttaagtataaaaattgttgaatcttttcatgtgccagtatccataccctgaagaaaagtagttaatgaataaagcaaatgttctcttacaatatattttggaggtttggattttaaaattccatttaatgaattcaaggaatcaattaaaacactatgtgtctccttatagaggttatgtcaatatattgatcatttaatgaggtcttttagattattattattttgtatcatgggactgaggattttgaaaaggaaacatgacccagctggtcagaaagggaatgctaatttacttgttgacatgccatttattttgtacatttcactgtcaaagaagctactggcttggatgcttctgagaaatctatgtgagaaaaaatttgaaaggaagatatgactaatgagtaatttgcaagtaaatgttgtatctatatatatatatatataaagattcaaaagtagttcagctttcataagtagaaccaatataaggacgttgttttagcatttttaatcattatttttaaataaatgatgtaacagaggcttgatttgtgttatgaaagattgagaaactaaattttctgttgatttaatttttttgtgccttaaaactttgttaaattcctgaagttaattatcatattgtactttttggggcataactcattagcagatatgtagtgcagtgatttacaaataattgagagtaaaatcagtgatgtataaactagttcatgagtctaggtaaaatatcaattacctctgtttaaaatgctctgttaattattattgtatgtatttaaatgtagttaaagcttttaaacatgttgttacatagtgttaattctacacagtgctacacagcttttagtgtcacatagccttacagagtttataatgatgtagcatctgcaaaatatatgcatagcttatatcctatttttatagagccagtaatggtttttgtgatgctgtattacttctgggttttagacaataaagtctgtttaac

SEQ ID NO: 200160 - DNA, 904 bp, Homo sapiens
gaggcgcgtggtagtgatggcggcgctcagtgagactttcctgtcactggctactactactcccaaccctcctcaaagccgccggagcaacccccaggtctttactttacaatcggcaatttgacttgctctgctgcatgtctggagggaccaaggaaagtgtggagacgctccaaggattaggtgatcggagcttgaaaagaaaaaaagccaaacaaataaacaaaacccacccaccctaacaaatatgaggctgctggagagaatgaggaaagactggttcatggtcggaatagtgctggcgatcgctggagctaaactggagccgtccataggggtgaatgggggaccactgaagccagaaataactgtatcctacattgctgttgcaacaatattctttaacagtggactatcattgaaaacagaggagctgaccagtgctttggtgcatctaaaactgcatctttttattcagatctttactcttgcattcttcccagcaacaatatggctttttcttcagcttttatcaatcacacccatcaacgaatggcttttaaaaggtttgcagacagtaggttgcatgcctccgcctgtgtcttctgcagtgattttaaccaaggcagttggtggaaatgaggctgataaatgatcatcctctcttttatttctttcagggcatcgttataacacccctgctcctgctgctttttcttggttcatcttcttctgtgcctttcacatctattttttctcagctttttatgactgttgtggttcctctcatcattggacagattgtccgaagatacatcaaggattggcttgagagaaagaagcctccttttggtgctatcagcagcagtgtactcctcatgatcatctacacaacattctgtga

SEQ ID NO: 200161 - DNA, 779 bp, Homo sapiens
gaggcgcgtggtagtgatggcggcgctcagtgagactttcctgtcactggctactactactcccaaccctcctcaaagccgccggagcaacccccaggtctttactttacaatcggcaatttgacttgctctgctgcatgtctggagggaccaaggaaagtgtggagacgctccaaggattaggtgatcggagcttgaaaagaaaaaaagccaaacaaataaacaaaacccacccaccctaacaaatatgaggctgctggagagaatgaggaaagactggttcatggtcggaatagtgctggcgatcgctggagctaaactggagccgtccataggggtgaatgggggaccactgaagccagaaataactgtatcctacattgctgttgcaacaatattctttaacagtggactatcattgaaaacagaggagctgaccagtgctttggtgcatctaaaactgcatctttttattcagatctttactcttgcattcttcccagcaacaatatggctttttcttcagcttttatcaatcacacccatcaacgaatggcttttaaaaggtttgcagacagtaggttgcatgcctccgcctgtgtcttctgcagtgattttaaccaaggcagttggtggaaatgagcagctgcaatattttaattcagcctttggaagtttttgggcatcgttataacaccccctgctcctgctgctttttgaattccgatgctgaagatcgtgtttgcaggccatgagcatctctctttaatatctgtacc

SEQ ID NO: 200162 - DNA, 805 bp, Homo sapiens
gaggcgcgtggtagtgatggcggcgctcagtgagactttcctgtcactggctactactactcccaaccctcctcaaagccgccggagcaacccccaggtctttactttacaatcggcaatttgacttgctctgctgcatgtctggagggaccaaggaaagtgtggagacgctccaaggattaggtgatcggagcttgaaaagaaaaaaagccaaacaaataaacaaaacccacccaccctaacaaatatgaggctgctggagagaatgaggaaagactggttcatggtcggaatagtgctggcgatcgctggagctaaactggagccgtccataggggtgaatgggggaccactgaagccagaaataactgtatcctacattgctgttgcaacaatattctttaacagtggactatcattgaaaacagagcttcttacttaatgcgattctgcgaagcagccaactttgtgggatgcaggagttgaagaaggaagaatgccacagctgtcagcatttctctaaggactgacttcttttgtaagcacctaagaaaccttcagagtcatccagctaatttggatctaatgaaatgccgtgatctcgtgctttatcgtggtatctaagcagcaatcaaagccatttcttccatcaaaagccctttttacaaaagaatacaacattaagtcattttcaaaagccatataacttaagatgtcctagattgtatcattgtgtaatattaaaccacttctaaagcctgctaatttcatggttaacttgtaacttaggaggtagcagtcatat

SEQ ID NO: 200163 - DNA, 1067 bp, Homo sapiens
gaggcgcgtggtagtgatggcggcgctcagtgagactttcctgtcactggctactactactcccaaccctcctcaaagccgccggagcaacccccaggtctttactttacaatcggcaatttgacttgctctgctgcatgtctggagggaccaaggaaagtgtggagacgctccaaggattaggtgatcggagcttgaaaagaaaaaaagccaaacaaataaacaaaacccacccaccctaacaaatatgaggctgctggagagaatgaggaaagactggttcatggtcggaatagtgctggcgatcgctggagctaaactggagccgtccataggggtgaatgggggaccactgaagccagaaataactgtatcctacattgctgttgcaacaatattctttaacagtggactatcattgaaaacagaggagctgaccagtgctttggtgcatctaaaactgcatctttttattcagatctttactcttgcattcttcccagcaacaatatggctttttcttcagcttttatcaatcacacccatcaacgaatggcttttaaaaggtttgcagacagtaggttgcatgcctccgcctgtgtcttctgcagtgattttaaccaaggcagttggtggaaatgaggaccctccttgcctggtgtcatttcttgagctctcctgggaggagattagtctaaaacaacaaagtagccagatgtctggttctgagagagtcccagaggccaggctatggtaggcaacagaaaccgcgtggggctgaagatcaaagatacctgagaattacttatgggcacatagtatgtgtcattcccattattaacagtctgagaaaatttgtttctctaattaacccttttgttggaataaccttaaattttagtgagtatatttctgttttgatatgttttcttttgtgcagtattaagtgcacacaccaaaaaagagaaatgaaaaggtactctcgtgcttgattgaaatctctaagccattattcttctcccaaatagatacgctatcaagtgtgttatcatttatcatgaaatgaa

SEQ ID NO: 200164 - DNA, 1658 bp, Homo sapiens
gaggcgcgtggtagtgatggcggcgctcagtgagactttcctgtcactggctactactactcccaaccctcctcaaagccgccggagcaacccccaggtctttactttacaatcggcaatttgacttgctctgctgcatgtctggagggaccaaggaaagtgtggagacgctccaaggattaggtgatcggagcttgaaaagaaaaaaagccaaacaaataaacaaaacccacccaccctaacaaatatgaggctgctggagagaatgaggaaagactggttcatggtcggaatagtgctggcgatcgctggagctaaactggagccgtccataggggtgaatgggggaccactgaagccagaaataactgtatcctacattgctgttgcaacaatattctttaacagtggactatcattgaaaacagagtttgcagacagtaggttgcatgcctccgcctgtgtcttctgcagtgattttaaccaaggcagttggtggaaatgaggcagctgcaatatttaattcagcctttggaagttttttggtaagtaaacatagtttaacttgtctattacaacttttgctgtgatattgtgtatatgaaagatttagtgaaagctggatttgttttactctttggttaagtataaaaattgttgaatcttttcatgtgccagtatccataccctgaagaaaagtagttaatgaataaagcaaatgttctcttacaatatattttggaggtttggattttaaaattccatttaatgaattcaaggaatcaattaaaacactatgtgtctccttatagaggttatgtcaatatattgatcatttaatgaggtcttttagattattattattttgtatcatgggactgaggattttgaaaaggaaacatgacccagctggtcagaaagggaatgctaatttacttgttgacatgccatttattttgtacatttcactgtcaaagaagctactggcttggatgcttctgagaaatctatgtgagaaaaaatttgaaaggaagatatgactaatgagtaatttgcaagtaaatgttgtatctatatatatatatatataaagattcaaaagtagttcagctttcataagtagaaccaatataaggacgttgttttagcatttttaatcattatttttaaataaatgatgtaacagaggcttgatttgtgttatgaaagattgagaaactaaattttctgttgatttaatttttttgtgccttaaaactttgttaaattcctgaagttaattatcatattgtactttttggggcataactcattagcagatatgtagtgcagtgatttacaaataattgagagtaaaatcagtgatgtataaactagttcatgagtctaggtaaaatatcaattacctctgtttaaaatgctctgttaattattattgtatgtatttaaatgtagttaaagcttttaaacatgttgttacatagtgttaattctacacagtgctacacagcttttagtgtcacatagccttacagagtttataatgatgtagcatctgcaaaatatatgcatagcttatatcctatttttatagagccagtaatggtttttgtgatgctgtattacttctgggttttagacaataaagtctgtttaac

SEQ ID NO: 200165 - DNA, 786 bp, Homo sapiens
ttcaagggggttgggggaagaagcaccaccttacaatttacatcctgctaattacctataatgcctagatgcagtgatgacatggtggaaagggcagatctgttatctgttctctcaaagggaaatgatgtatagatagaaacagagagattcttataaaatagaattctccttggtgagttgctgactaaaattaaattgacataagtaaataaatcttgaatagttcagggattgttcgtccctgctgacagtaacaagaaacttgggtacgggccagattttccactgcagtctgaagaactttgatttcttgaaatgcatgtcaccaaaatttgacaaatgctccaatatttaaacactactagaacctagaactttcccatacaaacaataaaatgtaagactaaaacttaaatgactttattgtttcaataaatataagactaaagttcttaataaagtcactaacagatatcttagttggcagatttactagaagagttctgtacagggtttatatgtagatttgttcagttacaagtttgaaacgttgcagaatttcacattccactctttatacaagcttctattttctgactaagaactgccaccactttcttagatgtctttatgttttcctcattcctgtcaatggcttgaagaattggcattcttctggggaaacatttttcatgagagaaaaagatttttgttattttatgagcatgagaaaattagctatgtgagatgtggatgctgcataccaccatacaccttacagga

SEQ ID NO: 200166 - DNA, 362 bp, Homo sapiens
gtaatgatgtatcatatggctgaccaatgaaatcgaataccatatgattggactgaccctgtgtatgaacatttgttacaagattcatactactatcgatgactattcgaattgatttcgctactattcaaatcggcaatctgatttccggtcatcatactagcaccacttccaccactacaactgccaccactttcttagatgtctttatgttttcctcattcctgtcaatggcttgaagaattggcattcttctggggaaacatttttcatgagagaaaaagatttttgttattttatgagcatgagaaaattagctatgtgagatgtggatgctgcataccaccatacaccttacagga

SEQ ID NO: 200167 - DNA, 897 bp, Homo sapiens
  misc_feature (2)..(2): n is a, c, g, or t
  misc_feature (81)..(81): n is a, c, g, or t
  misc_feature (111)..(111): n is a, c, g, or t
  misc_feature (120)..(121): n is a, c, g, or t
  misc_feature (144)..(145): n is a, c, g, or t
  misc_feature (154)..(154): n is a, c, g, or t
  misc_feature (337)..(337): n is a, c, g, or t
gntgacctgggcattgtacacccggatctcaagccagagatctgctgtactacagcctggatgaagactccaaaatcatgnctccgactgtggcctctcccaagatggagnacccgggcnngtgctctccaccgcctgtggaannccgggatantggcccctgaagtcctggcccagaagccctacacaaagctgtggatgctggtccataggtgtcatcgcctacatcttgctctgcgttaccctcccttctatgacgagaatgatgccaaactctttgaacagattttgaagaccgagtacgagtttgactctccttactgggacgacatctctnactctgccaaagatttcatccggcacttgatggagaaggacccagagaaaagattcacctgtgagcaggccttgcagcacccatggattgcaggagatacagctctagataagaatatccaccagtcggtgagtgagcagatcaagaagaactttgccaagagcaagtggaagcaagccttcaatgccacggctgtggtgcggcacatgaggaaactgcagctgggcaccagccaggaggggcaggggcagacggcgagccatggggagctgctgacaccagtggctggggggccggcagctggctgttgctgtcgagactgctgcgtggagccgggcacagaactgtcccccacactgccccaccagctctagggccctggacctcgggtcatgatcctctgcgtgggagggcttgggggcagcctgctccccttccctccctgaaccgggagtttctctgccctgtcccctcctcacctgcttccctaccactcctcactgcattttccatacaaatgtttctattttattgttccttcttgtaataaagggaagata

SEQ ID NO: 200168 - DNA, 768 bp, Homo sapiens
gaattttccatctgactttatttccaaatacacttttttttttaaaaaaccaatacactttttttggggatgacagttttaggaaatccaatttttcaaaaaatactacatttagtctgggggtttagccaaagatttcatccggcacttgatggagaaggacccagagaaaagattcacctgtgagcaggccttgcagcacccatgacacaacctgtgagctggggcgggatttggggccctcaggtctgcttctgccctcataggcaacccaccacataaccccatcctaggattgcaggagatacagctctagataagaatatccaccagtcggtgagtgagcagatcaagaagaactttgccaagagcaagtggaagcaagccttcaatgccacggctgtggtgcggcacatgaggaaactgcagctgggcaccagccaggaggggcaggggcagacggcgagccatggggagctgctgacaccagtggctggggggccggcagctggctgttgctgtcgagactgctgcgtggagccgggcacagaactgtcccccacactgccccaccagctctagggccctggacctcgggtcatgatcctctgcgtgggagggcttgggggcagcctgctccccttccctccctgaaccgggagtttctctgccctgtcccctcctcacctgcttccctaccactcctcactgcattttccatacaaatgtttctattttattgttccttcttgtaataaagggaagata

SEQ ID NO: 200169 - DNA, 196 bp, Homo sapiens
aaaggggttcctctgctccgctgcctccttcagcacatccagagggatgctggagacccaggaggggctcagtcaacacttgaaaatgctgagccaatcccacttgagaaaagataaagaaaagaaaaagactaggaaatggagaacatgtgtggattaaaagcagcttatctctgagggagcctttccctgaaga

SEQ ID NO: 200170 - DNA, 609 bp, Homo sapiens
tcagggtagcactaattccaggagacaggataattaagaacacaattctggagttagctacctcagttcagacccctgcttcccaaggtttttaactatgtaatcttggtcaagacattctatatctgttcctggatttaagttttgtctcatctgtcaatggaagttagtacctacttcattagggatgttagcagggtcaaataagattatccatatagactaaatggcagtttctggtacatattaaatcctcagtgaatgtcctgctatcatcatgatagacatcaatgtaattattagccctactattgctcttcatgttgtcaggaagggcctagtgctaatgtctcacagggggttttgtctaaggctcttgtgccatcttctctgatgtgcctctctgaagccatcagtgtattcacaatgtattccccaaaaaggcagttctctaactgcagtggggagattgaactggatagtagtcagaatcttccttggcctttcttgaccaatgcgaaacaggtctcaaatgaccatatttcctgtgcttatacatgaaagactgtcagtgatcactgtgggcttatccctccttcaggctatttt

SEQ ID NO: 200171 - DNA, 189 bp, Homo sapiens
tcaagcagccacctcagcctctcaaagtgctgggattatggatgtgagccactgcatctagccaagaaaatgagtttttaactaaaaactcaacacagaaaacttctgacccagaaagtttcgctggcaactgtaccaaacctttaaggaggaaataataccacttctgcacaacctgtcacagaaaat

SEQ ID NO: 200172 - DNA, 631 bp, Homo sapiens
cccaaattatttttctcttatgggttatgcatttggtattgtatttaagaaatcttttcctgaccaaaggtcctcaagaattttccttatatttttttctagaagctttatagctttaggtatcacatttagacttatgatacattttgagttaacatttgcatatactgtgagatataaatgaaagttcattttctacatatgcatacccaattgttaaacaccatttgttaaataagaaaaaactatcctttccctgctgagttgactttgcatccttgctgaaaatcaattgtctgtatacatatgttggttcatatctagactctcctgttccacatggctatgttgcagtcaatgtcacactgtcttaacctgtggttttataataaggcttaaagtcatgtagtgttagtttatcaaatttgttattctttttcaaacgagtttcagctattttaggaccttttcatttccttaagaagtttagaactggcttggtaatatacacacacaaaaaaaagccttctgggaatttgattggaactgcattgaatttatagatttgtggagaattgctaccctaacaatgttaagtcttctggcccataaacactgtttacctctccac

SEQ ID NO: 200173 - DNA, 135 bp, Homo sapiens
ggggccccaaggttctcctttcatgctgggaggagggtttttccacacgtctcagacccaactctcgggcttcttaacccaaaagaacttccacgcagaaggcagcgaaaatagtgcacttcattttctaagaca

SEQ ID NO: 200174 - DNA, 261 bp, Homo sapiens
taccataacccataagctgagggcagagtggaccatcctaggatgcaatggagatggagatgggagtgggacggggataaggggagtagcagctgtttcctgttaaaacacagtggtgtcaacacaggtaaaaggagctttgtaaaaggcagtggaaaggtacaatgaaaaaaatggtttgatttactttgggagggtttttcctcccaaagtaaatcaaaccatttttttcattgtacctttccactgccttttacaaag

SEQ ID NO: 200175 - DNA, 650 bp, Homo sapiens
ccagcttctcctcaccacccgtgaaaaagaccagaaagattggttgactgttcttggagatgagatgacaggcctgcaggtgcacctgtagcctctgacctgccagtagaatcttcacttgcatgactaaagcagcagcttagatttccagaaatattagcagttttcatttaaactttctctagagaccctgggcagatgacatgaatgaactgctcaaaaatttcctcagcaaacctttaactctcatttttgctgataccattatttttgtaggaataagggagagaaattacagagacagaaggaaagaaaaattttaaagaaagaaaagcattatttgctgtgtaaaggcagttacccaaggctaatatgcagtgtgtcaaaggtataactgaaatatcttaacctgtaatccaaatccaaagaataaacatgaacattaaaataatactgaagcataaaggtctgaaggataacagatatccacagttattctgcaggaagacccatagactaagttggctttccagccctactgaccatccctagaggcttcaactgtgagcctggtagaaaactgtattagaagttgcaatgatttcattttctccatctcttgagatgctaggaaaggtccaaattacact

SEQ ID NO: 200176 - DNA, 456 bp, Homo sapiens
tacagaagactttcagttttatttaagaaaatatttgtgaaatgatttccaagagaagtggctgaaacatcttgttctgtgttctcaaagccagaattctgatccagttctcagcatttgaatgagattgctgtaacttctagtccctaacttggtgctttggattttacagggatcccataaatgtctgttgaaagctttctaatcacaatgttttctgatctataaagaagggttttaatcctgaagatctgggtgttcatcagtaactcagtggacaaacttcattgaaattttctttgaatgtacatggtaagaaatataacttgaactctaaatagctgttgttttatctaatgctgatgataaaaaattttctcaacataaaagaagatatactataaaaatgacttaattttctgaagtatgtatatagtttagcaggtgaactgaatg

SEQ ID NO: 200177 - DNA, 290 bp, Homo sapiens
tcccactggcttcccataatcctttaaatgaaatccagccttctgccagacctcacaaagcccttcctacctatctccttgacctcactaccaaaaccatctccttccctctctaggccccaaccacactggccttccttcagttcctaaaacacagcaagctcattctcatggaaggatctttgcatttgttccatctgccttaaatgctgctcagcctgagcatgttctcagactggctccttattgccttcttttcattgggcagtacttactcagataaaccccct

SEQ ID NO: 200178 - DNA, 199 bp, Homo sapiens
tccggggaaaaggaagtgaagagggccagagcccctgggaagaggcctggctcagatcaaggattctgccaaaaccggaaagtggaggagccaacgactcggggggttttgcttatcaggaaaaggcattctagagggcgtagtggtaaagttaggatgggagacagtggaagcttgcgtcaggggagcgaaagtacag

SEQ ID NO: 200179 - DNA, 509 bp, Homo sapiens
atatctattcttatttaactatcggtaaatcccaagatgtgcattgctgggtcatatcgtaactctgtataacattttgaggaaccaccaaactgtataactaaaggggctgtaccagcaatgtatgagggttccaacttctccaggttcaatacttactactgtatttaatattaattttgtagagacaggatcttgctgtgttgcccaggctggtctcaaactcctagcttcaagtgatcctgccacctcagtttcctaagtagctgggactataagtgcacgccattgtccctggctgatatttaaaaaattttctgtagagtcgtgttcctactttatagtagagatggtgtttcactgtgttactcaggcttgtcttgaactcctgggctcaagcaatccccccaccttggcctcctgaagtgctgaaattacagcgaaacccaccatgccacctttatttactctctctttctacccccaaccccagttgctatgtttcagtc

SEQ ID NO: 200180 - DNA, 341 bp, Homo sapiens
agagacaaggaataaactcttacgtttatgccagtggaggtgccgggaaaatttaagagaagaaaggagagtcttttcaacaaatcgtgctgggaaaagtggatattctcttgcaaaagaatgaagttgtacatctctttcacaccatacacaaaaattaactaaaatgaactatagacctaaatgtaagagctaaaactataaaattgttagaaaaagaagagaaaattaagagtagtccagcgtatagaagggtgctattattgaaagagtttgaaatagtgacttagttattttgaaacatttttgaagacgttatttagctggaaatgacagaaaga

SEQ ID NO: 200181 - DNA, 291 bp, Homo sapiens
  misc_feature (62)..(62): n is a, c, g, or t
attatgtgaacccatctctactaaaaatataatattagccgggcgtggtagcacacgctgtnatctcagcctcccaaagtgctaggatcacaggcatgagagctgttcttctgcccagctttagaacataaatgtttttccacatcttaaaattttcttcctaaatataattttaacagctacataatggagccactcataaacaatttctgtgactgctgtcctgttgtttgctgtttttcataattataaatctgcagtggacaccctcttacatcactgttatctata

SEQ ID NO: 200182 - DNA, 180 bp, Homo sapiens
cattctttctcccatacgtcaaaaaaatttatgaaaccatgtatttcctcacctgttttaagtaaatgcttaattttttcttcattttacaaagtaacacacttacaacatagtatcttgcatattttaaacatgacaagaagttcagctgagccccaggaagtacagggttgcccttag

SEQ ID NO: 200183 - DNA, 476 bp, Homo sapiens
ggtttaattttgaggaaatagtactgttactagcgaggtgaacttggagaagtaagaaagcatcacaaacttgggcctggaaaagaagtaggttttgttatgtggtttttttcaaaacccaaaggacaacacataatctgaagaggattataaactggagacttggggacaggtctaatgagttatttgttgttcccaaaggcacttgacatgtatgtgggattggactactaccagctttataaaaccatgatagcttatagttgactctgtaaatattgaaaagcacacagcagactcatatgtccacagattcttggaaaattttgggttgctatggtgtctttaatttcctcttcaatatgacaactaacaaaagccatataagttgttttggcagacatttaagatactaggaatcttttattgtaaactcttctgtaattttctttgaattttcttctattcacaattag

SEQ ID NO: 200184 - DNA, 456 bp, Homo sapiens
aagaaatttgaagtgcttgtacttacaagaaattatttcttcttctaggatgtacttacagaaactctggtacaagtatacagagacattcattgcagcactgtttgtgaaaatgaaatattgtaataaaccaaaatagtaatcaacaacaaaatggatgtttaaatgtattgttccatggatgccaaaaatgtcacatgtgtactctgaaatagactatttttggcaacagatttaaaaggtgacaaggagtgttggagataaaatataaagaaaattttaaaaataaaacatcgaataaaaaaggcaaactgcagaaaatttaaatgtaataaaatttatgttgaaaataaagttcaggtaagtaagattatgacaaatctagagttctatttcaggcttgctgacaatgtaactattaaaataaaaacaaaatattttcttgaatatctttaa

SEQ ID NO: 200185 - DNA, 409 bp, Homo sapiens
ataaataatcataaaataggtaggttccatgatatatatacataatgcaaaaatgtcagaatctctcctcagttgacagcattaaaatcctcctctgaatcaaaacctgctacaatatcagattaggcttctgaaggctagtgcctaatattcatgaacacgtgtttatgttttgattttttggacctactaactggtttggtcaatgatgcctatgtaagtttttaatcattgttttacctatgtgaatttttgagcatctgcttattttgacctcttatccataatagagagtctgagtagtcagtgcaactttatattgagtgtagcataataacataatatgttgaatttgaaaaaccattgtgtagtactaacctttaaataagaaaatttcatatacatgtat

SEQ ID NO: 200186 - DNA, 371 bp, Homo sapiens
aagagatgagggtctccctatgttgcccaagctggagtgcagtggtatgatcatagttcactgcagccttaaactcctgggctcaagtgatcctcccgcctcagcctgccaagtagggaagactacaagtgtgtactaccacacctggctaattgtatctttatatttaaaagaatggaaaaagatactgtataaacagtatcactaaatataaaaaagctaagtataaacactaagtataaaaaagctagagtgatttttattagacaaaggagacctcagaacaagaaaaatattgctaggagtaatgaagcatgattcatcacgaaagaaggatcaattttttgagaagacacagcggtcaaagcttt

SEQ ID NO: 200187 - DNA, 343 bp, Homo sapiens
tttttgctacacagaattcttttatcccctaaggactcggttgttatagatttagtatgttgtttgttattatggtaagaattttcacctattatctcaaatatttaggtaccattttcacacttctacttgacatttaaagaaaatgaagtacagagtaaaaagtaacaatttaaccaaggatatgctgtgggatacactgaagagctggatgttgaaccttggtctgactaaggcaagtctgtgtcccacagtgggggagagggctggcaggggacgactcccggtttgttgttactagttaataaaaccccaaattctgaacaaatagacaaaccctgcc

SEQ ID NO: 200188 - DNA, 145 bp, Homo sapiens
tgctggctgtatttcttattcatcatgagaaaatgtatcagctgatggagtgttcaccattctttcaattgagaggtgggaaaacaggtgaagttaagttacgagacattgagacatgccctggctaactaaagggctgatagat

SEQ ID NO: 200189 - DNA, 310 bp, Homo sapiens
gccaaaatgtagagggagaaagatgtaaagtcatctcaaaagctactcagagcctgatgctgggcccagctctaagctctttgcatgcctaaaatggcccatttcaacctcacaacaatgtgttactgtcctttttaatgtgcagccagggacactgagattcaaagatccaagcagaagctgcagagatggacttcgaacctaggttttcatttccaaagctcatactctcaaagaacttgaatgttttactggaagatccaatgctattgaaaaaaaattgagtcaggcatagtggctcacacctata

SEQ ID NO: 200190 - DNA, 492 bp, Homo sapiens
agagattcactgaaagttgtaaaaatggcacacagaagcccatgtactctgcactcagtctcccccattggttacattttacagacttgtaggacaatatttcaaaccagtatactgacattggtaaatgtatgtgttgtagttctgtttcattttgtcacatgtagattcatgcaagcactgcagcaaacaagatgcagaactcggccaggcatggtgactcatgcctataatcttagctcttttgaaaggcccaggtgggacagatagcttgagaccaggagtgtgagaccagcctgggcaacatagtgagatcctatctctacaaaaataaaaataaattagccagacatggtggtacatgtgtgttgtcctggctacttgggaggctgaggtgggagggttgcttgataccaggaatttgaggctactacgagccatgatcacaccactgcactccagcctgggcaacagagtgagactgtctccaaa

SEQ ID NO: 200191 - DNA, 416 bp, Homo sapiens
caaaaggcctgtaaatcgattatttagaatgctgattgggtttctcttgtacacttttgctggcccttggctttccaggacctactttgccattgctttctgttccagaccatgaaatctttgttcccataaaaacatagctgacccagtgttgataagctaattacagctaacggattcctggctgacagtgatagaggttgccttgcattttaaaaataacctttgaaggctaaaacaaggaactttttattagccaaatccagtgaacaaagaattttgatcatagcagaattctgtaatcacttaaaactgtttctactcttgggaactaggactaagagcttagtctgagtatgtagttgtatgccatggtctgattggactcgtggaatatcctgtcctgcttccactga

SEQ ID NO: 200192 - DNA, 497 bp, Homo sapiens
gaaggaacataactcaatgaaggtcatatatgacaaacccacagccacctggggaaaagctaaacaccttctctcttagaactagaacaagacaaggatgcccactttcactattcttattcagcagagtaagaaaagtcctcaccagaacaattaggcaagtaaaagaaaaagggtatccaaattggaaaagagaatgtcatattgtcctttgcagatggcataatcttatacatagaaaaacctaaagattccaccaaaatcttttagaactggtaaaggaattcaataaagttgcaggataaaaaaatcaacaaacaaaaattagtaggtgtggacatgatggctcatgcttgtaatttcagcactttgaaaggatgaggcgggtggattgcttgagcccaggagtttgagactgtcctgggcaacatggcaaaacctcatcagtacaaaaatgagctgggcgtggtggcctgcacctgaagttcagctactca

SEQ ID NO: 200193 - DNA, 487 bp, Homo sapiens
caaagaatatttactacatcctatgacccttatcaaagggcagacagcataaactttataagccgactgctaccagcacaacttttccctagagaactccactctccagaattcgaattccaggccaccatccaaaattccaaataccctcagagagggaactctgaggtaaacagatcccatcttcagagagtaaccaaagacgctctggccatgactcaggagattagccactgccttgattcatctctgcaaagtcagcctgtggggcttcccagagccatgaggaggaagtgggccaggaaggaatcaataattgccacccacagatgtgcctgtgagtgctataaagggaatgaccgagaacacctaggggaggttctcagaacacgcagccagtcctctatgttggagcaagtcttagttcttccaggcacgaatttttagtgcccacttctgttccttagcaaaaaaggaaaaaaaaaaa

SEQ ID NO: 200194 - DNA, 593 bp, Homo sapiens
acggctgccttcttcctgtgtcttccctctgtgtgtgtctgttttaatctcctcttataatgacaccagtccgagaggattgggcccatcttgggcctcattttactttgtatgtctaaggtattgtactgggctttagggcttcaacatgggaatttttggagtcacaattcagcccctaacactaggtgtcgtatatgttagtagacatttaatagagctgcacaaagattagaataaaagtgagctatgagctctgcgtttagataacccctgggctcagctgtggccctgggaattttatgtgtagccgactccaggcaaggcagtgggggtggccatgtgcaccccgaaggcagacgcctggggagctcacaggcagagtgtgggacttctcaggatcccaggagcgtgggctgggatggtggccatggcgatggctagagtgaaggagtttggggactgtcagatgagtccctgatgaggccccagcccccatctcctcatctgtaaaatgggataatactctcccctcactgggttcccatgaggtgatgtgaaatgacctctttgtagcaccaggcaccagtggg

SEQ ID NO: 200195 - DNA, 399 bp, Homo sapiens
tgtgagctatctcaggacagtaagattttctgcatgtcagcagcccttccaagtccttgacaatgcgtaccagaaacttccagaagccgctgggcagcatgtgctttgtgttttcattgcttctctataaccaatgttgggcatcaagatctggcccttgaatcttctatgaacgcagttgtctctgggtttccaccggttatgcttaattttgacatattgttctgactggtggtgaatgaacttcttgctcctctttttgatgatcttgggcttcatgaggggtctgatggtggccatgatggtgagtaagagatggctctaaaaatcaaccccaaatggatcaaagaccttaaatgtaggagctaaaattataaagctcttgaaagaaaacataag

SEQ ID NO: 200196 - DNA, 469 bp, Homo sapiens
agtggtttgctactgtgcatatcttcccagctcccttttcactgttatcacagttgactatggtggtagttgttggcatttcctgaacatatcacactgattgtgggggcggggagggagaatcaaagttggagaggtcatgagaaaccatgtacaaactaaaattatgggagaagaaactatgagtgaaacgatgagaaaaacctaatgcatgatgtagaactgagtggtgttaatagcagagcactggagggaagggccacaaaactcttcaccccaaggtctagaatcattctagaatcatcctacaagcctagttttcatgagattcagccctattttatttcttgctcttggaattatatgaaattacgaatttctgtgtgttgccagctgtaatagaataccctggaattttatttacttttaattttgtttatttatttatgcttatgtgccatcttctcat

SEQ ID NO: 200197 - DNA, 523 bp, Homo sapiens
gatcaaaaatattcaggaaaaaaggttggttacatctgtactgaacatgtacagacttttttccttgtcagtatttcctaaacagtatagtataacaaccatttcatagcatttgccatatattaggtattgtaaactagaaatgatgtaaagtacgtaggaggatgtgtatagcttatatgcaaatactatgccatttcatgtaagagacttgagcattcttggattttggtatctgcaggggaccctggtaccagccccctacggatactgagagacaactatatttcctcacttcctggtctttcagaaaaagatataacaccgatccctttccttttgggatttaaaagccaaaccttgcctttgtttttccctcctcccttcctagcctttgttttcttttttccttttttttttgagacaggattttgctcttgttgcccaggtggaggttgcagtgagccaagatcatgtcattgcactccaggctgggtgacaaagcaaggcttcgtctcaggga

SEQ ID NO: 200198 - DNA, 164 bp, Homo sapiens
aatgaaattcttatacatatagtcatgtgccaatgttttagtcaacaatggactgcatatatgatggtggacccagaaggtaataagggagctgaaaaattcctcctagctgtcataactttgcagtgcaaagtgttaatcatgtgtttgtggtgatgctggtg

SEQ ID NO: 200199 - DNA, 417 bp, Homo sapiens
gaacctgggcagcggaggttgcagtgagacgagattgcaccagtgcactccaacctgggcaacacagtgcaactccttctcaagaaaaaaaagaaaaaaaaaaagaatatgggtccagatccatatggatcctagatccagatcacggtgttagaacatggaaaaacattgcaagattctgctaagtgaaaaaagcatttgcaaacagtatgtacagtctatattcagaggaggaactgctgggtcatagatgatatttcataggtattgccaaaccgttctctggagaagtggtatgggtttaccctgggattcttctatggagggaatagttgagctcccgggcttgctcttctgggtgcccctccccgcttcctatccaccacaaggagctgcaggggagcggggcatgccggt

SEQ ID NO: 200200 - DNA, 202 bp, Homo sapiens
gcaactattatacatcaggcattaggttaggcctccacatacaagcagagaccatgtctgtctagttccttgcaattgtgatcttaaagcctagcacatgggcatgtgcttagtatttgttaagtggaaggatggatggatagatggataaatggatgaatggatggatggataaatggaaggatagatgaatggagagatg

SEQ ID NO: 200201 - DNA, 559 bp, Homo sapiens
gaaatgataaaggagggtgaagttggtggttaatcagaagtaggttttccaatcaagcctccctcttggaagagatgcaaaaagctgcggcaagcattacattttgatgtgtgtgttgggatagaggggatttcactcgtgtaatggaaggggtggtgatggaggcagatccaagtgctactccgttcttgtttattttgacgaatcacactgccatgggtgaagcacagcagcttaaaaacctggatgtacatgcatatttattagatatatgacaccaaaacccctacagtactaaagctctataatcagggggacagaaccaatatccaaggcaggtctatggagcttcaaagtctatattcttacacagttttgggccccatttggatacaggaccacagtgggatgaaactatcttaatgcacctattctctctctctctttttttttttttttagatggagtcccatttcttcgcccaggctggagtgcaatagcgtgatctcagctcactgcaacctccgcctgctgggttcaagcaattctcctgcctcag

SEQ ID NO: 200202 - DNA, 817 bp, Homo sapiens
tttcaccacggtggtcaggatagtctcaatctcctgacctcatgatccgcctgccttagcctcccaaagtgctgggatttcaggtgtgagtcactagtgtagcaactatttatggttcatgccaccataccgtatggatccgttggtagaacaaacctgtattttttcgtcttctgtcaactggtcctagggagcgtcccgtgaaaccacagatgtagactgaggggtgtgaagtagaagaggcggcagcatgtgtttggtcactcacttgggtcacatacttatgccttctgaatctgttcaggcatagttttgtgtatattatttccagtttcagtggaatgctgtttatgtccagtttaatgatttgtgtataggctgtcctcctatggtatgcctcatgcttctgtgggctgtattgggatcagagtcttgggggtctgcaagcaaggtggtattgttgggttttgagaatcagcatctctctgtgaggcactgtatttgttctcacactgctataaagaaatgcctgaggccaggtgtggtggctgaggcctgtaatcccagcactttgggaggccaaagccggtggatcacctgaggtcaggagttcgagaccagcctgaccaatatggtgaaactctgtctctactaaaagtacaaaaattagtcgggcctggtggcgtgcacctgtagtctcagctactcaggaggctgagacaggataattgcttgaacccgggaggcggaggttgcagtgagccaagattgtgccatttaagcctgggtgacagagcaagtctccatctaaaaaaaa

SEQ ID NO: 200203 - DNA, 655 bp, Homo sapiens
agtgatgaaccctgaggagagggaggggtgcggcatcagggggccccaaggaggagtggagacgaggggagagggaactggaaagcgagagaggaggaggaggggtagggctgggtgctgtgggctgaatgtccatgtctctgcaacattcctgggttggaccctaacctccaatggcatggtgttgggggtgaggcctctgggaggagactgagcccttgtgatgggatcggtagccttataaaagggaccccagagagctcgcttccactttctccctctgccacttgagcacagcgtgagaaggcggccatctccacaccagggacaggccctcgccagaatccggccctgccggcatcctattctcaggcttcagcctccagaactgggagaaaatcaacccctgttgggttttgagacggagtctcactctgtcgcccaggctggagtgcagtggcacgatctcggctcactgcaacgtccacctcccaggttcaagggattctcctgcctcagcctcctgagtagctgggattacaggtccccaccaccatacccggctaatttttgcatttttagtagagatggggttttgccatgttggccaggctggtcttgaactcctgacctcaagtgatcctcctgtctcggc

SEQ ID NO: 200204 - DNA, 544 bp, Homo sapiens
gcataatattcaatgaaaaacgcacaaggtctttgaaaattcatagcaattttgcatgagcttttgaatctaacattcagccctatttggtagcataatccttattttaaaggtaataaacactgaaaagaattttttccaacatgtggattgtgtcatgttagaatcctgaagttttcacatcaaaagtaaattatgtctgggtcagttcagataactctcaattatccggacttaatttatattaagctttagaatcctttggtgtcttaaccattctttcaagaggttgcagttctgtaagcagctggctatggcgaatgtgtaaatcaatttgctgtgcctgactgagtataatggtacttgaccatgaggacaggccacaggaggaagtcaagctgaaatttaaaactcacaaaatgggtaattccagaggataattgaaagttgactgtaattaacttcatgcttttgttgttgtttttaattaattgtttcttagacttgggttacaagcattcagatatgtatggtgctgttgtga

SEQ ID NO: 200205 - DNA, 435 bp, Homo sapiens
agaccagaagttcttaaagcctggtccctggaccagcaacatcagtacctcctgggagcttgttagaaaagcagattttctgtgctcacccctacccactgaatcagaaatgagggtgaggtgtggtggctgtttcacagccctcccgggattctgatccatgctaaagagtgggaagcactgctccggatctgcagagaaatcctgctttcaaagaactcactaacgcccctacaaaactacaatttttatgactagaagctctgtgaataccttaaacaaggaagctgacagatttagtaagatcgcgtaggtcatgatcgcaaatgggctgcccaagggcacgtctttcccttgggtttgtgcatttgtcctgcacacaattaaaaacatttaactagttgccagtattaaagaaatagaaacttccacgta

SEQ ID NO: 200206 - DNA, 174 bp, Homo sapiens
gccttggttttcagtgcagttttatttcattaaataacagtttaaatgaagtagcacaagacagtatttcattacactgctgtatgtgggctttattcacctttattacagctgcatttctgttgtgaggttttttataaaactctgagctagaaaattagtgaagattgtact

SEQ ID NO: 200207 - DNA, 782 bp, Homo sapiens
ctccacctccaccttcaagcataaggacgtccgcgtgttttctctttcagttagctggaggacaggatgttgggaaaggaaaggacagatgtctaaaggaggttgcagagcaggccaggcagacagtgggggctcccttgaagagcttcctccctcccaaacctgggtctcaaagacctagaaagaggcaggcacagcccctgcggacagcagggagccagaaggtttgtagcctattggtgcaaacattggacaaattcctgtgtctttcctagaagcgcactatcacaaacacaggagtgttttgctcctttgtctcctcttccccatctatgtccctttagtcacagttaggacaaatggggaggggacaccatgctgaggcagaaactagcccagaactcactcagttcttctagtgggtgagtgcagagagagaagaactcagatcaccagtagggagaggtaaaaaagcaaacaaagcaggctctaaggcacacaacattgcagaaaatgaggaagggaggggagggaagggacagaagcaaaaaggagcctgtggtgttccccagtggggcagggtgagcaggggcttccaggctgcatgaggctcatggaccagctctgatcccatgcatgtgcgcatgctcagagccctgctgcccacaacagagcactgcgctgcgtgggagtccccacttcccaagctatcagagtcaacgtcctgcctgtgcagctgcagcaaagccagtgagaggtgggtctcgccatgcagtaaggcc

SEQ ID NO: 200208 - DNA, 776 bp, Homo sapiens
aaatatccagaatagtcaaatctacagagacagtagattaaagcaggacagagagaggttgccaggggaaggggaaagcagggaatggtaagtgactgcttaatgggtatagggtttccttttggaccagaaaaatattctgatagtaatgatggttacacaaccttatgaacacagtaattgtcactaatggtcaattttatgctgggtgccttataccacatttttttttaatggatgtgatagacaaggttgtcaattcacttttctctgttcttcccttctaaaaataactaaatattttggaaatagttcaacagacaaccataaaaggattctgatggctggaaagaaggcagtgactgactaggcatctcaggacttgaaggctgacactatggtgagttccctggagttttcttttcatcactcacataacccaaactgggcaccacagaagcctgacacacagatctgccgacagcataaacacacactcaaaagtagaagaaaaacttgctttctccagccaaaagacccggaaagaggaagcccaacagagagggtctcccagtggggagccccaatcccttctccatacctggagcagtgacagaccaatccaacctgcagtggcaatgtcagcagaaccctggatctctgggccctccacccagcatcagacattttaccagaccctacatcttctggcctcccccacccactccagtgataacaagtggcccagggaaatgccttctacccctgtggaagca

SEQ ID NO: 200209 - DNA, 120 bp, Homo sapiens
agaatgccacttttaatatttgaaaatatgaatttttggtagaaataatgtaaaataaagcttctggtaagccttaggcagttaaatttacatcagtgtaaagtaggatgaaaatctgta

SEQ ID NO: 200210 - DNA, 832 bp, Homo sapiens
atgataaatgattggttatcattgttaatcctacaaaatagcagaaagagtcttcaacataagctttaatactatggccaaaccaaattttattatcagaatgacagggcagtggattactgtttctggatcaccagagtttaaacatcacatcttttgctgtgtcgcatctagttgcaaaaagattaacttgtgtgatgggtatcaatttaatttttgttaacatagtaaaggaaatttaactgaaaaaggaaatcgcttccagactctctgcttaggtttaattcatcttgttagcatcaaccaggttgtgtactcttagcaagaattagttgtttgataatccagagtttgaaatgtttttttaatcttcattttcttttttctgtttggggaaatcaccttaatctcagcaatgcatcagaataaatattactacaactctacgaatgtgtaagattaagtgcagaaataataaagaaccaacttatggtgttgataatgatattttagagtagagtagagtagagtagagtagagtagagtaggaggccaggcacagtgactcatgcatgtaatcccagcactttggaaggctgaggtgggtggatcacttgagatcaggagtttaagaccagcctatccaacatggtgaaacccagtctctactaaaaatacaaaagatttagccaagtgtggtgctgtgcacctgtaattccagttactcgggaagctgaagtagaatagcttgaacctgggaggcagaggttgcagcgaactgagattgttctactgcactccagcctggtcgacaaacaagacactggctcta

SEQ ID NO: 200211 - DNA, 1082 bp, Homo sapiens
gatcatttgttcaaagctgtgtatgtttaacatccagagcataggacctgaagggtcatgggcataagagctctcaggtccagtccatccgagggcctcagtcaggtgagtttgccaggttggtaggttggttccacctgtgatacagggtgtcacttaagaggcaggcagatacacacttcagcataagagcaacttgagtggtgtctccagttgatgggaggtgctgcattgtttaaagtcctgctcaactgagagcagtcacctggttggtcattcctgtgtggcagaacgctttctctcaggaggacaaagaaactgaagacaggcgctcctgcctttgggcccagttctttctggcaagggggtcctagttgaagagaagcaaactcatgtttcttgattctgggcaagcagcatctgcccttcagcaggatgtcaagtcaacaggaggatggcctgcagtaggatttgtaggaagccaagcgtgggtgtcctggtcagagcccgatgtttacctgacttcagggaggcagattctaggacagggacagtccaagatgtggctttctgagactctgaaaggggaggaggctccaagatagagttctgaggacagcagcctaaggaagaatgcaaaggggaagcgtgttgaaaggccagagggcacaaacaggaggtctcagaaatataaaattatccatgaacactgatcaagaaatggcactgcggcctgaaggaagacgcttggagagcctagtcactgctgacagcacctaaccatgactgaacatttcctcagtgttgggcagttgtaaagtgcttttctttttaaagttactttattttattttttagagacttggtcttgctatgttgcccagtctgatctcaaactgctggcctcaagccatcctcctgcctcagttcttctgagtagctcggactacagttgtgtacctcgatataacccaacagctctataaggtagatatcattaataccctgttttcatacataaggaaaactgaggcatagaagacctgaagctcacaaaactgttggactcccttgcttccaag

SEQ ID NO: 200212 - DNA, 173 bp, Homo sapiens
agccatgcatagtaattcattatattacaatcagaatcaaataattttgtttaatatttgcttctgaaactggtgcaccatttagctgttttgataccataaacaagtaaattttataaatgtagatatatgagatctttcagttattttgattgactcatttataaaatgta

SEQ ID NO: 200213 - DNA, 941 bp, Homo sapiens
agttggatgatactgaaaatcatgaatgatgtgatttgttccatgtatctgtggaacatccctcaccttcctccggtatgcgccttctgcactccacacgtggtcgcctccatcctccctagtgtctgtcagcttgcctggtcaccaagtcaggaggaagaagatgaggaggctcaccagttgtaggcaagactcttcctctcgggagatcttgtaataatggcccagtttcagggcacagttgtacacattctacttaaatggaggagttcagtgatgccgtggccaaaagagttatgcccatttctaaaagcctggcatatttggtataacttaagcaccaggtaaaatctggtgcttaagttgtaccaagtatagccaagtttaactgtcgttgtgtattaataagatttaatttttatgcttgtgcttttcagagtaaagggcttgctttcaatagtagaatgacaaagcttctcctccaatgacaatctgttagcaccctgttgacttagctcaggacatgagactgacttagctcaggacatgagacatttcctggaagtgatttccatgagaacaaaggcttattcctttaacttaaaccccaaactttgttattttaattattttcaggcaatcatctttatatactttccttacaaacccagtggttgagagcataggccttggtggcaggtgcatctgggcttgggggcttctgccacacttactactctgtgacttgggaagctcttaaggctcccaaggctccgtttcttatgtggaagaagaatagcaggaggactcacctctgcgggttgttgtgaggattaactgggtgatgactgtaagcagctgggagagtgccttgtgtgcagtgaccactgttgctgccaccatgattatgtcacctctcaacatggggtggtgggaggccc

SEQ ID NO: 200214 - DNA, 930 bp, Homo sapiens
aggaattcagaataatccttttaaatgccattcaactgtttttaaaaactctgttgactcccccaccaacctgtcttgcaagcctacctctgtggtctgacttgctgatgttaggccccggagagatggtcaaggttagattatgtggggggttgtaggtgatagcaatgagtttggattttctttcctctgtgccatcaaaaagaagcacaatgacattgtttgctttacattttaagtaaatgtttggaataagtcgtagcaggttaagaatgaaattagggagaccagttatgctgcttcagtagaagaggcaaaaaaccacggtacctggataaaggcggcagtggtgaacacggaaaacagtggatggatgcaggtaataatttggagatacagccaatagaagttgctgctgaactaaatgagagggtggtgatacaagagaaaagacagaattgaggatgacatctgcatctggggcttcagtaattgggtagtggttccaagcacagaattggaaaatgttgtgtgaagcaggttttcagaggaaaatcaataattcccttttggacatgttagttttgagattcttgttaaatatccaaatgtcagacagttaccttcactagcacggagttcaatgaagtgagtttcttgagatacaaatttggaagttatacttttaaatgctcaactggcatttaaagtcatgggtatggatgaaatcacctggggtgaggaattaggtaaggtgaaaaataaaaagattaatccacaatcctcgttctcaaataatgtaggtgagaaaatatacatctatatatctatatgtatacctatatatgattatgtaagtagtagaactccaagatcactcactgcctccaagctccatttttgttcttccaaccacagataatttattcc

SEQ ID NO: 200215 - DNA, 369 bp, Homo sapiens
tgtgttggtatttatttctcattgaggttgagaaggtcttggtgctttgaacatcttcccacctatcctgtgcacaactgcacacactctcaaataatgaaaacatttttctttttgattttacaagctgatattattctctttggagctttggtgtcttagaaatgcactgtaaccttaattacaactcgtatcaggggagttgtactcagttttaagggactgcttcaccgttctaactgtggagaaatgggaagttatttcccagtggctcgaattagaattaatgcactgagctctccagaccacagacagaatcatgagacattgggtaagcatctgaatcggggaattttcagcctcctggca

SEQ ID NO: 200216 - DNA, 386 bp, Homo sapiens
cagtttattttcctctcatcaatctgtcatagctgactgcctatatatctctgtataatacatcagaaagagagctcccgcctaaaacctcaatttactcagtacacttcaaagcctaaaggccttgtaactcctttctcccactaatagtagctggaattcactagatacttaatataactgtaagcactttatagacactctttaatgtaatcctaaagatgccacatagcattataaattatattatgcaacttttacaaaggagaaaactgaggccgggcagtggtggtagttatatacattgtctgagatcacaaagctaaactcacactcaagcagtttaggatagcatagaatcttaaccactagagcatatctttaaa

SEQ ID NO: 200217 - DNA, 576 bp, Homo sapiens
ttttttttatcagggaaaatttgatagtttaatgtttgtaagaatgaaacatctttaaaataaataacattacctccaaatttaacaaagaattaaaaactgagaaatatcttccataaatatgggaatgtactaatgttcaaatattaagagttattataaaccaaatgggggaatagcaacaaaaccccgtaagtattgaaaaagtatgtaaactcacaaaaagaaacaagtagcaaagtacacaaaatataaaagtcaccgtttctagttaacacaactcattgagataccattttctttcaagtaggaaatcagtcaaaataaaaaaagaaaagaagaaaaaggaccttaaggatgccccgtattgatgagggttcaatgcaacaagctcccttataacatacagcatgtactttaaaatatttctgcatcatgacacagggctgtattactaggaatctattctgaggacataattagagatacagacaaaaatgcttgtgtaacggctttcaacaaaagtataccagtagggaataatagtataaaaacaattacactttcaagacctga

SEQ ID NO: 200218 - DNA, 150 bp, Homo sapiens
gacatctaagtgaggctgtcaagtggccagtttgacagagtagtcaggagcccaaagaagaggttagagctgggggtagaagtgtgggagccctcccacagagaggacacagacaggcgcggaacacacaagaccccagagatggagtcg

SEQ ID NO: 200219 - DNA, 179 bp, Homo sapiens
ttgctgagttgtagacagattacaatcgaaagagtatccatagccaaatcctaactagaatgaagggaaaattttaatagtgtacatagctgatgtcctaaaacgttccagaagctttaagagtgtgataagggcctggtacagggactcacacctgtaatcccagcactttgggaggc

SEQ ID NO: 200220 - DNA, 439 bp, Homo sapiens
agtcagataaagaatccaggcaagcacaaggcaggatattaatactcccagataaatgagctgagaactgtggtcctggggggcctgagacacttaacaaagtaggggttcatgactaagaaaaatacaaggccagatcccagttctagtgacaaggtcagagagagtggagatgtcagcagagtgacctggagagtactaagcctcagacctcactgtgtcaaaaagtgattagaatctaatgagagtgcctgggtatcaaacccagtcaatggatactaacaagggttcatgatagtctgagctccactgaacttcactcttcccaaagattgaagtggtggaaagctcctgataactttgccaagagcagaaatggtgtgagtcctgggtacccttaggcttcctggaagctcagaggattgagccttaagaatat

SEQ ID NO: 200221 - DNA, 198 bp, Homo sapiens
tcaaaatgttggggcaaaaaagttgtgaaactcacagtttccaatttaaaacttactaccaaattacaataataaagacagtgtggtgctggcttggggatttggtttatagattagtggaattatagatttggtttatagattagtgaaacccggtctgtactaaaaatacaaaaatcagccaggtgtggtggcatg

SEQ ID NO: 200222 - DNA, 246 bp, Homo sapiens
ctgggctcaagagatctggtcaccttggcctttcctaaagtgttggaattaacaggcatcagccacagcagccggctgaccatgagcatttgagtgaagtgaagccaggcacagtggctcacacctatcatcccagcactttgggaggctgaagtgggaggatcacttgagctctggagttccagaccagcctagacaacatactaagaccttatttctgttatttaaaaaagaaaaaataatggc

SEQ ID NO: 200223 - DNA, 396 bp, Homo sapiens
gatgtgattcagttcttatggagtagagctgtatctgtatttcagtatgtgccccatgtgattctcatacatccaaagttttagatccactttcataaggaatattcatccaagttcataattaataaagaatatcaagacaccaggtaacaatacagatttcaaagtctgaagcaattagtccataacatgtatctttagtaagattttagaacaaatgagctggcaatgtaaagaaagtgttagttacattattccttgaaaaaaattaagattacaattccttttcatatctacaaaataggttagtatagggagtgggttttcagtacagtaagttggctctcagaaatcccagctcatgcaagctcagaaaaaaataaatgaactgaatgg

SEQ ID NO: 200224 - DNA, 294 bp, Homo sapiens
gtttgtgtaactggattttttttttctgcaaagcatgatgctaaatgagatttagacatttaggcctaataataaattgatggctatctgactaaaatatgtaaatctatctatctatatatctatgtatatattcagcttggtgggaactgaaacttatttcttaaatatgtattcagcacacactgtgggccaggagctgtgcctggctctggagatgcaaagatgaataagatgggccctggctgcaaagaggccttagtcagacaagtgggcaggtgggcaggtgctgcg

SEQ ID NO: 200225 - DNA, 494 bp, Homo sapiens
aaccaacttcttgttatctagaaaattactagtaataataactggctagtaactagccagttactaataataactaattaataaccagtagcagttactagtaataataactggcttatataaccctgattttgagaccaatgctagtctatgttaataacatattaatctcattttttccttaccataatcataggagagaggcctggttattatgctaattttacaaataaagaattaaggcacagagaggcagtaggcactcaataaatattggttgtgttatcccattcaactaatagtcactgagtgtaccctaagggccagttctccaacttgaaaactcagaggaatatcagtttgtgtatctcagggagtttctgtaagagggaggaaaaaatgaacagttgaaagcaggaaagtgttaaatataaagccccatgcaaattgttcagatgccctatttcaattactttcacttggaatattttggt

SEQ ID NO: 200226 - DNA, 432 bp, Homo sapiens
aaagaaaataaaaagaaatctatgagctgaagactacctcagggatttcaaatcaatgggaaatgacaaatatactgtatatattgcatcctataggaaacaaatagtggagtgaaaggaaaaatcacccacatggctggacctgagataaaggttcatttagatttcagaattgaattgcttattttaaggtcatgtcaaaaaataatgaggatacaaaggaagtgggtctattagaagagaataatggaataaacccagagagaaacagagatgggaaaccgtggtcactgaaaaaggaatagaacatccagattcctatgtgatttccagtacatgtgaggtctagctttactgttttctgtccttctgtcttaagagatttatctttacttcagtttctccatttaggattctctatgtctcgcaaaa

SEQ ID NO: 200227 - DNA, 487 bp, Homo sapiens
atccagaaagtgaacacaactgaggttctggtttccagtaataatgaagtagactagttcgttgaataactatttcacagataacaataataaagcttaataaaatactatattttgctatatagaaaggcacactgtttagaagactgaatgaagattttatctatgccactgtggaagagataaggattggggtttgaatctattcaaattaactccctcttaaaataataattttcaaagaaatacaacagaatccagagtccctgtagttcctatcacacaatttaaaaattcatgagatgtgtgaagaagcatgaaagtgtaatcgattcacaagataaaaagcagacaatagaacctattctcaagatgtgcaagatgctgtaatcagtagataagatttgaaagaagctatggtaagtacgttcatgggggtaaaagaaaacagtctcatgacaaatgaacagaagcgtaactgtacatt

SEQ ID NO: 200228 - DNA, 256 bp, Homo sapiens
tggtctggttctactgcaattcaaagtgttttataagggtcccaactggtgctgggaagcaggccacgcactgaagcagggcagagagaaggaggatgcagccagtcaggcctggggaccgacagccctgtcacgctgacttatgatggatgagggaaaagtctatttctcatccgcagtgggggaggtgaagtgtaaagaaagatgctcccagagtctctgggcgattcatcttgcagcagataaactctagaag

SEQ ID NO: 200229 - DNA, 109 bp, Homo sapiens
gaggtgtggctcccggtagagggggcgtggcgccctcaccctccccgggccaatgggcaggaggtgagaagtggagaggaaggcgaattatcccatcccaaggtggctc

SEQ ID NO: 200230 - DNA, 352 bp, Homo sapiens
tggagtgaacaccccagaggtgggcaggggacaagtccagcatgggagacaggacccctgggtcaaaggctgttcttaggtaagcttcgtgacaaacatggcatttgagctgggtcttgagtggagccaggagaaaacaggagttttgaaaattcctgagggaaaaaatgtgaacaaagaaagggacccaggaagtagtttattgttaactatcattttcctactatggtatcaaatacaagaatgaatttcttctatccaactgcatgttggtgcccattagtcaacttctcttcctccccacttcccttcccagcccctggtaaacactgttctactctctacctctttg

SEQ ID NO: 200231 - DNA, 297 bp, Homo sapiens
cccgcacccttctaaaacagaattggaatgccagttaaggatgttgcctcagttagcggctccttttctctgatcatcataataagctttgggagacaaaattgaaagtggagaaagagatataagaagtattatggttgccaaagtctggcttgcatgacaaaaagataagttttcttttttggtaattggagagctcagaacacaagagttggaaggagctgactccaagcccagcctcattcccacccaccatgtcctcattcattgtgaaaagagaaagtaggagttatacag

SEQ ID NO: 200232 - DNA, 177 bp, Homo sapiens
acaggttagtacataactagttcacctgagtccaaaactaccaaatgtgaagtagaagctaaatatagaagatgaaaatgtttacctgtttgagagtgagagttaaggtaattattaaaatgaaaatttcatgcttctcctttattcccattaaaaataaataagttcaattccaca

SEQ ID NO: 200233 - DNA, 215 bp, Homo sapiens
tggtgtgcgcctgaagtccctgctactcaggaggctaaggcaggaggattgcttgagcccaagagttcaagtctgcagtgaggcatgacagtgccacaggactccaacctgggtgacagagtgagaccttgtctcaaaaaaaccccaaaagacaaaacgattacagataaggctcaagtatcctctgattgcaccctgttttcacagcaccttct

SEQ ID NO: 200234 - DNA, 322 bp, Homo sapiens
cacggaacaagatgatttatttggtcgaagttttagcaaaaaaaaaatgaagatcatcaatataaggatgcattttatattgactgtcactaaaatccaagggcatgaaacattctcattggaaactatatgtaaatttctctttgaaaatgtaatattcatagattttataagtaaaacattacaaaaaaatgcaaagtaccaaaagatattacaggaaaatggaaattacccaaatcccacgacccaaacactgctagtgtttactttctttccacactgtctcacgtctattctctccactatagtgagagccccaaga

SEQ ID NO: 200235 - DNA, 451 bp, Homo sapiens
gggccacctgccggcgggaaccttgtcacactcatcatagtatccccaaggctacatagtaaacacacattaaagggcacagagtaaacacattcaatattttctgagtggataaattggttaacattgtataattttcaaaactaggtaatggccttaagaagtacgactggcagaataggaaactgagacccagagacattaaaggattcagttggtaagaagttgcagaggcagggctaacaacaaaagcttacctcagtatgggaaaggtgatggccacaggtccctcaaaactggcctaatacactaaactccactcaggaagcttgggatactttggctcttcaagggcaaagcccttgatttactcccagacaggttgctttctgccccaaaaccaaggatgctaagagagggtagctgaggttgccagttagtgagacacgtg

SEQ ID NO: 200236 - DNA, 418 bp, Homo sapiens
gaatagaatgggaggcaggtttgtcctgagcagttccgagcttgtcttttcccttagtttagtaattttggggccccaagattttcctttcagaaaaaagaaaatgtggtatatatacacaatggagtactattcagctctaataaaagaatgaaaccctatcatttgccacaacacggataaacctgaggatatcatgtaagcaaaataagacacagaaagacaaatacctcatgatctcactcatgtggcatctttaaaacgaagttaatcattaagatatttaccagttgtctgaggtattgggttgaattttctttttttttttttttttgagacgcagtctcgctctgttgccaggcagaagtgcagtggcgcgatctcggctcactgcaacctccgcctcccaggttcaagc

SEQ ID NO: 200237 - DNA, 224 bp, Homo sapiens
cagctgaggaaagaaaggaccagaaatgaggggaggaaaatcatagtttgctctgttttctgcatgatccccacttggacagagacacatacagtgtgtgtgtaatggtggtgtgtcttcataaagcccttcctcactcctgactttgatatacagtattcataatcttaaacatgcctttccaaaggaaagaagaaagggattaggaattctacgcagaaagt

SEQ ID NO: 200238 - DNA, 383 bp, Homo sapiens
tgcaactaaattttggttttcaaaatttaatgtgactccaaaatggatgcgtggcctaaaaatctaacaaccattgatgtaacctcactgctatacgaggttgtgacttggtataacaataccccttttactaagagctcaattagagcagggcactggatgcagctgctgcctcaaaagaaaggaggaaaatgagatcggaagaggcagtaggctaaaatcactggctacccttttgcgtggtcaaaggccaatgagtaacatgcttcaaacaagttattttattcctgagaactgtgaaatcctttaaagagatcctaaagtaccatcccaacatttaattacctcccagaattaccatacacatgtaagatatttaggta

SEQ ID NO: 200239 - DNA, 803 bp, Homo sapiens
caggggaggacttttggaggagatgatgattcgagctgagatctggagagtgagaagccaaaagctttaagagcaggggcaggagtgttgttggtaaagacttcaaggcatggccgggtgcagtggctcacacctgtaattccagaactttgggaggccgaggtgggcggatcacctgaggttgggagtttgagaccagcttgaccaacatggagaaaccccgtctctactaaaaatacaaaattagccgggtgtggtggcacatgcctgtaattccagctactcaggaagttgaggctggaaaatcgcttgaacctgggaggcggaggttgtggtgagcagagattgggccaaaaaagacctgaaggcaggacagagcctggcacgtctggggaggtaagagacctgtgtagctagagcatggagagtacaggggaacggagcatgagaaggtttgagaaggcaagaagaagggccttgccatgggttctgtttagtccgtttaggcttctttaacaataccatagactgggtagcttgtaaacgacagaaacttatcacagttctgcatcctgggaaggacaatattggggtgctggcgtatttgatgtttggtgagggcctgctttgtggttcatagatgctggttttttcttttcttctttttctttttttgacggtctcactctgtttcccaggctggagtgcagtggtgatcttagctcactcccacctccgcctcccaagttcgctttggtgctctcagctcactgcaacctctacctcccaagcaagcgatcctc

SEQ ID NO: 200240 - DNA, 441 bp, Homo sapiens
tgtagtctatggcagagatgccaaggaatgggaatcagatctcaggcactgaaggtttctgcagaaccaggaagggcccagggcatccctggtttaggaccctgagtattcactgatccttttgtttttctatttgtttatcaacagtatatgtttacataaatgtaataatctaaaataagcaaaagaagtagattaatcatattatctgtaaaaatctgcttaaataacactctcaactcaggcccaagggctgtgaacaccacactgcacacgccagccccagacctgtcagcactcagaaaaccctgctccacagctggtcatgtccctagctgtgtcctcagctctgcctctctcctccccagacagaaatgtgtactgtgtattacaggaataaaaataggccaggcttgagtcaggtgtaacgttgtgaaaagc

SEQ ID NO: 200241 - DNA, 214 bp, Homo sapiens
tctggagtgtagtttaaactgctccttctgtttcctactgctttgttccagcaatcctttgtaaatttagatgaggaacaaaaccttcctcaaatatttctccaaaggaactacacattaagtaaataggttctacagataggactgccaatgccaggttttaaagttagttaggaaggtgcatttatgaaatgcttacccagtgtggagagag

SEQ ID NO: 200242 - DNA, 376 bp, Homo sapiens
acagatcacatagggaaggaggcactgtgaagactttggattttactctgcatgagatgagaatcttttaaaaggtttttaaaagaagagtcatgtgatctgacaatgttttaaaaagttcattctggctactgaattgagactggtttggtcgagatgggggacagtcaaagcaggaagcagttagtaggttcttttagtaatccaagggaaacatgatggtagtgtggactggggtggtggaggaagtcctgagaagtgatcaggttctggatttgttttaaaagtagaaccggcaatatttcctaatgatttggaagtggagtgtgggagaaagagaggtcaaaggtgacttcaaaagttttggcctaaacaa

SEQ ID NO: 200243 - DNA, 387 bp, Homo sapiens
aatgactcctaaggctcctttcagctgcccaataattattaggtaataggataaaaaatacccagtgtaaagggggaggttttacgtggggtataggaaatatctgattcctcactatgataaaaaaacaaacaactaaatggctccattccaagaagtttagttaaaacttgactgatgtgggctgggcatggtggctgacgcctgtaatcccagcacgttgggaggccaaggcaggcggatcacaaggtgaggagatcgagaccatcctggctaacacagtgaaaccccgtctatactaaaaatacaaaaaattagccggctgtggtggcgggcgcctgtagtcccagctactcgggaggctgaggcaggagaatggcgtgaacc

SEQ ID NO: 200244 - DNA, 433 bp, Homo sapiens
gatcctggattttccacttcctagtggtggatcttgggcaagtttacccagcctgtttaagtctgtttctccagttcagagttgctgtgactggtaatgttaatgtatagaaagcttcacagtatgtgatatacagatgtctgataaatggaggctcttattaggtacaatgacctccttggggaaaagggtaaagacttccagaagataaaaataaattctacttcagacatgtcacagtggcccacccctgtaatcccagcactttgggaggccgaggcaggcggatcacaaggtgaggagatcgagaccatcctggctaacacagtgaaaccccgtctatactaaaaatacaaaaaattagccggctgtggtggcgggcgcctgtagtcccagctactcgggaggctgaggcaggagaatggcgtgaacc

SEQ ID NO: 200245 - DNA, 834 bp, Homo sapiens
cacccctcctcctcctgctccgtcctgactgctgtggcttcggcgtccttctgggctgtgttgatgttgagctgctaggggttgggactgctgtccatcctgggtgagctgtttagattatcctttccctctgcgtgggtatcaagacttgaggcagagcccatggtgatgcccgccacatgccagggctgctccagctccaactccaggtagctggcaggcctgggacctcacctgggagaagcagcgaggggaaacatggtcttgtagggatggggtagggacaatgaaggaagcgatgttttacagggtatgcttttccccagcctttctcaaatctggagtacagataagaatatattggggtgtttgggggtctccatgtgcaaaggacagccgagattccagaggaggtgtagggacagagtcttgtcccctgtgggttttctgctgagggaggaggctccctggggagctgggctgcaggcggagtttcacccctgccttgtcgtcatgcctagacctggaggtctgggagtgtcagggtctgagatgaattaggaagcaaagggagtgaagacgcgtcgctggaagatggcgccctgacactgatgacaggagggcagagtgagggcttggcctggtctttgcctcagaccaagcattggggcgggaagggtgtagttggagagatgaggaggcatttgggggcacctagagccgtgctctatggcagacagatccttcaaccagcggtggaagccccaagctcttgtcctgtctccgataccacctggccaagtggccatgggcgggtcactcagcttctagggc

SEQ ID NO: 200246 - DNA, 183 bp, Homo sapiens
agctgttcaggaagccacatttagagaccaaaatcgaaggtccccaggcaaaatatcctatgaagtgacaaaactttggcttactttaataaccaataaagttaatttgaccgctgctgatttactttgaaggagcctaagtaaccaccttgcctgttcatgggtgctttactaaatagaaag

SEQ ID NO: 200247 - DNA, 590 bp, Homo sapiens
acaggagggaaggaaatatacagtatgaaaaaatagggcccttcacaaatctctgaggagccccacatttaaggacagacagagaaaaggaaggtaggccacaaagaatattcacaaaaagcagagagaggaggagttctaggaaactgggtgtctcatggagaagcgaacaatcctaccttaggtagctaacaggtcaaatgaagtgaaacctgaaagggtttattggatagtttattgataaagcgcataagaacagtgtcgttggagtgtagaatagaaatctgattatggtgacaaaggacaaatgggaagtgaataaatagaggcagcaaatatggacaaccttttaaaaaataatggggtagggagagccggaaagagatgagtgtcaggcctctgagcccaagctaagccatcatatccccagtgacctgcatgtatacatccagatggcctgaagcaactgaagatccacaaaaaaagtgaaaatagccttaactgataacatttcaccattgtgatttgtttctgccccaccctaacagatgaatgtactttgtaatctcccccacccttaggaagtttct

SEQ ID NO: 200248 - DNA, 944 bp, Homo sapiens
gatagacgatgtattagtttggagggagaagggaaagctgggaacgcagaatgctcccaaatgtcagtaaaaggtcaaatatgaccagtttgtcataaatgttcctgatgctacctttggctgtgaaggaaggtagaatgtagctcttcactcagccaagttgaagagaatctgaacctatgttcttgagagaattaagacactggtgtttgtgcccccaagaaatactatgtattttctcctgtgttattagagtcagccacttgtgtgtgtcctctgtgctctttacaaacctgaattttcaagctattaaatttactcctagatttcctgaagcaagttatgcttgagcattagtgcccaaagcagcatggtggcttttcacttgagaagaaaatgtggttaagctactgatgtacagccaacatgatgaggagcttatctttatctaaagtagtttgcacattttcaactggaaagcgaagatactatgtcacaggttctcacaaccaacctggcagaatgcatccccagtttaacagggttcaacttctaactcatctcaaacgtttaccctttctatttgacatcatgaagttttgtctaacatgtaaatgttacttctaaagcctcgaaaattctttcagtctttatgttgaggagaatgtctcctatacctgttatcaaataatgctatgagttttggccactagatggtgcttttagaaaaatacagcatctttttcaatttctgggagaaattgagttgagtttactgtatgttagtgagcagttgaacactcatctggttgctgagccaactgtgttggcttagttagttagaagttcatattacttaaggtacaggaggcctgtgtgtgtgagagacagggaactttggcaagatcagccagggttaaggggcagatggtgactggatacca

SEQ ID NO: 200249 - DNA, 574 bp, Homo sapiens
gtaacagtatctgatacggttctaaaggtatgtagaaagatttaaggctttaaggctgggcatggtggcttatgcctgtaatcgcggcattttgggaggccgaggcaggcggatcacctgaggtcaggagttcaagaccagcctggctaacatggcaaaaccctgtctctactaaaaatacaaaaattagctgggtgtggtggcgggcgcctgtaatcccagctactcgggaacgggaagctgtggcagggataattgcttgaacccgggaggtggaggttgtgttgagctgagatgacaccattgcactccagcctgggcgacagagcaagactgtgtctcaaaaaaaaaaaaaaaaaagatggataaagataaaacgttaatcaaaggaaagcaggagtgacaatgttagtatcagtaaggcagacttcaaagaaaatgaccagagacagagaaggacattaaataatggtaaaaagataagttcatcaagacatagcaatcctaaatatgtatgcagcaaacgacagagctggaaaatatgtgaaacagtatcagatagaaatcagataga

SEQ ID NO: 200250 - DNA, 332 bp, Homo sapiens
ccttaactcttaccatgaacttacaatacattctagacaaaaaataagtagcattagcagccacaatacagaagaatagtaataattctgtttgatccaagttgtttttagaaaacccattaacaccattgggtcaaaataagtagatagtcaattacataatctaaatcagcagctttcaacttttcctgtaagacagtctctaatatatatacacgtacactatctattcacagatctcttgcaacaaacccacagtcccctcaagtgaccagagctcacaggttgggaacaactggcacatcttcatcttcctttctaccaacaagaca

SEQ ID NO: 200251 - DNA, 118 bp, Homo sapiens
ttaggtgtagtcaccaccaaaggcaggtagaaggccaaccccaggctcccaaggacaaaactagtggctaaaaccttcatgtctcggtaggcgttttgccaccctcagccagcaccca

SEQ ID NO: 200252 - DNA, 771 bp, Homo sapiens
aaaaaaaaatgtcaagccgactgtcctcagaatctaacctgtagataactatagatgaaactcacattttccttcccctggttcaccttgacagcattgcagctctggtcagccacagaatgccaggcagtggtggacaccatgatagccgtgtggtcagaagggaagggcacgggagtgagctgggaaccttggctgttggggaagttgcaaagctccagtttcctctaagtgtgcctttatgatccgcactggcgacagcaggctttgtctttccttagaaagactttgtgcctgttctcacttgaccagatatcgtgtacggagcacttgctggcagtaggccaagctctgcacattcatgaattgctttgtctcacaacaccctgagccgtaggtatctttattgaccatattttccagatgaagagacgaaagcccaagagaaccctgttaatgctcggccagatcagaggagacaaaacaagcacccctgccttcatgggttgtgtggatgaatgagggtcggcctagggctgtcccctcgcggtctgtccggtctgtcggtacaggcagcagatgggccacttgttcctggaattgcagaagcagataaccaagtgtagaaaatgtatgtatccctcttctaccccaacagaagcaccgtctttttgctttttctttttttttttagttacagatatgataggtaggtttttttctatggtgtaagcatttctgctgttggattttgtttgctgtttgaagacc

SEQ ID NO: 200253 - DNA, 633 bp, Homo sapiens
aatttggtgagagattatatagtccttcatgttcaccccatttgtaggtattaatgttgaaacaaaatcctaaagcaacatgaccagagtattattgcagtcatcatgagccttatcattgatctctgcagtttttttcttttctcagataaatagaagcaagaaaaataatggtatatagagaatacatattattaatatattgggttctcaaagttcctaagtctaagtgtttataacctagaattaatttcccatggaaatagtgtaattaattatggttagatgccaaggctaggccacaaaacctcatataatattagtaggtgtggcaggataaattgattgataaaccatattttattttcttgtctactggctcataatgggaaaacgagaagtatttctttatctcttctctctggagggcgggttaagctgtggtgattttctgatgcctaagcccatgaaggcagatgattcaatgatttggaatgggaaggactccaagaaaagggaaatggcctgatgtcaggagaatttaggtctcttgaacctgtctggagagaaccagacaggagtcagtttctataaatggtgaggagctgtgtccactcccaaatagaccaaaat

SEQ ID NO: 200254 - DNA, 340 bp, Homo sapiens
ttgcctgaagccaagtgcccatgttatgatttgctgttaaacttaaaacttctgcagtcctctctatatgtaataccatcttttgtaaaagtctgttgtaagctcttagcactgataaaccacacaacatacctataaggaaattattaattttatctgtattttaaagacggagaaactgaagcacagagagattgttaattcacctgggacacatagcttaaatgctatttctcatttctttttttttttttttttttttaaagagagagggccttactctgtgtcccaggctagagtgcagcagcatgatcctagctcactgtaacctcaaactcct

SEQ ID NO: 200255 - DNA, 908 bp, Homo sapiens
ttcccaggccgtcgcgctccttgccgcgcacccagccaggacccagaggccctcagccccgggctctgcgcgtacactgagggcgcggcgcagcaggacagcaagataaggaagcagagactgaagggaggaatccccgctttccggggatgatggcgttcgagttgggtctgtgagggatgaaataggagttggccagagggagagagggactctaggcctcgagaagagcacgtgcagaggttccgtgacacgaaaacgccaggtgggtgcggggctgggaggacaggaggcagaagggtttacggctccacatggtcgccgaaattttaggtccctgagagtaaaggggtgcagctgatttcatctagaaagcccctggccgggaggagagaacgagcttgcttgcctggggttgcaaaggagtgggtagctgagacggccagcaccccagcatcctgactcagggccagacgcttcaccccattgggcggcgtctggaggagcagacacatctcttgtgggtaccctcgaaagtgaatcatgggtcgcagggaactgtggtcaaaccgtctctagctagatgctagagagccagctctgcaggctcaggctactgtgagacacgaaaggagggactcgctgggcacagcctcaccctggggcatgccagcaggccctgccctctgagtgttggcagacttgaacatccctagggaacgagagaagttgggcaacgatgggagagcagtgcaggccctggaggtgacgagtctgttgagattctgatggggatgggtcagaggacgtagaaagcagtgaaggcctagacgcccccaggtcagtgtagcctgctctgcttccagtgagctgggctcagtcccccacatgtcattgtcttagacgcc

SEQ ID NO: 200256 - DNA, 407 bp, Homo sapiens
ttccttcattcagtcttttaaaggttatttgtccttctcttcactaggagaataaagtatgagattttttacttttctactgcttgacttcaggaatattaaaaacattattaaaaggccgggcacggtagcccatgcctgtaatcccagcactttgggaggccaaggcgggaggatcacctgaggtcaggagttggagaccagcctggccaacatggtgaaactccatctctactaaaaatacagaaattagctgggtgtggtggcaggctaattactcaggaggctgaggcaggagaatcacttgaacctgggaggcggaggttacagtgagccaagatcacaccactgccctccagcccaggtgacagagcaagactctgtctttaaaaaaaaaaaaaaaatta

SEQ ID NO: 200257 - DNA, 220 bp, Homo sapiens
catcttcagacaaggcagtcatagagggttttttcctcatccagaaatctactttttgggaaattttttgatctattggcaatcactctgagggcaaatattatgggtagtgattatactgatcccaactccactccactacctcactcaagtcagggataagggtaggtctttttatatactttagtggcaactataaagagcaagctggaacaattgt

SEQ ID NO: 200258 - DNA, 207 bp, Homo sapiens
ggttctcgcctgtaatcccagcactttaggaggtcgaggcaggaggattgcctgagctcaggagttcaagatcagtctaggcaacatggtgaaacttcatctctacaaaaaatataaaaattagctgcttgtggtggctggaggatcactttagccccagaggcagaaggtcgaggctgcagtgagccatgaccacactactgcact

SEQ ID NO: 200259 - DNA, 500 bp, Homo sapiens
ggttctcccttgcgtggtaggctcccacatgaggagggacatgagacactgcctggtgtaatcaccctttggatgctaatgtacccattcccatagtacacagccacccttgcccacacacaacaacccagccacttgtcctgcctccacttgaatatctccaatcatggggaattttgtatgaaatgttatggcatctgttataaataaaagatctggccgagcacggttgctcatgcctgtaatcccagcactttgggaggctgaggtggacggatcatctgaagtcaggagttcgagaccagttggccaacatggtgaaaccccatctccataaaaaatataaaaattagctgggtgtggtagtgtgcacctataatcccagctactcaggaggctgaggcaggagaatgcttgagcctgggaggcggaggttgtagtgagccaagatcgcgccattgcactccagcctgggcaacaaagagtgagactccatttca

SEQ ID NO: 200260 - DNA, 659 bp, Homo sapiens
gaaattgttctttttctgggtagttggtgttttagtgatgagacgtaatatttgaaggtcttatttctggaatgtcttctcttatgacagtggatggtcaacagcacagaataaatacagtgtgaaacttgttgatgatcgcttggtttatcttctacttgaaccctactccatcactattattacatgcttatgatcctgatttagacctgtaagtttcaatactacattgcttcctttattcctaaggttcattatcatgaatcctattgaatactagttctcagcagtttttaccctctctttctggaatacttccccatcttcttagttctactcatgctattcctttttctcggtaagctgtccttctatcagctttcccttttcatccttgatttagaaagtgagtgctctctctggcctctcaaattgcccctagagcagtttgtttgtttgatttgtaaggtgcttttaccattcttcttggagatttttggtacatgtctcagtccttggactgattgtaactttttaagataagaatcatatttttactttttcagcccatagcccatagatttttttccccatctctgaagaccacagaccagttagtagtcatgcaaatgacctacttactagctatctttgaaata

SEQ ID NO: 200261 - DNA, 285 bp, Homo sapiens
ttatgcttcttttcgctctgcatcagtcaccaggtccttgcacacagaatgaccgactgggaggtgggtacgatatattggaaacgtgagaaatctcatttctaaccccagttctgccagtaactaactggatgacattgagctaatcgcttaacctccatgggcctcaatttcttcacttgtaaaatagatggattctaatatctggggttcttactggcttaagaaaaaaaagaaagtgtaactagttgcatgtgttatttccccaatctggaagactcgaca

SEQ ID NO: 200262 - DNA, 502 bp, Homo sapiens
ccaccatgtgctcagtgctgcatcgggcgcctgggttggggtagggaatagtggtgggaaaagagtcataagatattctcctgacccttacgaacatgggcattggtaagatgaggcagggaggcagcaaccgttgacatcccccgtagggctgcctccacatttatgggggcactgattacatcataggcatggcagctgcgaatagttattatgacagttttcccagaagatggcagtagagagtgcttgttcttgcaaagttggtctatttaggacaattttctcagagatggcagtaaaatgtcttgagagcgatgcctgtttctaatctcacaaagacacctaagggttagcagcagtcctggccaagatagacagtgagggttccaggagtgtggggaaaggcggcaaagtgtgtgggctggaggatccagaggagtcgccgtattaatcagcacaggctcagctctgcacctgccgagtctcagtggcttttacc

SEQ ID NO: 200263 - DNA, 164 bp, Homo sapiens
gtcacgcagccgcaccgcctgagaggactaacccttctgttttgccaagaaagatgtcagcttcaactacttttatactggagaaacaatttacaaactaaaattgttttaaagcctctattttcatgcagttttgtttctgtaaagtgttatttaatctccaa

SEQ ID NO: 200264 - DNA, 204 bp, Homo sapiens
attcacttcaagagcacttcttatatcccatggttatgacttagccatgtggtcacacctagctgcaacagacactggacaatgtggtatttattcaaagaatacatgtgcccagctaaaagttggagtattagtaccatacaagaataaaagaaggtgttactaaagacaaaaggaggaggggggactgtatattgggagatg

SEQ ID NO: 200265 - DNA, 156 bp, Homo sapiens
ttctcatctgattcaggttaaattattaatccatggatgcatgtctttgttatatcatttaggaagcataaaatcataaatatgttacagtgaactcattttagaaaaaagtagagggctgtatgtttattttagttaccaggttttctgagagca

SEQ ID NO: 200266 - DNA, 394 bp, Homo sapiens
aagttgtatctgttggttggattttaaaatagatgatttaatcagtgcatttaatatcctaatatggcatcaaaacttgaacattgatatggcctgaaatctgttgaaaatgatcatattgagtaaagaaagtctctacccaccggtattaataacagggtgatctgtttagaaattacattttctctgatacatcaatgagttttgcaaaggagagaaaattgatggtacctgtagtcaagtccagttccaatactgccacagaatttttcttaaaagttctattgtaaataataggccacagaatattccttcactttctgggatgcaaaatggattcgtaaatgctgtaccacaggagtgagtatttacaaaaaatatgccaactggccca

SEQ ID NO: 200267 - DNA, 345 bp, Homo sapiens
caaattcttatcctgaggactggagtggagttgaagtatctatctcctgagcttgtctttcaaggacttaactatgaaagcaactcctccttcaaagcccttatcattttccgactcctcttgcagctgctccacaacctctgtgtgcagccactactttcggggtggcatttgttgatttctacctctgaattggctgaggtggcacctgacgtttagtctttgggtaattagagatgacatatttgcggcatgtttactccttcccccagctcacttggagtcatgctgattttgtttagtcaatgctctgacagatcgcctttggtattttttcaattgtac

SEQ ID NO: 200268 - DNA, 555 bp, Homo sapiens
cgcataaatcaggtgtggtacaacgatcacttggaccacagtggtagcaatggaggtggtaagaagtgctgggatactcatactatcttaaaggcagaataaagcaagatgtccagaaagactggtatgagatataaaagaagatgactctaaggttttggtttaagcaatagggaaaatgtaattaccataaacagatgaagacagcatatggtgcagcctgagtctggacaatgggagagatcaggagttcagttttgaacatgttcagttagggtatgtgtaaggcatagtgctaggaagtgtgagtagaacagagaggaaaactgatcattccaacacagatgacaattaaaatgaccagtccatgcgctgactacttcactggggagaaggttgggatcaggaaggactatctgaaaaatgagttttgaaagagtatgaattagccaggtaaggtcaaagggggttcgattggtctctgctagtgtggaataaatcatattatggccagggtcatgatggcaggagtaatcagaggttccttgtgtagtg

SEQ ID NO: 200269 - DNA, 358 bp, Homo sapiens
tgtgttggggaacagggaaagaaaaaatatggatgtgtaggctgggactggagccaagtactcactgttataggcagtaggaaataattggaagtttaagagctgggaagcatgacaataaatagcattgctggaagagtgggttttgtttgtttagggtatgagttgggctgtagaaacagaccagtcaaggagcaacaagtggcagtaacggtgtagtacgggcattcattggaatttgcggaaataataggtaaaaagaaaaaggggaatggttatgggagaagtgttagggaagacttagcagtaatcaattagatgtgtaggcataaagaaatgatttgactaggtgctgtta

SEQ ID NO: 200270 - DNA, 691 bp, Homo sapiens
agcagatagaaagatcagtactaatccgtcaccagacccagaaaacaaattcaaaacacatgccctatggatagtacactatctgtggctctttaatttatgagggtatcataacagatttttgtaattttcttaaacagatttttttttctgattaataataaactgcatgttattgaggatcctgggaaaataaagtatgaggaaggaaacaaaattcactatttttcccaggactgacagaggttacattttggatttttccatccttgatgttcccttcccttggcctccatgacaccacacttggttgactttcctcttcctccctgaccccacccctacattctccttttcccctttcctcctgaatttggcttgtaaatgatagtgttccttggcactccgtcctgcctcttcatttctcgtggtcctgcattcccatggatggtgtcctttgtcccagacttctgtcctgaaatccagattcaaagatccaagtgtctacaccacttctagctggatgctaatgtgtccagtaaatgatccccttatccccaccatctaacctgcacccctgtgttcctcctctctaggagtcacagccttcacctaggtgcccagcccttcccctcccctccctgactaatccatcaccagattcaacaattctactttccaaatatctctc

SEQ ID NO: 200271 - DNA, 586 bp, Homo sapiens
tctggcacgttgaaaacgtcctccgcagcttcgcaccggcttcgcggcgccctgacagctgggtgaggagggagcgaatgcccaccggcgtccttggggtaacttgggacagaggcaccgccgcggggggcggaggactgggcgcgaaggcgctggccctttaagggggggacggagcgcatgcgcggcgcgggccgtagtcgagcctggtgggcggctggctggcaggggacgtggtcggcggcagcggggcccaggggcggcggggctgcagcagcggcggccccagcttcgccgagcagcgatcggctggtgggcttctcgttggcgggctccgcgttggcgggctgctccccaggcaccagcgcagcgcgcgctcgcccggcttcgtcactcgcctccagctacatccgccggccgaggctgcgcgagcctccgggcttgcggtccccgccccgcggtccttcctccaccctcagccagggcagctgcagcccgagcgaacagccacggagcatcctccgcccgcccgggccgcgccaccgcccatgctgcagccagtcccaggcagcgaccccgcggccgc

SEQ ID NO: 200272 - DNA, 522 bp, Homo sapiens
tctggcacgttgaaaacgtcctccgcagcttcgcaccggcttcgcggcgccctgacagctgggtgaggagggagcgaatgcccaccggcgtccttggggtaacttgggacagaggcaccgccgcggggggcggaggactgggcgcgaaggcgctggccctttaagggggggacggagcgcatgcgcggcgcgggccgtagtcgagcctggtgggcggctggctggcaggggacgtggtcggcggcagcggggcccaggggcggcggggctgcagcagcggcggccccagcttcgccgagcagcgatcggctggtgggcttctcgttggcgggctccgcgttggcgggctgctccccaggcaccagcgcagcgcgcgctcgcccggcttcgtcactcgcctccagctacatccgccggccgaggctgcgcgagcctccgggcttgcggtccccgccccgcggtccttcctccaccctcagccagggcagtgcagccagtcccaggcagcgaccccgcggccgc

SEQ ID NO: 200273 - DNA, 539 bp, Homo sapiens
tatcacatgtggcttagcagaaggtgagagtaatagcggtttagactgcggatagctgaaggctccacacaggctgaatgagataaaacctgtaatgtcctgtacactgtgactggtctaaaggaagtgttccatagatggttgtttttaatgttattatgtttacaattttttttggtccctaaagccttggaaaaaaatcctcctcattataaaatacatagtcacatatgcacatggcaaaagaaaaaaagccttatctggctcttgcttccacagggcttcattttctgtaatttttagatagaggtggtgattgcaaaacatatgactaattgtggttgtcatttaattgttcactttaaaattattagttacattatgtaaatttcaccttaaagtgttttaaaacaaaaaattataaaacatacagattttcagccattctaatatttatcagttgtgtttttcttatctcaatatctgagcaatttttgaaaaatagtctgtcaacttaataaaaaaaggttctgctgtca

SEQ ID NO: 200274 - DNA, 545 bp, Homo sapiens
gtactagaggacccctcgcgaacgtgttatcccagtgactttccagcttaaaatttggaagcaaattttccttaagagactaagtacccatatcttcacatgttgatcagctgttatgtatggcccacagttcacaactgaatagcatgtatactacatattcaaatttttagtatttcacttcacaataacaaagttattaggaaaacaggactaccacaaccaaagatgttacagagtgcccacaactccaacagggtgagccataatcaaggagttgttttctttaggaaacaattctactacaaaacaacatggggatggaagtaatttaaaatgttcaagacattaaatgcaggactgactccatattgccatttaatatgctttgtattacaggatataaaaactaacccccatctatggaatgttaagctgacacccgagactgtcaaagtctcccataattcaatatcctacacaattttctggttgtaccaaaaaataaacaaccagcaaattgtgtaggataacacgttcgcgag

SEQ ID NO: 200275 - DNA, 213 bp, Homo sapiens
aacttttttatcttgcaaaactgaaactctatccccatgaaacaatcatttcccattctcttttctccccagcccctggaaaccatcattctgcttttcatctctgcaactctgactgttctatgtgcctcatatgaaagatattatatagtatttgtcctttgtgactggcttatttcacttagtttaacatcctcaaggttcatccacatt

SEQ ID NO: 200276 - DNA, 367 bp, Homo sapiens
aaatatgagcaagctcaaggaagaatttgggaccatggacattcaaatactcttggaagaagaaactggtatcacctctccagagggtaatctgacatctgtaccaaagctgccctattttgtctagaaatttgtcaaagcagctaatcagagacatactcattaatgagtattacaaagatatttatattagagctatttataatagtagaaatttggaaaaaaaaaacaaactaaatgtccaacactaaggaaagacttgagaaacctttaacaattgtgatacaggctgggcatggtggctcatgcctgcccaactttgcaatcttgatgtctggtatactgtcctgtccccacaatttatcca

SEQ ID NO: 200277 - DNA, 345 bp, Homo sapiens
ttttgttaagagttgagaagtaggagcagttatttctaggaaatctgtctgcgggccgtagactgagctgaatgcctgaaaaggaaacagtggggggcagtactggtagaggtaaatttactagcgctagcagaggtagatttactagtactagtagaggtagatttactagcactcacagaggtaggtttaaccacatcacaagtggtcttggatgatgggccagggatttgtgacttaattaagcacaggagtaatcaaagcttttgagcagggggcaccaaaatcgtctggctgtaaatagatcctgaaatttggaatctcatttttgagaatgaatttgga

SEQ ID NO: 200278 - DNA, 328 bp, Homo sapiens
ttcaccctccctacccctaatcataaccatccaagaactttagagcttctcagtccaatgatcaatactattgtactgcctcttgcagccatgtgatgtcactgttgaagatgggttctgcacagtctaaaggttttaaggatgggcttttccactgtgacctgctcagcccacattagttccccatactgggtccaagatcataagccattttagtctacactcccatgctcagccattactctccaaagcaaaaccactggcccagtctgtgttgaaatcattcccttttaaccctcattgagccttgctcatcagcctggatttc

SEQ ID NO: 200279 - DNA, 440 bp, Homo sapiens
tggaagtgttgggattataggcatgagccactgcacccagccggctttgttttataagtgtgaagaaaattgtttctggtcaaagtggagacaacaactaaaccaaatcaagaaatgggaaggacagacagactgggtatacatcagcatatcataagttctgatattctgcaataaagaaacccaatgttttccaacttgcagtgttttttttttttttaatgatgctaactagttacattaggaaaatagatttgcttttgtgtcactgttttttgtttttaaacagggtcttgctctgtcacccaggttgtagtgtgatcttgctcactgcagcctcagcctcctgggctcaagcaattctcccacctcagccctcactacaggctcacgccaccatgcctggctaatttttgtattttttttggtagatacggggt

SEQ ID NO: 200280 - DNA, 555 bp, Homo sapiens
cttctcttcttcttggttcttccagtccctttcatagaaggatccttttctgttaacatccaatggggtgagctcttcttcctcctgcccctacactgaagccctttcacactggactatgattggtttctttgtctttcttcctaattaagctgtgagcgcccccagtagacatgtaatcttaccacacagctgaagactcacagcagctcctcaaatctgtgttaaataaatgggagtaatgttttatttcatttagatttgtcagcagaaaaggacttattgtgtaatatttctaacaagagctcacatgtattgagtgctaagtatgtgctggtatgtataaccttgtttgatcatcagagttgcaattttacatgtctttgggtaattattggactgatctgcttgtcctacccatggactggaaatgtcacaaaggaattacatctctttttgctccctcttttgttctcagtattggatacactatgtggaacactgttgatgctaaatatgtattttctgcatagatgaagaaatgaccccctgagg

SEQ ID NO: 200281 - DNA, 249 bp, Homo sapiens
ctcccggtctccgctttccaccaccttgggcacctcgcccgcctgtggtctcgaaatcccccccaccagtggcgcacggcctgacgggagttgcagtctcccggctcccgtctatcatctcaagtcgagacaatggaaggggatggggcggggccaccggcaaagatggcggctgcagggccggggcgactgcgacatgggatgtgtagtccaggcgtctggcctcttccctgcggaaatgagggagag

SEQ ID NO: 200282 - DNA, 329 bp, Homo sapiens
cacttcaacatctcatttctggctaatattagccaggaagggggatgtttggtattttggggatgacacggtagccttatttttttgcacatttagaaaaaaatgtgtgtttatcttgtattgcatcactttagcatggtctcagattggccttgtctaatgctgatgttttgtgaaactatgtccaacaggagagcgccaaagcctaccagtgagtgccaggctggccccacaggtcaagggctgcccttctctttctcagcatccctaatatggtacatatgattttaattgccagcacttaaaatgaacttgtgataaaatagctg

SEQ ID NO: 200283 - DNA, 316 bp, Homo sapiens
aatccaaatacttcacttcgtgtcctttttgtgggggtgaaactgagttctagaagccatgtgtataccttcagctatcatctctcttcccttacctccatttacccagcttcttaatttgttaataagtcctaagagtggaagaggaaatttgatactgagccttagctcttcctgctctctgttgttgtgaggagcgtgccaggacagagtgcggggtgtaagcatcctgcgggtgacagccccacaattccacactcatggcccttaccacgctactcctacctatctccccttttatactaatatttttata

SEQ ID NO: 200284 - DNA, 558 bp, Homo sapiens
tcttaggccaatatcacactgcttgattgctgtcatttgaaagaaagttttgaaactaggaagtgtgtgtcggaaacttcctcatctttttcaagatgattttggcaattctgggtctcttgaacatccgtgaatttaaggatgtttgtcaattcttacaaagaagccagcttagattctgatagggattgctttgcatctatatatcaaattggggagtatcccacttaacaatattacatcttgcaactaatcaacagaagatgtctttccatagatttagggcttctttaatatctttgaacaaatcgacagagactttgtattcaattagtaatcagtgaataaaggaataaatgagtgaataagccaaaaacacaaataaaaaggagcatccagatggctcttagaaatacatacacaatggccactgtcttgaatcccatctcacttctcagaaagccactgttaattagtcacaactttcaaaatactgatttcagcccctttttacataacttttgtcataaaatctattgtttctttttcttttgccca

SEQ ID NO: 200285 - DNA, 401 bp, Homo sapiens
tcagtatgcctgacagctgtaggtctgtcgtatatggctttcattattttgaggtatgttccttctatccccagttttttgagggttttttttaaaatcatgaagggatgttgaattttttcaaatgctttttcagcatcaattgaaatgaatctttcttttcttgaatataggtatttgcagctagaaatttctctgagtactgctatcactacatccaatgttttgatatgcagtgttttcattttaattcctctcaaagtattttaaaatttcttttgtgatttcttctctgacccatgagttatttaggaatgtgttgttcaatttacacttatttgtgaattctgcaaatttatttctgttattgatttctaatttaattatattgtgttcagaaa

SEQ ID NO: 200286 - DNA, 490 bp, Homo sapiens
ctgacgtcaacccaatcaactgtccagggacttggccacctaccttctctgactgtacttaaacttatcacttgcatctgagacaatgcaaattcaggtagtaccaacctcacttggaaatgagaggttccagagcaagttagagcttggctacagaatcctactggggtgagggacactgtgctgctggcttctttccatcagaaccagcaagagatcacatttccttcccccttttcagcgagtgaattagtttctgctcatatcatatggcaaattccactccttccatcatttactttttaaaggaacaggaccacattacttctcagtaacttagagaggtggagaaaattcaatgagaaatgtattttccatgggttccaaaatacagcaggcagaggggcactgcttatctcaaggatgatttccacacaggaactggaatttttcttgtacgtagtagtcgtagatagggttgacgtcagga

SEQ ID NO: 200287 - DNA, 485 bp, Homo sapiens
gcacttcacagcacatctcatttcagattagcctcatttcaggggctcagcagctgcatatgattcgtgcctgccgtattggacagcatgggtcaaccagggcctcatccaccttcctgcctacccattagggcaatccctgaggtcccttcagggaaatcctagactccttgaaatatggtttggcagctatggtgattcctgagaaatctccatacatacttcagacaaaaggacagatttgccaagagccagtttttcagtttactgtaatatcttcctcctctaaacttcctttgcatcacctctcagactgttcccagaggactagattaaaagcacagctgttatcatttctagaaactatctgactcatacgtttcactggatgacagagtaattatcttaattttaggaagcattctatttcacatattgctaggctagaataagccaggattgggaagggcagaatattaaaacaa

SEQ ID NO: 200288 - DNA, 1353 bp, Homo sapiens
ctgagaagttgagtacatttacatggtatcaaaaatttagcatctgcagccaaaagccacacctgtgctactcaaaagctgagaaagtacatgtatgtaacacagcaactattgcatggtccttttcttatttaaagctttctcaggtaagttttaatagctggaggatacatattgaaaaaaatctcaatatgaaagaaagaaaacttcagtgttgaaatacattaatacctcctgtgacatctgaatctctggctcaggatcagaacttaggatcacgtctctggtggccataaaatatttacaatctagttaaaggcacagtggcatttaaaaataaagtcttggggacccatggtaaaagattcactgtaattattaacctggcttcaattggtagaattgactcttgccagataacatgcgagggagatggtgattcggaacctgctagctggttatgaggcatagcgagtcctttacctcaagaacaggtggaaacaaactcacggaaacatgcccgtgtttaattctggtgatttacatctttcccgcattttttgctaacctgagccagaatgtggagcgtgggggtttcttccatgactgattggcaggttgtcagtatagtcttccagctcaggatcctggaaatccctcttattattattattattgttttcttctgtttgaggagcagctggataagctcattctgggttagctgtgcataggcaaaagcagaatctgaggggttttcttgatcgtggtcttgttgatcaagttctcactgatgatggtggcagttcccaagctagagatagcaatcttggtggccattgtgttcattggcttcacaggatgaagtcaaggtttgacagctctggtttttggagccatcacagagagaattggtgattctgttcagacttggattctgggtcagtttttggttctgtgatctgcacatcttcaaaggggttcagggagttaccccttctggagacaatagctgcaatatctttctccaatcttctcgtaaggtctttaacaggccctgaagcatgctacccggcttgacctccataagcatgccttccttcttctccaggatggtaagagggttttcaccttcactgttcttagccatgtccttcttccccgtcacccgagaaagcaaagaagactctcgttattctgcttcttgctctctttggtttcttttgcagcttccaagtttgctggagccatgttttctctaatgtccccacagaacagtggttggtaggatggcggagacatggacttcagagagttcttggtagaagactcaaagagccacctgtcatgaga

SEQ ID NO: 200289 - DNA, 325 bp, Homo sapiens
tgtgaagcagcaggccgaggcatcagacacctctcccaccacacacctctcccaccagacacttctcccaccagctgcagggctcttggcagcgttctcagcccagccattctgtgacagttgttttaaggaatcagctgttgacctttttttctcaagcggcaacaataacatcaatattacagtggtcttatgaatacacccatgtgatcaacttgttagtaaacacatgggtatacaacataaagtaggcaaagcggaaaaagtatttacaactgtcaaagtctctctctctctctctctcacacacacacacacacacaca

SEQ ID NO: 200290 - DNA, 189 bp, Homo sapiens
ttcctgaataaacttgagatcctaggtgaaccacaccaattattttaagttaacataaacagaagacaattgaggtaaatcatcagtaaaaatttaaaaaccaaaaataagttattttgaaataattctgtgttggaatagtcttctccttccaactctgtctttacatggctaaatccttttcattct

SEQ ID NO: 200291 - DNA, 343 bp, Homo sapiens
gaaaagagcagaaaagataactatcgggtacaaaggcttagtacctgggtaaggaaataatctgtataacaaatccctgtgacacaaatttacctatgtaacaaacctgcacatgtaaccatgaacctaaaagttaaaaaaaataaagtggggatattaataggagtacctgtttcacagggtagtgaaagtaaatgagtatggagatgtaaacactattattttcttaaaattattttgtattattttgttacaattataatttagttacaagaactactgaagaactgccagttcattgagccaaatgataagataccaacccctgtcagctgcccaacaa

SEQ ID NO: 200292 - DNA, 493 bp, Homo sapiens
ggtctagcaaaagggactgagaaggagtctgccatgaagtgaggggggactcagaagagtctgggtttctggtggacactgaagaaagttttcagccttctgccgtcagcctctcttggaactgctctgagcctagggagctacctcacttgaaggctctcctagaagccgccagccaatgacgagttgctatgaggtgtaaagaccccacccccttgccttactttggaacacctctgcagggccatctcagttccagagcttccattaggtcaggctgaggcctctgttgagactacatcagcagttcagcttcttcttccgcccaacccgtcattcccctactggtgatattcgcaagagcactccgataaacctacactcaaatcttgctatcggagtctgtttcgggggacccgacctaaaacaaccattgtagccccagcccagagccgtgcacatagcagatgctcaataaatatctgttggctga

SEQ ID NO: 200293 - DNA, 480 bp, Homo sapiens
ggtttcatcttgatccagaaatgtcccttggcaaatccacccttagctaatcacccaggaatagcatgactcagtaatgagtatcagactcgtgcgagacaaaaccattttcatggtgcacgtgtgactttgcaagtcacaccacaacctgctgcacgccctcatttccttaactgaaaagtgggctattagtaattcttacacatgggggtactttaaggttgaaaggaaatcgtgtctgtgacgctctcagcaaagacaaaggggtcagttcctgttagcttccatttttactattgttttaaattcaatttatttctttcctccagctcagtaactttcaggagttcctgtagggacaaatccactttctaccaagcctctggggtcttttctgtagggtcctgatgacccacttcaatcactgagccactgagtccagaggtgcttgtggagagtctaacagatgcagagctcctg

SEQ ID NO: 200294 - DNA, 295 bp, Homo sapiens
gcccaacactaggcaggttctcctctcggagcctgaaagtatcatttattaagcacctcctgttgtgcacacctgattcagggggttcgggacacagatataaaccttaaacccttacagttaatgaatcttgagaatatgctatgcactaggcattgttctaagcactttgagtggattaatttatttaatccttaggacaaatgtatgagaaaggtatggctcttcccattttgcggtagggagatgaaggaaacttgccccaaatcacacagccaggaagtaggagaggtag

SEQ ID NO: 200295 - DNA, 388 bp, Homo sapiens
ttagcaaattgctaaatccagggatctttttcagttctcatttgacactgttaattctctactgtttaagaatccatctcaggtgtatgaacttggcagaataatgaagcccgtttgacctcagttttcctgtattaaaacttaaaacagctcctaagtttttttgagtatcaaatgcaacaatgtgtctgaaaatatctcgcatctagttagtagcgcaccccaacctgacggtctgtgatgctttagttgctgcctggctcgaaatatctaagatagttttttttcctattttttttcctccctccaccttctttgaataaagacattctctaaggcgcattctttgaactttatctctttgccttatctgttggaaatctcatct

SEQ ID NO: 200296 - DNA, 521 bp, Homo sapiens
agctctcccctggtaggcaaagtgacagacatcttgattgacaactccatcctgtctctcggagtcagggaggagttccccagagacaggaacatgggaaagtgtggaggacagacacactcttcagtgaccagtgcctattgtcccagggaaacaaaagactcccaatcagcaggggaaagagatgctcctcccaagcacaaatcagccagtgagtgactttggtctttcttcaacagaaactcatcttcttccctcctgctcttgagctcttggtggctttcagggataaactaccaccatcgccttcaataacagcatctttcaactcattctgcctccacatcctgccttttgctgtttcctgtccccttcctatcacctagccaaatgctagcatctcttcttcagggatccttgcttgaataacccaaccaggaatgtctttctcttctgaacttcataccccatccaaatacattttttaaaactaacaatgactatgtgcttggctttactgg

SEQ ID NO: 200297 - DNA, 460 bp, Homo sapiens
tggccagtgacccggtgacgacgtcacctccgcaaaggctcacacggttccacctatcccctgctcttctccacggagcaccagtgtgagcctgagaaacacgccctctggcacctgtcctcataaggcctctcctggctttctctggagtccagcctcaccctggcctctacctgccaccatgctgttcccgccaccctgaatgcccccttccaggcatccttggccagcacagcctcaccccaggggaaccttctgccatctcctccctggcacacaacgtgaaccatgggtgcccagttcccctcagtcccctacctgctccaagggtagggcccagactgatggcctctggggtgggccacgatgagacccctgcccctgagggcccagcctgcacctcctccacctcactggatgctgttaaccccctctgctcctcctccaggtacagggaagc

SEQ ID NO: 200298 - DNA, 829 bp, Homo sapiens
gggtttcaccgtgttagccaggatggtctcgatctcctgacctcgtgatccgcccgcctctgcctcccaaagtgctgggattacaagcgtgagccaccgcgcacggcagcggtaattttttttttcttgagacggtgtctcactctgttacccagactggggtgcagtggcaccatcccagctcactacaatctccacctcccgggttcaagtgatcctcccacctcagcagccatatggtggaacttcaggccctgagcacctctgacctctctcacctgcttcactttacttctctgtaaggcaaggggaccagagctgaattcccttagcctgcaggaccaagcccactctctgcacctccatatgacccctcacctgcctcaaggtttctccccgccagatctttctttctttcttttctttttttagagatggagttttgctcttgttgcccaggctggagtgcaatggtgcatctcagctcactgcaacctccacctcccaggttcaagtgtttcttgtgcctcagcttcccaagtagctgggattacaggtgtgtgctaccacacctggctaattttgtacttttagtagagacagggtttcaccgtgttggtcaggctggtctcaaactcctgacctcaggtgatccgcctgcctcggcctcccaaagtgctgggattacaggtgtgagccaccgcacctggccccaatctgtctctctttctttgtttctttttttttttttttagagagactttctctgtcgtccaggctggagtgcagtggtgcaatcttggcttactgctacctctgcctcctgggt

SEQ ID NO: 200299 - DNA, 200 bp, Homo sapiens
ggtattattataaaaatatcttgaccttttggagcttatggtgagaaataaagcttatattctttatttttatcttttaattccattttttccatgaactttttgaagtcccttcatatagggctattcaggttatctatttcgtcttgaatgagctttggaagtttgtcttttaacagatttgtccatcttatctatgt

SEQ ID NO: 200300 - DNA, 321 bp, Homo sapiens
aatgctctacatttggtgaggtgcaaataaatgctacattgagaacgaagagtatattacttcctcttttattcttgttattctattattattctatttgtgctttctgtacctaaaattctttgtttctctatcagttctccccgcattctatttttgaggtctattaaaatgtgtgggtaggaacaaaaacattgattcttacttgcaatcccaatgagaatcccactttaaaataagtactattgactgactgcgacagggagctggcaaatgctgaaaaacgactacattccttaataagctgccaaagggagagca

SEQ ID NO: 200301 - DNA, 945 bp, Homo sapiens
acagagttttgccatgttgaccaggatggtctcaaactcccgatctcaggtgacccacacgcctcggcctctcaaagtgctggattacaggtgtgagccaccatgcccggtcttattattttctaaatgtaaaaaaaaatagacctcaaaaaaatgatttggcctcctgtgtccagagtcagtacttttttattacaccacagcaatctcaaacatctttacagctcttaatattttaaaatatgcttcattttatataagataaacaatctcaaagcatttgtagaagagtaaatttttgtcactctaattacattttaaatgtagtgattcttaccacatctgagtaaatgtagagaggtttgggggtttttgtatgtgttgcatgttttattaataatagatgtttcttcccttacacctgctaagttagaatcttttctgagattcttaagcatcttaaaaagttttaaatgactataatgggcccttctataccaacagagtaacagtgtacaaacagaatccacatattcatctcagtatcactcaatgaggatgaccagacactatgtttctcatgacatgatgcaataccacaacatcaactataaaggattcttaccaaaaaaaagaggaagaaagaaaagattcgacctgaattgaatcaagccttcggttctaactaccagtttgcagggaatagtggggatataggatcaagttaaacaccagcacaagagagcaatcagtcaaatccagaatgtggaacattatacaggacaaatgacctggtttctccaataaatcagtggcataaaaaagcaaagggaagggaatctgaagagttaaaactgttataaaagaggcaaaagcgaagatttttgagacaatcaggaaatttcaagattatattactggaattgttaatactcttttaagtgt

SEQ ID NO: 200302 - DNA, 688 bp, Homo sapiens
aaccctttaaatgtgaacatggagaaaaggagaattgctaaacacattgctggaaaacatcgcccatataaacgtctgtctaaaagagcaacttagccagagcaaaatcgtctgctaaatcaaaggcgactggcacaactaaatggtgtagaagcaaatatttcattttcagcttaaagaatatcactgcaaaaaatatgttcattctgggttatcaatgcgttttctaaatgaagatgactctgaaaacatactgataaagttaaatacatgccgtttcaatcccaactgacacaaacactccaaggagtcaaggactgcaaaccaattatgtttgcaaaatcctggctcaaatgtcctccctcaaacacaaatgttaatgtcttactcagtatactaagaaatatgtcctctctgttgagtctttaaaatcaagtggcttatgaaataaacctcccatccaataagagctcttggcctcatcaactcatattgaaaatatgcacaagggttctgttctgacaatcatctcactgtcgaagggtcaaatcaggtgattctcagcgtctgttaccagagaccaggtgcttccactcaagatgacttcccggtttgctcaagcaagaaccacttaatgagcaaatgagcaaaccctctgggctgctccagcttaggtgagagtgcacat

SEQ ID NO: 200303 - DNA, 266 bp, Homo sapiens
tggacagtgggacaatgtgaaagttctcttcaggttgcttctattttcttgagtgaaaaaacataaatgagattgagaaaggagaagagggtgttgcagggttggagaggaaaggtttgaaatagtatcccaaccatctaataatgtgttctctctctctctcttttttttttgggagatggagtctcgctctgtcacccaggctggagtgcagtggtgtgatcttggctcactgcaatctctgcctcccaggttcaagcgattct

SEQ ID NO: 200304 - DNA, 565 bp, Homo sapiens
ctctttcacccaggctggagtgcagtggtacgatcttgtctcactgcaacctctgcctcccgagttcaagcagttctcctgcctcagcctcctgagtagctgggattacaggcgtgtgccaccacaccatagcaggtcctattttcttgtcctcctttagtcaaaccatcagcatagtgtctgctactgaagttatatttaaaggtggtaggaaatgttatttaaaataatattttaacccagctaatttttgtatttttagtagagacggggtttcatcatgttggccaggctggtctcgaactcctgacctcgtgatccacccgcctcaacctccgaaagtgctgggattacaggcgtgagccaccctgcctggcctttgccattacttttaatggcaagaaccacaattaattttgcaccaacctaatgcttagtgtgaggctattgtaaaaaggtgaaaagagcattgagtgaaagttggtacctgtaatacacagaagtggcagaaaccataccagagagcaggtgaatgactgaagttgaagaacagggaggggagggt

SEQ ID NO: 200305 - DNA, 971 bp, Homo sapiens
cgtggctagagtagggtctggagagagctcccactgtggcgagtcctgtcgttggattcccgcggcgccccgtaaggctccgccccggcggtgctaccaaaccctgttcgattttagaatcgtacattcccagagggaatcctagacccctcattttacagttgaggaaacaggcccaagtagcatgacttgttcgcgccgctagtcgaaggagcagcagccccgatcccttgactctggggcactgctttccctttagctcatttttggaggaaatgggtgcgcccttgctcgacctttggtgattgccgccacaggccttcccgccggctaactcagcgtgcccaagtcccgtgacttagtgccaggacggtgctgtgacccgttatcccctgtcgggttttacctccccccgggagagctcagccctggatcccggcgggcggcggagcctctctggagcccggacgggacagcccaccagggtctgcttctgtgaggggccgaggcgtcattccgcgaagccttctccttgctgttgccatgtgaagaaggatgtgtttgcttccccttctgccatgattgtaagttttctgaagcctctccagccatgccaaactgaagctgctggaaggtacacatcttgggagtttgccctttgaagctcacctgtggaccttttttcctttcgaaaagaagcataagctgcaataaaaatttggtttcaagataacaaagtcagtccccaaaaatcagtattgagagtcactgacattaaatgatgaagatacgaggatggtgtggggacctttactcttcgaagatgagctatacatgcccctgaaaaggctgtctgaagacaggggaaggctggagatggcaactttggcctctgccaagtactcgtgctattttctgtatgtgatactatctgttttgtaactcagaggcaacaccacatacctagcata

SEQ ID NO: 200306 - DNA, 328 bp, Homo sapiens
tgaagaaaatcctagggcccttcagactccttggtcttggagatccctaaggaccacacttggaaactgatggtctatggcaatgggtccttttaggccttgaatccctttaagaatctgacaatatgaaactctgtctctaggaagctgctggaaggtacacatcttgggagtttgccctttgaagctcacctgtggaccttttttcctttcgtaagtccactgactccagttaggaatgcttggtctgataagcgtcctttttatgtaatgatggtggataaactgctttttccaatacctacacatacagtttcaaaaccaagga

SEQ ID NO: 200307 - DNA, 637 bp, Homo sapiens
agaggttaaaggccttggcagagtgaagctaagccagggtggcggatttgccacctcccctggccgcacccaggaggaagccgtaaaggccactcccttcctctgtcccttggcccaggttgcgggcccctccgtgcccctccaggtcggcaagcagctgagcttccctgctcagaatctaggacagccgggatcttctctggacccagcttggacccttatgtgacctgtgtccacttataatcaggcactgccctgggtttaggcggccaggtcacagccctgacctccacagaatgtccagtctgtgggtggacaggcatgaccagggctttaaggacagttgttagacatgggaggcagtgcttcctaggtctccaagagggacatgagaaccctcccaggaaatcagctgagatctgaaaattgaggggaaaacacagggtgtagggaggagagagggaaaggcaagtctctggtgtcctaatggaccttaccagctcttttttttttcttttttgtggtgacggagtctcgttctgtcgcccaggctggagtgcagcagtatgatttcggttcattgcaacctccatctcccaggtttaagcgattctcatgcttcagcctcccgagtagc

SEQ ID NO: 200308 - DNA, 539 bp, Homo sapiens
ttgataatttcagaaagagatttggctttaaaaatgtcaagataataggagaaacagcttctactgaccaagaggcagcagacaagttcccaggcactgttaagaaaacagctgaggaaggatatctgcctaagtttttaatgcaactaccccagtccagaaaaaaatgccacaagagacatttattatattagtaaggtggggaagtaagcaacaagatttaaagcaggaaaggataggctaactccactgttttgtgtaaaagcagttaggtttatgatcagggctgcccttatctataaagctactaactcctgagcctcgaagagaaaaactaacaatcttttggtggtacaacaaaaaggtcaggaaaacaagaactaattttctagactggttccattgatgctttgcccctgaagtaaaaaagtaccttgccagttagggactgccttttatggttcttttgatattggacaatgcccctggttacctcatgaatttaacatcaaaggtgttgaagtggtctacttgccccc

SEQ ID NO: 200309 - DNA, 685 bp, Homo sapiens
aatagagaaaaactggagaaaatagactatgccacctagaaaacttgatgtatatgtatgcatgtacatacatatatacatatacacacgtacacatacagccatatatagatacatatgcatacacacacacatatatatatacaaatacccagatatgtgcatgcagaaagactggatgctgcacccataaagcaagaatgggatatttaaaaaaaaacattcagagaacaaaaaagaatttttaccaattaagaacatatagtagaaaagaaaaactcaaagaaatattggacattaagttgaggaaaactttctagaaagtagagcaaaagggcaaagaaataataaacagaagataaagtaaatatactagtgcaggagggccagctctgtattattaaacattccaaaaaagggaaaacagaataaatgaaaagaaagaaaaaatgaatagtatatttcaagaaaatttctcataattgaaggcgaagtacttattgagtgcttggcgtaatggatgaaaagagaccaatactcatttaaagaataggaaatataaaaagcaaacttagatgcctaggctccataatattcagggaaatacaaattgaaatgagatactatttttcatccatttgatagggtaaattaattatatcaatagcattgggaaggatatggg

SEQ ID NO: 200310 - DNA, 642 bp, Homo sapiens
cactaggatagaagtttcctgtgggtgtagaaggtctggaagaggaagctgtcagttctgttgagagaaccaagaaaggctttccaagcagatcaatgatttgtctcagaaataagtagataaggtcgtgtgtgtgtgtatgtgtgtttccaactttattaaggagattctcctcactcttttttggagttatgtaatcctttattatcatttcctatgcccaaaccaagccttattataaatcaagacattgaaaaggccctctctcattagctctttcaggatgacatgggagacaaattaactttaaatcaacttggtgtatttgtgatttaaacaagatagaagtttattcctaaccttcataaaagttgggcagttggaagtccaaggaaggcacaatagctccacaaaacattagagacccaggattcttttagttctacaatctgtcatctcttggtagggcacttgtcctcctcacccaaggtatctgctggaggtcaaaccattcctgctgcattccagtgagaagatagaatggggaaaagcaaaagaaacctctctcagatgactccacctttggtttaaacaaccttcctggaaatcccacgcaacacttctgctaacatttagtagatc

SEQ ID NO: 200311 - DNA, 362 bp, Homo sapiens
gcctccttccctgcctccttccctgattcaaaggtttccttctggggctcctgagccagggcctctgcctcacacctgggactcgcctgccggcctggtttgcttccagggagggcgcaggaaaggagtggcctcccctttctggcaggagagcaggtccttaggagagaaacgggctcaggctaacacaacagattcccctaccaggaaatacgagatcgctgatttgtgccaacagcgtttaataagcacttcctggatccctggctctgggctgagttactgtttacttgaatcacatgaggaaacagttgaggcagaagtcaggggtcagaggtcaggtcaggctcaaagccacagca

SEQ ID NO: 200312 - DNA, 339 bp, Homo sapiens
gagaaagttattgttttcatttttttcagacgggctctgttgcccaagctggactgcagtgatgccatcacggctcactgcagtctcaacttcccaggctcaagcaatgtgttgggattacaggtgtgagccactgcgcccggaccccactctttctttgtaggacacattgacagggcaggtggtaagcattggtctcaaaattatcagccacagccagaattgtgtacctactacatttcggccctagcctaaaaatgtacaatatgtcaaccagcttgcctggcttctgtgtgttgcagatagatgaggcagcacttttcttcctggaattaatga

SEQ ID NO: 200313 - DNA, 192 bp, Homo sapiens
cctgggcaacatgacgaaaccccatctctacaaaaaatatagtagctgtgtaccagctactcgggaagctgagcctgggaagtcaatgctgcagtgagctgtgattgcaacactatacttcagcctaggtgttggagtgagaccctgtctcaaaacacacacacacacacacacacacacacacacacacac

SEQ ID NO: 200314 - DNA, 392 bp, Homo sapiens
cagccgttcgacatcttcgtgctgcgcgctgaggatggctgcatcagcaccaaggagctggggaaggtgaagaaggagacggtgaaggagaaggcaagccggaaagagcgaacgaaagaagtggtggaggaggaggagaacggggctgaggaggaagaagcagaaactgccgaggcatgagcaggcaggaagatcaaggggcaagaagaagcatgcggaagacgcaagccgcaggctcatgaagggcccgcgcgtgaagagagctgccgaagggccacggggaggtagtgacgaaaaataacaatacaggactctttcgaggccctgtaattggaatgagtccactttaaatcctttaacgaggatccattggagggcaagtctggtgccag

SEQ ID NO: 200315 - DNA, 747 bp, Homo sapiens
ggttgcgctcatgcactagattgcccagctggtcctttgacagctggcccactgtgcgacgggctcgggccgtcaggaggcccacaatacggaggcggatttccgcaagcttttccatctggcccacccccactatgctgggcacggacttgcacatgtatgacaccaaaatgtacgcggacggattgtctccggaactcaccgtggcattcaccgggtccactctagataacctcgggccgatcgcacgccccccgtggcggcgacgacccattcgaacgtctgccctatcaactttcgatggtagtcgccgtgcctaccatggtgaccacgggtgacggggaatcagggttcgattccggagagggagcctgagaaacggctaccacatccaaggaaggcagcaggcgcgcaaattacccactcccgacctttaaaatctccattgtctgtagttcccatctttgtgtccgtgagtacccaatatttagctcctacttataaatgtgaatatgcagtatttggtttctgtttctgcattagtttacttaggataatagtctccagctacatcaatgttgctgtgaaggacatgatttcattcctttttatggctttgtagtattccatggtatatatgcaccacattttctttatccaagtgaccactgctgagcacctgggttgattccatatctttgctattgtgataatgctgcaataaacatatgagtgtaggtgtctttt

SEQ ID NO: 200316 - DNA, 758 bp, Homo sapiens
  misc_feature (62)..(62): n is a, c, g, or t
caggcggccacctagtcgctgaagcagaaagacaggaagatgaaggaaatcttgctgcattnggacgactagctcatgatgtattggataactgtggtaattctagagctaatacatgccgacgggcgctgacccccttcgcgggggggatgcgtgcatttatcagatcaaaaccaacccggtcagcccctctccggccccggccggggggcgggcgccggcggctttggtgactctagataacctcgggccgatcgcacgccccccgtggcggcgacgacccattcgaacgtctgccctatcaactttcgatggtagtcgccgtgcctaccatggtgaccacgggtgacggggaatcagggttcgattccggagagggagcctgagaaacggctaccacatccaaggaaggcagcaggcgcgcaaattacccactcccgacctttaaaatctccattgtctgtagttcccatctttgtgtccgtgagtacccaatatttagctcctacttataaatgtgaatatgcagtatttggtttctgtttctgcattagtttacttaggataatagtctccagctacatcaatgttgctgtgaaggacatgatttcattcctttttatggctttgtagtattccatggtatatatgcaccacattttctttatccaagtgaccactgctgagcacctgggttgattccatatctttgctattgtgataatgctgcaataaacatatgagtgtaggtgtctttt

SEQ ID NO: 200317 - DNA, 875 bp, Homo sapiens
ggcaccttcgctatcatcggacatcgctatcatcggcacctcgctattcatcggcaccccggacagatcaactgaaatcggcaaactactgagttcctacttgcaaaagacaagtgacgtggaggatcactcggtgcacctgcttaaaacagcaaatcgctgggaacaagtgccgttaattaaggaaaagttgagccagggcgtgaccctcgtcgtggacagatacgcattttctggtgtggccttcaccggtgccgatgaatagcgatcgctattcatcggcatcaaaaccaacccggtcagcccctctccggccccggccggggggcgggcgccggcggctttggtgactctagataacctcgggccgatcgcacgccccccgtggcggcgacgacccattcgaacgtctgccctatcaactttcgatggtagtcgccgtgcctaccatggtgaccacgggtgacggggaatcagggttcgattccggagagggagcctgagaaacggctaccacatccaaggaaggcagcaggcgcgcaaattacccactcccgacctttaaaatctccattgtctgtagttcccatctttgtgtccgtgagtacccaatatttagctcctacttataaatgtgaatatgcagtatttggtttctgtttctgcattagtttacttaggataatagtctccagctacatcaatgttgctgtgaaggacatgatttcattcctttttatggctttgtagtattccatggtatatatgcaccacattttctttatccaagtgaccactgctgagcacctgggttgattccatatctttgctattgtgataatgctgcaataaacatatgagtgtaggtgtctttt

SEQ ID NO: 200318 - DNA, 755 bp, Homo sapiens
ggttgcgctcatgcactagattgcccagctggtcctttgacagctggcccactgtgcgacgggctcgggccgtcaggaggcccacaatacggaggcggatttccgcaagcttttccatctggcccacccccactatgctgggcacggacttgcacatgtatgacaccaaaatgtacgcggacggattgtctccggaactcaccgtggcattcaccgggtccactctagataacctcgggccgatcgcacgccccccgtggcggcgacgacccattcgaacgtctgccctatcaactttcgatggtagtcgccgtgcctaccatggtgaccacgggtgacggggaatcagggttcgattccggagagggagcctgagaaacggctaccacatccaaggaaggcagcaggcgcgcaaattacccactcccgacccggggaggtagtgacgaaaaataacaatacaggactctttcgaggccctgtaattggaatgagtccactttaaatcgcttcagaccagaggattcaccagatcaccaacgttgtgaaacagacaggccacggcaaagccagcatccatacaggacaactaaagaggatcaccccaggtagacctaaccgcaggtagggatgatgacggaggactatctccgtgtacgatcgagcaaatagactggcccatgcgagggtcggtcaaaggttgatgaactcaggtacgcatccaacagcgtcgctgagtataacggagggagcaa

SEQ ID NO: 200319 - DNA, 613 bp, Homo sapiens
atggctcctcagccaagcagcatcgccaccattgttctgaacctgcgggggtccgaggctcgaattcgtttgtctgtcgttctatagtctctagataacctcgggccgatcgcacgccccccgtggcggcgacgacccattcgaacgtctgccctatcaactttcgatggtagtcgccgtgcctaccatggtgaccacgggtgacggggaatcagggttcgattccggagagggagcctgagaaacggctaccacatccaaggaaggcagcaggcgcgcaaattacccactcccgacctttaaaatctccattgtctgtagttcccatctttgtgtccgtgagtacccaatatttagctcctacttataaatgtgaatatgcagtatttggtttctgtttctgcattagtttacttaggataatagtctccagctacatcaatgttgctgtgaaggacatgatttcattcctttttatggctttgtagtattccatggtatatatgcaccacattttctttatccaagtgaccactgctgagcacctgggttgattccatatctttgctattgtgataatgctgcaataaacatatgagtgtaggtgtctttt

SEQ ID NO: 200320 - DNA, 582 bp, Homo sapiens
agtatgacatgattacttcgttatggtaccttgcctgtggctggtactcttctagataacctcgggccgatcgcacgccccccgtggcggcgacgacccattcgaacgtctgccctatcaactttcgatggtagtcgccgtgcctaccatggtgaccacgggtgacggggaatcagggttcgattccggagagggagcctgagaaacggctaccacatccaaggaaggcagcaggcgcgcaaattacccactcccgacccggggaggtagtgacgaaaaataacaatacaggactctttcgaggccctgtaattggaatgagtccactttaaatcgcttcagaccagaggattcaccagatcaccaacgttgtgaaacagacaggccacggcaaagccagcatccatacaggacaactaaagaggatcaccccaggtagacctaaccgcaggtagggatgatgacggaggactatctccgtgtacgatcgagcaaatagactggcccatgcgagggtcggtcaaaggttgatgaactcaggtacgcatccaacagcgtcgctgagtataacggagggagcaa

SEQ ID NO: 200321 - DNA, 634 bp, Homo sapiens
gcacccaggcgcacttctccagaagcagattgtcaacattgaccgtattacaaagtatatgtctcgagtccacggtatgcaccctaaagagaccacccgtcagctgagcttagctgtgaaagatggtcttattgtcgaaactctaacagtgggctgcaaaggttcaaaagctggtattgaacaagaaggatattggttgccagaagtgcgcctgggtgcgcatcccaggcgcacttctcggagagggagcctgagaaacggctaccacatccaaggaaggcagcaggcgcgcaaattacccactcccgacccggggaggtagtgacgaaaaataacaatacaggactctttcgaggccctgtaattggaatgagtccactttaaatcgcttcagaccagaggattcaccagatcaccaacgttgtgaaacagacaggccacggcaaagccagcatccatacaggacaactaaagaggatcaccccaggtagacctaaccgcaggtagggatgatgacggaggactatctccgtgtacgatcgagcaaatagactggcccatgcgagggtcggtcaaaggttgatgaactcaggtacgcatccaacagcgtcgctgagtataacggagggagcaa

SEQ ID NO: 200322 - DNA, 730 bp, Homo sapiens
tgaggcgaggggctgtgtcctcagcattgcctggccctggagggacagcagtgatgccactgccagaatgcagctttcacatcaaggtaaagccgggtctcctgctggcccctgggtggtgagcttcgacttcccaggggaaggcagtgagtgggagagagaccaaacctgggcttcccaagcatccactgagagatctgtcaagagccgatccctgggtcctaagagagagccttgcctggttctgcccatgccaccctcttggaagagcccaagaaggatacatgtctggccatgcctttggggaaaaggagtcggagagatgtttcctgctgaccatccaccccttcatttgggaggagacactgctgagaagaacaggctttgctctagggctccatgtttggttcctggtggagccctgttgggcatcatcaccatcacctccttctctccaccacctcctcctcccagccccactgctctagattgctgggacactagggagtatgatagggcagtagccagggccatggcttagtgtcctggagccctggatctccctgcccatagcctggatgcagcaagagctgggaggcgaagtggaaacatgcagggctcagggttggggagtgattgcaattgccttccttgccaaagtgacttggggccccaacgttcccagcagaccccttgaggacagaaataggtagagtcagtctcaagacct

SEQ ID NO: 200323 - DNA, 328 bp, Homo sapiens
cctccacccccgctaagtctccattctcaggccttcaacctcaaactgagagtcacatcactggctcccttaattctcaggcctttggattcagcgtgagttatactatgaacttccctggttctcctggttgctgatagcatatcatgggacttctcagcctctataatcatgtgagccaattccaaacatgaacatcctcttatgtatctctaaatgtcctattgattctttctctggaaaaccctggtttatctgctatatctaacaggtgtttctaatattagaaatatctaacagcatctaacatattcaataatgtactgtt

SEQ ID NO: 200324 - DNA, 405 bp, Homo sapiens
gagggtctctggagtgacaatcttccaatagcatcaggataggatattaagtttaataattagctggagagaaaagtttagaattgctgttttggaaaattggacaagtggctgtataagagttcataaaagttaagaccaggaggagccaagatggccgaataggaacagctccagtctacagctcccagcgtgagcgacgcagaagacgggtgatttctgcatttccatctgaggtactgggtgcatctcactagggagtgccagacagtgggcgcaggccagtgggtgagcgcaccgtgcgcgagccgaagcagggcgaggcattgcctcacctgggaagcgcaaggggtcagggagttccctttccgagtcaaagaaaggggtgacggacgcacctggaaa

SEQ ID NO: 200325 - DNA, 622 bp, Homo sapiens
tacgaatttgtgttgagccacattcaaagccgtgccgggctgcaggctggacaagcttggtcttccgccatgctgctcacacagaagcaggctcacgccaggcagtgccagttgggtttctgaagtagctctacctctaagtctccagggcacacgatgcgagatgcaaatatcacagagctttctaggcagccagcagacgtggaaagcaggttagtcaggctatgattcagtctccagctctctcccttctcccctggcttggctgtgcctcctaggagggagttctgggccaagaaggccacacacgcccccaggcaggccacaggcccagactgcctggtcctataatacagaagatatgagagccaggaagccacagaaacagccgtcaatggggcttggtgtcccacacacaaccccagattcatcagactccagctcttactgtgccatctgggccacaagggaaatgggagcagtgaagtggagctggaccaggaaccagacacgaacctactctgctcccaggaaagtaactatgacctctgcgtcactgtcctttggtctctcaaggatcccacttccattgcctgtcccttaaacgcccgggaagcggcct

SEQ ID NO: 200326 - DNA, 504 bp, Homo sapiens
aaaaaacaaacaaaattagccatgtgcattggacgtctcagcaatttgggagtctgaggcgggaggatcactagagcccaggagttggaggctgcagtgagctatgattgtgccactgcaatataggctggatgacagaatgagatcctgtgatggttaatgttgagtgtcaactttattgtattgaaggatgcaaagtattgttcctgggtgtgtctgtgaggtgttgccaaaggagattaacatgtgagtcagtggactggaagaggcagacccatcctcaatccggaaaggtacaatctaaacagctgccagcaaggctagaataaaagcaggcaaaagaatgtggaagaactagactgcctgagttttctggcttccatctttctcccgtgccggatgcttcctgctcttgaacatcggactccaagttcttcagcttttggactcttggggacctacaccagtggtttaccaggagctctccagcccttggccacagaa

SEQ ID NO: 200327 - DNA, 193 bp, Homo sapiens
tttcttactctgtttaagcattgtaagactgtcagaagctgaactttgtgggaggggagtcaagtgaggagagaatgcaagtaagaaaggaaaaagagtgaaatcacaagttggtgtttcccgtcctggcttttcggttcatgggaagtggcagaatctggatttaatgcctccataattgggaaaaagagca

SEQ ID NO: 200328 - DNA, 690 bp, Homo sapiens
tatgagacttctgtgtccaatgtaaggtctcagaagatgaaaatcaagaatttatgtaaactagaaaaaaaaaaccttctctttcagcaccatgggtgataccagaatataatgtgttataaatactcagagatgttataaatactcagagatgttgttaatatttagtaaagtcatactgaatgtctgaaatttctcctaatatttggccaaaggaacaataaaataattgcctatgatgtcagtgggcatattgtgaatttgaaagcttctgagctgggttcccccgtggctcagaatgtctgcacaagtatcagaatccaaagtgtgcattacatcatcttccaaatggcagtgaaatgaagactcttttcatgtttctctagagatagaagcaagaaactaattacattcttcttacagaaaaaaagaaagcagaaaagtgaaaatcaaaatttccaagaatctggatatccttcactgaagctaatttcttaatatccaattatcttgtttactgttactgggtatacaggtctctatcttgaaaatgtacttggcaaaattgtaaaagcaacaaaaaccaccacttggggacagaaaccacattttgtaatttcatttattgctaatttgtttgaaatgaaattatagctcgttgtcatatggacaccagtgagattaaaagca

SEQ ID NO: 200329 - DNA, 826 bp, Homo sapiens
ctcttctggctgaaggctggtggcccccactgggggtagggggattgtgtgcaccccacctccactgtaccgtgccctccagcctggcaagtaacagcacgacagagacaggggcccctgacactgaggcttgcatgttggtgcacaggcaggctggggctgtcccctccgggaggcaaggccaaattccccatcaggtcaggtcagcactctccctgaccccatgccccagctcacatcctggccaggtccaggccagctgcattctcccccttctgcccttacttccaggtctaggcagcacccgggtaggtgggcgcctggtcgggtggcctagccctttgtcttgctcattctaagtttggccacgtggttcttggcgtgtaggccccggagggctgtgagaaacggctctgggctctggcctggcctgtgtcctccctgcttcttcttgatcccaggtcctcccagcctccccaagcgcagggtgctctagagggcgctggaggcccctcggggctgcctctttcagggtctgaagggtcatgtgtccccgtccctggaggccccatttcctcccccctgcggaccgaagagaacgcttgtgctcggagatgttcaacccatttgtgatgggcaacttggtcatgcagacatccagctagaagcatctgtagctgaaagaaagccttttgaaattgttaagagccagaatattgtattggtttttaaaatttagctgcatgtatttttttaaaaaaagaattataccccagatcactttgctttggtctgtgtctatatatgatctagtttagagagaaaa

SEQ ID NO: 200330 - DNA, 332 bp, Homo sapiens
tatctggtcttatgagaaaattaatatttttattatattccttgtcacagccctgatatgaatggctgctcttagagttatatatagtgattctgaaagatactgtgatcctacatctgagtaaaaagctatggtgaactgccacaaaaactacaaaaaaatgactaatgccaaatggtctagaaaatacggattcagggaaagtagagccttagagattctcttaaaaatgtgcaattcaaagtactgatgtccatgatgtagaaatgcatgaatgtactgttaattaatctcaactcttgctaatttctctcggaccaatgagtattgca

SEQ ID NO: 200331 - DNA, 250 bp, Homo sapiens
ggacaaacttggggaaactgtttgcaattgaaataacaaataatttacatcctcaatattcaaagaatgctcacaaataagtaacaaaatattcatccctcaatggaaaaaatacacaaaggtcctgaataagcaattccccaaaaaaaggaacacaagtggctaacagacatgttattttaaatgttcaaagaaatgcatacttttaaaacttaacatgctgtttcttttttttttttttttttttttt

SEQ ID NO: 200332 - DNA, 718 bp, Homo sapiens
tggagactccatttgcagctagtgtctgaagtctgaagtggggggcagttttgtgggactgagcccttaatttgtggggtccacactaactctgagtagttagtgttagaattgaactgtgggacacctagttggggtcacagttagttggtgttagaatgacatatttgatgtcaggaaaaaaaaaaccacacaactcctaatgatcctgtagaccaaagctcaaacgtcacctctaaggaaagatcttcctgctcccaagaccagctgagaccccagctttccttgcaagcttgtccagcccagggcccacaaggtgcatgtagcccaggtggctcaggatggctttgaatgtggcccaacacaaattcataaactttcttaaaacattgaggtttttttgcgattttttttttaagctcatccactatgattagtgttagtgtattttgtgtggggccaagacgattcttcttcccatgtggccccaggaagccaaaagattggatacccctgctttaaagtatacatatttgttcacatattaataaatgtctgtcccatcaattagacagtaagcttcataagggcttattttgtgttgaatagttatttgttcctagtttttaattagttcttttaagctagagatcctctcattccatggtggttatgaggattgaaagagttagtatacatagtgtgcatttacatacta

SEQ ID NO: 200333 - DNA, 629 bp, Homo sapiens
tactggcagacaaatagacatactctctctcctcaatgccctttctgactagtacagaaagcagaatataaattagtgaataaaaatttataattacaaattgtaagagaggttgttgcaagagaataaggcagagtggttaattatttaaatgagttgattagggaagatctataatgaggtaatatttaagctaaaacccaaaggagaaaatttaaccaagtgaaagatgatgaaacatggtgtcatgaccactcttgtgcctagagaaagaatgtagccagaaaaagagggcccaggtctgaagctgaggaactccaatatctgaagttcaggcagaataaacagcagccaacaaaggaatctacatagaagcagcaagacagataagaagcaactaatctaggaaagtataaattcttcaaaaccaagagtaatgaaaatgttttaaagaagaaagagtatgccaggcgcagtggctcacgcctgtaatccccacactttgggaggccgaggtgggcagatcacgtgaggtaaggagttcgagaccagcctggccaacatggtgaaaccccatctctaccaaaaattcaaaaaaattagctggccgtggtggctcatacctgtag

SEQ ID NO: 200334 - DNA, 577 bp, Homo sapiens
agaccagcgcggggaacacaggaagacctcatcactataaaaatttttagaaaaaataaattataaaaaaaagaaaaagaaaaaaagaatttgagtaaaaactataagaagggagggcaatccgtgtctatgtctggggcggagctctgcagggagaggcaacacaagcatcagtgctctgaggctgcagcaggagaggtgtacacagaacagcagggaggccagtgtcaaggcagtgagcaagctggagagtgcaagggaaggggccagagaggtgaatggggcagtaaacttggggaggaagttaattacctagcgggataatagatgagttctttccattttccaaatgttccaatatgtattactacacagtttcacaagatattaaaggaaacaattcattccgacatacggcttgtatgagtgaaaacagggagaacggtgagagcagttttaaaacttactccctaaacgcactccagggtcggaagcgacctctaggggttcatttagaccattacttttttctttttcttgctcttaaaagtataaaacagcacggtccacatttaat

SEQ ID NO: 200335 - DNA, 362 bp, Homo sapiens
ctcccaaatggatcccacagagtgaagataatgagttaaatgctttagctctagggatttaaaatatatagaaagcaagttacttctactggaagttaaacttaaagaattctcatggttatgtcatctctcactgcagtaccgagtgtgctacttggcttccctctctccttccatctactgccttgccctatcatttacagaggcattaatgccggtttcaaactaataataattctttttcttctgtgctgcaaatacccaatcactgtggttaaataccatgtataacataaacagggtcaagaatgccagctgccagaagagtcatgtttaaattagcattaaccagcaagcccttc

SEQ ID NO: 200336 - DNA, 599 bp, Homo sapiens
aacttccatcttcccatattccagcagttctatggataatttcaaaaacaattgatattcacaatttcattttcatttttgttgttttaataagcaactagagaaacgtgaataagatctgcattttcagttcccaagaagtttcctatgtggcaaaatcttatcttttattgtccaaggaaaagtacttccctagactctacaagcaaaaagcacagcatttcaacctgtaagaacaagaataaactgttatccaagggttatgtaaaccagcagtaatctctccctatcctttacctcagttcaaaattctgaccatacatggctgaggatataaagccgattcaaaccatggggtcaagctgctttctccattatgattgcttgttcctcagaaaaggagctattccaaatgagtcatgaaggaaatgatcacactgaaagaaaactgcctgctcttgcctcacacgtttggctggtgctacctctaggtttaatcatggtctctcagaaatccttacaccactgaatatattacactaactcactatcagtcaggtgtatggacaactgtgataatcccgtctctaaccatggaa

SEQ ID NO: 200337 - DNA, 488 bp, Homo sapiens
attattttgagatatgttccattaatacctagtttattgagagtttttaacatgaagggatgttgaattttatcgaaggcctttctgcatctattgagataatcacgtggtttttgtcagtacatctaattaatgagttccagtatcatgaacataaaaggtagtttaggaagagggatgcctcagaaggtttcccatgttgtttcattcatcagagatcaagagacaccataaatcactgcaatatccccattagttcctaaaattttgctttctgagacagcatatcttaaatgccaactctgggttataaaattcaaattgactctgaaatttaaagaggaaacatatgaactgtaaatgtgtgaaggaaatcttccaaccccccatcccaaaatccactacagcaatgtttactttgtcctttataattatgggatgaaatgataagactgatgacttcactctttgattgggatgagtggggt

SEQ ID NO: 200338 - DNA, 272 bp, Homo sapiens
tgaaaaggttctggagaggccagggcttatctcacagaggttggcagcctgtctgccccatcccctgcctgcctctcccagcctggtagcttcaagatcatttgagcatttcctccacagcaggagccggatgcatctgctccacctaataaccccattagggccatttgcgcctctcaggggcaggcgcctgggaacccagccagcgccctcctccctgacctcttgccccagagggcggggcccctccacatggcacagggtgtcttccg

SEQ ID NO: 200339 - DNA, 232 bp, Homo sapiens
aataatttttaaaatcttttaaaatgtttttaaaataatttttaaaattattttaaaatgctttgtcatgagaaaaatccattttaaatatctttttttgtttggagactggagggcagtggtgtcatcatagctcactgcaccctcaacctctcaggctcagatgttccttctacctcagcctcagcctctcgagtagctgggaccacaggcatgcaccacaccccaccta

SEQ ID NO: 200340 - DNA, 542 bp, Homo sapiens
gtggccctagaccagatctatgattttaggcataactctagccttacatgaacctcggttttcccatctgtaaaatggtcagtaaatgcacccacaccaggctatttgaggaaagttaaaggggttaaagtattcaaagtgctgcaccatctaggcagttattgttacgagtattttccagaaagcttgtcttggatacccgctctctcaactgctgggagatcactgcctcacctctgaaatgaagaaggcttccaagcttaactctctcacgctatgaaggtgacaggccacttccaaggccacgttccctgacactaagcctgctaagaggaaaaaacaacagcatcacctcaactagaagttaaaaataagacacatataaacagattctataacattgtatggcatcaccctgcaagacaatgccaagaaacagatggctctgtggaaacagctgtatctcagaagaatcccggagaaagcccagaatgcattcctgctctcacgtgcgagccgcatgtcgccaactcttcagtcac

SEQ ID NO: 200341 - DNA, 633 bp, Homo sapiens
gaagttgcagtaagccaagatcgtgccactgcactccagcctgggcaagaagagcaaaattctgtctggggggcagggggaagaggtatattttttggattaaaatggaatgctttcctcaaactgttaaaattaggtagtgttacaagtttaaagaataggtttagccagtgtgattattgcagtgtaataaaaaggatcccaggtggcacacatgctagtgtggtgcccagatgctcaactgaagtgaaggataacatgcgtttcaacattttctatatactaggcagtttttcttaagtcttggtttattgtgatataatacagtaaaatttactctttatacgtatgattccattaatattaacaaatttaaacagtcttacagctaaatacaatcaagatacagaacatttccatcactacaggaagttgttttttgctaatttaactaaacttcttaccatgctcaaccccccacccccaccctgagaaccactgctttgtttttctgatcatatagtttggccttttcaaaaatgtcatacagttggaatcatatagtatgcatgaatcatgtagctgaagttttcatttcacttaggtaaacacctaggaataggagtgctgggt

SEQ ID NO: 200342 - DNA, 548 bp, Homo sapiens
cttcacacttcctgtaccttaatctccagtttttgtgacgctttgagaattcttttttaaaaatttaagttttaatttttttagagacagtttcttgccgtgttgcctaggctgagtcttgaactctggtctcaagtgatccttccacctcagcctcctgagtagctgggattgcagatttgagccacagtgcctggcagagtttttgttattattatcaaattaatattatttttacattattaattttttctttctaggcttcttaaaattatatctaattttctatccatagttaacccagaccatgagatttaattctatttagatttaattctgtgcctaactggaactggtactactgctagttcattcattgataacattgaatactctgaactatgccctgttctatgtcctagggataaagaaatgaataaatagacagaaatccctgcccctctggagtttatgtactagagggggtggcaaacaatgtaataaatgagtaagtcttagaatacgttagaagagaacaagtgctaaat

SEQ ID NO: 200343 - DNA, 470 bp, Homo sapiens
ggttcggaggcacatggggaagggaagaaaatgggggagatgatggagccatgggaatgtgcttggctactttcttggtcttcttaagccttttctgaggatctcttagcgtgtttagactagaggctgataactggtgctcaaagtcagccaatgggcatgttttatttggtttcacaggagttaaaaacctaatttaaaaagtcaacattttaaaaagagagttttcacatgaaaattcagttggaagatcagctgtgttcagttggctttcctacaaggtgtctcattagctggagtggaggagcacctgactctatgtatgtcccttgcttgaatcttgttatcctccagagtacagcttggctgactctggtttgtggaatggatgcgccaatatcactcgctcctgccttttgccatttccccctctaaaaatcagcattgacaagagataacagccctataaa

SEQ ID NO: 200344 - DNA, 248 bp, Homo sapiens
tcatctccagcatcccacagatgaagcacacgttccacttacctacataataaatgggcacatttgttacctacataataaatgttgcactgctgatatcacaggacaaataaaactagacttctgatgctaggctccagcttcattctcacaggttatcaccctcatcagggagatgatgatctctgaacaacttctatttaaatcgtgctcatattgcactgttgatgctgagtccatgacagcct

SEQ ID NO: 200345 - DNA, 296 bp, Homo sapiens
acctttaagacatcatgttgttttcatattaaaaacttaaaatattcagtgaccaattaatttggaggcaaaattggccaagtataaagttatgcaggggagaattcagatttgaacacagctaacttggaatctgagttcatgtacaacatatgtatatacaaacccacatgttgcatttgtgaatgtaggcacagagtgaaaattctccacgtttaggtccacaacacagagccatgtcacgaagaattaacacatgttctaattctcaccagaagatgtctaaataggttaat

SEQ ID NO: 200346 - DNA, 176 bp, Homo sapiens
ctttaggagtaggacaggaattgaatagctggaagggatcttggaggttatgtaacttgatccgaattctacagaggatggagaccctgcacagatctgtcagctacttggtggcacagcttctccccctggtggctaactgccccactacaccacagggatacatagtccagtct

SEQ ID NO: 200347 - DNA, 323 bp, Homo sapiens
atacattttctgaaacagctttaaatgaccacattcgtatagtcctttaaagaaccattttccaaaatcatacatgccaatgtccaagctgggatcaacttcataagtcgcagcaatcacaatgagtaagagaaaacaagtgaggtcaaatgacttcatggcagtaggattactctttatgcttcatatctttcatttcagagactaaacagaacagtatgtgaaaaatcacactacttctagtgtgtttaaaatatgcattggaggatattactgtatatataccacaatatataaaaaagacttggtatgttcctattttg

SEQ ID NO: 200348 - DNA, 451 bp, Homo sapiens
aaccactcagtctttcattgaaataaagttggtattctggtgagaggatggattctgcaacacagtttaggtctgttgttattaatatgttttagatacaccatccagttgtaaagtgcagcccattctttgcaattatgtaccatgccttgcctgggtactaaaacgaatcttttccataatggtagatgtgcctccagaatggtgctacctggaaataataataatccagacctttcatctctgaattgtactagtgtaatgtgggtataactcagcacagcacttgaaggcctacatctgaatggctgcttcctccctgactcctcatttctccatagctcccactccctactggtgtcagtaaactatggccagtgagtaaaatccagcctataacctgttttcatatggccctaagtgaaaaaatggtttttacattttaaaaaat

SEQ ID NO: 200349 - DNA, 555 bp, Homo sapiens
tggaaggactttttcctacattatatccttctcttgccatagacctagcatggcagttatagttggatggaatatctcctctacactcccttttgtatgggcatgttggttgatatagaaaagggagaaaaagtattttggaaaagtctttaagatgacttttcgcttataaactactgttttcctgcatgtcatagattatatttttctctgcttgttcattctcccttccttttccgtgtgatatgcaacacctcctatgagaggagtacacatccttgccccattgatgttaggcttaaatcgggcgcggtggctcatgcctgtaatcccagcactttgggaggccgaggagggcagatcatgaggtcaggagatagagaccattctggctaacacagtgaaaccctgtccctactaaaaatatgaaaaattagctggttgtgttggcacgcacgtgtagtcccagctactcgggaggctgaggcaagagaatcgctcaggaggcagaggttgcagtgagctgagatggcaccactgcactccagcccgggc

SEQ ID NO: 200350 - DNA, 373 bp, Homo sapiens
gtcaaatttctagcagaaaaaagtaagataaacttcaaactaaagaaagcttgttaaaagattttgcatctacatttacaatgttattgtccccttttacaccattatgcctcgtttctaaactataatcacccagtatccctgatatcatcccatatataatctttcatttagaaaatccttgtcatatccagtacattctgtatatgtcctcatgtttttttcttttaaaaaaattatttgtctgtttcccaaatgatcacagatccagtaatgttaaagtacatataaaaaattaaattgatttttgttatctaagtactagtacagattctgcttctcttgcacacacacacaaataaagacaaatttg

SEQ ID NO: 200351 - DNA, 374 bp, Homo sapiens
tcgtccccggtaattcagtttctctttctctgagttatggagtgttcttctaacagaaggatgaaatttgtttagcttgagggtagacctgtaaagaggagccagggaggccaggcacgatggctcacgcctgtaatcccagcactttgggaggtcaaggcaggtggatcacctgaggtcaggagttcgggaccagcctggccaacatggtgaaactccgtctcgactaaaaataaaaaattagctgggcatggtggcgcatggctgtaatcccagctacttgggaggctgaggcagaagaatcgcttgaacccaggagacaaaggttgcagtgagctgagattgtgccactgcactccagcctagatgacaga

SEQ ID NO: 200352 - DNA, 650 bp, Homo sapiens
ttctcagcctcccaaagtgctgagattataggcgtgagtcacggcacccagccagataactatattttaaagacactttgaatatatcatgaaagtaatatcttcataaacctaatttttttaaccatacaggagacttaaaaagcctagatttcttttgctcataacctacaatcttatgtttaatttttatagtaatgagtttgttctgtgtcatatactggtaagttttaggcagcatgtggagttgagagaattcattgagtctttaagttacttctccagccattcctagagtcttcgtctgcccttatgattagttttggtaaaccaagtagcagacggttttttaataatgtcatggcacataagtttgcctaaacatgacattggcattctttctgcttaattttcaagtgagggccctggaccaagtggtgcgtcggcccctgtcagctctgaggtgacacacaagtgcggggccttgctgtgcatttgtttttttacgttgactgttcagtgagagaggaggcttactcctggctctgcttttaccatcctctttctcattattttcagtgtatgctttctggagggaaagttaagagctttatataccacacaaactacctaaaatccttaatagggta

SEQ ID NO: 200353 - DNA, 447 bp, Homo sapiens
agcctttttatgtaagaaatacctgaaagaacagaagggctttgtcctggaggagagaagactgtggtcatgagtgacatccttcatgacaccaggagcattctcaagcattttctcgtaagctagcacgcactgcctttcactggctcattagtcctcacagcagcactctaaggtaggcgtaggatccttatttcacagccagtgaagctgaggcttagagagggacaatgacttgcccgcagttgactcaatgatagagaccagtctctaagccaggtctaagcccgtgtctctgcctgttagacaaatctgattggccttgttctctgtgagtttaaggaacagaacgaggataactgggcagaaattaatagaaagacagattttgggctcgttatataaggaatcactaatgagccgtccaaggtgggaacaaactgcttc

SEQ ID NO: 200354 - DNA, 780 bp, Homo sapiens
  misc_feature (681)..(681): n is a, c, g, or t
  misc_feature (710)..(710): n is a, c, g, or t
  misc_feature (717)..(717): n is a, c, g, or t
  misc_feature (745)..(746): n is a, c, g, or t
ttgaaaaggaaggtggctgaacaggaggagcggcagggcatgaaggtccaggcgctggccagagagaacgaggtgctcaaagtccaactgaagaaatatgtaggagctgtccagatgctgaaaagagaaggtcaaacagctgaagtgccaaatctttggagtgttgatggagaagttacagtagctgaacagaagccgggagaaattgctgaagaactcgcaagctcctacgaaagaaagctcatcgaggtggcagagatgcatggcgagctgattgagttcaacgagcgcctgcacagggccctggtagccaaggaagccctcgtgtcccagatgaggcaggagctcatcgatctccggggaccggtgcctggagatttgagtcaaacgtccgaagaccagagtttgtcggattttgaaatatcaaaccgggcgctgatcaacgtctggatcccctcagtgtttctccggggcaaagcagcaaatgcattccacgtgtatcaggtctacatccggataaaagacgatgaatggaatatttatcgccggtatacagagttcaggagtttgcaccacaagttacaaaacaagtaccctcaagtgagggcctacaacttcccacccaaaaaggccattggaaacaaggatgccaagtttgtggaggaacggagaaagcagctncagaattacctgcgcagcgtcatgaacanagtcatncagatggtcccccgagtcgctgccagcnnccagaaagagaccctcatccagctgatgcccttc

SEQ ID NO: 200355 - DNA, 1028 bp, Homo sapiens
acactatttgtcttctcgctctttctgtatctttcagtgcaggcctggcatctcttgggcacacaccgattcgtgcatgtagttgacagtgaataagctaaatgtgcatttgatgccactctagggcgtatgccagatactgggttaggcttcatgtgctccaggtgaccaaagtctgaccccctagcctggacaggtttcctgtctggccctcgctgatctctgaacctgtgccacttttgttctgctgccctgccattcctctcttacacacctgatgtctcctgcagttgtgccaaatctttggagtgttgatggagaagttacagtagctgaacagaagccgggagaaattgctgaagaactcgcaagctcctacgaaagaaagctcatcgaggtggcagagatgcatggcgagctgattgagttcaacgagcgcctgcacagggccctggtagccaaggaagccctcgtgtcccagatgaggcaggagctcatcgatctccggggaccggtgcctggagatttgagtcaaacgtccgaagaccagagtttgtcggattttgaaatatcaaaccgggcgctgatcaacgtctggatcccctcagtgtttctccggggcaaagcagcaaatgcattccacgtgtatcagctatttaaaaatgtgaaaatcattcttagtctgtgggccgtatgaaaacagccagcaggccaggcgtccagcctggtttgagaggagtgcgtctggagggaacagtgtgtcagaggaagatggagcatctgcctaattcctgccgggcctagggcctgcgtgggctttctctgtcatgctccttcctatggaagctgctcagtagatcctgctggggacatggcattgcggcactgagacatcagagcagggtcacctgtgtgctactagaggggcccacgctgttcctccctgactactctaccaacccctggccaaggcagcagagagagtctttgcgcagatactctgataaatcaaactacaatggaaaaaa

SEQ ID NO: 200356 - DNA, 928 bp, Homo sapiens
  misc_feature (829)..(829): n is a, c, g, or t
  misc_feature (858)..(858): n is a, c, g, or t
  misc_feature (865)..(865): n is a, c, g, or t
  misc_feature (893)..(894): n is a, c, g, or t
acactatttgtcttctcgctctttctgtatctttcagtgcaggcctggcatctcttgggcacacaccgattcgtgcatgtagttgacagtgaataagctaaatgtgcatttgatgccactctagggcgtatgccagatactgggttaggcttcatgtgctccaggtgaccaaagtctgaccccctagcctggacaggtttcctgtctggccctcgctgatctctgaacctgtgccacttttgttctgctgccctgccattcctctcttacacacctgatgtctcctgcagttgtgccaaatctttggagtgttgatggagaagttacagtagctgaacagaagccgggagaaattgctgaagaactcgcaagctcctacgaaagaaagctcatcgaggtggcagagatgcatggcgagctgattgagttcaacgagcgcctgcacagggccctggtagccaaggaagccctcgtgtcccagatgaggcaggagctcatcgatctccggggaccggtgcctggagatttgagtcaaacgtccgaagaccagagtttgtcggattttgaaatatcaaaccgggcgctgatcaacgtctggatcccctcagtgtttctccggggcaaagcagcaaatgcattccacgtgtatcaggtctacatccggataaaagacgatgaatggaatatttatcgccggtatacagagttcaggagtttgcaccacaagttacaaaacaagtaccctcaagtgagggcctacaacttcccacccaaaaaggccattggaaacaaggatgccaagtttgtggaggaacggagaaagcagctncagaattacctgcgcagcgtcatgaacanagtcatncagatggtcccccgagtcgctgccagcnnccagaaagagaccctcatccagctgatgcccttc

SEQ ID NO: 200357 - DNA, 738 bp, Homo sapiens
aagatgctttttctataccaagtgatatgttcatgtggtttttctcctgtacagttaatatggtgacttatgttgatcttcaaatattggaccaaccttgcattcctggaataaaccctacctggttatggtgcactatcacttttatatattgctggatttgatttaaattttttttgaggattttgcatctctgttcatgaaggacatttgtctataattgtcttttgtattgtctttgtctggtttttggtatcagggtgctgtgggcagaaaatcgagaccaggagtgggtttgttgtcatcacaaatgctcgaaaaatgtggaagcagctttggaactgggtagtaggcagaggccagaagagtttggaggagcgagaagaagcttagatgccattcatggagtgtaaagggtgattttgttgagggctcagaagagaactgtagggaaagtctgaagcttctttgagaatacttaagtggtcatggtcagaatgttggtagaaatctggacagtgaaggccattctggtaagatctcagacagaaatgaagaacaaggtgtcagaaactggaggaatgaccatcctagttataaagtggcagagaacgtggctgaacagtgtccatgcccagtccttcctttgtggaaggaactgggatatctggctgaagaaatactcagggtgtggcatgttttcttctaactgcagagagtaagatgtgagaagagaaa

SEQ ID NO: 200358 - DNA, 445 bp, Homo sapiens
gaggtcaagaacattcatgcttatttacattgagctagtatttttaaacatttgtaaagatctgcttttttaggccttgtgactacaattgggacatctcagctaccacacccaatatcaccaggctgccagttataaaaaactggcaaccaagcttccttaccctcttagctcctttcttccaatctaaggggactgtgtaccataggaacttataatctgtcagtctgacttttccttctcttgtcttacctcttttaattttgtcttacctcttcttttaatctacctattaaatcttgtgaattaaaaaactattttatgccagggacggtggtgtgtgcttataatcccatccactcaggagactgaggcaggacgatagtttgagcccagcagttcaagaccagcctgagctacaaagtgaaaccctgtttgcgggaaa

SEQ ID NO: 200359 - DNA, 620 bp, Homo sapiens
ccacgtggcttgattggcttctttccagtcttagatgtcgccccctcagacagacattcccagatccccctctctaaagtactcagtatcacatctccttgtttcatttacttcagagcagacatcagtctcataaatgacttgtttgcttatttgcaatcttctcattagactataccatccgtggagcctgtgaaaggccctcaggacattgtcacatgatgctttcttactctgaggttttttatttttagtgccatgtttcatggcggggggcggggagtctgagttggtggtggccagcagaggccacttggtccctctgggctcttgattttttaagtattgacaataaagactggcaccactttacgatatgaaaataatgatggcaaatatttgtcctcactggttaattattaacattgcttataggactgacgatcaactttctgccttccgtggctctgtgagttcatataaggtacacaaaggtaggtttaggaagaagtgtttgaaacttgacccagttttctgtgagcaagagctgcttttcggagcagcggttggaagcaggagcagttcccatggtgaggtcttcgtaagggtgttgagttagc

SEQ ID NO: 200360 - DNA, 536 bp, Homo sapiens
gttgattattgcagactaaacaacttgagtagtaagctagaaatgtttttgaatctcatgtttaatttagacattttcagctaaggaaagcactggtttacccgaaacagtcataaagatgaaaacagtcatctttatgatagcgcagcagaaatatcattttgtaattccaaaaggaaccctggactgcaaggagcaaatcaatatatagcttactgaattatgaccccagttttgacactaactgaagggtagagtagggaatgggatatttttcagtatttctgcataatacaggaatggaaagcatgttctcttatctttgttatagtcagatttcatgtgtatctttttggtaacatgttttagttgttttaaagacttgtcttctcagtggatttgacaaaacactcaagtccttgaaggcaaggaatggagtctcatttgttcctagcaccaagtatcaggtcacgtatattgttggtagctgatcaaagtgtattgaatcaaattggatgttaattagttgaagaata

SEQ ID NO: 200361 - DNA, 205 bp, Homo sapiens
tgctgggattacaggtgtgagccaccacgcccagcctcttccctgccttttagttagcatatgcccttcttctcccccttgtagaagcagtaggggacagaaatgataagtcatatatggccggtgagtttttcttccaaagactggtccacactagagggtgcagcctccacagacactgggaattgctcctgacctatggaaa

SEQ ID NO: 200362 - DNA, 206 bp, Homo sapiens
aaatgtattaacaaaacatttctgcataatctcttttgtctctttctgtctccctctttgatttagaaagattgttctgcagtatgtgaaaagtagattggaggagtctgaaattgggggacagaaaagttagcttgaaaaacccattgcagtaatccagggcaagagattttgctggtctggacagagctgagccaataggatgg

SEQ ID NO: 200363 - DNA, 744 bp, Homo sapiens
tttttgtattggtagagacaggctttcgctggtctcgaactcctgagctcaaacagtccacccacctcagctcccaaagtgctgggattacaggtgtgcgctcccacacccggccagcagcttattcttaattatgacatgacaaattaagttattgctctacacaggtacatatggtagtgtgtagtagcaaatacaggcatttgtttgagctgcaatgagtagaaaatctatgtaactggaaaacaaatgagtattactaaaagttttgtgtgtatgtgttttaatttctttactttaataagttaatgatctcccttggaatcttaacacaatttgttgaacaaatgttttttgggttggtgtaagtcatgtctttctttgctaagtcacaattctaagtgaataaggggcacaacagtgtgaacttcggtcatcgtatttctttctgatagcttctcaaatagacttctgtcactttcgatgaaatacttcaggtatccatatacttttaacaacttagagtatatccttctagaatcatataaccaactttacagccaaaacttagaattaagagccattgtcatttggtgagcagtgaataagataaagtattcttggaaatggtgaaatctggtataccttttcgaaagcatctttatggggatggaacattttcttttaactacgtgagctcttctgatagggattttatactccaaaactagtctataagttcca

SEQ ID NO: 200364 - DNA, 247 bp, Homo sapiens
agatggagagtctatacttaaggtcccgtcagtacggacgtccaaatatctacatctttattggaagggtacctagtaaaatcagctatcacttcccatgacactgcaaggaaaattggttaatttaaaccttgacattgagcataggaatgaaatatctctttgatcatttgaatatcaagctggtattgtgggtttgctactgaagttcacactacataagtgataccaaaaaacaaaacagaac

SEQ ID NO: 200365 - DNA, 1206 bp, Homo sapiens
tctctttcctgttctcagataggacacaaggggttccattcggagttggctcaggacattcagatgccattattttagtaatgatcacatgatgttttgagggcagcctgaaaaaaatagagtctctaacagaggagctgggtaaaatcagagtaggaccatctctaatgccttttctagctctcttactctgattttgtgaatttatccttagggacagtttttcatcaggatgagaccctgctgtggtctgaatgtttgtgtctctctcccctcaccaaatttatttatatgttgaaatctaacccccaagttgatggtgttaagaggtggggcctttaggagacagttacatcatgagggtggatccctcatgaatggcattcacgcccttataaaagaagcttaagggccaggtgtggtggtgcgaatctatagttccagctatatggaaggctgtggccgtgagaagattgcttgaggccaggagtttgaggctgcagtgagtgaataacccctgcactccagcctggacaacatagcaagactctctcttaaaatagatagatagattagatagacagcctaagggagcctgattgcccctccaccatgtgaggacacagcaagaaggcaccatctgtgaaccaggaaaggagccctcaccagacatctgatttgtaggtgccttgattttggacttaccaaccccgagaactgtaagaaatgaatttctgttgtttgtaattacccaggctaaggtattttgttaaagcagaccagatggactaagtcagccccataatgacccgttttatatttttatttataatctatctgctgcttaattttgtgattagtggccagctactgtttactcatcttttattcatctgtaaaactcttttaacttgtctttgtaagaaacggttggctaacagatgaattttcaggttgttcagttttaaaatgttttacttaaaagggtaagacaactccccaatgcaaagtgtgacttcagagataactttcatttctttgaaatgtaggaagtccatagccattgctggctgacatctttctgctcaatatgctccaggggaagattatcaaattttagcttctgagctttcaaatggctcttattatcagtggcatattacatgaaactggttttgggctcttcaaatttatatttttggcaaa

SEQ ID NO: 200366 - DNA, 519 bp, Homo sapiens
agaaacgcccgagcccagcccctaggagggggtggggcatccctggccaacccttaaacattcccaactcctctcataacactagacacatgtgcccagcaaaaaaaaagacaaatgcttcgtgatttcacttatatgaggcacctaaagtagtgaaattcatagagacagaaagtagaatgttggttgtcgggagctgggggcagtggggaatagggagatattgtttaatgagggcagagtttcagttggggaagataaaaatgttctgaagatggatggtgtggatggtggtgatggctgtgccatacataatgtgaaagtacttaatgttcttgaactgtgcacttaaaatggttaaatggtaaattttatgttatgtatattttgctgcaaaaacccacttatacaatataaggtgacattattcctgatattttcttacctctccccctcatacacccacccctactgctgtgcatattccagattttgataaacacttgctaaaccaaaaaa

SEQ ID NO: 200367 - DNA, 287 bp, Homo sapiens
acccacccctccaaaggcaccgaggccctagaagaggtgagaacatctgcctccacaccgaccccaaacagcgcagacaggcggtgcggcgcccactttcatgaaagccgctccatcttctccttccccacctgccacctcctcggctgctcaagcatctctcgaccatgcaagactctacacagacgtgttttgtcccacccacgcctccagacaccggggagaaactctagagggggaagggactgctgatgagggaaatgaaaagagtttcgcccacaaggagc

SEQ ID NO: 200368 - DNA, 384 bp, Homo sapiens
ctttccagtagctggtactaaaagcgggcaccaccatgcttggctaattttcatatttttcatagagacggggttccaccatgtggccttgcttggtctgaaagttctgagctcaagcaacccacctgccttagcctctcaacgtcctggaatgacagcatgagttgccacacctggctgcatgccgaatactttagagttgtttatgcctgacacttccagggcatgcagaactatggtggcattaaccgacacattaaccaactgcctcacttacttttcttttgactcagtttataaattttcttaatttaaattttaatttcaacatgtatacatctttgaaataaataaaataagctctttgaatgtttgacataacgt

SEQ ID NO: 200369 - DNA, 560 bp, Homo sapiens
cagttcaggccattaaagttaagtgaaatgcttaaggttagaaagccaataaatggtagcaaaataatttttaagtcaatggactctagatatgatgtttttatttttacttttcactactaagtaatttgggtgtcttttaaaactttattgtatcaatacaaatgatgatggatgataataatgatagtaattcaaataaatagtgccactactgctaacagtgtacctaacacttactgaaaacctacatgtacaggcactactgtttcaagtgttttatacgtgtatcaactcattgaatccttgcatcaacttcataagggacatattattattcctatgttattgatgaggaaaccaggcaaagagaggttaggcaactcacactaggtcacacagtattaagcagcagaggcagaattttaaatcacatgggtaagctccagagccccctactcttaatctctgttatacaattaattttgctaaataatattggatatatttattaggagtatattagcctataaaagaataccatggaacaggacataaac

SEQ ID NO: 200370 - DNA, 568 bp, Homo sapiens
acgtgggtaacgagacacggtttcgtaatcctgggttctaagctttttcccgggggcttttataccctactccaaagtctttggtttcaggacctctttacactcttactatgtattcaagaccccaaagtggattatacctatcaatatttactgtattagaattagaacggcaaaaattttaaaatatttattcatttaacaaataacatatgttaacacaaataatatatctattatatgttaacgcaaataatattttagaaaaaggtaactgttttccaaaacaatttagtgagaagagtggcactgatttacatctttgcaaatctttaatgtctgactgaatagaagacagcaggattctcatatgtgatttttgcattcaatctgtcgtgatatgtcgtgctggttgaagtatataacgaaaatctaaccttacacagatatgtagttgtaaaaggaagagtattttaacaaacttttcagctaactgtggatatttttctttggtactacatcagaatccaacaagtggttgtttcttaaagattggttgcaatgtgga

SEQ ID NO: 200371 - DNA, 239 bp, Homo sapiens
caagggcaattcccataacttcttccttatcttgatttctctgcctctgtaggggctgaggctgggctaagcttggagatgctggaactcacagtgatggggaccctcacaatggagatctgttctttactgtcattctctccataactgtgagctctatgaggcagggactgggcctgtcttgttcactgctgggtctctaatgcctagcccagctcctggtgtttgtccagggtgga

SEQ ID NO: 200372 - DNA, 452 bp, Homo sapiens
aatttggggtggatttggagggaggagggaggtggacatctagcatggcttccaagtctctggtgtgtgcctgggtggagggatggagggggcactcgtggtgccctgaacagaggcagggaagaaaggagtggagcaagctgacgcagcagggaacaagaccatgcttgttataaaggtctggcttcagcagttccttcaaaaacctcattcttagcaacttctctaattggccacacctgactctggggacaatcatcttatacatggaacgctaatgtactcgttcatttacctgttgttttgtaagtgcccatcagtcatttcttgcaagtgatggtgagggcttcagtgttgccctctcatgcagcccatgggatgttctggaagggagcccctcctcccaattgtttatcctccacccctataaggcacagagcacagcatgttct

SEQ ID NO: 200373 - DNA, 701 bp, Homo sapiens
gcatttttaaaagatgatctatttgtacagagctaatagaaagaattctaagacatgttgataaacaaggtggtggtgaaacaatgcatatggtctggtgtcttttatattaaaaaaattatatatttgtatatttttatatgtatgtaattttgtagaaaggagattggaagaatacacaccaaattatcagctctagttacctctggagagaagaggggctgagtatgaagaaggtcctcagcattttgcttatataattgtatataatttgagtttttcacaatgagaatgtattcatgtaactgctgagtaatttttgtttttgattttgttttgtaatttatacaaatattttacaaatgtataaagtacatgtgagtagtttttacatgtatagaatgtgaaatgatcaagtcagtgtatttggactatccatcatcttgagtatttaccatttctatgtgttagtaacatttcatgtcctctcttagttactttgaaatgttcaaggcattgttgctaactattgtcaccacactgctatggaatgttaaggctaactttttcttagatctcaccttcttcaggtttaaaaatgtaacaatatgcaaatttttactttcaaataaccaggttctgtgagtgccatgacttgatgtacaaagaagaaaggatatcaggaagagaaaactagagta

SEQ ID NO: 200374 - DNA, 827 bp, Homo sapiens
tctgggatgtgtggttatatctgatttctgagctctgggcgtggaggtctgtctgcagaggcccgggcctgggcacaaagggagaggggcctccattgtcccgcaggggccaaaatgcagaccgtgcatccccggtgacctcggggaccgttctctgatcatcaggattttcttggactctggggtccttgtcctgctcaggcatccctgccccgctctccttgagggccctcaacactatcttccctggacacaagtctggggacagccgggtgttgtggaccccaaaggggtgactacctgctcctgggccccacagagtccttgtgctcagtgtagtggctgagctgggggatgccctggaactcggagcacacagcactggcttactgtggtacctgtgcagtgaaattgaagacagaatcaccaggatggaacacaggtcttgcaggatcacggaaaaccttcttagagttgtcttgacaccactgatgtcgagtgtgcgggtgtttgtaggatggcctgccactcagtccaggggcaggagcaacggggagatcccacaagcaaagtgaactgggggatgggctgaaggggctccaggcaactgagccctactcgcaggtcctcggccttggcccaaacaggaatgaggggcacagagtgcccgggtaaccgctcctgggagcagtggggaactgtcggatacttgaactctcaagagctgggctctgagcgtcctcgtccagctgccaacttggccaaaggctaagccagcagattgttctgttgccgggcaacgcgacttctaaacctgagggagtggg

SEQ ID NO: 200375 - DNA, 491 bp, Homo sapiens
agcatcaaagtctcagtcgctagcatgtgacttacagaagctctcatgggaacaagacaagaccatactgttaccgtgacactcacggcctccctgactggtttctgctgttgattctgcctcaaatgctcctcaaatgcaccttgctgctccgcctccaccctagagctcgcctgactgcccacttgcccgttaagagtcggcttaggcttcactcctgccagaaaggtcctgccaggtgctctcaacagtcaccccctcctgtggtctcacaaaaccccagcacctctcggtcactctctccctcctatctggttgtgactgtcttccatgctcacttagaagctctctgaggccaagaactgtgtgtactgttgcttctttgtttacctgggcctagcccattgcctcatacacaggagaatgcaaataaatcatatgcttaatgaatgagtcgatgaatgaatgatgaataaagggaatctaatcta

SEQ ID NO: 200376 - DNA, 443 bp, Homo sapiens
ttttttaaagccaaaagactgtgactttcccttcaaatccaaacaatcagttctaaccattttactgcttacatatttctaaatccttaatatcactagttcatgccttccatattttttaccaagactattgcaataggtcagctgttttacccactttcattcttgtcctctaacctttgttttttaactgctctatataagctgtaaaatggaaacctgaacatgtctttctgttgtttgaaactcttcattggttcttcatcatctgtagaataatgccaagaccaaataacctagagccatacagggctcctgtataagattttatttccagcttcagttttggtcattcctgctgctgcctttttgctttggtaatgctaaactatacttctttcattgtgcactttaaggattgtaagttttctctcagcaaaaaa

SEQ ID NO: 200377 - DNA, 406 bp, Homo sapiens
ggcactctttgctatagagctactagagaatttagttttgaatgtgtcgagaggagatctgcccaactccaagagttggggactgaattagtcatacacatagatacatatagataaccaggctaataaaaaaagtcagacatttattaactcccaagaggaaaaaaaattctcattttcttgtttcatagtatactatatgtcaactctgactacattgtaactataaaaacactaaatattgagtattgctctaaccaaaattataataaatgaggagggtgggtaggaaattgtgtgtgcacatgtgcgcacatatgtgtgtggtggagtctgtgggagagtggaaagagaattaaattctaatcttcattggtaggatgtcattagataatgcctaacacca

SEQ ID NO: 200378 - DNA, 500 bp, Homo sapiens
ttaaatcatttttgcaacaaggttgggcataaataaatgattttgtttcccactcactgcagcccatttcacagatgataaaactgagtcccagagaagggcagcaacctgatccagggctgcagtgagtcaatggggaagaagagactctcattcaacctctccatgcttggtgggttcctttcctgctctgtccatttctgaagagatcacttgtctctcatttgccaactgtattaatcagaagtctgtattaatcagaattgccaagtgacagaaatcctgttgaataaacaaagagaattacttattcccttattgccccataaggtgcaaaccaaatggagttcaggcatggtttgatccaagtacatggacaggatcagaagcaggcctccgtccacactcagctttgcatctctttttgcttggtaatatcatcctttcctgcttcagacagcttcattccatgtggcataaatatgacaccagcagcccca

SEQ ID NO: 200379 - DNA, 680 bp, Homo sapiens
tctccttttttagaaaccaagaaataaggcaaaagtatgtcaacagcaaagtggataaattatgctatattcagacaatggaacgttatttataaaccaatttaaaaaatgattacaactactggtaaatgacatggatgaatctcacaatgttgaccagttactaagtgagtcaaggagggaataagagttgtgactaggaagtagcagaggcagtttgtgactggagaccagtaatgttctatttactgatccagttgtgaagagatgggtgtttctactacaacgttaaactatgaatatctggattatgtactactttgtatgcatatttttgtttcacaatgtgaaataaaaagggtattataaactttatgccagtaagtttgaaggtgtataagaaagaaaccaattcctggaaaaaatgcaacttgccaaaatgacataggaagagatacaaaatctgaatcttcttaaatctatttttaaaactgggccgggcccagtggctcacacctgtaatcacagcactttgggaggccgaggtggatggatcacgaggtcaggagtttgagaccagactgaccaacacagtgaaactccgttctactaaaaatacaaaaattagccgggcatggtggtgcatgcctgcaatccgagctactcaggatgctaagaca

SEQ ID NO: 200380 - DNA, 234 bp, Homo sapiens
ttaattgtgaaatccatgaaacattaataccacagataaagtgtatatctgtttatataatatatgtaaatctgtgctttatacatgaaaagaataagaatcttttaatctcccccaggaaccaattttagcctctttggggtttatatatctccactgagactatatgaagtagacaaagctcaaagtttcaaattgtagaaaaaaatattttcacttactttcaatgaggca

SEQ ID NO: 200381 - DNA, 837 bp, Homo sapiens
acaatacattaggtaatgttggggtttataaatcgatacccccaaatatagtactgaaccgaagaagcaacctgaagatctctctgaccttccccgctccacacggtctctcccaaaaagctgaagttcctttatttgcctaagatccagaccctccaaggagaacagtaggtttcttttcctcctgtaagaccaaaaatgtaaccacacctgaacagaccttttcatgagttaatgcctgcttctcatggtcatctaaattccaaagaaaactatttacaagttaatttgtttcctgatcaaatcattctctttagtaatcatttattgcccatcaacagaattccttttctcccgcaggatccaaactcattctttctgtaacctcatgatgacgtataagcttttgcacctcactgggaggttgggtcttcattctgaaggcttctatgtatacatattaaataagtttgtatgccttttttcctattaatctgccttgcgtcagtgattttcagcaaacttcagggagccaaaggccttggctcccacagtgataataaacaatatgacttttggctatcaaaattcctgctgttagttaaggaaaaattgtgacagtttctgaaatggacaaatacaggcatccttccagtggattactaggatttgtctagactagaggacaggatgcttctgggggttttctgattctctacaggtcagtatccttccttgtcttgtactgttttgcaactctagaaagaaaagttaaatatgtagaagcctgacagtgatacaaatgatccctgttcatattaatacaaatgcaaattg

SEQ ID NO: 200382 - DNA, 566 bp, Homo sapiens
gaataaaattattagccatgaatggaaggctatctgacatatggccatagcatcctttttcagtcttgctcctaggattcccctgcctgtccactttgctctagtgatactgaaccaatggccactccctgattatgcctcctgcttctctccttcgttgccttattctgtcttaccggctttcctttcttcttctctttttaactacttaatcctacagactatgcaagattgaactaaaatactcttatacctttaggcacaagagatgaactgccctgtcaatttgtttctcttcctttcttgttgcaaataaccttatttattctgctttatgtttagttgtttaaggacttattctttctactaggttacatacagatgtcttgactactgttccattttcatcttcataaattctgtaacagctattagttctaataagaactttttaatttaattggttgttattttcatattttattttttattcataaagaatcttacaggtgtgtctccatttcacattatatgccatttaatgagttctatttttttttccattt

SEQ ID NO: 200383 - DNA, 592 bp, Homo sapiens
gtttggtccagaaaggcaggataagtggaaggggggataacttccaggccataggtagattcacagattttctgattggcagttggttgaaagagttaagttattgtctaaaacttagaaatgtctgggttaagataagtgggtgtggagaccaaggttttattatgcaggcgaagcctccaggtggcaggctttggagagaatagattgtaaatgtttcttgtcagacttagagggtctatcaataaatccaaaagggaggagggtagaatcaggtatgtccaaccccccacccttcccatcatggcctgaattagtttttcgggttagctttggcactgctgagattccaaattgctgtcaatagccttgctgagaggaggggttcattcagatggttggggggcttagaatttcaattttggtttatcatccccatttcacagatgagaaaaccaaggctcagttgttgaagtgtcttgctcaaggatgagcagctggggaaggggaggagtccgcctcacccttcccattgcagctggattttggaagccaattccagctggaggactaggagatttgtagtgggtga

SEQ ID NO: 200384 - DNA, 4250 bp, Homo sapiens
gctgaggccttcccagctatgtggaactatgactgtgatgatcctcttgtgtctgccttgcctcaggcatccttcagcagttcttccgagctctccagcagtcatggtcctggatttgcaaggctgaatagaagagatggagctggtggctggtctccacttgtgtctaacaaataccagtggttgcagattgaccttggagagagaatggaggtcaccgctgtggccactcaagggggatatggtagctccaactgggtgaccagctacctcctgatgttcagtgatagtggctggaactggaaacaatatcgccaagaggacagcatctggggtttttcaggaaatgcaaatgcagacagtgttgtgtactatagactccagccttctatcaaagccagatttctgcgcttcatccctttggaatggaaccccaagggcagaattggaatgcgaatcgaagtgttcggatgtgcatacagatcagaagtggttgatcttgatggaaaaagttcccttctctacagatttgatcaaaaatccctgagcccaataaaagacattatttctttgaaattcaaaaccatgcagagtgatgggattctactccacagggaagggccaaatggagatcacatcacactgcaattaagaagagcaagactctttttacttattaattcaggtgaagctaaactgccttccacttccaccctggtcaatctcaccctgggcagcctgctagatgatcagcattggcattcagtgctcatccagcgtttgggcaaacaagtcaacttcacagtggacgaacacaggcatcatttccatgcacggggagaattcaatctcatgaatcttgattatgagatcagctttggagggattccagcacctggaaaatcagtgtcattcccacatagaaattttcatggatgtttagaaaatctctattataatggagtggatatcattgatttggccaagcagcaaaaaccacagatcattgctatgggaaatgtgtcattttcttgttcacaaccacaatctatgcccgtgacttttctgagctccaggagttatttagcactgccagacttctctggagaggaggaggtttctgccacttttcaatttcgaacttggaataaggcagggcttctgctgttcagtgaacttcagctgatttcagggggtatcctcctctttctgagtgatggaaaacttaagtcgaatctctaccagccaggaaaattacccagtgacatcacagcaggtgtcgaattaaatgatgggcagtggcattctgtctctttatctgctaaaaagaatcacttgagtgtggcggtggacggccagatggcttctgctgctcctctgctggggcctgagcagatttattcgggtggcacctattattttggaggttgtcctgacaaaagctttggatccaaatgtaaaagtccacttggtggatttcagggatgtatgaggctcatttctatcagcggcaaagtggtagatctgatttcagttcagcaggggtcccttgggaacttcagtgaccttcagatagactcatgtggcatctcagacaggtgtttgcccaactattgtgaacacggtggggagtgttcccagtcctggagcacctttcattgtaactgtaccaacactggttacagaggagctacttgccataactctatctatgagcagtcatgtgaagcctataagcacagaggaaatacttcagggttttactatatagattcagatggaagtggtcccctggaaccatttcttctatattgcaatatgaccgaaactgcatggaccatcatacagcacaacggctctgacttaacaagagtcagaaatactaatccagagaacccatatgctgggtttttcgagtatgtggccagcatggagcaacttcaggccactattaaccgtgcagagcactgtgaacaggagtttacttattactgcaagaagtcacggctggtcaataagcaagatggaacccctctgagttggtgggtaggaagaaccaatgaaacgcaaacctactggggaggttcttcgcctgatcttcaaaaatgtacttgtggattagagggaaactgcattgattctcagtattactgcaattgtgatgctgaccggaatgaatggaccaatgacactggattgcttgcttataaagaacatcttccagtaactaagatcgtgattacagacacaggccgactgcattcagaagcagcttataaactggggcctctgctctgccggggagacagatcattttggaattcagcttcctttgataccgaggcttcatatcttcattttcctaccttccacggagaacttagcgcggatgtatctttcttttttaagacaacagcttcatctggggtatttttagagaacttggggattgctgattttatacggatagagcttcgctctccgacagtagtgactttttcatttgatgtggggaatgggccttttgaaatctcagtgcagtcacccacccacttcaacgacaaccagtggcaccatgtgagggttgaaaggaacatgaaggaggcctcccttcaagtggatcagctgacaccaaagacacagcccgcccccgctgatgggcatgtcctgttacagctcaacagtcagctcttcgtgggtggaacggccaccagacagagaggctttctgggctgcattcggtctctgcagttgaatgggatgaccctggatttggaagaaagagcccaggtgactccagaagtgcagccaggttgtaggggacattgcagcagctatgggaagttatgccgcaatggagggaaatgcagagaaagacccattgggttcttttgtgactgcactttctctgcatacacagggccattctgctcaaatgagatttctgcatattttggatctggctcatccgtgatatacaattttcaagaaaattatcttttaagtaaaaactccagctcccacgctgcttcatttcatggtgatatgaagctgagcagagaaatgatcaaatttagtttccgaacaacacgaacaccaagcttgctgctttttgtgagctccttttacaaagaatacctttctgtgatcattgccaaaaatggaagtttgcagatcaggtacaagttaaataaatatcaagagcctgatgttgttaactttgattttaaaaacatggctgatggacaacttcaccacataatgattaacagagaagaaggagtggtctttatagagattgacgataatagaaggagacaagttcacctgtcatcaggcacagaattcagtgcagtcaaatctctggtattgggcaggattttagaacacagtgatgtggaccaggagactgcactggcaggtgcgcagggcttcacaggctgcctctctgcagtgcagctcagccacgtggcccctctgaaggcagctctgcaccccagccacccagaccctgtcactgttacaggacacgtgaccgagtccagctgtatggcccagcctggcactgatgccacatcaagggaaaggacacactcgtttgcagatcattctggaacaatagatgacagagagccccttgctaatgcaatcaaaagtgactctgcagtaattggaggtctgatagctgttgtgatttttatcttgctttgcatcactgccatagctgttcgcatttatcagcagaaaaggttatataaaagaagtgaggcaaaaaggtcagagaatgtagacagtgctgaggctgttctgaaaagtgagcttaatatacaaaatgcagtcaatgaaaatcagaaagagtacttcttctgattggcagctatgatttaacataaaattatgatagtttgttttaatagccaggggttctcaatggaaaaacgaatgctcttacactgaatgtacaggcagtgggcttgcagcactgccatcttgccatgtacaggcttggggtggctccaggaagcctcgtccagtgatatatttctcatagcattcattctatggaacaagaaattagatattgctgttaattttcaactgttctggtatgatctaaaacaagtttaacctgcttaatggctacagtttttacatgtgaaaactgtagccttggtctcttaaccatgtaatacataagttttgttagaggtaaaaattaaatttggactataatgtccttgctttatttg

SEQ ID NO: 200385 - DNA, 546 bp, Homo sapiens
gctgaggccttcccagctatgtggaactatgactgtgatgatcctcttgtgtctgccttgcctcaggcatccttcagcagttcttccgagctctccagcagtcatggtcctggatttgcaaggctgaatagaagagatggagctggtggctggtctccacttgtgtctaacaaataccagtggttgcagattgaccttggagagagaatggaggtcaccgctgtggccactcaagggggatatggtagctccaactgggtgaccagctacctcctgatgttcagtgatagtggctggaactggaaacaatatcgccaagaggacagcatctggggtttttcaggaaatgcaaatgcagacagtgttgtgtactatagactccagccttctatcaaagccagatttctgcgcttcatccctttggaatggaaccccaagggcagaattggaatgcgaatcgaagtgttcggatgtgcatacagagcagtgatcctgtttgcagatctggagaagaaatgctatagaagtaaattacgtggctgggag

SEQ ID NO: 200386 - DNA, 2740 bp, Homo sapiens
gctgaggccttcccagctatgtggaactatgactgtgatgatcctcttgtgtctgccttgcctcaggcatccttcagcagttcttccgagctctccagcagtcatggtcctggatttgcaaggctgaatagaagagatggagctggtggctggtctccacttgtgtctaacaaataccagtggttgcagattgaccttggagagagaatggaggtcaccgctgtggccactcaagggggatatggtagctccaactgggtgaccagctacctcctgatgttcagtgatagtggctggaactggaaacaatatcgccaagaggacagcatctggggtttttcaggaaatgcaaatgcagacagtgttgtgtactatagactccagccttctatcaaagccagatttctgcgcttcatccctttggaatggaaccccaagggcagaattggaatgcgaatcgaagtgttcggatgtgcatacagatcagaagtggttgatcttgatggaaaaagttcccttctctacagatttgatcaaaaatccctgagcccaataaaagacattatttctttgaaattcaaaaccatgcagagtgatgggattctactccacagggaagggccaaatggagatcacatcacactgcaattaagaagagcaagactctttttacttattaattcaggtgaagctaaactgccttccacttccaccctggtcaatctcaccctgggcagcctgctagatgatcagcattggcattcagtgctcatccagcgtttgggcaaacaagtcaacttcacagtggacgaacacaggcatcatttccatgcacggggagaattcaatctcatgaatcttgattatgagatcagctttggagggattccagcacctggaaaatcagtgtcattcccacatagaaattttcatggatgtttagaaaatctctattataatggagtggatatcattgatttggccaagcagcaaaaaccacagatcattgctatgggaaatgtgtcattttcttgttcacaaccacaatctatgcccgtgacttttctgagctccaggagttatttagcactgccagacttctctggagaggaggaggtttctgccacttttcaatttcgaacttggaataaggcagggcttctgctgttcagtgaacttcagctgatttcagggggtatcctcctctttctgagtgatggaaaacttaagtcgaatctctaccagccaggaaaattacccagtgacatcacagcaggtgtcgaattaaatgatgggcagtggcattctgtctctttatctgctaaaaagaatcacttgagtgtggcggtggacggccagatggcttctgctgctcctctgctggggcctgagcagatttattcgggtggcacctattattttggaggttgtcctgacaaaagctttggatccaaatgtaaaagtccacttggtggatttcagggatgtatgaggctcatttctatcagcggcaaagtggtagatctgatttcagttcagcaggggtcccttgggaacttcagtgaccttcagatagactcatgtggcatctcagacaggtgtttgcccaactattgtgaacacggtggggagtgttcccagtcctggagcacctttcattgtaactgtaccaacactggttacagaggagctacttgccataactctatctatgagcagtcatgtgaagcctataagcacagaggaaatacttcagggttttactatatagattcagatggaagtggtcccctggaaccatttcttctatattgcaatatgaccgaaactgcatggaccatcatacagcacaacggctctgacttaacaagagtcagaaatactaatccagagaacccatatgctgggtttttcgagtatgtggccagcatggagcaacttcaggccactattaaccgtgcagagcactgtgaacaggagtttacttattactgcaagaagtcacggctggtcaataagcaagatggaacccctctgagttggtgggtaggaagaaccaatgaaacgcaaacctactggggaggttcttcgcctgatcttcaaaaatgtacttgtggattagagggaaactgcattgattctcagtattactgcaattgtgatgctgaccggaatgaatggaccaatgacactggattgcttgcttataaagaacatcttccagtaactaagatcgtgattacagacacaggccgactgcattcagaagcagcttataaactggggcctctgctctgccggggagacagatcattttggaattcagcttcctttgataccgaggcttcatatcttcattttcctaccttccacggagaacttagcgcggatgtatctttcttttttaagacaacagcttcatctggggtatttttagagaacttggggattgctgattttatacggatagagcttcgctctccgacagtagtgactttttcatttgatgtggggaatgggccttttgaaatctcagtgcagtcacccacccacttcaacgacaaccagtggcaccatgtgagggttgaaaggaacatgaaggaggcctcccttcaagtggatcagctgacaccaaagacacagcccgcccccgctgatgggcatgtcctgttacagctcaacagtcagctcttcgtgggtaagttctctttttaagcaatcattttattgtatgatatgt

SEQ ID NO: 200387 - DNA, 529 bp, Homo sapiens
gataatacgaaaccaatcattacatgaaaattagtcaataaaggggaaatatataaacatttattctgactttcctaaatgaactataccactaagtatctaaatagtagatgtgggaatatttctttataaaagtaatttcaactaataaatgaaaaatgaatgatagaatgttgccattttgcaatttccaatgaatgaatatgggcatttagcacaaacagctgctaagatcacataacacagatgaccggatattacgtgcctcctataatcctgccaaatgccactaatagtcatgacaaaagattaaacttgagtctgatgcttctctggatccagctgcaaattgcagaaggctattgagaggacaaaggaacatgctgaactgcactctcaaaaggatgtgttctgtaaaatccggattctggaaaactctataggtcaaattgtctgggttttccaaaagataaattgcaggaaagtggcagatgtggaggaggaccctgtagattaaaagtgacttaaa

SEQ ID NO: 200388 - DNA, 479 bp, Homo sapiens
gttgctgattcccattagttgcagatacgttagatacacccttgatttagtatatctcttcctggaatatcttgcttcagtcataaaattcatgtttttatgaaaaattgcagtggtcaccaaaaaagagaattttagaccaatatccttgatgaacattgatgcaaaaatcctcaataaaatactggcaaactgaatccagcagcacatcaaaaagcttatccaccatgatcaagtgggcttcattcctgggatgcaaggctggttcaatatacgcaaatcaataaatgtaatctagcatataaacagaaccaaagacaaaaaccacatgattatctcaacagatgcagaaaaggcctttgacaaaattcaacaaccttcatgctaaaaactctcaataaattaggtattgatgggacgtatctcaaaataataagagctatctatgacaaacccacagccaatatcatactgaatgg

SEQ ID NO: 200389 - DNA, 195 bp, Homo sapiens
agaacaatgtgagaagaatttggagctcctgtgagccatctggaagggactaaggaaaaccaaaaaccatggtaggaggctgcagtctgaggtatagaaatggccaagagactttttcagagaacaaggatagctgtacaatctctaaaatgaaataatttgacagaagcagaattcagagccagaggagaccct

SEQ ID NO: 200390 - DNA, 414 bp, Homo sapiens
ccattaggcactttgtagattcttggaaggaaaatgagaattagaaatcaggggccttcaccccagcaccaccaccacacctacttcgagctcagctatttcaggtagtttgagtcctgtctggtgctttattgctaaaaatggatggatgagtggatagatgggaggaagggagggagagtggaaagaaatgaaagaaggcagtgagagaagagaggaggtaagggaaggtgaacagatagacggaagtaaagaaggacagatggatgaaaggatggagaataggatgaataactgaattaaaaaaaggaaggaagaaaagaagcaaggaagaagggaagaaaggaaagaaggaaggaagaaggaaaggacaaatgaatggatacaaaggaagaaaagtataaataaatgatt

SEQ ID NO: 200391 - DNA, 429 bp, Homo sapiens
atggaagggcaagagggacaggagagcaagtgtgagagagctcgcttttagaacaaagccactcccaggataagagacccactctcatgataacagcattaatccattgatccctgctaaaatgcctgtgaatgagagagcccttcactgacctacagtaagaatcaacaccctccactcccagattcctcctcctgctaccacctcttcttgtcaatgacacttgctaccacctggaataggacaaatacgtttgaatagagccaatttttcatccattcaaacgacagtgccataaagttagaatctttcatcaattcatctcctgccatctcctcactgcctacagcagtgcctagtgcagtgcagccaatcaaaaactgtgtaggcaaatgaatgaataaaggaaaaaacttattgtcatacaaa

SEQ ID NO: 200392 - DNA, 474 bp, Homo sapiens
gctgaatgaatgtcgggctaacaagaattagtgtgtagactggcgcagtggctcatgcctggaattccagcactttgggaggccaatgcaggaggatcacctgaggtcaggagttcaagaccagcctggcactatctgataggccttggtgttctattgaacataaaccacgtcacagagcaccgatatcagacagggccactctgtgaccacaatgggtcaggacaagaacaaggccactcagtaatcacgtctgaactgggaccgaaacaggaacattgttgaagccacaaagatgaccaaacatcctcccatgccgctaacatgagggactcctgcttggccactcacagctctagcctctcttcattccttccaccttttagataagatccattaacagcatcaaatccagaacaaagccccacttccatgaacctctccccaacatgatctaacacaagcacaaatcct

SEQ ID NO: 200393 - DNA, 796 bp, Homo sapiens
ggatgagtttggttagagttgatgattctgaggatatgatgagatatcgaggttagaaacatgggcctaggccaggtgctgtggttcatgcctgtaatcccagcactttgggaggctgaggcaggaggattgcttgagtccaggagatgaagaccagtcagggtaacacagtaagatcctgcctctacaaaaattagccagacgttgtggcatgcgcctgtagtcccagctacttgggaagctgaggtggaaggatcacttgcactccggtgggcctagacttctggtgggactgggagtcgtcagagtgtagggtagagttgttagagtatggggtagaccaggacattttggaccaagcatcagaacacatggaaccaaatgtttgacattgagatcaacccatcctgttagatacctgtagtagtggttcatctagacgccttataggagaatcaaggatgccccaggaaagaagagagttagtgagagacagaggattctttcccccaaggatcaggtggaagaatacctccagcaaaggagaagtaaagggatcatggaccagagagaagaactagacttgtgctgtatggtagacctcattgatgagtccctaccacatgcaagactgtgaaagattatagagggcagggtggccatgggatagaggatcctgagggattttatagttcagaggggcaaacagccagttgtcaatggctaatgtaatactttgaagaataaaaaaatgctgaactggacttcagacaacacattgtggaaatgcagaagc

SEQ ID NO: 200394 - DNA, 787 bp, Homo sapiens
tgtcggatgtgtctgtgtgtaatctcctgattatacagtgctggaaactaatttttaaaactctgtagcaactggctcacacctgtaatcccagcactttgggaggctgaggcaggaggattgcttgagtccaggagatgaagaccagtcagggtaacacagtaagatcctgcctctacaaaaattagccagacgttgtggcatgcgcctgtagtcccagctacttgggaagctgaggtggaaggatcacttgcactccggtgggcctagacttctggtgggactgggagtcgtcagagtgtagggtagagttgttagagtatggggtagaccaggacattttggaccaagcatcagaacacatggaaccaaatgtttgacattgagatcaacccatcctgttagatacctgtagtagtggttcatctagacgccttataggagaatcaaggatgccccaggaaagaagagagttagtgagagacagaggattctttcccccaaggatcaggtggaagaatacctccagcaaaggagaagtaaagggatcatggaccagagagaagaactagacttgtgctgtatggtagacctcattgatgagtccctaccacatgcaagactgtgaaagattatagagggcagggtggccatgggatagaggatcctgagggattttatagttcagaggggcaaacagccagttgtcaatggctaatgtaatactttgaagaataaaaaaatgctgaactggacttcagacaacacattgtggaaatgcagaagc

SEQ ID NO: 200395 - DNA, 568 bp, Homo sapiens
aagtagtgtttcccacacttctctattaagaagcatgtgagatacttgttacaaacataacatcctggtcccaccccaaagccactcaatcaaatactccagggaagggatctaggaattcgtaggtttaacgagtgccccaaaatgattattacctgttggagaatctaggcaacaatgaattaaggaaagctctctaccatttggtactggtaccaggtttgaggatcacagggaagagggtaagcatatcagactagcagagctgccagaactcgggctttcaaaagagaggtgccaccctctcccatgtccatgtaagtagcaaacaacccattcagactacagcaggagaatcctgagtgtagaggttcatttatgctatacataaccaaattcatcataaaaagttttccaagggctgggcacggtggttcatgcctgtaattccagcactttgggaggctaaggcaggaggatcgtttgaggctagtagtttgagagcagctgggacaacatggtgaaaccccatctctaccaaaaaaaaaaaggggttaaatttccatct

SEQ ID NO: 200396 - DNA, 396 bp, Homo sapiens
gtaacattgtttttctttacagtttgtgatttcaatcctctgctttcccaatgccactttgaattggcttctttaaaactccaacataaaacctcaagtgaccaatatgtggtctcattatggtattttgggttaaaatgaaattaagatagctgggctcacccagccaaacacatttaccaaagggaaattttgaggcatcatagactgtgaagtggttagggaaaaagagagttaaatgttggctagtttagaatgccaagtgtccatcccaacttggttatactggccagagatggcaaagaatagagacaataaggttctgaaaagacagctggtgactggtatggccctgtatactcctgggataaatcatgaagtgagggtctcctgtac

SEQ ID NO: 200397 - DNA, 458 bp, Homo sapiens
atgaataattaaatgaatatcatctgttctgtacttcccagtggaagattttgttaattttgctggttattttgatagcatatagcaggtactcagtgcctgaatgagtgaaggatttttcaaacaatactcgccaatataatatgttctatacattgatcactcttaaatttatatctctagccaagacctctccccttaatttcaagctggtatgttcagtggtcttctccacatcatctcacatatataagatgcatttcaaacttagattcccaattgagcacctgcttctccatcagtcatctgtacctcagtaaactgcagtgccttttttccggtttcttaggccaacaacatggctgtcatctttgactcctcgcttgcttgtgtacccaatatccagagtgtcaacaaatcctccagactctgcccatctctcaccaactttacagctt

SEQ ID NO: 200398 - DNA, 770 bp, Homo sapiens
ctactctgtgaaataatattcaacgtgattgaagtgaaataatagattttatgtctgacgtgaaataaaatattcactagctttgtgagtttgggctttttggcatgttagagcttgtactcttgaaaaggatatggtaatagaaatttttaaaaacagtattatattaatattttaaagataagctagatttgaaggtgaagaatgaagggaactgctctataagttagctgttcttataatcagtacacaaatatacacccagtgcactggtatagagtttatcagttaacattgtatcattgaaaattagaataatatctaccagaaagttcacagagtaagaatttagacttttgagcttggtgtcgatcattaatgtatattaactgaaacggatcattcagtcattgaacagtttgtatattgggaacaccaaccatgttagttagaatggatgtgttacagtgtgtttacacattataaactacagagcatgagcttatgtccgttggttatctgttgagcagtaaatttaggttgaattatttcttctattctcctctatgtgataggcaagctgtgggggaagcacaggctttggagcaagcagatctgattgtgaccttacataagtctcaatttccctgtctgtaattagatcccactttattgggttgttgtaaggattaaatgaagtaatttctgtaaaacataatgactgatacaaagtagaaaataagtaaatttttaattttctttcacttttg

SEQ ID NO: 200399 - DNA, 278 bp, Homo sapiens
atcctcaggggtggcacacactctgcaagcatggtgctaggcacacggcacaactctgtgtatgtttgaactgatgctaggttcacaggctactgcctcagtacttgtatacttggaaggaaggatcaagatcgaggtaatgctgttgtatcttttcttaacagaacaggcaaagcccttgtctcttgtatggcctgcttccttaggcatgaggacagcttgcaccatgagtggttactcctgatcttcatagtaaggaaggccgttagtcacgtttc

SEQ ID NO: 200400 - DNA, 352 bp, Homo sapiens
cctattgtaccaataccccctagaaaacatatgtgccgtccatttaattacaataacgagattgcaaacaagttatcacagacaaaatttactaattgctgattgttattaggcattacttttttttttttttttttggagacagcgtctcactctgtcgcccagaatggagtagagtagcatgatctgtgctcactgcaacctctaccacgtgaattcaagagattctcctgcctcagcctccagagtagctgggattccaggtgcctgccatcacgcccagctaatttttgtatttttagtagaggcagggtttcaccatgttggccaggctggtcttgaactcctgacc

SEQ ID NO: 200401 - DNA, 630 bp, Homo sapiens
taatcccagcactttgggaagccgaggcgggtgggtcacgaggtcaggagttcaagaccagcctggccaagatggtgaaactccatctctactaaaaatacaaaaaattagtcatgtgtggtggtgggtgcctgtaatcccagctactcgggaggctgaggcaggagaatcgcttgaacccaggaggcggaggttgcagtgagctgagatcatgcgactgcactccagcctgggtgacagagtgagactctgtctcaaacaaacaaacaaacaaacaaaaaaattgagcaaggcaaactccattagatcgaaagctttaagaataatcctcttgcctgggcgcggtggctcacgcctgtaatcccagcactttgggaagccgagatgggtggatcacgaggtcaggagattgagaccatcctggctaacacggtgaaaccctgtctctactaaaaaaaatacaaaaaaatcagccaggcatggtggcgggcacctttagtcccagctactcgggaggctgaggcaggagaatggcatgaacccgggaggcggagcttgcaatgagccgagatcgtgccactgcactccagcctgggcgacagagtgagactctgtctcaaaaaaaataaa

SEQ ID NO: 200402 - DNA, 613 bp, Homo sapiens
actggaacagcaaagggattcgcaacagttcttgctgaagcagttacatccctggatctgcctgtggccattattaatctaaaagaatatgatccagatgatcatctgatagaagaggttggcaaaaatgttgacaagtggctctggatgcttggcgcgcatcgtgtgatgagtcgaggggagggcgactgcgacgtggttaaaagcaagcacggcagcattgaggccgacttcagagcatggaagaccaagttcatctcccagctgcaggcacttcagaaaggggagagaaagaagtcctgtggcggccactgcaagaaaggcaaatgtgaatctcaccaacatggctcagaggagagggaggaaggatctcatgagcaggatgaattgcatcatagagacaccgaggaggaagaaccctttgagagctccagtgaagaagagttggtggtgaggaccatcagagcctaaattccattgtgatgttgaagattgggcaaaattatggatcatgtgacgaaagaacagagagaaaaggaacagcaggaagagaagtctggtttgttcaggaacatggggaggaatgaagatggtgaaagaagagctatgataa

SEQ ID NO: 200403 - DNA, 287 bp, Homo sapiens
gcttcacaggtacaataagagaggttcagcaactgcaggtcttttggtctccctaggcccagtggagaccagctggagagtggaccctggtgtgaggtttcttagcccagtctacaggataccaaagcacctgatgagcagtccttgtcaggcttaggaaccctcccccttggtagggagcttcccagcttccccatgagaagccccatcaccagcaagttcctcttcaaagagtgagaggcacaggcagtagttatcacactaacagaagtgtctgaagccatgca

SEQ ID NO: 200404 - DNA, 311 bp, Homo sapiens
taatacaacgctttgagcatggacttaaaaatgcagagatgaaatataagagcttcttggaagcaaacattgttggacagacttataatgtgtcaggattttcaaactcattttctataactttccaaagatgctgtcaaatgaaggatgagtcaggttttccataaaaacatcattctaattttgtaaaacggtgtggctcaaaactataaattgggctgccaaactatttctctcaaatgtttgatggtttgggaacatgtagaatccattatattttcttcattaaaggactccatataataaagtga

SEQ ID NO: 200405 - DNA, 509 bp, Homo sapiens
gccgggctgacgctccagctgctgtggccggaggtgcagccccgtcaggacggctccactccctggcgcctcacagactctggggctgcggtgaggtcgccctgaagaccccctggtgaggacgcttgaacccgggctgtcacctgagcacaggctgccactctgagcttttggggcgccctgtgcctgtcgggctgatgctcctctggctcccggccacctggggctgacaccggttctgtgggtcctgatatgttcacctgtcgccactcctgtggccacagctacccatgaagcgctttgggagcctcaggagcaacaagaaacacaaggaccaaaatcgaagcacggagaggcgccagtcggagcctcatggccttttcggtaggactctgcccattcccgagcccctggtggtctgtccttgggagggaaccccacggcgtgtgtgcacaccctcctaagcagtagctgtttccagccactctcttccaactgggatataacat

SEQ ID NO: 200406 - DNA, 944 bp, Homo sapiens
cgggggttgttccggcagcctttcactgaggggacccgccagtttcaaattcagtggcgtttgccctgattcccggggcctggctttcagcgtagcaattctgccggcgaagaaggtgagcgcagtgctgtgtggcagcagaggtccttaggacgaggagcagcgggacgaggaagggcagactggtgaaatcgcaaactgggcgtctgttccggcgccggacccctgtttgcaaaggtccatggctaatgaaacacagaaggttggtgccatccattttccttttcccttcacaccctattccatccaggaagacttcatggcagagctgtaccgggttttggaggctggcaagattgggatatttgagagtccaactggcactgggaagtccttaagtcttatttgtggggccctctcctggctccgtgactttgaacagaagaagcgtgaagaagaggtcaggttctggcccccgcttttctgtgggtaatacctcatactgcgaccaggcacagaggcggaggagaccccgggatgggagactcacccttcgtgcgctcacccaggctctcctgctttgctccctgctgcctgctgcgtgctgcccagtgtgactggcgatggtgggtgggtgagcgctgtcagtcgctgttcctgtgctggatgatggggcaggtaaatgccctctctgcagtgtcttacagcacacctgcatctccagttttcggcccctccctggctcttaccaggtcacgtgatccctccagacaacatcctgccccttgtcatctgcagcggggtctccaaccagccgctagaattcacgttccagaaaagagacctgcctcagatggtcagtcccagccagctcgctgcaccacagcctggcctccggcagccaacgggtcacctggggcacggggcgctctgggcccaacctg

SEQ ID NO: 200407 - DNA, 749 bp, Homo sapiens
cgggggttgttccggcagcctttcactgaggggacccgccagtttcaaattcagtggcgtttgccctgattcccggggcctggctttcagcgtagcaattctgccggcgaagaaggaagacttcatggcagagctgtaccgggttttggaggctggcaagattgggatatttgagagtccaactggcactgggaagtccttaagtcttatttgtggggccctctcctggctccgtgactttgaacagaagaagcgtgaagaagaggtcaggttctggcccccgcttttctgtgggtaatacctcatactgcgaccaggcacagaggcggaggagaccccgggatgggagactcacccttcgtgcgctcacccaggctctcctgctttgctccctgctgcctgctgcgtgctgcccagtgtgactggcgatggtgggtgggtgagcgctgtcagtcgctgttcctgtgctggatgatggggcaggtaaatgccctctctgcagtgtcttacagcacacctgcatctccagttttcggcccctccctggctcttaccaggtcacgtgatccctccagacaacatcctgccccttgtcatctgcagcggggtctccaaccagccgctagaattcacgttccagaaaagagacctgcctcagatggtcagtcccagccagctcgctgcaccacagcctggcctccggcagccaacgggtcacctggggcacggggcgctctgggcccaacctg

SEQ ID NO: 200408 - DNA, 556 bp, Homo sapiens
cagaatatgttacctataaaaatgacaaaatgaaattagctggtttctaatagacttaatgtttttgcaggaatatacaattatttcagaaccattagagaccaatgctcatcccaactctagaccacactcagggtctctgggaaacagagacaaagcataaaacagctgggacatttggaactcagatgaactgatggacaacacagaacatgtgtcaaaaaaataacaattcaaatttttacgtcattgccacataaccctggatatcagtttttataacttgaataatgtaatttgaaaatactgttcttcaatattcaaaactcctctttaggaacatgtagagactgagcatggtggttcatgcctggaatcccagcactttgggaggccaaagcaggagaattgtttaagccctgtagtttgagcccagcctgcacaatatagcaagactccatctctataaaaatgcttcttaaaaaaattagctgagaatggtgatgtgtgactgtagtcctagctacttgtaaggctgaggtgggagaatcacttg

SEQ ID NO: 200409 - DNA, 229 bp, Homo sapiens
agataattgcagattatgaagaatcacaaaggaaaaacactaaatgattaaaattagttttactgtatattactgactaaaaattaactacaatcacacttgattatctgaaatgtttccatttattcccatacagttaagtgaaaatatcatggtggctttgagattagacatttttaggtctgaataccagttctcctactcatttttaaaactatcaactacattg

SEQ ID NO: 200410 - DNA, 413 bp, Homo sapiens
tccacgttgggcttcattttatcaaaatacagcaaagagctcatcatttctcagctcctgtcggaagcaacagtggctgttcctggacacagagctgcagacaaggagtggtgaggattcaggcaagagaagatgggcagcttccccttcatgcttccctctcaggaagaagccagggtgcctgggatcaaagaggctaggaggctggtgaggcctcctgtccctgaaagcggtcagtgaacccaaaagttgaaaagcctctgctttgagagtggttctgctgccctactggtgctgacagttttagaaactgacatggcagagctgaccaggcagactatatttttaggactctgctggggcctattgaaacgtccacattactcagatcaccaatctggctggagctacca

SEQ ID NO: 200411 - DNA, 349 bp, Homo sapiens
agtctagccacacaggcctccttgctgttcctcacatacaacagactctgccaccagatgacagggctaactctttccaagtctttgctaaaatgtcattttctccaaagacctactatgactatcctatttaaaactgaaaccaaacctgtcctctttccctgctctttatttttccataccgactatcagcttctaacatataaatattttattatgttttaaataagtaaataaatcctaatttattatgttttagcatctatctcccctgattggagtaagcttcccaatggcagggactgttctgttttgatcattagtgtatctcaagctccaagaatagtgc

SEQ ID NO: 200412 - DNA, 383 bp, Homo sapiens
ttgtatatgtacttatgtatgaagtacagttttaaattttgacacatatttatgttgtataataatctaattagagtagttactgtatccatcacctcatgcatgtatcatttctttgtggtaaaaacatttaaaaacccctcttctaactattttgtaataaagaatattttactgttaaccatagttaccctactgtgcaaaagattatgagaaattattccttctatctaattgtaactctgtacccactgaccaacgtctccccatccttacgtctccactcccgtctccagtatctggtaatcactgttctactctctacttctatgatatatatttagatcccacgtgcgtgaaatcatgcaggatttgtctttctg

SEQ ID NO: 200413 - DNA, 854 bp, Homo sapiens
tctgcacactggtcactggggcccaagtttaggaggggcccaagtttaggaagggcccgtggaggcctccgtgggccagggttgctccctggctctgagcaggtgccgtgtcctccagacactccagaccccaggttcccaggacagtgagtgagtcccagctctgatcgcaggtccaggctccctctggtggttcccagccggcagccggcctgtttgatggtgttcttcccagcatggcaacagccaggaattagcactgaatgtagagttccagccacaccaagagctgccagatagacacagagcagctttttgaagcacctggcttaggactgtctacatgggaccatgggccacagcccccgacaaagcctgccagggaaattggtgctcacccagtgcccctacatattggatcctagcctagcctgcatcacagacttcaggggcccctcctgcactacagaaaaccagccatacctcccctgtaaacttgagtgagccattgaggggatatcagctctgtgttcctggcagggtttcatctcagaacagagcagccagggaacagcccttcggagctgctcacccagagcccactggtctggatccctcccgctgggctccctcctttttattagaacagtaaagtctgcaacagaacaccacctcacctttccccacactagctcaggaacagacagaatggactaaaaatagttgagctaggtttccaagtccaggatgcacaactcaggccgagcttgggccaaggagctggacgacaagttgcccgctgtcccccgaggcaggaggcatgagcccttctggagaaggaaggcagacgttgc

SEQ ID NO: 200414 - DNA, 653 bp, Homo sapiens
acgcctggccaagaatgttgaatttgatcagatgtttttaggtaaacattgagatctccataatgtaccattctgattcacttggtccagctcagctccctgcctaggtaatacttactatttcctttaagtcctcgcatctcgcctttataaaaagattcttccattcagtctcatttctctcgtctttgaattaaatttcatagacttcagtagcttttattttgctcctcagataggtttacaagatcctaggaggcaagggaccatatataacttaaccttcttttatattccttggtataaaactggaaataacaagcactcatcccttcttcctctttccttttttctttacatgttttatagtgaaattttgctttacattttaaaaatataaatgtttcaaactattcaatacatgacagttgtattgtgtatctttcctattgtacaacctgactttgccttatgagtttttgaaataatgcaaaatatttttataggaatatatcctgagtggatctcacagttgtaaattatgctgaacaactaaggcaaaatctcctcctctctggaaacgtagctgacctctggcctgtagcaggccatgcagtttttttctaagtgtcagtcaataatatagtaacttt

SEQ ID NO: 200415 - DNA, 297 bp, Homo sapiens
ttcgtatttttagtagaggcagggtttcaccatgttggccgggctggtctcgaactcccggcctcaagtgacctacctgccttggcctcccaaagtgctgggattagaggtgtgagccactgcacccggcctccagtcacacttctaagggtttgcttttagttctcctggtggttgcctccagaattttaaatacaacaattgtatgttgtttctcgatttattaactttgaaactaccaggttcctgttataacagacaaggaatgacttctttacactaagcactgcctctcct

SEQ ID NO: 200416 - DNA, 451 bp, Homo sapiens
tactacaagcagcatgtgagaaagtcattgcacaaagattctctatatctaaggaactcatacagagtctttgacatggaaagcacccagagccaaagctagtcaatcataaactatacacattatagtcacaacctcaaagctccatcaaaataaatttttaaataataagaagaaatatccccagatgagaaagaaccagaaaaatgattctggcaatataaaacaaacaaacaaacaaacagttttataacacccccaaaagatcaccctaactctccagcaaaggatccaaatcaaatgaaatctttggaataccagataaagaattcaaaaaattgattgcaaagtttctcagtgcaatccaagagaaagttggaaaccaacataaaaaatcaaaaaatacaattcaggatataaatgaaaaattatctaaaaacaaatatttctt

SEQ ID NO: 200417 - DNA, 444 bp, Homo sapiens
aacctacgtagtgaaaagtcatgacataatcgtaaacaaaaaacacagtatacagaacgtgtttgctgtacttttcctaatgtgtgtgtttctttccggtgttttacatacgtcatactgaaggaaatcagactaaaacactaatagccattttggaggcattaagtgatttacaaaaataccttcttctcatttttaaagctatgttttataaatttaaacattaaatatttttcctaataatttctgaaattaatactgtgatccaaactctattggtgccttcctttcaaatactttttagtcttaagttgccaggacttcaaaagtggcagacagggagtcactcctgctatttaacacatcagcagacactaggcatcgtttccaccttacatgaatgatgaaaagctcaaagtggctgttttcctcatttccctaaat

SEQ ID NO: 200418 - DNA, 293 bp, Homo sapiens
ggggagcgggcctcgcgcgcctggagggccctgtggaacgaagagaggcacacagcatggcagaaaaccgagagccccgcggtgctgtggaggctgaactggatccagtggaatacacccttaggaaaaggcttcccagccgcctgccccggagacccaatgacatttatgtcaacatgaagacggactaatcacatttcaagtacttaataacccatctggccaagtaatgtctcctgttctgaacagcacagctctagccacagcagctaagtgcctgaggtattgagtag

SEQ ID NO: 200419 - DNA, 321 bp, Homo sapiens
gagagaatgtgtttagaaagtgtgacatctcagtatggagtattaaatagtgtagtagggattggctttaatgtgtgtgttttggtgtgtgtgtgtgtgtgtgtgtgtatgtgtgagtgcatttgacttatgagccctgaatataatgtgccagaagttttatttgaaaaacataaccaatttgtaattgaaacaggattagtcaagaaccatcagcaccaacacaaatgtatctttgcagaccgaaggaatcagctaaacaatttacagtcatctcaatctctactaaaacaaaaatcacatccaacacaccacctgaca

SEQ ID NO: 200420 - DNA, 403 bp, Homo sapiens
aaatttccaaaggaacctacatatagagggaaaagattagacaactacttagtgaactaaaacaatatgtttttactaaatgttacatttagtattggaaaaagataatgccgcctaagagttaataatcatttttccttttgtaggcatcaacactaggagaaaatggcatgctatttacttgctactttcctttacagatgatttttggctcttctgggatttaaaaagaaagttcaccaatttgtgctctaagttgccttcattctgggtctcaggctgacaaagcagataccatcaggagtgtgggtgctaactttgggaaatgaaaaaagagtatggcaaatcacttaaggactcttaaaggactttcattggccaaagcaaatcacatagccacatt

SEQ ID NO: 200421 - DNA, 245 bp, Homo sapiens
cttgccatgcaccctgagccctgcaccctcgagctggatgggatgggctgcagaggcaggaagggggctgcagaggctggaagggggtacgcaggctggaagggggctgcagagactggaagggggcaacagaggcaggaagggggctgcaggctcaggagccaggcagagggagcaggtgggaacaagagcatgggcagggaggcttcctggagacaggggcaccctggcagcccaggtcagca

SEQ ID NO: 200422 - DNA, 457 bp, Homo sapiens
ccccctctctactgaaaatacaaattagctaggtgtggtggcaggtgcctgtaatcccaggtacttgggaggctgaagcaggagaatcactcgaacccaggaggcggaggttgcagtgagctgaggttgcgccattgcactccagacttagtgatagagcaagactccatctcaaaaaaacaaaacaaaacaaaacaaaaagacaaaattacaaacacaaaattcagtataaaaaagatttatttagaatgaaaaagaaatcccaataaattacaaatttttaaagagtcaacagatttatcagacataaaaaatccagaaatataagataatatttttattaattaactaccagacatgtcttgtatccttttttcctttatatttcttgactgcttactcttcagttatttcttcatttaacagcaattttgcagtattttcttatttatttgtt

SEQ ID NO: 200423 - DNA, 562 bp, Homo sapiens
tggttaagagagccagtgtatcgctaggcttggtgaccactagtatccaagcgtgacaagattgacgacgtatggaatttactgaaacatccacagtatcgactgtaccaattcccagtccagaacaaggagagcactgatgaggtgctgtggaagttcttgcagtcagaagttaccccaagtcactcatcagacatagcatctatggggaaggggttaagtccagtcttacttaaagctggcactgtgtgggcctacaaattctggtctcccaccccatccctgactcacccacagcatctggacaccacaggggctggtcagagctcagtcttggcccacagggtcaaagccttggtattaagaagtgggtctctggcctcaatccctcacccacccagcctgccctcaatcctagcacaggtggaaggttaaatagtgcccagagggggatgaaaactctcattcctcatcctcttacccccgtctgccctcagaagagccactttttccctaaaagactcagagaatcccattcctgatactctgaaaagctccccga

SEQ ID NO: 200424 - DNA, 464 bp, Homo sapiens
gttgtgtagttaatttctgatcccaaatgaaagatttcacatttatctgtatcatgtttcatactttgtcccatcactctagtctatagaaaaattttagaattgttattcttttattcaattacctactcctctcacttttgataaggttaccttctattcactcaaccaaatcattgataaagatgttgagctgaacagaggaaaaagaaaccaacaacatgtcagtttatcaatccaagagtttacctttgggatgattgttctaacaactgtgggtctcctctaccatactcttacccaatgtacactccgcatcctgtctgccttgatcaggtaccatgctgaagaccacactgcaccttggcattctgctaagccaatatttgatggtctcatccccaaaggatgtaagattaaagagccaaaactggtcctggaaatatctgttctttaaaatgctc

SEQ ID NO: 200425 - DNA, 235 bp, Homo sapiens
tagaggatctcctagtcttctcccatcagtatttctgctgttttcacctctttagctctgagtctaggctatatgacacaaaaggaaaacccaggaactcaccagtatgtcattcatcaggatctgaggtccctaaagagtctgctgccttctctctgcatttcagagtcgtcattgaaacttaaaaaatatatgtccagggttttaaaactgtacctgatgggacgaagacgcg

SEQ ID NO: 200426 - DNA, 479 bp, Homo sapiens
ccagctgtgcctcccttcccatgaatttcttatacaggtaaataatatatcttcattacttgataaagagacttccagtgtcagctctgacatgtgaagagcttaggagacagcattcccatcctcagaataagaaaaagatagaaaaacaaagtcagtttttttttttactttccttgaaattccagaggactacaattttgaggggccctcacttccatgagcattatctccaggaacaccaccaggttttcatgctgaagatcccagaaagatgctcttagagctcttgcaggagtaaggaaagagtagtcatagtaaaatttaaccagagctttctccataacaaagacctactacctatgggaaaagactttgccagagccttactcagtagatgaaagaacattcattcaattcatagcctcctccagctttcctgcctcacctaatagagagggaacaaaacaacaacaact

SEQ ID NO: 200427 - DNA, 1274 bp, Homo sapiens
agaatcctgaacataatcctgcatacttaatcgcagcttatcacaggttctaccaatagtcactctctctattgaacctaacacgagagagccccatgccctgagagcccctgccaagagtaacatttggaagctgagtcaggaagaagctgagatcaggtgaggttaagtatccaggatctctggtctccaggatctgccaaaaccaggatgtggagcatcagcaactgtcatagttgttgatgggagtgtaagtggtacaactagcaaaggtggggatgtcattcttgtcgacccaacagttgcactcctgggtagagaagctcttgaacatgagcatcagaagtgagactcatgaatattcaaatcagcacaattggtagtggcagagatctaaatgtctatcagcaggaaagggaatgaatggtgttttcatcatttcatcatttcatggcagtgaaaatgaatgaactacaattatcaatagggatgaatttacaaccttaacattgaaggggaaaaagcaaaatgcatgcacttaagtaaggtttacaaaaagatccaaaactgaatgatgtattaggaattcataaatacgtagtaacattatgaagagaaccaagagaataacaaacacaaaattgaggattgtatttacctttgtggagaggaaggggttgtgattggggagggacgcataagggcttcaaaagtatgtgccatatcctagttcttaaaatgagtggttggcagatgggtgttcactttacgattctttatacgtacattaaaaacgtatgcgtgtcctggttacttcctccagggacattccaccaggcagggcttagcacaactgggaattccctggtcaaagtcagggaatttcaagatttttcagccagtggttgggcaaggggtcatctctctcgtcccctccctcgaggttctgaggagcctcagaacagacgttcaacctctggaatcccccagaaaaaagactcatagggcagcttcccctttctcggacaggacagagtggagatccagggggatccccagccccaaccagctggctcgaggtcacatcctgatatttcagttctgttcccattcatgtgtctcagctgagcaactgccatgcttgtggcactcttaggggaagggaagaaatgaatgaggtgataagacccacgccctaaagaatccagggcagtaagctccctggctttcggtttttacaaactaataatattgtgtaatataaatactgacat

SEQ ID NO: 200428 - DNA, 765 bp, Homo sapiens
actgcgtggtatgctgattccttttagtcattaaatataatttatatgatgatgaatgccaattttatatctcaaaccaagacctctccccttagtacccaattcattttccacctgcttatttgacatctccactaggatgtctgtaggcatttcaaacttaataaatctaaaacctgatcttctcccttaaatttgcttaacctatattcttccccatctttccatgtgtccagtagccagaattcttggaggcatccttaaattctcagtttctctcatacccacatcagtgtgtgtgtgtcagtacatcctattaatatatctccaaaatatatcccaaactcagacctctgcagcatcactgtagtccagactttcctcataatttgtttgtatcattacagtggcctcctaactggtctcattctttcttcccttgctcttccacaggttcttctcaaaatagcagtttgctttagcagtccagttaaagtaaattagatcctgtagctcctctgcttggaatctttccatagcttctcatcttgtccaaagtaaatggccagttctataaaatgactctaaggccttatattataatctctcatgcttcctactgcctctgttacccatctgagtggcctcccaagttctaaccccctcctcatgccacttcaagtatactggactcctaattgtttcaaacaggccaggtatactcttgcctttccctttatgttttgtttccagtattctaaccca

SEQ ID NO: 200429 - DNA, 353 bp, Homo sapiens
cagaacctcaggaacatgttggactataacaaaagacctagcattcatgtcttcagagttccagaaggagagaagaaagagagagggctaaaaaatattcaaagaatggcagaaaatttaccaaatttggcaaaagatataaacctacaaatttaagaagccaaattgaggagcatggttaagggtgggagtactcccattgggaagaagggaattacatgaaaatttgctggtactgaatgttgggatcctctatcttctaccttccaactctgcttctagaacacaggcagctaaggcatatcactccaggaatgagatttgaaatatttttgtatgatcatatgctaaaa

SEQ ID NO: 200430 - DNA, 154 bp, Homo sapiens
acagaacatcagcccctgaatgcaaacattgtactgcgattcaattgcatcgaccagctttacatctaaggcctgtgagcttcacccaccttggggactgtcttaggagaaggaaagtcttgttacaaagtagcattaatcaagtgggcttaga

SEQ ID NO: 200431 - DNA, 732 bp, Homo sapiens
cagaaccagcccatctttcaccatgtcacaaatggagcacagttctcttgtatctgctggagtctgaacttccctgcctaactctcgagccttgctctgatgactcctgtggaccacttttaccaagaggaatattcagctcatgtctgacttatcacctgatttctcgcccatgtatcattcctttttatatccttcatgacgtttttacctctgagtgaaaggcccatttctcctttgctgtaaatcctccccatcacctgcacctcccctcctctggaaatccttcctgtattcatggaggcaatatgtaaatatcagggactatggtatcagggagaccaaggttctagtcctggctctgacacatttacttatttttgactctgtcatttaactcctctgggcctcaaatgcctctaagattcctgtcagttttaaattgatgttaaccaataaaaagtacctagtaggtactcattaaacatgaattattttgattactacagcctcactactcacttttgttagactttttggttccaaggaagaaagtgaatcaacgggctgatgcaaatgaggggttatttaaggataaacatgcacaggaagtgttgaacaaactggcatcaggaagaccaggaattatggtcaattttggtctcagaaagcataaaactttgtagcaaagctgagccttggggttttcaataaatattttgccctgtgact

SEQ ID NO: 200432 - DNA, 434 bp, Homo sapiens
aaaagccaggttggccacactggagagtccacatcctatctaacacaatgtccggctcttgcaaagacaagaaagggcgttccataaaagatgaatgagtccttctcaacatcaactttgtagctgagttttccacctggcccccaattatccagataacttattaaaagaaaacttgtcatccatgagtttctctacaccaagggaagatggttccgtttcccagtctccaccatcgtagggataatgagctccataagcctatccctgttgtatgaggagaaggagagggtactcgacccagagctcttccaggaatccttacactggctgcattctcagtctgggaaggccaattgtgttcaatccattgccctgactagtgcttcctcagccctgccaccacgattcaccaattccttctttgtccctgc

SEQ ID NO: 200433 - DNA, 513 bp, Homo sapiens
gtcaattaaatcttatttaataacagatctacaggttgctagtacatccctgacaacccgtatatgaaaagtcattagttgtgattttagagacaaaattagaagcaaaagataatttgtgaaggaactttaaaaattacctaaatgtataaacactagctgcttgttaaataattcaaaaatatcacactaccagaagctagtgtgacatgtatggtacatgcttgaataagaatacaagccaggggatttgtttttcctgatctacagcaagaggggttgtgattgttgtgtgacccaccataattgttgatctggagggtggcttatctaatctgcatttagatgaacaagttcatatgctggctacacaaaatcaaagcccacacaagacactttgtagtttcccaatttgctcacccatcatcattaaggtacacataggataaaatgatagccacaaatgtttctgcgtgattgtcacatcagtattccttcagatttaactttaag

SEQ ID NO: 200434 - DNA, 385 bp, Homo sapiens
gaaatttatagtaaacacacagggcagatatgctgaactattaaaatggaaaggcaaaagtcaattaatacacaggaaggggaaggggacttgatattcagaaagataagctgaacaaagggctagttcttgagcttcctagcaggagatggccacctggtggattgtacctctctcatcttttactcgatcgtatggagggaggcaaactttgccctgttcctaagtgcagaaagaaacttttcctgtgggaacccagaagtttaggaaaacacagaggcctttgtgagacaggttcttctactggctccctataaaacagacacagtgttaaatttagtcacataaagacaattataacatgaagggagaaggaatgaatggg

SEQ ID NO: 200435 - DNA, 220 bp, Homo sapiens
catcacatggtgggtttctggcagaagaccctaaatgatccatttaaaaggagacagagagatgggtggaggccagggaaagctggtaaggggagtccaaacaaagaagaaatcagaggcctggtggagccgctggagtacagactcaggagccaggagactggtcagctgatttttatctgggtggctttggaaagctgcttgacctatctgtgcctca

SEQ ID NO: 200436 - DNA, 473 bp, Homo sapiens
aattcactttacaacataggaaaaacgtttgtaaaaatggacagagaagaggattctgggtagatggcagagtaggaagcatcaggaatccatcttcccacctagacaacaattgcactggcagaatctgtctgatgtaactgttttgtaacactggagtctattgaaggcatgaaacttccaggggaagtcttggacagtaaattgtgcttaatttcagtcaattttagctgttaacatgaaagcagctactctgaccacagccccctgtcaggcggctgtatgggtgttcctgcagcaacctgcacacagcttgtgagagccagggtggacaaaaaggaccctatagtgaatacagagtatctgagctctgatcactgattattgcttctaatcaaagaaatacagacacaaaagcaggtggccattgttgttgcacctctcctgttgttgcaagactctccccctccagc

SEQ ID NO: 200437 - DNA, 370 bp, Homo sapiens
caccctgatagcactccgcagtcatttccacctgcccctcttcctgcctgcttccagaggggctgcctgatggctttgagttcctgctatgtcctcttaaacaaacatcaagagagccaggaacacacagctcagcccggggaacattcttccttaggacgtgcaagagaaggtacaggctccagcagctcttcctccaccctcacaaagagctcccagtaggggacgagagctctaaggttggttaagctgggaggatcaaggcaagaagccctgtgctcccaaccacccaacccattctactctgccctggctgggaggaaaaatgcctggagaaacgaagctggcccccgtgccatggtggctgtct

SEQ ID NO: 200438 - DNA, 240 bp, Homo sapiens
ttttgctaaaaaattagaacatgccctagagtaggaaaatacaataaagtaaaaatatcggttttccttaatcagtgtattcaatgaagtcccaattaaaatgcaaacagaattttttaaaattgaagtttgcctaaaaatatgaaaatactcaggaacattctggaaaagaagtgtgatagaggagtattagtcctgattctcatttgcagtcaaacaatccatgacattccaacacat

SEQ ID NO: 200439 - DNA, 520 bp, Homo sapiens
tggcataaatactttatgtggaaatattacatactccatcaattcaggaggcacaaaatgtcaggctgtttcactcttagtaatgccgtaaactcagctgggtgcggtggctcagagcaatgaagggttttaagctggagagagaaacggtcagattggtggtttagacagccactctggctggtaaagatctgtggggacaaaagagaggcagtggagactgagcagtaggtttttcagtgttcagatgaagagagctcaagccaggcagtgggagtggaccgagagagacagatccagaaatatcaagaccagcctggataatatggtgaaaccctgtctgtacaaaacagtgtaaaacttagctgggtgtggtgatgagcacttgtagttgcagctacctgggaggctgagatgggaggattgcttaagcctgcgagcagaaggtacagtgagctgagatcatgctgatgcaatccagaccgggtgacagagtaagaccctgtctcaaagaaaaaaa

SEQ ID NO: 200440 - DNA, 447 bp, Homo sapiens
tggcataaatactttatgtggaaatattacatactccatcaattcaggaggcacaaaatgtcaggctgtttcactcttagtaatgccgtaaactcagctgggtgcggtggctcagagcaatgaagggttttaagctggagagagaaacggtcagattggtggtttagacagccactctggctggtaaagatctgtggggacaaaagagaggcagtggagactgagcagtaggtttttcagtgttcagatgaagagactatgagcacgaggaatggaagagagaccaagaggaggagttggagtcaagaaaatgtaggctataaaactggtatgacttggtcatggaacaagaggtggggagtagaacctgtcctttttctcatctttcatttttggacgtgtcctttctaagagaaggctctctgccgcctgtcaggctagtcgggg

SEQ ID NO: 200441 - DNA, 324 bp, Homo sapiens
gtcatggaaaacaaaaatcaatgacacctgccagagaccccactgcctgctgtggggagacagacaaaccaatacaaaatcatgatgcaatggcccaatgcttcaccatggtgaaaggcacctagcccagttttgagggtcgggaaggttgcctagaggaggtgatatgtaagctgagatctaaagggtgaggaggaattcacttgttgaagataggaggagtacaattgaaaatgaggcccagaggttggggagatcctggctgttcagagagctaaagacacctcattggtggcaggagcagagggtgggggtggggtgggg

SEQ ID NO: 200442 - DNA, 857 bp, Homo sapiens
gagggagggagggggaaggagagaggggggaggggaggcggggaggggggtgaaggagggcagctgggctggtgttcttgcctgtagtcttatggaagaggtgaggtcctctggtgagatggcagtactgggatgggggatgaaaattccaagttttggcaagttgcagaataggaagtgagtgaagtactcaaaatttagggtgcaaaattttagggggtaccaaagacctcagtaatcgagacaaataattgtttaaaattcaaaattaggctgggcacagtgactcacgcctgtaatgccagcactttgggaggctggggcagatcacgaggtcaagagatcgagactatcctggccggcatggtgaagcctcgtctctactgaaaatgcggggattggctgggcgtggtggcgggcgcctgtggtcccggctactcgggaggctgaggcgggagagttgcttgagcccgggaggtggaggttgcagtgagctgaaattgcgccactgcactccgacctggcgacagagtgaaactgcgtctcgaaaagaaaaaaaaattcaaaattaatgcagaaaaattccatgatggacaaaatgtcaaaattttaacccaaaccaagattagtaacagtgctgtgctgagccatatcggagcctcatgtggggaaaaaaaataatgattccatcacctgagtcctgaccctcaggctcctgctgttgctcctgacaatctgcaggtggcgcctgattctggaaaataatctcccgctgggtccgttttccaggtctgtggaatttaagtagattctcttctggctggacagtcattctgtgatagacgatcattctgaaa

SEQ ID NO: 200443 - DNA, 205 bp, Homo sapiens
tctcctggtggtgcccctgagcagcaacctgatttctgtcctcagctatctggccaatgacatggaggaggacgacgaggcccccaaacaaaacatcttctacttcctgtacgaggagacccgctctcatatacccttgctcagtgagctttggttccagttatgccgttacatgaacccgagggtctatgaagaactgctctca

SEQ ID NO: 200444 - DNA, 266 bp, Homo sapiens
ggaggcagaggaaggaaacaagttttattttaaaagagggttatgatgcaaatcaaaaaactaagaaacagttttgtttgtttgtttgtttgtttttgagacggagtttcactgttgttgcccaggctggagtgcaatggtataatctcagctcactgcaacctccgtctcccaggctcaagcgattctcctgcctcagcctcccaggcagggattacaggtgcgcaccaccatgtccagctaatttttattttagtagagacggg

SEQ ID NO: 200445 - DNA, 444 bp, Homo sapiens
ctaatctgtgtttttctttggcctactgttaccagggaggttttttttgttgttgtttgtttgtttcttcttttcttgttttgtttttttccttcaggtgatttcttattgctcattaacatcttttttatttctgattgaagaactccctttagcattacctgtctggttttgatgaaatcactcaccttttgcttgtctgggaaggcctttatttctccttcatgcttaaaggatattttcactggatatactatcctagggtacaagttttttctttcagcactttaaatatgtcatgccattctctcctggcctgtaaagttcccactgaaaactgttgtcagatacattggagctttatgtcatttgggttttttgttttgtttcggtttggttttttccctctggctgcttttaggatcccttctttatccttgacct

SEQ ID NO: 200446 - DNA, 502 bp, Homo sapiens
aaaaaattgtagccctttacgtctgtttaatcatagttagtaaaattatatccactcgacatattattttgaatcattaatatgctcagcatctctagctaaggcaaatcagaagagaaaaagagaacgttgggtgagaatctggtttgtcattccccatgtatggtggttgaaagatagccacaagttctttgataactccccaattcaaagattgggtccaattccccttaccttgtatttggactagccttaaagacttatgtgaacaacaacaacaaaaatgcagccaaagtaacgttctggaacttccaagaatatttcacaataattattacagcttttgcccaggactcttagaatattttctttgggatccctgatccatcaggaaaaaaatctgactacctgagaccactgtgataaagtgtgcacatgaagtgctcttgttgacagtccctgctgtgcctaggctactagccatacccaccaaagtgacaga

SEQ ID NO: 200447 - DNA, 450 bp, Homo sapiens
cctcccaaagtgctgagattacaggcatgtgccactgtgcttgactttttttcatattattagcatagtacctggtgcttattaaatattgattgataatatcaaaggtgttaaattatgacatattaattgattttcatgacactcttaaaagttatattcctattttatagattgggaaacaggctaagagaataagagaaggtcagtaacttgcttaagtcacatgaaagtagagccaagagtaaaagctacgtcttcctagtcccaaatcctacagtttttgcaccagagcacactccatttcacatctgagttgtttgtcagaaggggaactatgtaacagtttgttgatagattgagtttgtttaggactggtgttgggtctgcagaaagtctatattggccagatcagatattctatactagtttctagcattctcactttca

SEQ ID NO: 200448 - DNA, 239 bp, Homo sapiens
gtttctttattcattttaatgctattttaaggtaattagtagaaaatgtttgagatgttgacctaaaaaatttggtataattatcctaatgtgttttaggtgggaataaagtttatattactcagttggcaaaatttttaaagtaccttcatttttgattattgaataactttcagttgtaactcttgttaaaacagtactaagataaaaatccttactaataaaatttccaaattaca

SEQ ID NO: 200449 - DNA, 637 bp, Homo sapiens
tgtttcatggttgtgatgttattgtaagtggtattttttatttctatttccaacttttcactactattacataggcacaaaaatgattttttcttttttcttattgacttcattttaagatatttaccttgttttccacaaaattgatttttgatattgcctttgtatcctgcaagcttgctatgcttgcttagtagttctagttatatattttgtaggttcctcaggattttctaaacaagcctagtcatcgtgtacgtgtctaaaaacagttttccttttcctttccattctctatgcctttcccctattattggctgggatcagtcctctggtacaatgctgaagagatgatgagatagatatccttgcctttttctcaggggaagcattcattcttttgccattaagtatgatggtagctgcaggcttttcagaggtgcccttccttgggttaaggaaattcccttctatccttagtttgctatgagtttgtttgtttgagatggaatttcactcttcttgcccaggctggagagcaatgttgtgatctcggctcactgcaacctccacctcccaggttcaagtgattctcctgcctcagcctctggagtagctggaattacaggcgctcacc

SEQ ID NO: 200450 - DNA, 707 bp, Homo sapiens
gaggacagcagcatagcacctgtctactgggcactgatgggtgccacaggagggctttgcacaccgattcatgtgtcctcacaggaaccctattgggtcatgtcattacttttctctttttattttattttatgtatatatgtatgtatgtgtatatatacgtttgagacagggtcttgctctgtcaccgaggctggaccccagtggcatgatcacagctcacttagcctcaacttcccaggctcaagtgatcctcctgtctcagcctcctgagtagctgggactacaggcatgcatcaccacacccagctaatttttgtactttttgtagagatagagtttcactatgttgcccaggctggttatcaaactcctaggctcctatatttttttctgaatttagaatcctaggttaacagtttttttctttcagcattttacaaatgtttcacttacagttttttctttttttgtaatttttaaggggccatgctaatattctctgtattgttctaattttagtatatgcgttgcagtgagccaacatcacgccactgcactccagcctgggtgacagagtgagaccctgtctcaaaaaaaaaaaaaaaaagtattagggttgaatgcagtggctcacgcctgtaatcccagcactttgggaggctgaggcaggaggcttctatcgcaacgactcagctctgatgtaa

SEQ ID NO: 200451 - DNA, 513 bp, Homo sapiens
agatggaatctgtggcatccccttgtaatatggaggtggatgaaaagtttccttcaaaaatgtcactttgcagagtgggctgtcttgaaatcagcccagaatttctctttaaggaaaactatgggggagatttgctgtctgtggtcagtggcatcacgggctattgataattaagaattaacttgagcaattgctgtggttaaacacaagaaacgtgcctgtctgccttccttcctttcccttcccttcccttccctttcttcccttcttctccttctttccttctcaaatatttaggttaaatatgatttaggagcataattctatatatttaaaaacatattaaattttccaaatattggtgtgactagaatattaatttctatcaaatgaggaaagtgctacagagaaaaattatatctctagtgtcattcaaaggagagtaatcttggaggcttaaatcttatttttaactggaatgcattcttattaaatagtagcaattataatata

SEQ ID NO: 200452 - DNA, 385 bp, Homo sapiens
aagcttccatccgcttaataccaaggtgatcaagtctgtgtgctaaatacaggaaaagccttaataggagaccctgctaccaatttgtaggaaataggacaaaaaaaaaacaaaccacaacactttgaacttccactgttgagtatgcaaacagcaaaatccagactatagggaagtcaacaagtcacaaggcccaagtttttcaacagataaagtagaagcaaaaaactgtaagaaaggaatgaagagagaacctacagattaagaaacttaaacgacttaccagtatagccacatgataaataccattaaaagaaaaaggaatgaactttcggctgggcgcggtggctcacgcctgtaatcccagcacttcgggaggctgagg

SEQ ID NO: 200453 - DNA, 624 bp, Homo sapiens
ttggccatccttggtgactctgaaatccgtctaggaagttattcaactgctagcatcattgttcttcccagtagctcctgagggccctgggatactgtgcttgcctataggcaaggcagctggtaggagaggcccttttgtggaatgcagttactctcttgttagttcccactttttctcttttcatctccttttcttcccatctgctcctcttgtgtgaacagatgtgagtttcctccttgactttccaggccatgagttggaacacgttgttcttaggtgatcattttagagatgaaagtgtagtgtacaggggtgatggagccaagctatgagttcttcatcactctcttacctgctcatcagcagctccatctccctgtctgcagcctcagctgaaacctccgcacctggatacccccaaacatctgcctggtacaggaatgaggatggaaaatgcttggggatatccagaatggggaggtcaactgagtctgaagacagagagctggacctgttgagatgcagataagagagtgaagaattgatcagggagtgtggagagaacctgtgatggtgtctgctccttattgggcgaaaggctgtgccagcgtgaagaatggg

SEQ ID NO: 200454 - DNA, 257 bp, Homo sapiens
aaataaaataaaataaaataaataaataaataaattgcagggtcaaggctggtaccagggaccagttaggaggctaagaataggtggttcccactgaaataagaaggagaggttgagacatcccaggcagagaaaatagcctctgcaaaggcacctttgtgctttgcaggtgcaccagggatgaagtggccaaaagacaagatcagaaggcaagccgagcccatggcaggtgctgagcagggagtggcatgatcaga

SEQ ID NO: 200455 - DNA, 817 bp, Homo sapiens
gttgcaagtgctcagccccccttggcctcccaagtgctgggattacagatgtgagccactgcgccaggtgagccttcagggattcttaaccgttttgtgccattgatcaacttggcagtcttgtgaagtctagggattccctttttagaataatactttttaatttatatataaaaaaatacataacattataaagaaaatgaattattatgaaatataattatctacaactcttcactcttacttctcatgaccgcccccaagaaagacctgacttgaccaaaattggcacctaccatgcttcccccaggacctggccccaggcatttggaaggtaatagattggtagtccaggattgtaatattgggctgtctctgtttaagctaaaaattaaggtaaactattaggtcccatctggacagccccattgttaagttttatataacctttcataatcggcctcaatgacagatatgtccagcaaatatccaaattggttttaaagtcagttgcaccatcatttactgatatttaaagtagatcattataatttagtaagtaccactggtggctagctctgggaggagggctgccatgtgacagagtaggtaagattttccaacccaggacacctggtaggtgctattagcagcgataccagtgtcttcctgagcatgccctaggggtggcagaagggattgcctgtgctcccctatgttttgccagagtttctattggcttttgtgggagatgaacacaatccatagagaaaataggccccagtgggacaggtggagcatcacatgagcacagggg

SEQ ID NO: 200456 - DNA, 614 bp, Homo sapiens
agctaatttttgcatttttagtagagatggggcttcgccatgttggccgggctggtctcgaattcctgacttcaggtgatctgcctgcttcggcctcccaaagtgttgggattacaggcgtgagccaccgtgcccggccatattatcttttatcctacttaatttctttgagcttatgtccagcctacatgtataaaatatacagtgtagaaaacactccagctcatcttatatttcattgaaagcaatgtcttaatgataaagtacttcacaatattatcttttagcctacataaaacctatcagggtttaactaaagtggaagagcaaatagatgactgttccttctataaagagacctaagaaataaattaattacatttgtttttctacagtggttctgaatcaacgcccctaacaattcaggatctaacactgaactcaatccatgcttgaacaaaataaaagtcaggcttgtaaaaaaaaacaaggtgaatgaagtaaagaactggctacaaatatgaaaagtacttcctctacactgttacccacatgtaaataaatataatgggctccccccagcgccattcaatgagtgaacagcaaggtatatt

SEQ ID NO: 200457 - DNA, 422 bp, Homo sapiens
tcagcctcccaagtagctggaactataggcgcctgccaccacacccagctaattttttatatttttagtagagatgaggtttcaccatgttagccaggatggtctcgatctcctgacctcgtgatccgcccacctcggcctcccaaagtactgggattacaagagtgagccaccatgcccggccgtaatttcatgtttttaagcctcaattttatcatctgtaaaatggggatcgtaataagatccaccccatgggattgtcgagggactgtagttcaaccaggtgatctcatgtcaagagctcagcccaatgcctgtcccaagttcggtgctccatggatgttctgtctggtgatgcggttgggaaacacggtggtggtaggaacctgggcaagcgggtgcatggagcttcccccagccag

SEQ ID NO: 200458 - DNA, 794 bp, Homo sapiens
ctccagcctgggtgacagagctagactctgtctcaaaaacataaaaagtaaataaatacaataaaaaatataaaagatgcttgtggaacaatctgactatagagtccttctggatattaatccatatttttctctaactctttaagtgctagctcagccacatgtaattgaatagtttttctcgtaattgcattatatcaaatctgtcaacctgagtgttacatagacaaatgtcgtgttatgcagtcatatttaatcacggatttatttaatatttaattaaattacttcgttaaaatagtaatttcaaccatcaggaattagagtgaaatggctaatttaaaaccatctggtcaaaaaatgggcaaaagatttgaatagacatttctcaaaagaagacatacagatagcaaacaggcatatgaaaaggtgctcaaaatcattgatcatcagagaaattcaaatcaaaactacaccgagatatcatctcaccccagttaaaatggcttatatccaaatgacagtcaataacaaatgctggaaaggaagtagagaaaaggggacccttgtacactgtttgtgggaatgtaaattagtacaaccaccatggagaactgtgtggaggttcctcaaaaaactaaaaattgcactaccatatgatccagcaatcccactattgggtatctattcaaaagaaaggaaatcagtgtatcaaagagatatctgcacacccatgtttgttgtagcactgtttacaatagctaagatttggtaaaaggtgaaagatttatgca

SEQ ID NO: 200459 - DNA, 313 bp, Homo sapiens
tgtacttatgccgtttatgtgtggtctcgtgttgccagaacaaactgcaaactctgaggacaaatactgttatatttttttccctagtaactcccccaagaacactgagcagataagccaagttgaaatacgctgggaaaatgaaaacacgttatgtattcgaactaatttaaattacaaagcaaaattacctatatagtcaattacattaaggcaaacaatcatctaatacattaataaatatctagtacacaaaaagcattctggaactggatccatgagttcaaactggctccaacactagtaactatgt

SEQ ID NO: 200460 - DNA, 240 bp, Homo sapiens
ctagcaagcagtgatctttttgtctttgccttttccagaatgccatataattggaatcgtacaatatgtagctttttcagattggcttctttcactgagtaatatattcttaacatccctccatgacttttcaaggcttatggcttaattcttctcagcactgaatgttccatcgtctgaatgtactatagttcatccattcatgcactaaaggacatcttgcttccgggtttcggcagt

SEQ ID NO: 200461 - DNA, 531 bp, Homo sapiens
tggatgcctagtgccagttacagaatgctcatgggaggtgtccctggcgtagttgagagcacccattatgggatggatgctgcaaaagacgggaaaatccttggggtggcaactggataaaggcagatatagtaagtgtagatgaggggaattggagcaacattcttacacatgggatgaattgcaatctggagatcttcagaggaggagccatttgaaaatgctgttgaggaagagtctggtcctgagaactgttgtggccttaatgtcgatgttgaagtttaggatatggatggtatcacactcatgtgaagagagaacagaagcagcagcaggagaaatccagggtttgggcagctctgctcctctgagacatcctcgctgataggtcctgacagattgggagccttacagggcagagctttgcagatggaccaagtgggtccatgggagagaagacttccagagaacatgtttgcagcattgaaagccctccctacatggagactacctttaacttgtgtgcaaaaa

SEQ ID NO: 200462 - DNA, 579 bp, Homo sapiens
gtggtgagacaaaaagagggatttatatgaaagggattgtataggaagaattaaaaagatctgctgactgagtcaatgtggagtagggaatcaaagacagaaacacatgacttacagaacccaaacatgtcaacctgcataacgacaagaccaaaaacccaaaaacatctgaagtcacaactggttcccaaattactgattcatcacagctttacatcatatgttcagagcatatttctcacacatacaaaatgtaagatttttgtagttaggtttgaatttactggaagccagtcatcaaaggtttattgaagagatgttcacaaaaattaaatcctccgaggacaagaagatattccaggccaatactaatcaaaagaaagctgggatagccatattactatcagacaaagtagatggtaaggcaaaaagcattattagtgatacattttaacctaccaagaagatataacaattataaactaataacaccaaataacatgcctcaaaatataaagtaaaaactgacaggtctacaggaagaaactgacaagactgacaacataggagattttcaca

SEQ ID NO: 200463 - DNA, 348 bp, Homo sapiens
aaagagtacttataatggctcttagtggctcatgaattgcaaacaacacaaagctatatcaggataatctgaagttaaacaatggggagcccactacagctgtcctgaggggaattccttgagttatgaaatcccagcaatgggccaggtacagtggctcacgcctgtaatcctgacactttgggaggccgaggtgggtggatcacttgaggccaggagttcaggaccagcctcgccaacatgatgaaaccacgtctctactaaaaatacagaaattagtcaggcatggtggtacatgcctgtaatcccagctacttgggaggttgaggcatgagaattgcttgaacc

SEQ ID NO: 200464 - DNA, 507 bp, Homo sapiens
ctgtctttgagaaatttaatgctggttatcacatttattttccagatgttttctgaaattaaactgtgttcagcccctgcactttttactccgatattctttgggaaaccataatgtgaagcagacatttctaaagagaagagcatttctccttgtggaattgtgttataattagtgatatcaaataacttatgaaaaacaatatgttataaaataaaaaataatgagaggtgatagacaatgaaatgtgataaacaactattatattctattatgtgacttagtgctttgtaaactccagagatcatttcaacagtaaaatatgtcctatatgctagggctcgaaggaaacaattatctgcaatattctgttgcagataatcaactgaacttacaggtcacttaacttaaaaaaatatgagtaacaagctaatttttatcttcttacctgtatgtccatatccctataattttatgtatatatatatatatgtacttaaaacagca

SEQ ID NO: 200465 - DNA, 273 bp, Homo sapiens
catatattaggagtatagcattctgttgagtgtgttgcagctgtaccaaacagtagaatgcatgtttattgcctttacagagcttacatgagtttcatgagatgcgacatcaatggcagatggggaccacaaagcagaatagctctggagtcagaccacctatgttaaaaatgttttttactgcttgcctgctgcataatctgttatataaccttgggaaagttacctaagctcacctagtctcagcacgggtgctggcgtaccgcagctcga

SEQ ID NO: 200466 - DNA, 2320 bp, Homo sapiens
gacttttttttaaaagagggtgggggtggggggtgattgctggtcgtttgttgtggctgttaaattttaaactgccatgcactcggcttccagtatgctgggagcggtgaagatggaagggcacgagccgtccgactggagcagctactatgcagagcccgagggctactcctccgtgagcaacatgaacgccggcctggggatgaacggcatgaacacgtacatgagcatgtcggcggccgccatgggcagcggctcgggcaacatgagcgcgggctccatgaacatgtcgtcgtacgtgggcgctggcatgagcccgtccctggcggggatgtcccccggcgcgggcgccatggcgggcatgggcggctcggccggggcggccggcgtggcgggcatggggccgcacttgagtcccagcctgagcccgctcggggggcaggcggccggggccatgggcggcctggccccctacgccaacatgaactccatgagccccatgtacgggcaggcgggcctgagccgcgcccgcgaccccaagacctacaggcgcagctacacgcacgcaaagccgccctactcgtacatctcgctcatcaccatggccatccagcagagccccaacaagatgctgacgctgagcgagatctaccagtggatcatggacctcttccccttctaccggcagaaccagcagcgctggcagaactccatccgccactcgctctccttcaacgactgtttcctgaaggtgccccgctcgcccgacaagcccggcaagggctccttctggaccctgcaccctgactcgggcaacatgttcgagaacggctgctacctgcgccgccagaagcgcttcaagtgcgagaagcagctggcgctgaaggaggccgcaggcgccgccggcagcggcaagaaggcggccgccggagcccaggcctcacaggctcaactcggggaggccgccgggccggcctccgagactccggcgggcaccgagtcgcctcactcgagcgcctccccgtgccaggagcacaagcgagggggcctgggagagctgaaggggacgccggctgcggcgctgagccccccagagccggcgccctctcccgggcagcagcagcaggccgcggcccacctgctgggcccgccccaccacccgggcctgccgcctgaggcccacctgaagccggaacaccactacgccttcaaccacccgttctccatcaacaacctcatgtcctcggagcagcagcaccaccacagccaccaccaccaccagccccacaaaatggacctcaaggcctacgaacaggtgatgcactaccccggctacggttcccccatgcctggcagcttggccatgggcccggtcacgaacaaaacgggcctggacgcctcgcccctggccgcagatacctcctactaccagggggtgtactcccggcccattatgaactcctcttaagaagacgacggcttcaggcccggctaactctggcaccccggatcgaggacaagtgagagagcaagtgggggtcgagactttggggagacggtgttgcagagacgcaagggagaagaaatccataacacccccaccccaacacccccaagacagcagtcttcttcacccgctgcagccgttccgtcccaaacagagggccacacagataccccacgttctatataaggaggaaaacgggaaagaatataaagttaaaaaaaagcctccggtttccactactgtgtagactcctgcttcttcaagcacctgcagattctgatttttttgttgttgttgttctcctccattgctgttgttgcagggaagtcttacttaaaaaaaaaaaaaaattttgtgagtgactcggtgtaaaaccatgtagttttaacagaaccagagggttgtactattgtttaaaaacaggaaaaaaaataatgtaagggtctgttgtaaatgaccaagaaaaagaaaaaaaaagcattcccaatcttgacacggtgaaatccaggtctcgggtccgattaatttatggtttctgcgtgctttatttatggcttataaatgtgtattctggctgcaagggccagagttccacaaatctatattaaagtgttatacccggttttatcccttgaatcttttcttccagatttttcttttctttacttggcttacaaaatatacaggcttggaaattatttcaagaaggagggagggataccctgtctggttgcaggttgtattttattttggcccagggagtgttgctgttttcccaacattttattaataaaattttcagacataccaaaa

SEQ ID NO: 200467 - DNA, 2421 bp, Homo sapiens
  misc_feature (1)..(1): n is a, c, g, or t
  misc_feature (3)..(3): n is a, c, g, or t
  misc_feature (5)..(5): n is a, c, g, or t
  misc_feature (9)..(9): n is a, c, g, or t
  misc_feature (12)..(13): n is a, c, g, or t
ncngncggncgnngctagaggggctgcttgcgccaggcgccggccgccccactgcgggtccctggcggccggtgtctgaggagtcggagagccgaggcggccagaccgtgcgccccgcgcttctcccgaggccgttccgggtctgaactgtaacagggaggggcctcgcaggagcagcagcgggcgagttaaagtatgctgggagcggtgaagatggaagggcacgagccgtccgactggagcagctactatgcagagcccgagggctactcctccgtgagcaacatgaacgccggcctggggatgaacggcatgaacacgtacatgagcatgtcggcggccgccatgggcagcggctcgggcaacatgagcgcgggctccatgaacatgtcgtcgtacgtgggcgctggcatgagcccgtccctggcggggatgtcccccggcgcgggcgccatggcgggcatgggcggctcggccggggcggccggcgtggcgggcatggggccgcacttgagtcccagcctgagcccgctcggggggcaggcggccggggccatgggcggcctggccccctacgccaacatgaactccatgagccccatgtacgggcaggcgggcctgagccgcgcccgcgaccccaagacctacaggcgcagctacacgcacgcaaagccgccctactcgtacatctcgctcatcaccatggccatccagcagagccccaacaagatgctgacgctgagcgagatctaccagtggatcatggacctcttccccttctaccggcagaaccagcagcgctggcagaactccatccgccactcgctctccttcaacgactgtttcctgaaggtgccccgctcgcccgacaagcccggcaagggctccttctggaccctgcaccctgactcgggcaacatgttcgagaacggctgctacctgcgccgccagaagcgcttcaagtgcgagaagcagctggcgctgaaggaggccgcaggcgccgccggcagcggcaagaaggcggccgccggagcccaggcctcacaggctcaactcggggaggccgccgggccggcctccgagactccggcgggcaccgagtcgcctcactcgagcgcctccccgtgccaggagcacaagcgagggggcctgggagagctgaaggggacgccggctgcggcgctgagccccccagagccggcgccctctcccgggcagcagcagcaggccgcggcccacctgctgggcccgccccaccacccgggcctgccgcctgaggcccacctgaagccggaacaccactacgccttcaaccacccgttctccatcaacaacctcatgtcctcggagcagcagcaccaccacagccaccaccaccaccagccccacaaaatggacctcaaggcctacgaacaggtgatgcactaccccggctacggttcccccatgcctggcagcttggccatgggcccggtcacgaacaaaacgggcctggacgcctcgcccctggccgcagatacctcctactaccagggggtgtactcccggcccattatgaactcctcttaagaagacgacggcttcaggcccggctaactctggcaccccggatcgaggacaagtgagagagcaagtgggggtcgagactttggggagacggtgttgcagagacgcaagggagaagaaatccataacacccccaccccaacacccccaagacagcagtcttcttcacccgctgcagccgttccgtcccaaacagagggccacacagataccccacgttctatataaggaggaaaacgggaaagaatataaagttaaaaaaaagcctccggtttccactactgtgtagactcctgcttcttcaagcacctgcagattctgatttttttgttgttgttgttctcctccattgctgttgttgcagggaagtcttacttaaaaaaaaaaaaaaattttgtgagtgactcggtgtaaaaccatgtagttttaacagaaccagagggttgtactattgtttaaaaacaggaaaaaaaataatgtaagggtctgttgtaaatgaccaagaaaaagaaaaaaaaagcattcccaatcttgacacggtgaaatccaggtctcgggtccgattaatttatggtttctgcgtgctttatttatggcttataaatgtgtattctggctgcaagggccagagttccacaaatctatattaaagtgttatacccggttttatcccttgaatcttttcttccagatttttcttttctttacttggcttacaaaatatacaggcttggaaattatttcaagaaggagggagggataccctgtctggttgcaggttgtattttattttggcccagggagtgttgctgttttcccaacattttattaataaaattttcagacataccaaaa

SEQ ID NO: 200468 - DNA, 1133 bp, Homo sapiens
  misc_feature (987)..(987): n is a, c, g, or t
  misc_feature (995)..(995): n is a, c, g, or t
  misc_feature (998)..(999): n is a, c, g, or t
  misc_feature (1002)..(1002): n is a, c, g, or t
  misc_feature (1005)..(1005): n is a, c, g, or t
  misc_feature (1017)..(1017): n is a, c, g, or t
  misc_feature (1030)..(1031): n is a, c, g, or t
  misc_feature (1036)..(1036): n is a, c, g, or t
  misc_feature (1038)..(1038): n is a, c, g, or t
  misc_feature (1052)..(1052): n is a, c, g, or t
gacttttttttaaaagagggtgggggtggggggtgattgctggtcgtttgttgtggctgttaaattttaaactgccatgcactcggcttccagtatgctgggagcggtgaagatggaagggcacgagccgtccgactggagcagctactatgcagagcccgagggctactcctccgtgagcaacatgaacgccggcctggggatgaacggcatgaacacgtacatgagcatgtcggcggccgccatgggcagcggctcgggcaacatgagcgcgggctccatgaacatgtcgtcgtacgtgggcgctggcatgagcccgtccctggcggggatgtcccccggcgcgggcgccatggcgggcatgggcggctcggccggggcggccggcgtggcgggcatggggccgcacttgagtcccagcctgagcccgctcggggggcaggcggccggggccatgggcggcctggccccctacgccaacatgaactccatgagccccatgtacgggcaggcgggcctgagccgcgcccgcgaccccaagacctacaggcgcagctacacgcacgcaaagccgccctactcgtacatctcgctcatcaccatggccatccagcagagccccaacaagatgctgacgctgagcgagatctaccagtggatcatggacctcttccccttctaccggcagaaccagcagcgctggcagaactccatccgccactcgctctccttcaacgactgtttcctgaaggtgccccgctcgcccgacaagcccggcaagggctccttctggaccctgcaccctgactcgggcaacatgttcgagaacggctgctacctgcgccgccagaagcgcttcaagtgcgagaagcagctggcgctgaaggaggccgcaggcgccgccggcagcggcaagaaggcggccgccggagcccaggcctcacaggctcaactcggggaggccgccgggccggcctccgagatcgnggacggtngcnnatnagngccccggcagancaggagggcggannaaggngnccgggggagcccangggccccggaaaagggggcacgaggcacacaggggcgaggaaggaaactcaccctaatttgggccccccgacatatctctg

SEQ ID NO: 200469 - DNA, 1023 bp, Homo sapiens
  misc_feature (877)..(877): n is a, c, g, or t
  misc_feature (885)..(885): n is a, c, g, or t
  misc_feature (888)..(889): n is a, c, g, or t
  misc_feature (892)..(892): n is a, c, g, or t
  misc_feature (895)..(895): n is a, c, g, or t
  misc_feature (907)..(907): n is a, c, g, or t
  misc_feature (920)..(921): n is a, c, g, or t
  misc_feature (926)..(926): n is a, c, g, or t
  misc_feature (928)..(928): n is a, c, g, or t
  misc_feature (942)..(942): n is a, c, g, or t
cccctggggtgtgaatcggcgagggactggagcagctactatgcgagcccgagggctactcctccgtgagcaacatgaacgccggcctggggatgaacggcatgaacacgtacatgagcatgtcggcggccgccatgggcagcggctcgggcaacatgagcgcgggctccatgaacatgtcgtcgtacgtgggcgctggcatgagcccgtccctggcggggatgtcccccggcgcgggcgccatggcgggcatgggcggctcggccggggcggccggcgtggcgggcatggggccgcacttgagtcccagcctgagcccgctcggggggcaggcggccggggccatgggcggcctggccccctacgccaacatgaactccatgagccccatgtacgggcaggcgggcctgagccgcgcccgcgaccccaagacctacaggcgcagctacacgcacgcaaagccgccctactcgtacatctcgctcatcaccatggccatccagcagagccccaacaagatgctgacgctgagcgagatctaccagtggatcatggacctcttccccttctaccggcagaaccagcagcgctggcagaactccatccgccactcgctctccttcaacgactgtttcctgaaggtgccccgctcgcccgacaagcccggcaagggctccttctggaccctgcaccctgactcgggcaacatgttcgagaacggctgctacctgcgccgccagaagcgcttcaagtgcgagaagcagctggcgctgaaggaggccgcaggcgccgccggcagcggcaagaaggcggccgccggagcccaggcctcacaggctcaactcggggaggccgccgggccggcctccgagatcgnggacggtngcnnatnagngccccggcagancaggagggcggannaaggngnccgggggagcccangggccccggaaaagggggcacgaggcacacaggggcgaggaaggaaactcaccctaatttgggccccccgacatatctctg

SEQ ID NO: 200470 - DNA, 277 bp, Homo sapiens
ctgggggcgtggtactggcctgtagtagtttgaagccagggttgccactgaacattctacagcacatgggacaatgaattgtccgtcgcaaatgtcattggtacctagggtgagaagctctcttgtcattaagtccagaacatgagcatttatttagcattagaagtaaatggcaccgcatttgcccagtatggattttgttccacttgggactttacttggatcctggcactgctctcgacctaacccgaccactgtgccagaaccacaaatatcg

SEQ ID NO: 200471 - DNA, 205 bp, Homo sapiens
agtaaaatcacaggacttgatgaaaaattgtgagtatgtactaaaaggaaggggaacattaagattgtgtctagatttcaggcataagtagataatgatatcaagcgatatagacagttttagagtagaagacagtttagttttagggatgttgggtacaagtctttggaccccaaaaaatgtacaccactgtccaagtgtcaat

SEQ ID NO: 200472 - DNA, 386 bp, Homo sapiens
aaagaatgaatgaatttaagagtgttgcgaaactccaccctttgacctttccctcctgtaggaaaaggaggaccctaaaccttcctgcaaggcagatgaagcttgtagcttcagtgcaagcgttcttcctggaaagcagagctgctgtgtgcatggaacacgggttctccttccatccttccctgcctcccagctttccttccagagcaagcatcagccagatatttaggaacttttaggttctactgtaaaacttttcttccttgaggcagtgaaaagccagcttaggattcagacattgctgtgtaaaccctggcgagctaagttaggagtttctgtggttttcaaatttagatccttgaagaaacagaagattttaaaatttt

SEQ ID NO: 200473 - DNA, 287 bp, Homo sapiens
ctttaacagattagtattgcctgtttttgaactttatataaatggaacctgtgtagtatatatacagttgccccttggtgtacctgggggattggttctaggatccaccctcccaacaggaaaatcatgtgtactcaagtcctgaagttggccctgcagaacccatgtataggaaaagttggccctctgtatatgtgggtttcacgtcctgcaaataccatatttttgatctgcatttggttgaaaaaaaaatatgcgtataagtggacctgcacagttcaaaccag

SEQ ID NO: 200474 - DNA, 525 bp, Homo sapiens
gttaccaaatatttgaaatcagataaacatattcctaaagtaaacaaaggctcaaagaagaaatcacaatgaaaattaaaaatcattctgaagtatatgaaaagagaagagcgtaccaaaaatagtaaaatgcagctaaagcaacaccttaagggcactatttcacaaacaaaacgaatttgagatcactgatctaagtttaagaagctagaaaaagggcaaattaaacaaagaaagcgctaatatcaatgcaacagaaaacagacacacaacactgaaaaagcagtgaaactaaactgtcttttgaacaaatcaataaaactgatacctctcactaaactgatcaagatttgtattgtgaattatgaaaaataaaaaaacatagccacagactccacattaattgaaagaatattaagctaataatttctttaagaaataaaactcctttgaaagacatgagttaccaaaaatgactcaagatttttttgatctatgttgttctgtatctatgaaagaaattta

SEQ ID NO: 200475 - DNA, 623 bp, Homo sapiens
gaatcaagactagctctgagaaaaaattattagaaataacagccacaggaaaatgatagagaagaaattgatgaaaatgacctaaacaagtaataaaaaaaatgagcttatttctgatttttgaacctgccccaataataaccttgtgtttctcgagggtcatttaatttgtaaatcacttccttttgctcatagtggcttatgaagtagacagagcatgtctcatttaacaggtaagaaaatggaaaaacagagatggtacggcttccccaggaccagggtcagcaaagtacaccaactgattaaatccactcatggactgtggattttttacatggcccatgagtcaaaaatagttcttactattctcaactgtattcttaacttactattcttattatacattctgtacgtagagtttataattgagccacacttattcgtttacttattagatattgcctatgtctgctttctgcactacaacagcagaactgggtagttccaacagagaccatatagcccacaaatattgactccctggccctttacagaaaagtttgcagactccagccctagacccacagtagaaccatgagcaaagcccagattttttagagcca

SEQ ID NO: 200476 - DNA, 453 bp, Homo sapiens
ctggcccactcaccagggtcccctgctcagcagagcctcagtgactggcctaaagaggctatgggtgaaggattgtagggagtcagaaagacaaggggagcattggacaacacaggaagtccctctggccaccttctgaaggtggggaccattcatgagaaatccggaggacgccctcagtccttgtgcagcaccaggaagaaaccgactggcccagggccacccctgagtccgcatcatcacgcagggtccttcagctgagcccctgttgtatccgcagatgaacatccgcagatccctgtcccctggtaactgacggacagcacagggtcctggtggcccatggacgccacctcatgcctcctttccgaggccacctagccggcgaggcccgccacggacacaccgtgagcacgcgcaacgagcaggggtcggtgatcgccatcccccgtg

SEQ ID NO: 200477 - DNA, 852 bp, Homo sapiens
tgtccacacaaaaacctgcacagggatgtttatagcagctttattaataattgctgttatgggctgtttgtgtcccctcaaaattcatatgttgaagtctaaacactcacctatgtgatggtatttggaggtgggcctttggaagggaattaggtcaaaagagtggagcactcaacaatgggattaatgtccttataagaagaggctagagagctagcttgtcttcttgcagccatgtgaggatacaagtcagctgtctgcagccagaaagatggcctttaccagaacttgactatactggcatcgtgatcttggtcttccagccttcaaaactgtgagaagtaaacgtttgttgtttaagccacccagtttatggtcatttgttatagcagtctgaactaagaccaatgtcaaaacttggaagcaaccaaagatgtccttcagtaggtgaataaactgtggcacatccagacaatggaatattattcagagttcaaaagaaataagctattaagccatgaaaagactcagaagaaacttaaatgcagcttgctaagtgaagaactcaatatgaaaagcctatatgctgtatgattcaagctatatgacattctggaaaaggcaaaactatgaagacagtaaaaagattagtggttgtccgggaatgtagtgggggagaatagagcatggaagtagaacagagttttggagcagtgaaattatttcacatgaaacggtaatgggagacacatgacattatatgccatagaactgtataacaccaagggtgaaccctaatgtaaactgtgggctttggatgataatgatgtgtcaatataggttcatccattg

SEQ ID NO: 200478 - DNA, 457 bp, Homo sapiens
tatgtaccttgtaattcataataatagataaggttagataagtctaaccttattttttattcttaatattcatagtataaaagtgatatgaaagatgcattcacaactttagtaacagtggaaaacagcctgtcatagtgtaaatctgttttatagtatgacataacttgtcatagtataaaaaggatggggtttatcttcataattcctaatctttattttagttgtattgccttgggcaatgcatatcttcttgagtttcaatatttttatctataaaatgggtagataatatcaccctcactggactaaaagagatgatgtaaataaagtacctagtaatacctaggtacatagtaaacatctaagtggaatttaatcataaccattgataatgatacattccctgccttttctcaaaatagcctacgtatgttgtaaccacactcaggcctaa

SEQ ID NO: 200479 - DNA, 402 bp, Homo sapiens
ctgcctataataatgcctttagtagatacatattcagttgtctcggtatctctgggagggattggttccaggatcccccgataaaacagataccgaaatctaggatgctcaagtcccttatataaaatggcatatctagtgtttacatatagcctatccatatcctctgatatactttaatctctagattgcttttgatattaatatgtaaatgatacgtagtttttatattgtattattttaaatttgtatttttttattgtactattactttttattttttttccccaatatttttgatccatggttagttgaatccgtagatgtggaccctgtggataaattgtatgtttatattatttccaggaaaaatgaaagtagccttactttgtgactgttaaa

SEQ ID NO: 200480 - DNA, 413 bp, Homo sapiens
cacgcactggcaggaataaccaaatttccttgtcaatcgcatctttaaccatgactgtccttaagtctacttgtacacagtaaatgcttaatctgatgcttttttggaaagctctttataagctattataatcctaaagagttgtgctttcaaggaggttcatggaagggactctgaaagtacaaatgtctgataactttaagattatactgttggactggataaaaaaaccccagaactctaatgaaaaaaaaatgggttcataatactgctaacccaagcagagaagaattaaattatgaggaaatacatgggccaagtgcacaatgatatatgcccatcgttatactattatacatagtattttcattgccccaaaaatcctctgtgctgtgcctattcatctcccagcc

SEQ ID NO: 200481 - DNA, 574 bp, Homo sapiens
taattacattacaaagatccactttaacaaataacatttaaagttagatggctaggtgcggtgcctcacgcctataatcccagcactttggccataatatgtcttttttaaaattacaattaatacttactgttatttaatttgatgccaagtttttgttttattttgttgtttttttgagacagggtctcactatgtcacccaggatggagtgcagtggccatgatcttggctcactggaacctctgcctccagtgttcaagtgattcttatgcctcagtcacctgagtagctgggattacaggcgtgtaccaccatgcccagctaatttttgtatttttagtagacacagggtttcgccatgttggccaggctggtctcgaactcctcacctcaagtgatccacctgcctcagcctcccaaagtgctaggattacagtggtgagccactgcacccagccaggaatgccggttattcttaatttccctatgcaaatgtagagttctgaggatgcatttcacagaggtgctctagaccctggggaaatgacgtggtcttgactccatgcctatg

SEQ ID NO: 200482 - DNA, 559 bp, Homo sapiens
agtatagttaactttatgtaatagcattagggtaggggataggttgtttccagttgtacaaaagatagttgtattatgttaggtataattatgaccttattagtgtctttatttgaagattatgtatgatctcaggagatgtgtatgggttcaagttgacaaggggtggacttgtgatggttaatactgagtgtcaacttgattggattaacaaatgcaaagtattaatcctgggtgtgtatgcgagggtacctacctgatgggacgcaatcttcgtcccatcagtaatatattgttaaaattagactttttcactgggtaattggtaggagcctataggttttcttgtgataagttcagtcctcagaaagcaccactcttgtggcatttcagggcttaaattcttaatactctttgcttggttttccaagtctaaaacactgttccacatatgattctgtacaatctcatatctagtcatattgcagtgctgagaattgtagttccagagaggcatgtgtggagatagggttttgagaatgttcgtgaaatgtttcac

SEQ ID NO: 200483 - DNA, 896 bp, Homo sapiens
tctaggtggaggctcgtgttaaatcggacgaggagacgcctggcgcacccgcgggagcggagccgtggcgcgctcgccccggacgccggccgcccctccgctcgccctactgagcgagcggcccggggcgccgaggggtccgcgccgcgcggggcgcaccgccctggccgccatgtgctcccagctctggttcctgacggaccggcgcatccgcgaggactacccgcaggtgcagatcctgcgcgccctccggcagcgctgctccgagcaggacgtgcgcttccgggcggtgcttatggaccagatcgccgtcaccatcgtcggcggccacctcggcttcagttggaatgagccaggcccaaagatttacctttggagaagagagatgaagtcctggcctccagctaaaccagaaggccctcaccactttcccggatgtggtgcttgtacgggtacccacaccctcagtgcagtcagacagtgacatcactgtcctgcgacacctggagaagctgggctgccggttggtcaatcgcccacagagcatcttaaattgcatcaacaaattctggacgttccaagaactggctggacatggggtccccatgccagacaccttctcctatggtgggcatgaagacttttcaaaaatgattgatgaagctgagcccctgggctacccagtcgtggtgaagagcacacgaggccaccggggaaaagctgtttttctggcaagagataaacatcacctctctgacatctgccatctgatccgccacgatgtgccctacctgttccagaagtacgtgaaggagtcccatggaaaggacatccgggtggtggtggtagggggccaggtcataggctctatgcttcgctgctccactgatggacgg

SEQ ID NO: 200484 - DNA, 446 bp, Homo sapiens
ctgattataaatcctaggtaatgcagttcaaaatgcagatgatggaagcagattacgtctgggagatgctgtccaactcggatcccagttttctctcctcagaactatatgtgaaatccacttacagtgagagtacacctgagctagagggcatttaccacttaagggggctaaacttattgtttttcaaacaagaactcgggtgtggaggagcttgtccaaggcaggaaggcaaaaccaggtccctgatgttgtctggggctaagcagaaacagcagccagcaaccaaatccatctccagatggatccatctccacaaccacaggcccctccctattccccatgcaagatgcagcaccagggcatgtccatgtgaaatctcagaacacacagaggcgtccatcagctttcccctctcttgtgtcctgtccacagagcttacccac

SEQ ID NO: 200485 - DNA, 337 bp, Homo sapiens
  misc_feature (32)..(32): n is a, c, g, or t
tacgactcgagttcgtacccaggcatgcagcncggggtatgaaaattccataaacccattagaaaatatcaatactaagcttggcatggtggttctcgcctgtagtcccagctacttgggattacaggtatgagccaccgcacccggcccacatccggctaatttttatatttttagtagagatgaggttttgccatgttggccaggctggtctcgaactcttaacctcaggtaatccactcgcttccaccttccaaagtgctgggattacaacaggcgtgaggcactgtaccctagttactcctaaggcttcctcttgggctttttcaaattagaa

SEQ ID NO: 200486 - DNA, 461 bp, Homo sapiens
aagaatggcaggggttgtcatgtcagtcctccatttgtgatacatttctggccggtcatgaagaaatggcatgggggaacaatacacatgacccccaaaccaagacgcagaggtctctccacatatctgggtaagcaggaatgaatgagaacatcctcacattcatggcctccttgggttttaaaagtacattgagaaacaggatggtacctaatggcccatgaaggtctctcctcggctggctggctttccccatgtgcaacaagagatttaggagattcgtttgtatatttccatcaagaattctgggaatcagacctgaaacttactatttccttatcacttgggtagactggggaaaataatggttatattcagaaagctcatggacccacacatactgatcagtcaatggttccttaacacttaactagtgttaaggaaacaagagaaagggagaa

SEQ ID NO: 200487 - DNA, 287 bp, Homo sapiens
  misc_feature (55)..(55): n is a, c, g, or t
  misc_feature (57)..(57): n is a, c, g, or t
  misc_feature (91)..(91): n is a, c, g, or t
cgtcggtacctccgttctgacatacggataactttattgacataccaaagagaancnatattcactgaaggctgccgaatccgtatttctnagagtaaaggtgtttaattgactctccacacttaaagcactttgtatgaaatatagctacaaatatacataaagaattcagatcacaaaactctctaggacattggctgggcgcggtggcccaagagtctcctacctaaagttttagagtccaccttggggcaaataataaaccagtggcagcggaagtatgtagt

SEQ ID NO: 200488 - DNA, 255 bp, Homo sapiens
atgcttcttgcctgagggaaatctaggaaggcttccaggaggaaggactattcagattgaggagggaaatgagggggctagtaaaaggtgcaaaaacagttgtctaggggtgaggcacactttcagatgtagttgggtcaacttgagcaaatgacttagctattccagacttgatttcatctataaagtggtcacagtatctgccttgcctgtttgttgccatgatcatgaaatcagtgggagcagacctggctt

SEQ ID NO: 200489 - DNA, 246 bp, Homo sapiens
atgcttcttgcctgagggaaatctaggaaggcttccaggaggaaggactattcagattgaggagggaaatgagggggctagtaaaaggtgcaaaaacagttgtctaggggtgaggcacactttcagatgtagttgggtcaacttgagcaaatgacttagctattccagacttgatttcatgagcatggcgaacaaacaggcgaaggcagatagtgtgtgggggttatggcgaggattgggataccg

SEQ ID NO: 200490 - DNA, 218 bp, Homo sapiens
cctattttagacatcagtctgtagagctttttcacagctctcctatgacaacctttcaatcacttatcctcaaagaagtagacatttacctagactctgtgtttgctaaaactacccttggtcctttttattttgatattagctgaagtccttctctaacgtagttagtttatttgacaaatatttgttgacacctactgtgtgcgatggtatttgcc

SEQ ID NO: 200491 - DNA, 618 bp, Homo sapiens
cacagctatacaggaacagtgtatacagagaacagcttaccagacacatctatctcgtgaaacaaatactgctaccataaaagtcacttaagcatccctgttagttctaagcccctgtcgattgcccatttattttaggcaatagtcattcaacaaaattggagcataataaaaagaaactggacctcagcgcaagttgagtgttacacaatttaacctgtaataacaggttctcacttgtatttctccagctctttgctgtaagaagaataaacgttatgtagatataataccagcgtgacagcttgtggttggtggtttctagaagaaataattcagaagcaaaagacacatgaagttatgtggcagttcctcactagggaatttggtctccagggccacttttgaccttaatccatgttggagccatcaatcaaagaattgcttgcatctaataatggtgtaatgccaatactaagccctggaacgaagataggattcatttctcatggattattgagcactctggggtaacctggccctgatctgatgacgctaagatttaaaaacccagatgcatgtgactagaactatcttttctcccatgatgcactgctt

SEQ ID NO: 200492 - DNA, 309 bp, Homo sapiens
ttaaaaaacttagatgctagtaggatagataaagcatgtatgcatttaattatgatatcaaatttaaagtgttaaatgccattaagaagtataggtaaggtacagtgggaattttgagagtaggatgattgctttcagcaccaagcaaaaagagattggcaaaaaatacaacatttcaatagaattataaaggctagtaggatttgacagaagtattaattaggatatgctaagttatgcagcaaaaaaaagaatcccaaatttttagttgattaatataagttgatttctcattcatgtaacgtatca

SEQ ID NO: 200493 - DNA, 338 bp, Homo sapiens
caggagtcatccctcccaagtggtagagggaaaccagaaggaccatgggacaagctctaaaagagtataaataaactctttaaaaaaaaaaaaatcccaattagtgggaaagtaaatggctgatactagtagcaaaaccttaagtctttgaaattgacatactggaaatgagccattattaagattttaaatgaaaataataggatttagacataaaataggaagcaaaatacagtaaacagaaatcgtgtagccaaatatgcatcaaatatgcattcccttcagctacacttttttcctctgaaatacaagttttagaaaatcttagaagaggggtg

SEQ ID NO: 200494 - DNA, 586 bp, Homo sapiens
gcctgaatctcagaggcagagaactgttctaaatgtgactgatgagtatgacttactggatgatggtggtgatgctgtcttcagtcagctgactgaaaaagatgtgaattgccttgaaccatggttaataaaggaaatggatgcttgcctttctgatatatggctacataaagatattgatgcctttgctcaggtctttcatctcattttaactgaaaatgttagtgttgattacagacatagtgaaaccagtgcaacagctctgatggttgctgcaggacgtggctttgcaagtcaagtagaacagttaatcagtatgggagccaatgtccatagtaaagcatcaaatggctggatggcattggattgggctaaacactttgggcagactgaaattgtggatcttctagaatcttacagtgctacactggaatttggaaatctagatgaaagttctctggttcaaacaaatggaagtgacctcagtgctgaagacagagagctcctgaaagcttatcatcatagtttcgatgatgaaaaagtagacttggatttgatcatgcatcttctatacaatatctgccat

SEQ ID NO: 200495 - DNA, 427 bp, Homo sapiens
ttggtgtgagtgtgtgcacgtgtgctcctataccaaatgctaccaaaaaataacttaggcaaaaacataggaaataaaccatctcaggatgatgaattttaagactaagggggtaaggagagagcaatttttcactgaatacctgaaaacaacaattacaattatgggctgccctaaataaaaaatgagcaaatttttcctgccttggctttgaacaaagttaatttaaaaaatacatgcacataaacatactagttttaacaaactcaaaaaatatagaaaagtacacagaaaaagcaagtcaccccttctactgatagtaaaagtggctcctactacacagccctctgtataggcacgtgtgcatcacagtagaaaagtcatgccacatgagccatgtggcatgttctttttttttttttttttt

SEQ ID NO: 200496 - DNA, 412 bp, Homo sapiens
atggtgtagaaggtaccactttttaaagtactacaggattcctgattcaaatatcttataaatcctttagtaaaatgatacacttcttacacaagagcatattctcatattggatttgttttaaacaaggcacacaaactatgacattgtatgtaaaactataagccccatcacatgtaatattttaaatgtcttcatttaaccttaaataagtaaaaaataataaaatgtagggcaattaccaagtgccttaataaaggtcaagctacctatgtaacatctccttcgcatattccttaagatattcttcatgtgctaaaaataccgatggcgggctgtacttcaagacttctttttgggtcgggcgtggtggctcacaaccgtaatcctagcactttgggaggccgaggca

SEQ ID NO: 200497 - DNA, 611 bp, Homo sapiens
tgtgttgtcttaaaaaactgcttacttccttcaaagcagacttgaacgtgttatgtatgttatcataactcctattccactaagagtgtcttccactccagaacatatgatcaaaagataaatccactttataggatgagagaaaattaagtcatagaaacagcaccactattctttgtttaattatatcaatatacattatatctagcatgataagaggtgcatgaatgatataaaatgaactaaatgggaatagtctgtggttcttttagccatcataaagagcttagcttgaagcaatgggtgaatccatcaataggtgcttcatcttggtgcaaaccttaatgcactccagatctacaaatatcaatattaccaacaatgagattggattcattattgtcaggaagacagactgttgatgtagcattggatcaccaaattctaaatccagattactatatggtgataatcacaagagaagatagcctagatgtctccaccatgtaaacaacactaaggttattgtatattacaggaaggagcaacaacagcagccaatgtgtattgcattaaaagaggctttttatatattcagtaatttaatcttt

SEQ ID NO: 200498 - DNA, 286 bp, Homo sapiens
tattgcttcccagacttgccttttcccgtcctgacaataaggaggttgcatcagtttctgatgtcactccagctctaagtatccttttgattctatcttgcttttgttccagttatgtaataactcacgaatgacctgttaaataaccccaaagcaggaaacaagatgggactgaatgatacttggaagcttagggtggcatgaccagcactaactctaaactcaacctcaactcaacttaattttagtgcttattttttatgagaccaagatccatatgtagcct

SEQ ID NO: 200499 - DNA, 561 bp, Homo sapiens
gtcaatgttgctgcagtgggcatgattataccactgcactacagactgggcatcagagcaagacctccagctaaaaaaaaaaaaaaaaaaaaaaaaaagtcaccactccatcttagcaggtaaaaagctagagtaaactgaaaaatcaaaagctcttcttagatccataagagatgggaggtcatagagaaacccccaaattgtggacaccccaggttaatgcagattaatcacaactttatttacgggtagcagaattcttaagtgggaatcagggctggagtgggaaacacctgaccgtgtaatttaccaaatttgctggcaggcttgggtgtgcgacacagtctgtgagataaaaactttatggggaggctcccacacttttggtagttatacctccgggggctctactaggttctcacagtgaatttttgcaacccatcctctcatgcttccaaaaaggggagaggaaaaggaaccatcttgaaatgccctagagcattctgttcttaagaacaaggtcttccctcgggagaaattccttcactggagcctaacctg

SEQ ID NO: 200500 - DNA, 1116 bp, Homo sapiens
ttcaaccttcgccactgtctttgcactgccccataaggcctgaataaggctgatgggtcatgtatggcagggccaccccaacagtctagtaataggtcttgcattgttggacacacttcttgatttagaactatggctttcagtcatggttaggtgtgccccagttggcaaggtaaggagacatttccagttgttacagtgagtttgaagggtgttaatgcatttagttcatggagaccagggttgctgttcaatatcctacaatgcacaggacacttgcccatagcaatgatctgattccaaatgtcaacggtgctgacatcagtaaaccctgctctaagtcaatgctttttttgtatgcatattttaaaagtctcctccagctaaaccattagcttttaatggggtatacatttttctttccaagggatgtttggttatgcctggagacactttcagtttttgcagccagagtttggtgatgtttctggtatctaattgatactaatcctagatgctgctcaacatactactatgcagagtatggctcaccagaacaaagaattatcccattcataatgcctctagaattaagattgagaaaccttggtttagaatacagggagagctagtggtatcctctaagatgctgtctggaagcagctttgaagacaagcagagaccagagactttgaagccatactcacagggtttgatatagtttggatattggtcttctccaaatcttgtgttgaaatttgatccccactcttagaggtgggacttggtgggaggcatttctgtcttgggccagatctctctcatgaatgacttgatgcagtcctccagatgatgcatgagttcttgctctgttatttcccgggagatctggttgttataaataacctggcaccttcctctcctctctctcttgtttcctctctcgccatgtgatctgtgcacacagcagctctccttccccttccaccatgaatggaagttcccttagtccctcatcagaagcagatgctagtaccatgcttcttgtacaccctgcagaactgtgagccaaataaacttcttttcttttctttttattcttctaattagagacag

SEQ ID NO: 200501 - DNA, 424 bp, Homo sapiens
gaacaaggcatcaaaaatgcattttttaacaaatagaaacataatttcattgaatgagcaaaatttggtgcaataaggaagtttataagactttgggtcttctcatatttatatccagtattataagcacatacctcaatttactgcacttcgcttaattgtgccttgtagatattgctttttttttttttttttccaaattgaaggtttgtggcagtcctgtgaccagcaagtttatcagcaccatttttccaacagcaggtgctcacttcatgtctttgtgttaccttttggtaattgttacattttcattatttttatatatctattatggtaatctgtgatcagtgatctttgaagttaatactttaattgtttggggacaccatgaactgcacccgcatagcacacgtgaacttaattg

SEQ ID NO: 200502 - DNA, 734 bp, Homo sapiens
tcatctttgcacactcctggaaatattttatagcacaaattcctagaagtaaatttgatgggtcaaagagtacctacattttttgtttaatagatttttccaaaatacagtcccatgttacttatcatccacagattaggaaaatggcctattggcccctcctggcatttctgtttcttcctggcctgggatggggttttaagcctcccccggaagcagccaaagtggtacagaaggggaagtttctgagcaaataacattgtgccaccgagttcttcctccccaccgtccactcatcctcagcctcaccacaggctgcagcccagagcactaagggaaagtcttccctctcctctctactatttttttttctcctctctactattttttttctcctctctacttaatttaacctctagtcaaaaagtactgggttgggaatgaaagacttaaatgaccaccgtgcccaacctaaatttttttttaattgatataagtgcttctagacactctgaatttttgtgtttatcttgttgcaaactcataacagaatccccagcctggcagttgtccatgggctactctctgagaaatacagatacctcggtgcccactggagccaagcctagcatggagtcacagggtggctgcctgtgctccgagggagctggggacatggcagctatgtaggctgctggcaccctgctggcaccccagccagttgaatgactcat

SEQ ID NO: 200503 - DNA, 450 bp, Homo sapiens
tgcccctgactacggctcccagcctcagcccctgcgcggtgcacacccatgtgctctcacggacacgcatgcgcgccttggagtagggactgcagagtcagtggttcttgaaggggttctgagaccacagaaggagcaatggccttgtgcacaggaaacgactcatgaattatcctgaactgcagatccaaaaaatcacatccagttgtccctccttgatgcttgaggctttgcagggaggagcggcagtcttcagcacatttttacggagcgcttcgttgatgccttgtactcttctctgaaccaatgagcaaagatgtttgcccccagtgccctgtgtctccccttcccataggggcgtcagatcccccactgaaatggtggctttcttttggggatcctctctcccagaagggcatgggccagcattaaaaacggtcaaaaattagg

SEQ ID NO: 200504 - DNA, 425 bp, Homo sapiens
gttattagatataaaacaggaaggagggtgaaatatgactaaggaataagaacaataagagatctgaaaattttagtcaaatatgaaaaagtcattggggttttattttccaactatcttccctgacttttctctggcctgaatgccacttcaggttgataatttactaccaactacagacagccctacctaacttggtttctaaacaagtcgatcttttcttctgtgacatgaggacatttacctgcttagttctttttttttttttttttgagacggagtttcgcctttgctgcccaagctggagtgcaatggcgcgatctcagctcactgcaacccccgcctcccaggttcgagcaattatcctgcctcggcctcccgagtagctgggattacaggcgtgtgccaccacgaccggctaattt

SEQ ID NO: 200505 - DNA, 488 bp, Homo sapiens
gaaaaacacacaggcattaatcgttattaactgccacagacactctttcctggatccaggttcctatttgagtcttgccttggtccacagcctctcacctcatctctgccctctttgtgacccttgacataattagggatttagttggatcagcaatctagtcaaggaagaataaactgtacagcttcagggtttcccctgagctacttatcaattttcccaacctatttatcattacccctggatcatgaacactgcttaagtctattcgttctctaaaccattgcaggacagagtatatattaaaataaatttttcctatctaatacaggttgttcctgaaaacgaaattgctggaataatacttttaatagaattatagtaatagaacaatacttttaaatgtctggggatttaattatttaaagaaatttggttgtaaacatttttaaaaacaatgcttttatcataaaattggaattttataa

SEQ ID NO: 200506 - DNA, 616 bp, Homo sapiens
tcttaaccaggccagtcggttctaccatctccaattgctcccatccagccacaactgcaagactcctaagcctgagctgaacatgctcctatgttctctgcaccctcctatattccagcccaattccaccagcatctcagaagaacagcaaactcttatagtcacagcaatatcttactggccccagcacaattttcaaattggaaactttccaccagtttatctacatcacatcaaaacatgtgggaacgttaaaacacaggcaagttttcaaagtgacaagtgtaggcttccaagagacccaaacaggaatctattcaggacttttttttttctcagtgataaaataaaacaacttatcgatcattgaaaaaagttttttagatctcccagtccctagaaagaacttggtataaactcttcttagccataggccatatacagcctaagtattatccgacagctatggatcaaacttatcagtgatcacttaactgcactctattaaaaacattgatatctgctgagtaatcgagaaggctgatttacatgggctgaaggcctatgacatggacagattttggcagaatatcctggtatcttagtctatttgact

SEQ ID NO: 200507 - DNA, 385 bp, Homo sapiens
tgccagtcaaggacacagtctcccaaacctgcttttctcactctccccaactgttgtccttgaagagaccggggggctacatcatggaagggccctggcccgggagtctggagaccttggttctagtcttgggtctgccaccagctcttggtatgaacatctgtgtgttcatgtctctctgtgcacaggggacgagagtcactgatgtctgtagctgagacggtctctcaagtgagggcctactatgtgccgctcagtaactgggactttaattgctgctcctcattcctcctccctgcccccactcaccgaggtagataggggaagtgaaagtggaattaattgttcatttggagtttcactccaccagctttccatgcatttc

SEQ ID NO: 200508 - DNA, 460 bp, Homo sapiens
attcagcccttttggaaaacaattggatgggacatcccaggactgtagaagtgtttgtatgttcttttctcccgtaactccactcctgggaatgtatctcaaggtggtggtacactacggccgggtgcggtggctcacgcctgtaagcccagcactttgggaggccgaggcaggcagatcacctgaggtcaggagtttgagaccagcctggccaacatggtgaaaccccatttctactaaaactacaaaaattagctgggcgtggtggcggatgcctgtaatcccagctactcgggaggctgcagcggagaatcgcttgaacctgggaagcggaggttgcagtgagctgagatcacgccactgcactccagcctgggtgatagagcgggactccatctcaaaaaaaaataaagatggtatactagataagagggtaaaaaaaccttataagtggtcctta

SEQ ID NO: 200509 - DNA, 229 bp, Homo sapiens
cgggaggcagaggttgcagtgagtcgagatcgcgccactgcactccagcctgggtgacagagcgagactccgtctcaaaagaaaaaaaagaagtgagacgaaacttgctatgaagcagggtgatgagagaagggtgggggaagggcagtgggagcacttggggcttgggctggggtggggacctaagtcctcaaaggtgaatgggagtcagacaggtggagtgggggtg

SEQ ID NO: 200510 - DNA, 187 bp, Homo sapiens
taaactctatccagactcaacagcaaaaaaaaattgcacgaagatgtttatacttttaaaatcgtcttaatagctgccctgctttatttttgcttttatagttaaagagaaaaaaaaaagcttttatttccttaatctctctagagcatgaaacaaagaggaaacattaatgcattctcagctggtg

SEQ ID NO: 200511 - DNA, 4016 bp, Homo sapiens
  misc_feature (1217)..(1217): n is a, c, g, or t
  misc_feature (1369)..(1369): n is a, c, g, or t
  misc_feature (3278)..(3278): n is a, c, g, or t
tgatctctttgttattttgatgtgatgacatcatcctacacaaaacacaacttcaaatcatatgcagcttatccatgcacagttgtaattaccaatacaaaccaaaagagagagcaagaaagagagcgagctagagggtgtctatgacctataataattagcattttcagtaacaacatctgttgctgacaatattggcagtagcacaggaaaaagcaatcattaaaattagctaatgctcagtttaagtgctacacaatgtactgacattttcaatattttcattagttttgcattttctcattccagtaagtatctgttttcaagtttgcatgaatgccttgtattatattaaaaatgtttctcagaccttctctcaaattgatctgggtcttaaagcagtatttccagtgggtcaaagtagcactgatgcaaactcttagaaatatagtatccaacactctcgaattggattctataaatttgatcttacataatttagatactgaattagaaattctccataacctgcaacacacattttcttaaaatctcattgtcttagctttcttgagtttttatcctggaatttctgtttgaggtgtaagtgccaatattaactttaaaaatttagtgaagtgtaagtcaattagaataattttacaggtgacctgtaattccagcattttgggaggccgagatgggtagatcacttgaggtcaagagtttgagaccaacctggccaacatggtgaaaccccatctctactgaaaatacaaaaatagctgggcttggtggtggacacctgtaatcccagctactggagaggctgaggcaggagaatcagcttgaactcaggaggcagaggttgcagtgaggtgagattgcaccactgcattccagcctgggctacagcaagactccatctcaaaaaaaaaaaaaaaaaaaaaaaaaaaagaaaagaaaaaaaggaagtggtcaattctagatctattagaatttagactagactacgtgacagaatggatattgggaatgaaagggggaaagggggaggtatcaaggacaactccctgatcttgaagggtctatttactgagatggggaagaaaaaaaataaattggaggtagaggagggaattagttcagttttaaacatgtggtacctgtaatgccttccacgtaaatagcaatagtcagtcacctataagagggcngggctagagatacaaattagatagcgaccaacacacagatggtatttaaagccatgagaatggctgaggtgtctgtggagagaggggagagagaagagcaaagagacctccaggaccatcactccaaggaactccaacattgagggatcagntagaagacaatgagccagagagccgggaggaaaaacaggagagtgtagtattatggaagccaagaaactcttttcaagaaaggggcaatttactggaacaagtctgtgctgatcgggtcctataagatgtctactaaaaatcattggatttgaccacttagaggcctctgattttagcaagagcagttctatccaacagttgaatgaaagccactttggcatggatagaaaagaatggatggaaggtaaggaagtggaggcagaaattgaaagggtatttgctagagctgtgcttccaacaacatggtagccactagccacttatgactgtttaaatgtattaaaatttagtaaaatttaacatgcatttcctttgtttgcactagtcatatttcaggtgcttacttgccaccggtggtgtgaccaccatgttgggacagcgtagatttagtacatttccatcactgaagaaagcactgttggatagcactgttctagagaatgccagaatgtggtgagaaccatctcaggagagaaaatcccactagcaggcaagggtgggggaaggtaagaattggatccatgcatagggattgcctttctttggatgagagagacactcttcctccaaagtatcaatagaaaagaagatgggtgcagatccagatcttatgttgggaagatgagggagttatcttttggtttattttttttttctcaatgaaacaacaggccagcacattagccaagggtggaaagggaaaagaaccaggcgagatttttgaggaggctgcagatggcatgaataatcctagtaatagggggagagtgagtttaccaaagaagtgccataacattgtggcaggatttagtgcctgtgaatttatagtgattctagtttccctagttttgtgatttttctccagacatactcaactggagagtagtattaaggggctgtcataaggcagccattcttaggttgggttgtgtgtaatggcatatattaatactgctgaattggaacccttagggagatgtaaaactaatggagctcagcatggtgaatccaatccagacatgaattgagaaatgcattatttggtcctacagtaatatatcattatccctttacgtagaaatcattgagattccacctctgaaatactcgtgtatgagactcatcataatcatttggagaatctgtgtggtagattgttgttttctatacttcgtagttggtcttgttcattttagtctcagcagcagactagaatgttaagccaatttgctaaatcttgcctgtcctctgtaaaatgcttaaatccgtttatataatacaaagggatatgttggaatttaatgccttcttatggcatcagtactgaatatttaatcagaacaaaaagagaaacatgttagaattttcaaattacagagttaccgtgtggatgcttcacagaggtacgtgcagttcagtgtgcttatacacccgtatgaacttctcacatttattagctataaaatacttcgaaggtgtattttcttctagtttttatatttaatttatggaatattaagtaggaaaatattagcaactacttggatgcatgctgcacttattttctaagaattagtaaataatgttatcatgtgtgattagttgtgtttaatgctagagatgagatattacgaattagcaactcaccttctaagttcttttccttaccagttaccttaaacatatccatttcccaaatagagaccattttctcatttccagggactttcaggagattaaaaggttaacatttacaatgctctgatttcaagactgcaaggcactatgtacaaaattcgtatgttgtttgagcactttttttaaagcctctatgttcaaaccttttgnaatgaatttagttcctatggaaacttatcgctgctgtagatagtgcccttatccaagagaagaaaataaaatcaattcagagaatgattttataattgtataacatagcttgggaatggacattaggaatatgtgcagttgcgctcttcggctgttatactggttcatattagattgtgtttgaaaacaaccttgcaaatgtcaccatctgtccttcactttgaggccagaataggtaatagtggtttaacagaaatttcagtgggtactctttcttgcaacatcacaagtaataccttgtgaggaggcaggggatatgataaatattttggaagtaaaattagctttggtaggtggaggagagggagaaggaagaatgctgttgactcctgggaaagattggcattttgcaggctattcattcactagaattcgtgtagatgaacacaaaaaggaggcagctgaggcagatagactatttgaaagttaagtaatagtagtgtatgcttgaagtgataacttagcctatggtaaggatatgggaaactgaggaatgttaaaagtgaaaggtattttaaaacaggaactaacaatctcagtgacttcttgaaaataaagaattagccggtgctgtggcttatgccatatcctagtactttgggaggccaagaagggcagatcacttgagcccagaagtttgagaccagcctgggcaacatggtgaaaccccatctcagc

SEQ ID NO: 200512 - DNA, 650 bp, Homo sapiens
tagaaaatagtgtttgtgtgtgtgttaggaatttaaaacacaaatagttatacactatctgcaggatctttgccttaaaattggacagtaatccatatcggtcatgtagacttagttcatttgttttaactgcagcatggcataaatatactttatttagctatccttaaacattattcggtatttagattattgtcaatattttactagaacacagatgctgaaataaactttcctgtatatacctacttacacagtgtatgagtggatgcctttattggtatactgtgagaagtataccgcagtatgggtatactgagaaactactgatacacagggtctctatcttttacattttagtgcatattgactgtcaaactgcttttcagagtgtacatatcacatcacacccaccagcaatgtatgagagctcctggttctttctagtctcacagcaatatcaccaagctgattagtaaaaaaccttttctcctgtgctcctcattaatttgcatgcctctgactgctaggaagattaagaatctttttaacccagtgtttatttgctatctgtatttcctcttttgtgaattcttttcccattttttttaactgagttatcttttttcatatctatttgttggagcttt

SEQ ID NO: 200513 - DNA, 184 bp, Homo sapiens
aaacagagtgaaaaacacaatataaaatttctcaaaaaactgtttaagatgaataaccagccgggtgtggtggctcacgcctgtaatctcagcactttgggaggccgaggcgggcagatcacgaggtcaggagatcgagaccatcctggctaacatggtgaaaccccgtctctactaaaaatac

SEQ ID NO: 200514 - DNA, 340 bp, Homo sapiens
aaaggttaccagagttggtaagagtatttggaaatgagcattctcctgcaatgcattagaagtcagtctagcactgtctaaatgctccatgttaaacctcttgacctggcagttctactagcaggaacctgccccttgcaaatactcccaggtgtgcagagatgaacacagagatgttcatcacagtgctgtctgtaggtgagaaaaactgcagttaacttaaatgttcattatttgggggtggtttcattaattaagatatagcaaaacatggcacattttatagctattaaaaagtgaggtgggtctacttgtgcagatatggaaagatctccaggtg

SEQ ID NO: 200515 - DNA, 109 bp, Homo sapiens
acccagctgctaggactccatggcgcagcatacggcgctgagcttggcctgcagagccctggcctgtcctaagagttggagaccacgggacaagcacagccctgcagca

SEQ ID NO: 200516 - DNA, 714 bp, Homo sapiens
tacaaaaattagccgggcgtggtggtgcgcacttgtagtcccagctactccttctgaggcaggagaatcgcttgaacccaggaggcagaggttgcagtgagctgagatcacgccactgcactccagcctgggcaacagagggaaactccatctcaaaataaataaataaaataataataatgcaggacaattatgtatagcaaacactttcaaaatttaaactccttcaacatttaattcttcagcattatgtatacttttaattgcacatcatgcgccccgaccctgacaccaactagaatgtaagttccattttgtctatttaatttgctgatgtgttcccaagactagaacagagcctggggcatagcaggatcatgagggtcaaacaagataatgcctgtatgtagcctgtggtgggcagcacctggtacagagctcatgatgaaccattatcctcttcctcttacatgtccaccaacaggagaatagaaattatgatatataatattgtaagttggccaggtgcaatggctcatgcctgtaatcccaacactttgagaagctgaggcaggaggattgcttgagcacaggagtttgagaccagcctgggcaacatggtgaaaccccctatctctacaaaaaataaaaaaaattagccaggtctggtggcgcgcgccagcctgaagtgggaggatcaactgaacccgggaa

SEQ ID NO: 200517 - DNA, 500 bp, Homo sapiens
tacaaaaattagccgggcgtggtggtgcgcacttgtagtcccagctactccttctgaggcaggagaatcgcttgaacccaggaggcagaggttgcagtgagctgagatcacgccactgcactccagcctgggcaacagagggaaactccatctcaaaataaataaataaaataataataatgcaggacaattatgtatagcaaacactttcaaaatttaaactccttcaacatttaattcttcagcattatgtatacttttaattgcacatcatgcgccccgaccctgacaccaactagaatgtaagttccattttgtctatttaatttgctgatgtgttcccaagactagaacagagcctggggcatagcaggatcatgagggtcaaacaagataatgcctgtatgtagcctgtggtgggcagcacctggtacagagctcatgatgaaccattatcctctttgggtgaatctgtcattttgtccctttcgtgaaccacc

SEQ ID NO: 200518 - DNA, 608 bp, Homo sapiens
attttcattctttgttcaaggataaaggcgtgggaagggctccgggctgcccttcgtcaaaaacagctgtgcttttcatctctcatatgttatgtattgaagttctacaagatagtttgcttgaagaaaaccaaacttctaaattcagacttctaaacttccacttttaaaattgttcaaaaaccactaaattgctcatttctaagtttaagcccccttttagctctcaggtgatctaaggcaagcactgaaggatgggtaaaatttggtaggctgaaatgggagagaaaatgcattatatttggaaataataaagattagagatgaattgtgttcaagattagagaagagaaaactagaaatttaggaggccatgataatagcctacataatagataatgatgacccaaaccagggttgttaccatttataaagaagataaattcaaataacgatgggatgctaggcaatgaaaacagaatatatgaaataaaggagatggactagacaaaggtaactccatgactttgagctgggtgactggaggtaccattactacaagtagagaagtcaagaatggaatatgatttggctgaaaagatttgaag

SEQ ID NO: 200519 - DNA, 417 bp, Homo sapiens
ttctagattactggattgcctactttttgatgactttgtatccttgttcgcttaaaagatgatgaaaagtcacaattattatttttggattaattagtcacagcttatagaccaagtccatgtccaatggtacagagcagcctgctacctatttttgcacataaagttgtttttttgttttaggaacttggctgtaaagtgcatataaaggtgcgttggaacacagtcacagttacaagttgactggctgctctggcacatagctgagtagttgagacagacagagcacaaagactaaaatctgtgctatctggcccattctagaaagtatgctgatccctagtttagagccacaatgaattacccagattttgtgcttagttcatcagatatgattaaattctcagtaaatgaatt

SEQ ID NO: 200520 - DNA, 758 bp, Homo sapiens
aatgaatttggcttttaggtggaatagatccccttggggctagaatggatgccaagagctcacttaggaggctgttgccacgatccaggtgtcagccgctgggagcttgggttacgaaggaacaatagagacggagctaattgcatgttcggacgtctgtttaggaggagaggatttggtgacagattggctgtaaggatgtgagaagggaggtgaccaagttaagtagaaatggagctggtttgaagtggccgatgatgggttcactttgaaatggcccagtgctgtggctcacatctgtaatcccagcactttggaagctgaggcagtccaggagtttgagatcagcctgggcagcatagtgagaccccatctctacaaaagataaacatttgctgtgtgtggtggcatgcccctgtggtccctgctatttgggaggctgaggcagaaggatcatttgagccagggaggttgaggctgaagtgagcagtgactgtgccactgctttcctgcctgggtgacagagcgagaacctgtctttaaaaaaacgaaagagagaaaacgttgcattggcgatggctgaggccttggaatgggactgtgaagcgggcaggtgcctgagggcccagaacagatcgctgggaggtctagttggagacacactgttgtacatctgcatgtggctgttatttcaagctgtgggaatggatgacatcatcagtaaggagatgacagaggactctgccttatggaactcc

SEQ ID NO: 200521 - DNA, 510 bp, Homo sapiens
tctcattgttcaattcccacctatgagtgagaacatgtggtgtttgagatagttattcttatttgatgggagaaagctgactacacagggattcttcactaggaaattggcccccactgtcactttggggaagctgagacttcagtgaccaaatctgaacagtcacaatgaaacgggtgctcacttttcctggaagaataatcccagaatctccaagcccagaattttaaacccacacacacaacccgtgcatggacgtgtgagcacacacacccatcccccacttaaaatcccttttacttgatgtggtgttgctgatagaagagcttctttcttcttttttttctaaccttaagcaacttgtacttttataaagtcatgcagattcaaacaaataaaaatcaataggcagacagaagcgaaccataaaagagagaaccggttttcatatatgacagcattagaccacaaatgagattagcaatctttttcacttgtactattcaatgc

SEQ ID NO: 200522 - DNA, 182 bp, Homo sapiens
tgaggcagccgggaaacaccattggccaatgccacgccttgacttgcagtgattctccaaccagacagatcgtcagagtccccatgaagatttgcagccctgctccaactcccgcatcagcaccgctcaggacaagcctgctggtggggctgttttacaagctccccagccaactcatactg

SEQ ID NO: 200523 - DNA, 270 bp, Homo sapiens
aaactgtcgtgttcctataaccatagcttattgggtcagaggtgggcagctaatccaacctggggcaatcaaaatctcattttctagaaatttgcaattagacaagagataccagcttttctctaagtgtaaagcttggaagctgtcaaccaattttcccaccagagggacagaagtgaaagatgctggtctgcagaaagagagaaaaaatgcagactttcagagaagaacaaaggtgagaaatagagtcttcattgtgttcaattccca

SEQ ID NO: 200524 - DNA, 434 bp, Homo sapiens
tacatttagcttaatcacgcattatggaattctatagatttttatgacacctttaccaattaactggcaattttaaataatggaaatataaagtggaaggataataatgagtaagagtgaattcaggccaggtgtggtggctcacacctgtaatcccagcactttgggaagcagaggtgggtggatcacctgaggtcaggagtttgagagcaggctggccaacatagtgaaaccctgtctctattaaaaacacaaaaaaattagccaggtatggtggctcacgcctgtagtcccaggtactcgggagggtgaggcaggagaaccacttgaaccaggaggcagaggttgcagtgagccaagattgcgccactgcacgccagcctggatgacagagcaagactccatctcgataaataaataaataaagtgaattc

SEQ ID NO: 200525 - DNA, 379 bp, Homo sapiens
ccagcctgggtgacagagtgagatcttgcctctaaataataataataattataataattagtgctccattaagataacatttcccaggtttacttgattattttgcttaataaacttttttataccaataggtaaaaccattaaaatatctgaaaaataaaaccatttccatgccctcttcattcactcaaacaattcttggcacgaccatgcactggtgtataagcctcaccaccaagcagttcttaagtgccaactctgtgttcagaggtaaaatgagtaccacaggtaggatacagatgtagtctagacaggacaccaggtttctattccagcaactaagaattcactttttttccatccccatcttcacctccac

SEQ ID NO: 200526 - DNA, 601 bp, Homo sapiens
tgtgttagtagagatggggtttcatcatgttccccaggctggtcttgaattctgtgactccggtaatccacctgcctcaacttcccaaagtactgggattacaggtgtgagccactgcacccggccaaatccagtgtgtatttttcacacatcttaattcagtagctaaatcctaaaccattaaaactaaatggagtcctactagaacactcaagttgtgtttaatgggaaaacattttacactgtttccatttaaaagtaaaattgaaattgattaaataaaattaaaagttaaacttctcagtcatactagccacatttcaagtgctcaatagttaccaatggctggtggctactgtattggatagcagagacatagaatcatccccatcatcagtgaaagctttattggacaataaatctttaaacctttcattgcagaagattggacatattttgttatttttaaaatttaggatctgcataacaacattttagtcagcaatggaccacatataatgacagtagtcctttaagattatgccaaaattttgctgtacctttgcatgtttaggtatacttagatatacaaatactgacc

SEQ ID NO: 200527 - DNA, 430 bp, Homo sapiens
  misc_feature (337)..(337): n is a, c, g, or t
  misc_feature (340)..(340): n is a, c, g, or t
ccaaggacagaaagaaaataaaaatcaaccatgcattctatattcagtgaaactctcctttaaaaatgaagaggaaataaagatattgtcagatgaaggaaaaaaaaagaagattgttgctatccttcaagggaggaaattccatgttttggctggaatcagagtttaaggagtgggaggaactggcagggaaggaaaggagactgaagtgcactggagcctcctcccttcttgtctctagggtgtggtagaagacacttggcagtgggatggcattcacagtaagaccgaggctcagggtcacatagtagaggctgcacggccgggggaaggtgtngtngggaaaaggagatccgaatgtgtttatgcccagaagaaaactgtggagagagattgttgaagatgcaagagagacatgagatgttggaag

SEQ ID NO: 200528 - DNA, 562 bp, Homo sapiens
aaatgaggaaaccgaggctaagaatgagtaagtcattggccctcacccttgaataccatacactgagtaagtggcaggcaggggcctggatggtgatgaaattattccccttcatccctgaagatcacgcactgagtaggtgcaggccggggcctggatggtgatgaaattattccccttcatccctgaagatcacacactgagtaggtgcaggcaggggcctggatggtgatgaaataattattccccttcatccctgaagatcacgcactgagtaggtgccggccggggcctggatggtgatgaaattattccccttcatccctgaagatcacgcactgagtaggtgccggccggggcctggatggtgatgaaattattccccttcatccctgaagatcacgcactgagtaggtgcaggccggggcctggatggaagcctttcaggctttacagttagtcctttttcttcctctgcgccctgctccctccctggacagtacagcgtgtctgtgatcccagttgttcacgctggaatcctcagagccagttttggtgttat

SEQ ID NO: 200529 - DNA, 353 bp, Homo sapiens
  misc_feature (12)..(12): n is a, c, g, or t
aaaaaagaaaanaacgtaaaaccaaaaattagccaggtgtggtggtttgcgcctgtaatcccagccactcgggcggccggggcctggatggtgatgaaattattccccttcatccctgaagatcacgcactgagtaggtgccggccggggcctggatggtgatgaaattattccccttcatccctgaagatcacgcactgagtaggtgcaggccggggcctggatggaagcctttcaggctttacagttagtcctttttcttcctctgcgccctgctccctccctggacagtacagcgtgtctgtgatcccagttgttcacgctggaatcctcagagccagttttggtgttat

SEQ ID NO: 200530 - DNA, 200 bp, Homo sapiens
aaacaacaatagctatgacgacatgcggctcatacaactcaccttggaaagactgaagtgctgtatgtacaaaacacaagagtcagagttggctgaatcacctgttcccaaggtttaagaggtcagactttcaaagcctaatttccttctcccagagcctaaacattaccccaagttacatttgatgttcctctaagtgg

SEQ ID NO: 200531 - DNA, 342 bp, Homo sapiens
ctcatctgttttttgttaattcttttctgttttcttttgggctaatgaatgttttttagcattgcattttaattcctctattgaggattttcaaaaaatatatcaccttttgcaacagcatggttccattcacttgctttcatcctttgtgctgttgctttcatgtatattacattatgagcctgcgaatacactgtgttaggccattcttgcatcgctatgcaggaataactgagactgggtaatttataagaaaagaggtttaattgaatcatggttctgcagactacacaggaaacatagtgccagcatctgcttctgaggaggtctcaggaagctttt

SEQ ID NO: 200532 - DNA, 470 bp, Homo sapiens
gtgaactgagatcgtgccattgcactccagcctgggtgacagatcaaggatctgtctcaaaaaaaaaaaaaaaaaaaaagattatatttgtcgttgggggaaaaagggaagcaaatgtagagcaggggaaaggaggtcaggagttttgaaaactaagatgtcgtgttaacttctagggtgagagaaagccttgttaaagcctgaattccaattctgtctctgcagcttccaagttgtttgaatctggtcatgtgaaaacctatttaagccttggtttccacatctgaagaatggaggcagtagtatgaaattcatagctatcaattattgagtgcttcatatgtgatagtgctgagcactttgtatacatgatctcattcttaataagaacccagtgcatacttcttgttcaccaggtctgaagaaaaatataaaaaacagtgaagtgggtactgttactacccccattt

SEQ ID NO: 200533 - DNA, 125 bp, Homo sapiens
ccttggctctgcctcttcgtcgtgtcctccccactgacccccggctaccactggtcttttcactgtctccgtaagtttttcctttttcagaacgccatatagttggaatcataaagtatatatag

SEQ ID NO: 200534 - DNA, 251 bp, Homo sapiens
gcagtatgtggtcaggtagaactgcatgatttttcttgagcatgcatttgacaaagcctgttcctgtcccttctagttctagtgcagtgtggttttacatcctgtaagaattattttgtatgcttcctaatttaacttcatccttttaatatcttcttttgtcaggccagacttactgttttgatgtttaattctatttctcaagtagccatccatccaatccaatttgatgcctacagcaggtttaaaga

SEQ ID NO: 200535 - DNA, 612 bp, Homo sapiens
ttaccacctatatgttgcttactccaagtctggatcttcaataactcaactccatccattttatggcacctctagctgaatgttccacagttcctttgaacccagcgtgtccaacctaaactcattgtctgcccctatgatctgggatacttctcatttgtcccattgcagatggccaggccaccattcaagccctagtcacccagaatggagacccgggctccccccttcttctcatcccccatttctaactactttagctggttttattttcccccatattcccaccactaatgttctgattcagaccaaactcctaacaggtctcatctgtctcattttctggttctcaaatatgccctttcagggtctctagagtggtcagtgtcaaataggaccctgaccctgtcactgtcttcaacctcacattcgttgggggcttttcctcacctacggcatagggctcttgcccttcagtaaggcatgtgcagctctcactgctcctgcctcatattttccaatacagaaaacctcgggtgtttatagttctctgcacctattctacatgtgagcctctacccactttttactcccaataccccaattttggct

SEQ ID NO: 200536 - DNA, 1086 bp, Homo sapiens
tgaagaggaagaaaggtcagagataaggctcctgccataatccaggtgagggttaatggatcagataagtggtaaatcacatgggtctggattcaggattcactttttgtaaagagacagctagggtttctttttttttttttaacgtggaatttcagtcttgttgcccaggctggagtgcgagggcgcgatcttgactcagtgcaagctccgcctcctgggttcacgccattcttctgcctcagcctcccgagtagctgggattacaggtgccagccactatgcccagctaatttttttgtgtttttagtagagacggggtttcaccatgttggtcaggctggtcttgaattgctgacctcgtgatctgtctaccttggcctcccaaagtgctaggattaccggcatgagccaccgtgcccggcctatatttttaataatgaaatcagaactaggtttgtaaacagggaaagaacaaataatcataaaagttttatattctggatttggaagttggttgatttaagagtaatgagaataaataatatcccctccccctttagttctcaaggttttccacttagtttaagtagttttattagctatagtagagtaactcagcattttgaaatatttgtataatttgaaaagtctctgaaagaacactgtgattcgggtatagcattgcaagtttgaggggtttcaacagatttcttcatgtgtgtttaattccatgatgatttaaaaaaaaacccaagaaataaaacctctggtcacttaaccagcattttattttatttatttttattttattttattttttttgagacggagtcttgctctgtcacccaggctggagtgcagtggcgtgatctcagctcactgcaagctccgcctcctgggttcaagcgattctcctgcctcagcctcccaagaagctgggactacaggcgcccgccaccacacctggctaattttttttttttttttttgtatttttagcagacatggggtttcactgtgtggtagccaggatggtctcgatctcctgacctcctgatgcacctgcctcggcctcccaaaatg

SEQ ID NO: 200537 - DNA, 469 bp, Homo sapiens
aggtcagttagaggacaagtaaaatcaaaatgtgcatgttctctacaggggaatttccctactgaagagagctttgcttgaatggctgaaatacagtgtaaatgctggggcttatcgtgttgacaatatgcagtcagcatgcaattgctgtggttgctgcatcccgaggacatcgtcactttcttgactacctagcctgcctcaatagtacttgtcttgatttattctaaattatcaaccctgagactcagatttagctgttatgtcaacaatgtcaacagtggaaaagtcaaaatttttaaatcaaacatatttgagcttgttgggtcactagctgtgtatccaagagaaattatttgacatccctggagcttcaatcttcattattaatataaaacactatttcccctaaggctactttaattcatgaatgatagctataatacttgtctaagtattaaatattaaa

SEQ ID NO: 200538 - DNA, 522 bp, Homo sapiens
actctcctacgaacagactaattatgagtaatgagatggaatttgcaaaaaaaagtctcccatcaaaagcaaaaacaaaaaaagggcccagctaagacctcagaagcaccatcaaaaacaaaaaatagacaaatggctgggtgtggtggtcctgtgtgattagtctagggagactgggcagggagaacagtaagtttttcaccatgggtgatccaaaacttttggttgtaaaatcccatagatacttactgctgctcttatcttcactgattatctggacagctttaagaacaagtagtctagtgaagcagggcagataccacccattcccagcaatctcttttgtttgcaatttcaattcattttccaaattgtggatagttttatgaatttctttgagaaaaagttgaaattatttcataatgaagacgagtcagagagaaaaggattagcctagcatttgtcctctttatataaaggacttcttatagcctgattcctaatgcagagttcaggtaggag

SEQ ID NO: 200539 - DNA, 621 bp, Homo sapiens
ttagtgtactaaattgatgtacttaatgtcctaagctatacattttaaatagttaagatggtaattttttgttgtgtatgtgtgtgagtgggcccagaaagtgttaagccaaccatttgacaccgtcttggaattagcccgcttccttgtaaaaagtcactatataggcaccaagtcaatggcagctctaactgtaatggcagcagcaccagcaggaatgaaaggaattacccagccttctgcttttatacctacagctgaaagtaattcctttcagcctcaggtgaagactttgccatctccaattgatgctaaacagcagttgcaacggaaaatccagaagaagcagcaagaacagaaactacaatcccctttgccaggagaatctgcagcaaaaaagtcagaaagtgctacaagcaatggagtgactaatcttcctaatggaaatccttcaatcctttctcctcaacctattggtatcgttgtggcagctgtccctagtcccattccggtccagcggactaggcaattggtaacttcaccgagtccaatgagttcttctgacggcaaagttcttcccctcaatgtacaggtggtcactcagcacatgcagtctgtgaa

SEQ ID NO: 200540 - DNA, 614 bp, Homo sapiens
ttggaaggagctgaaccttctgggcagcttcaaaatattgatgaagaagttatctcttctgcttgccgtcttgtgtgtgagtgggcccagaaagtgttaagccaaccatttgacaccgtcttggaattagcccgcttccttgtaaaaagtcactatataggcaccaagtcaatggcagctctaactgtaatggcagcagcaccagcaggaatgaaaggaattacccagccttctgcttttatacctacagctgaaagtaattcctttcagcctcaggtgaagactttgccatctccaattgatgctaaacagcagttgcaacggaaaatccagaagaagcagcaagaacagaaactacaatcccctttgccaggagaatctgcagcaaaaaagtcagaaagtgctacaagcaatggagtgactaatcttcctaatggaaatccttcaatcctttctcctcaacctattggtatcgttgtggcagctgtccctagtcccattccggtccagcggactaggcaattggtaacttcaccgagtccaatgagttcttctgacggcaaagttcttcccctcaatgtacaggtggtcactcagcacatgcagtctgtgaa

SEQ ID NO: 200541 - DNA, 470 bp, Homo sapiens
tggaaaaagcaccatttgattggttaaaagccatcatagaagtattcactctgatcatagattctatactgaactggcagctcagtatagaatttgtctcccactgttatcagcaggtttcctagaacctgaaattagggtgctgagagtcaagtcagttgggtttagctcctgtcagaatcacagttccttgttctattgtagaccagaagtaattcgtacatcgggctggactgtgtctaaaccagcacagatatgaggaattttttctgttttaactatccccagaggaggaactgtaactaaccctttcaggagatcttttctctcaagtctaaatcctttttgctattaaggaaaaatattttcagaccagactttgaggctcatgcctataatcccagcactttgaaacttgaggccaggagtttgagactagactgggtaacatgatgagacactgtctctac

SEQ ID NO: 200542 - DNA, 689 bp, Homo sapiens
aataactcagtcttacattccctgctgtgctgttgtcttcttaggaatatgacactcaataacttagtgcatggaatctagcacttataaaatatttttgcaaaataacctcttatttataaaaacaattgatgtcaattaagttggtagacctcaaagatttttttttctttagccttacatctaggctataaacgtaagaaatgagggacaactttgtttttggtggcttacctgctaattccctttccttttatttccttcaattctaattaaatggtttataaacagtagtgtgctggtaagttaactcttgaaaacaaaaattagaaaacagcctggatttgtagctttctcacatttctgaggtgtaaatagtcccacaatggctgacttcaagccattactgatggcttcataatgtggtattactgaaaagggagttgggaagagaaatgtacaatctgctctcccgagaaaggttttcatttttatactgtcctccctttcacacgctcagtcatcaatgcttgtcttttattcttgtaaataaattttacagttattccttttattccaagcttatcattactgccctagtttaaactttgaccatcttttgctgttattattttaataacatttcaaatactgagtataaattcggttcagtgtttgggtgatgggcg

SEQ ID NO: 200543 - DNA, 496 bp, Homo sapiens
ctgtttttaccttcattgaagccgtcacctcatcatcttaaaataagctgacatatagatttatcatgtgctggaggagattccagggaatcaggaaaatcttcggtaattggtccattctgattctccatgttatacccctcttgccccttcctattccttgaaagctggctattccattcagatgggacactcatcccctaaggaaagctgcataaaaggaatttaattacccttttgggaaacataatacatataactagtaatacataaagctaataagaaagtgaaataataaaaaggaaatacaatagaagaagtccacctccctctgggccctcatttcctttctcataggtaaccactattaccagtttctagactacccttccaaagataatttctgcatatacaagcttatgcatgtgggcatatgtgtattttttaaacctaagtgtcagcatgctgtatactaacttcatacattgctctttac

SEQ ID NO: 200544 - DNA, 360 bp, Homo sapiens
tatcatgttacggtttgtggtgaataggtcactacgcagtggaacgtatggtttattagtaaacactgacaatgagatgaggctgttcctgggggtgtcacagtagattgaaggctggaaaagataggaaaataaggtgggtattcagagagagaagataatgaatagggagtgtcagaatgccagcatcatttgcctcaaatgccacttgttacgtgcttccactcttttattctctctgaggacatggtcaaagtgtcagtgtgaataaggtagttaacttaaaaggtgtattagggctgggcatggtggctcaagcctgtaatcccagcactttgggaggctcaggtaggcagatca

SEQ ID NO: 200545 - DNA, 452 bp, Homo sapiens
tgatggcaaaggaggaacaagatgagaagcagatcatgggaatgagagtgctaaagatacttgtttatttgtatagaggaacaggagctagaagttgttatgatagaggagaaaaaactttgagctcgggatcagacagatctgaatccactctgggttgaaattcttcaacccagaaattctctcatctcttaattaggaatcaggaacacccacttcagtgctgtgaagacttaactaaaccaagcctgtgtttaactctggcccatagtaaatgatcaaaaacttttattcttttccttctaacttcagcatagagactttaacaaagttgtgggtagaggaggaggtgataaagaaacatacatagaaaactattaagagaaagcaagtaacaaatttcatttgagaaaaccattccagtactagggcaaaaaatagagaagtctgca

SEQ ID NO: 200546 - DNA, 153 bp, Homo sapiens
gctcttcacacgtcctcccctcccaagctctcaaatccacctgaccaggctttctccctgctctaccaaacctgacctgaagatcgacctcagggtcacccacacgttcccacttttttttgttttgttttgttttttttttgagacagaatc

SEQ ID NO: 200547 - DNA, 771 bp, Homo sapiens
agacaacatctctaaataaataaataaatataatgtaaggcaaggccttttcccttatatctattttagggtttacccttgtgtatacagaaaaattgttccctgtccagcttattatgggctggatagcaggcagaactcctcagtttgggttagcattgcattaacagaactgccacatctttctggataatcttcctttgtgcataagctccaggctcaccttctctgcctcacagctgtgcgctggtttcccttagctttcttgggttctggatggatactggccttctgggtgagaagggggttctttggcaaaaggtgtttttgacataatttaggaccttcttaagttctacagcagacctaaatttcttcccccaagttctttgtctatatagagtactcagcactcattacccattctcagttctgaaggaaatcttatggagcagttgtagtatttatagggtaagcagagtgcccagtttccatgccccaccccaaaccatttagatttcagtcatgtatgtcaagggaggagtgagtacatttttgtggtcagctgcctcttcttttccctaacattctcactttttcatctttcctgctttcttgaggtcatttatctattgaataggatgtctattgaaaggaaaaacctcccctaatcgcctttaaactaatatttcttactgggcatggtggatcacctgaggttgacagtttgagaccagcctggccaacatggagaagccccatctctactaa

SEQ ID NO: 200548 - DNA, 174 bp, Homo sapiens
caaaccaggctgtccccgaggctctgattcacagctatttaccaacaccctgaatgtgttatctgaaacagcaatcaggagagaaggctacacgaaaatctagacaggtcgcaccttcttcaacgttttgaattgcaaagtaagaggtgacaccagcccagggaggtgttgtga

SEQ ID NO: 200549 - DNA, 398 bp, Homo sapiens
ttccttcaacttcagattgctatctaatgaacacaatagatttccataacatattttaatatcagtaagttactactctaacttccctattcctatgaacaatgaaggtttctagtttgcacaactggatttgataaagccattctctccacatttatcttcagattcaattggtccccaagtcctcacttctaaatcatcagaacacctagcacctacctttttctctacctacaccttagcttttatcttccttatacttgatccactgcttttgacaggtcttcccatcctcagcctttccctcaaaagtgtcaccatttgtcttttaaaggtacacttctgaatattactttaaaatgtgaagcaataaagctatcttacttttgggggaaaaa

SEQ ID NO: 200550 - DNA, 277 bp, Homo sapiens
gctaaacatactaacctttggggaaaggtatgtccttcttgagggagttttcgtataaacaaaacttttttaaaaagtgaaaacagcataggggatggagtaatcagaggaaaaggaacattatgaaattaggcagaggttggtgaccgacttcatgaggtttttgtttgctggatagagctgggctaaatgtttgtctcacagccttttaggcattgaaaataggtggcctgactgatttaaacattcttttttatctaggagaaacagttatatt

SEQ ID NO: 200551 - DNA, 662 bp, Homo sapiens
aaaagtggtaaagcagtgctttaatggtcaaaagaataaaagaatttgcaattaagattttcgcctacttcaggaatatgcctcagaaacacacacaggcactgactctccgctgtcatgttttttacccagtccgcatgaacattttcaaaggtctggaaggggaaaagtatttcttctctaaccttcattgcctcaacagctgaaactcatcagcaggtggggtagataggtgtttaaactctgtctgagctgagcagaataaataggcagcctggctttaaaaatacaaacagttaaatttatatcaattacgttagagtctgtaatttactgcagatccaaggaggagaatgaaatcaagactggattgaggagggatgtcaacagttgaatcagagtccatccacagaaatgttctcttataagaaaatatgtttcttgctgcccacggatctcccaccacctccagcaccctgccaaaaacaaaagtccctgcatagacatggctgagtcagacacacagccatcctcttccagccatcaaacactgatctgctcaccttttctccaacacacaaatgctaatcatcaactcggtcatgttctttccttttcttttttaaattcttgccaaggccgggcgcagtgactcatgcctg

SEQ ID NO: 200552 - DNA, 428 bp, Homo sapiens
ttaagtggggtggtggtggggggaggggagaagtttgaggaaataaacctttctagtttgaatgaacaaatgaacgaatgtgtgtataatcaactctcgataaaatctggttggtaaatgagcaaatctggaggttgtcagagtatatatctttttttccctgatactgcttttactcactcttccttttactgtcaactgatttttccattactgtccattgatttttgatgataaaattttgtctttcaactcaacactctaatgagagaaaggtaaacctgggtaggggctggtaggagtggtgaggcttggtcaaattgtggctttcttttgacatttgattgagagttgattgtaaggtgtgcattttaatggacttctttattttccaaataccgtttctgtaaacctctctgaccttgatg

SEQ ID NO: 200553 - DNA, 379 bp, Homo sapiens
tcttttttgtttgtacaatgagaatttattcatgtgtttcgtgtgttattttttaaaaagtgtgttgtccttgcctttctgggggttattttagtgaaggatttatttagctgcagggttggtgccaaaatgggtgataaagactagccagccagaaaaggtgggcattatactgctgagaaaggaactaggagcttcagtcaggtctttgggtctgagaggtgacttgctgaaattaatattaaatttaaattaatattaaatattaaatttaagaagagtaacccaaaggcagtatgtgagtataacttggagatcccagaaagaaggaaataggttggaggatctagtgctccaagaggggcttcctgggtcgagt

SEQ ID NO: 200554 - DNA, 705 bp, Homo sapiens
caggatcttgccatgttgcccaggctggcctggaactcctgggctcaagtgtttgttctgcttcagccgccagagtagctgggattataggcatgcgctgctgcacccagctaagagtacagattttggaaccagacttaaatttatttcttctctgtgacttactagctttttaacctcagttttatctgtaaaaaggtgatatgaagactgaaggagttaatacatataaagtatatagaatagtgtcttgtcatagaaaagtagcgtttgctcaaccattattgcactcatcaaacctaagaaggccaggcacagtggctcacacctgtaatcccagcactttgggaggccaaagtgggtggatcacctgaggtcaggagttcaagaccagcctgaccaacatggtgaaaccccatccctactaaaaattagccaggtgtggtggcacgcacctgtagtcccagctacttgggaggctgagacaggagaatcacttgaatctgagaggttggggttgcagtgagccaagattgcatcattgcactccagcctggatggcagagtgagactctgtctcaaaacaacaacagcaacaacaaaaaaccctaagatgccaccagttataagactcctgatttcagagatgctaaaaggtgaaaaaaaagaattgatgaggctgggtgcggtggctcacgcctgtaa

SEQ ID NO: 200555 - DNA, 195 bp, Homo sapiens
actttttgcctttgctgtgaactagtgttacacaaatgaggccccatgctttatgttaccctgcaacacagttactgttgaaataaggaaggtgtgtggaaatgtgaagcaagtgtgctgtgacaaacatgtcgcatgtgtgatataagagactgggtgccgttgagtcacaaattatggttggtgagaggcagt

SEQ ID NO: 200556 - DNA, 316 bp, Homo sapiens
cagctttcaggcagcatttggtgttcttttgaagtgttttggtcacttccttggcttcttagttttccttctgcctttctgactctttcagcctcgcatcctttgcagtcgcctccttctctaacctgaacatcctcaaggctttatttggacttttctccttccttgttcctcttttttctctccttatgctacatcatctgtagtccaatgactcccgaaatttcgtcttctacccacactcctctgagttctgggtatccaatgcttgcttgacatttttgttttatgtctcaaagataacccaagcttgcaa

SEQ ID NO: 200557 - DNA, 375 bp, Homo sapiens
ctagcataaattctgtaaaccaacctgatcggaaaaatgttttctctttgctttgaggaagttgcaccttttctgctttttaaagtcagttgtgaactttggaggtaaggtttatcttatcctatatgcttgcctgtgtcctgaggagcataacctcttatctgaactctccaggatagctattgatttcatacacccacatactctccctttccccttttgcccactttttctcttttcttcttcaattgccctttcctttttaaactttttttcttacacctaattgtcagtttaaggatctctatttggccttgcagttaacagtccagcatttcttttccaagtgtgaccccactttctgccccctgatta

SEQ ID NO: 200558 - DNA, 514 bp, Homo sapiens
aaggaattaactgtgttgcaaatggccagtaacagacaagaagttggttgagggggtttagcaactgtgcaaaaaaaacagctggtttggacagattctacccctcccctgcaaactcaaacacactgcacctaagtgaataggagcttaaggatgaggcaagaataactgcttgtcatataagcacaaattttgagagtgactaccaaaatactgaatacgagatagaaatataacaatctatcattcacagtccacttggcaagaaagtacaaggacgaggaaaaccaaatcactcagccaaatgaggaagggaggctaggaggtgacaatcagctagtctgactgtgaagcaaaagggaaaggcacaaccacagaatgaaggtcaaacagggaaagactgtgaatacaaggctaaggagtcagactgctagaagtagttctatgtgccgtgtagagttctatctaagccgaaagacatgttcgaagaggtatttcaagaagacaaaaattc

SEQ ID NO: 200559 - DNA, 286 bp, Homo sapiens
atttgcaagccacatgggaaatataattctcataactctcttgaagaaagcattactgatttagttagtggtagagagttgctgattccttgatttattatactaatttacagtatttttgtttttcagtagtacatgttatttccagactgctttgtagaatcttgtttctatattctgcagcacgcatcacctgatgtgagttcaaaggtttgactatgtagccctaagatatattacaatcaagtaagtggtatcttaattctataaagcacgtttatcccaa

SEQ ID NO: 200560 - DNA, 499 bp, Homo sapiens
cacagccatcgtgtgaggtatatatgatcattggccttaatttaccaatgaaaaaatagaggccgcagctctgctttaagccagctagtggcagagctcagataagaacctaggcagcctgctccgtggctcgtgcttttagccactaggctttgctgtgtaaatatgacacaaactgataaacaagagggcaaaaagaaagcgttgcaggctgggcgtggtggctcatgcctgtaatcccagcactttgggaggccaaggtgggcggagaatcacttgagctcaggagttctagaccagcctggccaacatggtgaaaccccgtctctactaaaaaaatacaaaaaattatccaggtgtggtggctcatgcctgaagtcccagcttcttgggaggctgaggcagcataattgcttgaacctgggaggtggggggttgcagtgagcctagatagtgccactacactccagcctgggtgacagagtgagactctatctca

SEQ ID NO: 200561 - DNA, 493 bp, Homo sapiens
ccaggatatatgaagtcattatgactaaaaaccacgtattatgtgcatcatattcttaattttattttaataattaattagtcttcctcatcatcccacaagtatatcacagaaataaatacagtctcctctcagctctcattatttttaataatgatctccttggtactaaagaagttgaagattacaactcagaaatgcaaaatgttgggccaggcgcagtggcttacctctgtaatcccaggactttgagaggccgtggcagaataatcacttgagcccaggagtttgagaccagcctgggcaacatggcaaaacaccatctctacaaaaaatacaaaaagtagccaggcatggtggtgggcgcctgtagtcccagctactcaggagcctgaggtgggagaatcacctgagactgcaaggtcgaggctgctgtgagctgtgattgtgccactgcactccagcctgggtgacagagtgagacccatctcaa

SEQ ID NO: 200562 - DNA, 1025 bp, Homo sapiens
ggtgctgcccaggatcaggaggctgagacgtgatctggaagtgagtgcccatccatacaccttccccagctttggggccacagagggacagaaaccgcaggcaggctggcctgggaatgaacctacaccagcctgaagtcagaagagcctctaggagcctccagcctggactctttttacagatggggaaactgagtcccagagagggagcaatgaaggatgtctaaggtcatcagcaacgtaaagccaacagcatcatcctgagtcatgtttgaacctgagggaaagaaacatatgttcgaagaggttctgaggctgctgcacccgatatcgtacctggttggccctgggaaagggcccacctccaatacataaacacaaccagctttgacagtgagccctgaagcatggcattgagaagctgcctaagaaggaggcagatccatcagcctgggtgcccgactgattaccctgagcagagctccccagcccacctgtgatggacgcatggagcttgagcaaggaataaatattcgttgctggactctgattacactggacctatccaagatctgagatcatcaactcatctcaaaatccttaagctgaccacagcagcatcgtcccttttgcagtgtaagggagcccagctgggacaatgtgtgaatcaacgcatgaaggagtgagtgagcagctaaccaaatgaaagaatactcagatatctggggtacagttcccttccaggtttgcacagcatctgctgaagtctccactagaaactcaatggaaggtccccaccggaaactgaaagtctcctagagtggctttgagttgcggtttcaccctccctgcagatccacaggggaggctggggcagatggaaaataccaacttgatggtctgtggccacaccatgctgctccccaaggcccctcagaatttcacttgcccaatatggtagcgcccagcctgaaacgtggccagtgtgaattgagatgggctggaaatgcaccagacttccaaga

SEQ ID NO: 200563 - DNA, 933 bp, Homo sapiens
ggtgctgcccaggatcaggaggctgagacgtgatctggaagtgagtgcccatccatacaccttccccagctttggggccacagagggacagaaaccgcaggcaggctggcctgggaatgaacctacaccagcctgaagtcagaagagcctctaggagcctccagcctggactctttttacagatggggaaactgagtcccagagagggagcaatgaaggatgtctaaggtcatcagcaacgtaaagccaacagcatcatcctgagtcatgtttgaacctgagggaaagaaacatatgttcgaagaggttctgaggctgctgcacccgatatcgtacctggttggccctgggaaagggcccacctccaatacataaacacaaccagctttgacagtgagccctgaagcatggcattgagaagctgcctaagaaggaggcagatccatcagcctgggtgcccgactgattaccctgagcagagctccccagcccacctgtgatggacgcatggagcttgagcaaggaataaatattcgttgctggactctgattacactggacctatccaagatctgagatcatcaactcatctcaaaatccttaagctgaccacagcagcatcgtcccttttgcagtgtaagttcccttccaggtttgcacagcatctgctgaagtctccactagaaactcaatggaaggtccccaccggaaactgaaagtctcctagagtggctttgagttgcggtttcaccctccctgcagatccacaggggaggctggggcagatggaaaataccaacttgatggtctgtggccacaccatgctgctccccaaggcccctcagaatttcacttgcccaatatggtagcgcccagcctgaaacgtggccagtgtgaattgagatgggctggaaatgcaccagacttccaaga

SEQ ID NO: 200564 - DNA, 128 bp, Homo sapiens
tttggagacagagtctaactcttgcccaggctggagtgcagtgacatgatcttggctcactgcagcctctgccctctggattcacaagattctcatgccttagcctccacagtgaaaaccccatctga

SEQ ID NO: 200565 - DNA, 255 bp, Homo sapiens
tgctgggattacaggcgtgagaccccgcacccagccttaattttttttttcttttggtaaagatgatgtcttgctatgttgcttcggctggtcttgaactcctcagctcaagtgatcttcttgtctcagctcccaaagtgctgggattacaggcatgagccaccgcgcccagccggctattacagttttaactttcagagacaagcagcttgtattctagatcattctacaatcaagaactctttctactttacc

SEQ ID NO: 200566 - DNA, 349 bp, Homo sapiens
gtgtgtgtgtgtgtgtgtgtgttgtgttgacaggtgatacaaaaagtcattttgcattcttaagatcaaaacacgttctctgactccccaaagtaccttcgcccatccttgatcactcactgccatcttgttctgtctgagctcttaccgccacctgaaattatcttgtgcatcatttgtttacttggccactgccagatctctgtgagatctggaatcttctccctccatccctgctgtatctgactgcccctggccctagaaaagggctcaggactacttgtaaaagaaagcaaggaaggaaagaagagaggagggtgtttgttgagcacctactatatgctctgtg

SEQ ID NO: 200567 - DNA, 658 bp, Homo sapiens
gaagagagccagaggaagatgtgactacagaagaaggcacggatgcagcattgctggctttgcagatgagggaaggaggccttcagccaaggactgtgggtggctctagaatctttttttacatctcagtatgtatgccacagttaaggtttttgtttttttatttttgagatggagtttcgctctgtcatccatgctggagtgcaatggtgagatctcgactcactgcaacttccgccgccggggttcaagcaattctcctgtctcagcctgagtaactgagattacaggtgcgtgccatcatgcccggctaatttttgtatttttagtagagacgaggtttcaccatattgatcaggctggtctcgaactcctgacctcaggtgatccgcccacctcggcctcccaaggtgctgggattacaggtgtgagccactgtgcccagcctcacagttaaggtttttaaacaatctgatttaactgaataaaaaatgctcgcttgtgtggcgacatggtttttaaaaatgtaaacagagctgggcatggtggctcacatctgtaatctcagcactttgggaggccaaggcaagagaactgttgaaggtcaggagttggagaccaaccagcccagggaatatatggggagaccctatctctt

SEQ ID NO: 200568 - DNA, 777 bp, Homo sapiens
tcaccacacagggctcctgagtctgacccctgcgctgtacacggcactgttcatcacacacgcggctccagagcccgacccccgcatgcacacagcgctgttcaccaccgcatgtggctcctgagcctgaggaggagcgtggtggcaaggacagctaccatgagtctgcaagcagccaggtacccttctcctgggctggagccagtgtagaggacggggactctcagctctgccgtgacccccgtggtctcccaaggacaagcgccattcttgagggacgatcacagcttctcgccagactccctgatgaggtcagtcacgcgctgagaccagagcaggggcatcatcctcgtttcttgcacagtaaacgcagctgtaacatctggaccagtggagccagttgtgggaatccataggaatttgagtttcagcgattgttccaggcagcgttttcccaggaagtgtttaccagttgtccacgttggggtatgaatgagtgaagcttcatgaatgtaactttgaacacttgatcagaaagagaaaacggatgacatgtttctgataaatcatgactaagatgattttttaaaatatcatttaaacaagataagtatcgaggaagcttccatttcaaaccaactccgcaggaaagttttagggtgaatcaaacatctttttctgtagttgagttagtaactctaaatatatccatttggtctttgagaatgctttcatatcttttttttaaaagtttttaattttcaaactttttaaaaa

SEQ ID NO: 200569 - DNA, 636 bp, Homo sapiens
cagctgctcttctgatataaaccactctgagcaaatcccttacttcctgtccgtgttactgcatctgaaacatggggattctactggtgatctcaaaggggagacttcaatgagaatgacaaacatacggtgctaggtacctacaggcactcagcaagcaacgatcgtcccccggccaacctactttacagtcactcaaaaagtggctgagacaggaaaggagtggtacaatcttttggccatggtgaactgtaaaggtaactgtgtttgttttgttttgttttgttttttgagacggactgtccctctatcgcccaggctggagtgcagtggcgcaatctcagctcactgcaacccccgcctcctgggttcatgcaattctcctgcctcagcctcccaagtagctggaactacaggcacaaaccaccacacccagctaatttttgtatttttagtagagatggggtttcaccatgttggccaggctggtctcaaactcgtgacctcagaagggtaattgttagaacctatccactaattctttccctaacccctaaatcaggtagagattctatttcaaacgagggtactttgactttgcagtgttgctatgttccctgatgcttggtaattacc

SEQ ID NO: 200570 - DNA, 280 bp, Homo sapiens
attaactagacatcgaaatagagatatcagatagacagctggatatgagagtctggtgcccaggagagaagactggacatcaaattcataaattttaggaataaatatatttattttaggaataaattaatagtgattattcaggaatctctaatatagagatggaatttaagctatgagattggataagatcacaagacagtgagtatacatagagaagagcagaccaggtactaggtcatgagttttctcttggagaacacaagaaaccattgaagaa

SEQ ID NO: 200571 - DNA, 562 bp, Homo sapiens
acaccaggaggctcagagcaaaggctactcaccaactgatgggacttttcaatatttcaaccattggtgtggttgttgtcagtccatactgggtgaatctcagtcctgattttatctgaaataaatccacgtggttagtttggttagttctcattatagaagcccctccccatccccaaaacttctaattatggaaacttaaatacataaaagttgagaaatagtacaatgaagccaagcatggtggtgcgcacctgtggtcccagctactcagaaggctgaggtgggaggaatgcttgagcctgggaggtccagggtgcagtgagctatgattgcaccattgcactccagcctgggtgatagggcaaggccctgtctcaaaaaaaaaaaaaaaagaaaaaagaacaccctcattttacaattaacattgtcatatttgccttctctgtgtgtgcctcttaagtgtgtgcgtccgagcatgcactttatgagccatttgaaagtacgctgcaggcatgtttcacccctaaatactttagtctgcatctcctgaaccacaatg

SEQ ID NO: 200572 - DNA, 555 bp, Homo sapiens
gagtaaaggcagggttgtggatagacatagttgatttgtagggcccttgtttgccaagaatagtcctgctttacccctgttgtcctgatgtaattattaataatactgcctcattcagtcttaaataagtcttggatttggactagaaattatatggctacctctttatgtgggaactaaaagtaattcattgagacaggaacatagaggtgaggtgccaaaagaaaaagctagaaaggtaagttttgatcatgttatcaagggcattgtaggcaggctaaggagtgtggagatagtgggaaagccgtggatggtttttaatgaggggaatgataaaaatagagatatattttaaaaataatctaggaaaagagtggagaatgaattggagtggagtgatcagagatggggacaatagggaaatcagagaaggccaatgaaataattaattggtgagatagtaaatttttgttttttaaaaatatgtttcataaaatataaatacaaaataagacactgggcccagcgctgtggctcatgcctgtaatcccagca

SEQ ID NO: 200573 - DNA, 458 bp, Homo sapiens
acagaataaaagctacaggttgaaaccaattccctttaaaatgtggacagttgaccatctccatgataggtagttaggcactgaattaatgctttttaatggaagagccaccctaagattcctggagtgtggtataatggagtactaaatcagcataggactaataactgcctcccgtgtaaactggtctatccggagagtggtatagcctctcatacagtgttcaaaggcagatttaactcactgcaggtccacagcaaccgataagataaactcgttggttatggtctcccactttgcaaaggagagcacagaggaagaggaaactgagataacttggtttaggaccccacagctggctggagctgggctgaacattagttcattgtttcttcgattaatctatgctgctttttctctacttggctccttttctaaattaaacaaaacaaaacaaa

SEQ ID NO: 200574 - DNA, 573 bp, Homo sapiens
ttttccttgtctgatgtgtgctcatctcctcttcctctaaggacaccagtcatatcagattatgacccactctaatgacctcattttaacttaattacatctttaaagaccctatctccaaatacagtcccattctgaggtactaggagttaggaccttaacctgtaaattttaggggacacagttcagtgcataatgcacacatatgctcttttcactggacagcccaaagggaatagtgccacttggttgggaggaagcagtgtgtgaaatgccgtgattcatattctagggagttaaatgttggcacagttccacttgcctccatcaaatgggaatatgtgggaaatgctacaatttgccactgtttctcatttagaaagacagtatcttgaaatttctcatttttcattttaaaggaaaaaaatctttcaggactaacctcccttctatgaaaaagaaagatggcaaagaccatgctggatcagaatggtgcccatgcagtgtagctttctatcttggagagagtattggggattaatctatggaaaaaacagttattcttatgacagt

SEQ ID NO: 200575 - DNA, 800 bp, Homo sapiens
aagcgatccacccactgtggcctcctacagtgctgggactacaggtgtgaagctctgccctacagcccttttttaaaccccaggatctaatcagggagccacactgtgcattcaggctatgcactttttttggcaggataatatactacatagagcatgttttatcttgttagaaggctgtcaacctgaaataaccaaacaggtcagaatttagcttaaagagagtttatttaagtgtataaagtttgaggacaggctgcctgggaagcacagattttaaagaatggaaatcagtattttgaactgtagatgtttgggatcatttatgtagacaaattttagggaagtttaacagaattttaacatctttttatgcataaagttataatctgaccagctgaggtggtcttttttaggtggaaggtatatttaacattttacactgaagatgtaggagtctggtctaagtacgggataataagagacaatctataataaagatcagtaattaaaaggggagcaggcctggtctgtggtctctcctagtcatttataaaacatgaatgataaagaaaaacagcctataatctaaaagacaaaattacaaacatgctatgtgacccagtttctaggacttaacttccctcttgacataataaatttatttatttttatttatttatttaaagacaggatcttgctctgttgcccaagttgacctaataaatttcaagagtcctaaaattttcttttttaagacaacatatcactgtgctccatgattgatagtggggctccgt

SEQ ID NO: 200576 - DNA, 309 bp, Homo sapiens
aaccacaattcaagactctgtgatagagtagcaggcactagcgcatctaacgcatccctgccagggatataatcaatgtggtggatttctacatcaggatactatcattaaacatggatttaatttgctttttataatacagtcagctttactgaaatagaaattcttttatccaggaagttgatggggacacagctcatgcaggatcagtttctagtgtaatgggttggtcaaaatcaacggtaagtgcgtctaggcaagcagctgaaactttgcattttcaagatcgtgctgctagatgatgctggg

SEQ ID NO: 200577 - DNA, 483 bp, Homo sapiens
gcgttgtctcggaggctgtggtttgtttaaaccgggcactggagggaaagcaggcagtgtctggtgtgcacaagcacccactgaaatacaaaccttagtgaacacaggtaacaccccttgatgtgtgctgtatccagttgttctgtgggattgacatgtgttcactcatttaagcctcacactaaatctaagatgttatccccattttccttacaagaaaaccgaggcatagggtccaactgggctggtgcacgagggaggactggaaacaggattctgagctcctgaccaggggctgaacttgtggctatttgtttatctgattagccaacaaatacctactttgtgaaattcttttttttttttgagacgaagtctcgctctgttgcccaaactggagtgcaatggcgtgatcttggcccactgcagcctctgcctcctgggttcaagcgattctcctgcctcagcctcctgagtagctga

SEQ ID NO: 200578 - DNA, 450 bp, Homo sapiens
tagctggagatttgtaaaatggaccaatcagcaccctgtaaaatggaccaatcagtgctctgtaaaatgggccaatcagcaggacatgggtggagacaaataaaggaataaaagctgcctccccgaccagcccatccccaccccaacaagccagcagcagaaacccgcttaggttccgttccacgctgtgggagctttgttcttttgctctccacaataaatcttgctgttgctcactctttgggtctgcaccacctttaatagctgtaacactcaccacagaggtttacggcttcattcttgaagtcagcgggaccacgaacccactagaaggaaccaactgcggacacagtgggatctcggctcactgcaacctctgcctcctgggttcaagcaattctcctgcctcagcctcccaagaagctggaattacaggcgagcaccactaca

SEQ ID NO: 200579 - DNA, 442 bp, Homo sapiens
tacctggcccggcttatgtgaagttacgaacatttaaatttaagttcttaataacacagaactttagatttttaatactgagcaatgagatattgtaacacagaatatgtgacacagaaagcactgatttaatatttttcattgtattgctatgcaggaagagaaaaagactgtattcaagtagatcttaggctagtgagaaaagttaagtagaatgtaacaatgacatttagcaggactagaacaagacacaagtattattcatcagtattttacagaaaataaaatgtattttttttgacacagggtcttgctctgtcacccaggctggagtgcagtggcacgatctcagctcagtgcaacctccgactactgggctcaagcaactctcctgcctcggcctcagcctcactacaggcatgtgccaccacgcctggctagt

SEQ ID NO: 200580 - DNA, 165 bp, Homo sapiens
gtagacctttgggttgtcccaccttttggctatagtgaataatgttcatatgaacgccagtgcccaaaatatctgtttaaatccctgttttcaattctttaggtgttatacctagtagtagatcatatggtaattctatgtttaactttttgagaagacaccaca

SEQ ID NO: 200581 - DNA, 1012 bp, Homo sapiens
ctccccccacttctatacttagagaggtggagaaaacaggagaagggataactacgacttttgtcctcaaataccaggaaaactagtaaaacacacagtatctcattttatgcattcatttgctgaaaatatttccaaagtttagaaaaatgatttttggatgtactatataataaataaaaatgcactcagaatgctagagtgtctaccaacttaaaagaacaatattatttgtttgactgtgattatccttaggaaaaaataagccctgatttaacttatcaatttctgaaaaaaatagtgtatggacgacctgtgtcagaattaacctaatttttgttaaaaacatattcccagaccccatccaagatacacagaattggaatctctatgaaaaccacctgaaaatttcctttttaataatctcttggggtacttctcgtgtgtgtgtgaattttttaagtcctggttgattataaatgataatacaacctgctcttttcattctgtcactgtgttgaaaagttaacaactctcagctcagagaattgtcagtgggtattggtaccaaagtcctctgtgggattttgaccagcactgaagcagaaacttggcgtccgaagtctgccaagtgcaagaactagagctgaaatgatgaagtgagggatggggacagcactgggcactgcccaaactttttgaaagctttcagaatgaaatggggaaatggaaactttcctctgtttgaaatataaaagacaaatgtgtactgaaggcaattttggcaactcaacttcacattgaacaagtgaagacaatatgagtttctccaataaaaactaaaaagctgttttcaaattgacctaagatgattgaaaatggaaaatatttgctatttggttattagtttgagagcaagtgccccaggaaatattttgcaatttaacttaaatggttataatgtatattttcttgaacttcattaaaggatttgtctctttttgcctttcta

SEQ ID NO: 200582 - DNA, 739 bp, Homo sapiens
caaaatcagcagcattgtaggcgtttgagcaggagagttgacaggatgaaatatggcttagttttagcaaactaactggttgcttacgttgataattggccaggagtgctgggagcagaattgacacatagaccaagctggaagttattgcatcaatccaggtgagagatgaaggttgctcgtaccagatactagtagaggacagaagtgattaggactgtaaatatattagattgatagatctaacagactttgctaatagattaatgtggaaagtaagaagagagaaaaggaggattaaagagaggagattaggaggactctaaagtttttggtttaagcaactgaaagtttagagttgccattaaccaagaaggaggagactgggtggcacaggtttggagacaataaagaattcagttttgactaccttccacgtagtaggtactctctgtgagcataatattgctgaatattaagttccaagggtatgagaaagctgtcatgagatggcctttcattgtcagactcatattgttcattaatcatgatttctcatttcgtcaacttgatgtttttgtattgtgttttgttttgtttttccttctctcttctcccctcccctcccctcttccgacagtgtctggctctgttgcaagctgtagtgcagcgatgcagtcacagctcactgcagcagtgacctcccaggctcaagcgatcttcccattcacttcagcct

SEQ ID NO: 200583 - DNA, 326 bp, Homo sapiens
attgagacacttgtcctcatcaagtttaagacacaacatagaagacagacatagctgggtgcagtggcttacgcctgtaatcacagcactttaggaggccgaggatggtggatcaagtgaggccaggagttcaagaccagcctggccaacatggtaaaaccccatctctattaaaaatacaaaaattagctggatgtgatggtgcatgtctgtaatccccgctactcaggaggctggagaatcccagctactcaggaggcaaggagaatcgcttgaacctgggaggcagagattgcaatgagccaggattacgtcactgcactgta

SEQ ID NO: 200584 - DNA, 137 bp, Homo sapiens
catattttcaccccccaaaaaatcagttaaatattgggacactaaccatccaggtctagaaaagtcacatgccatagccatggtattgcacatcattcatcttgcattctttgagaataggaagatcagtaaatagt

SEQ ID NO: 200585 - DNA, 212 bp, Homo sapiens
accagagtgtcaggaaagcaacagaaggagctttttcgttgtgtttggagcaagaacagggaaggccagcctacttcttggaacagatggcacactcctgacagatgacaggaagaaggcgaaggcagcagagcaagcagattctattctatccaccaagtatcactactaggaaactgcagcctctcagattttagttcatctataaaacg

SEQ ID NO: 200586 - DNA, 594 bp, Homo sapiens
cagcccacgtatccatcagcagtaaaatggatgaataaattgagttatgtttgctgtattgcagtgggttactgtgcaactaagaataagtagttgtgtgcaataacatggatagatctaccaaatataaagaagccagacacaaaataatatatacactatgatgatagcagttacattttataaaatacacatgcaaaaacaggcaaaactaatttatggtgttagagtatgagatagtaggtacttctgggaagaaaaaaaggagttgggagaatatataaaaatatgactaggtaaggccaggcacggtggctcacacctgtaataccagcactttgggaagctgagatgggtggatcacctgaggtcaggagttcgagactagcctgcccaacatggtgaaaccccatgtctgctaaaaatacaaaaattagctgggtgtagtggcacatgcctgtaatcccagctatttgggagggtgaggcaggagaatcgcttgaacgcgggaggcagaagttgcagtgagccgagattgcaccattgcactccagcctgggcaacaagagcaaaactctgtctcaaaaaaaaaaa

SEQ ID NO: 200587 - DNA, 278 bp, Homo sapiens
taatatttagaaatactaatagtagcaatatttaggatatggttttatagatgtaacacattttaatttgttattttgactttttatacattcacagggagttttaaagacagcctagagaggctgcttgtacccttcacccagttttttccattggttacacttgatgtaagtatggtaaaatatcattgcagaaaattgacattggtacaaagtgtgtgtatagtgtgatgccattttattgcatgtttagattctggttaccaacaccaaatgaa

SEQ ID NO: 200588 - DNA, 286 bp, Homo sapiens
atgccgtgaggcgctctagagatcccctgaagaggcggcatctcccttctggtgaggaggactctggaaagcagcagagctgcctaggcatcagcttatccaccaaacctttatgcagcgcctagtcattgccaggctatgacgaaatagagctaccaaaaggatgataattataagatcaattcaatactgttttcctttctgactatcaaggcatcagcattctgaaaatccagccagtgggactcaaacccacaaattttgtaattctccaaacgagagttta

SEQ ID NO: 200589 - DNA, 599 bp, Homo sapiens
catccatcactgtcaatcacgcagactgtttcacctgcaccaaaaattccgtggactccacctattcttccctctctctcaccctccctcagccccatcaagacctggcagtcaccgatctttttactgtctctatagttttgccttttccagaatgtcctagttggaatcatacagtgtgtattttttcaactggttcttttacatagcagtatgaatctgaggttcctgcttgtcttttcacggcttgagagctcacttccttttagcatattccattgtttgggtttatcacagtttgtttattcattcatctgctgaatgacatcttggttgcctccaagtcttgacaattgtgaataaagccgctataaacgtgtgtgttaagtttttgtgcgagcataaatcttcctgttatttaaataccgaggagtgcaattgttggatagtatggactacgtttagctttataagaaactgccaatgtgccttccacagtggctgtaccactggcattcctaccagcaacggagacttcctgttgctccacatccttaccagcacttgatgtagtattttgcactttagacattcaaata

SEQ ID NO: 200590 - DNA, 719 bp, Homo sapiens
tctgcctgggtcgtgtggccggttggcagtcgtcgtcccggcggttccagtttgggggtctgtgaaggcctgggcaacgtgggcatcggcgtcggacccgcaggggttttcatcccctccccatccggagcagcctctttgctaggctggatccagacgagcgctccccaaccaaggacaacggcctcccaggcgctcatcgtccacccgcaggagggtgcccgcagagcttcaagaaggtggttgtcacgcctgtcgccctctgccctcatcgagaaatgtagccacagctcgacgcagggacggagaaggaagccggcaaggggatggggcaagcatgtctgtctctcaaaggctggccttcctggccgagtcacccgtttgacactcctccccggatgccggtggtggtggcatggcccccccgtatcctgcctgggctctggcctctgctctgacctccctcttgctgtgtctgccccgtctctgagaagcctggcggcttcttagtgtggctcagtgtcttccacaaagaagacttccccgtccatcagggagaaacctcgtggcggtccgcgtcatgattgtttccctctccacacctctttctggatgattgggcagctgtggtgatcctggagctctgggcttccatacctgtgtgggacagggaagctctctcggtctccatggcccaagtgatggctgcacgctcggtc

SEQ ID NO: 200591 - DNA, 934 bp, Homo sapiens
ctgctttacaaaatgcaaactctgatcaccccagcctcaaaccttcattggctctctatggagggctttttaagctggagtccaagatgggcttcaaagggtcaaagaattctcatattgcacaaaaagtttggtggagagagggcttgtcattttcaatagatttgtaaaggcctttgtgactaaagagaggtctagagctactactgtgagccttttaggccaaaattccaactgcctggtctggcacacaaagctcttcacaatctggctcccacgagctgctctcactgccttcacttcctcatacgcaccctttaacccggcgttactaaaaggcgggtgctccctgctctctctgcccactctctttgcctgaatgctcttcccgacttctcatagtgaaactagctgatttctaatttaaccttaaaaccccaactccgtccaggcacggtggctcatgcctgtaatccctgcatttttgggaggctgagacgggtgggtcacctgaggtcaggagtttgagaccagcctgaccaacatggtgaaaccctgtctctactaaaaatacaaaaattagccagatgtggtggcgggcgcctgtaagcccagctactcgggaggctgaggaaagagaattgctagaacccgggaggcggaggttgcagtgagccgagatcgcgccattgcactccatcctgatcgaacagtggacgggatcctctagaacaaacaaacaaacaaacaaacaaacaaaacccaactccagcatcacttgcttggttcccaggccaggaagggtgccattcctctggctcctgctgccccgctgctctgcagaagcagtcatgctgctctctagtatttctactttattgactgtttctgctttccccctcttaactgccagttcctggagggttggactagg

SEQ ID NO: 200592 - DNA, 563 bp, Homo sapiens
gatgcgtctccgactgctcatagtaacactaactagactatcgtatagtttaaggcttcatcatacacacctccgtccaggcacggtggctcatgcctgtaatccctgcatttttgggaggctgagacgggtgggtcacctgaggtcaggagtttgagaccagcctgaccaacatggtgaaaccctgtctctactaaaaatacaaaaattagccagatgtggtggcgggcgcctgtaagcccagctactcgggaggctgaggaaagagaattgctagaacccgggaggcggaggttgcagtgagccgagatcgcgccattgcactccatcctgatcgaacagtggacgggatcctctagaacaaacaaacaaacaaacaaacaaacaaaacccaactccagcatcacttgcttggttcccaggccaggaagggtgccattcctctggctcctgctgccccgctgctctgcagaagcagtcatgctgctctctagtatttctactttattgactgtttctgctttccccctcttaactgccagttcctggagggttggactagg

SEQ ID NO: 200593 - DNA, 617 bp, Homo sapiens
cctggtgactcagcagctgtggacagtggctggtggagatgatgcattttggcagcttctctcctaggcctggctcagtgccctgggaagatcgcacacttcctgatccaggcttgttcctcctgctttccctccaacttttgctacttaagggccctgacccctttggtcaccccatcctgtgagggccacatgccactgagtcttcctgacatttaggaagtcaacttccatctggctggaaatgtccaacgcatgtttggtatgatgcttgctttctgaagccgtgtgtgaactcagccatttctcctaagggaaggcccaatttttctaagaaaaactgcaccataactacccttgtcaaagtcaacgttgacttccctgttgctagatccaagggatacttctctggcctcatcttcctcagtttcttagcagcattcaagacacttgactattctgtttgacgctaaatcttcccatgacctaatatagggtgttttcctttttattctactctaattgatgttcatttttagtctcttctgcttgctcctcctcttctacttaatttcaaatattagaattgagggtgtcaggcaaagccctcttgcctg

SEQ ID NO: 200594 - DNA, 605 bp, Homo sapiens
ccatgttggctaggctgatctcgaactcctgacctcaagtgatctgcctgcctcggcctcccaaagtgctgggattacaggcgtgagccactgcgcccggctgggattcagcattcttgactttatgatagatgctctccctttctctggtatatcttctacggctctagtcactgctcagtttctggtgtcctgttgctctcctgtttagccatgaagtattgacttagtcaaacttgggcgctgggcattcttatcctgtattctctccagttggaaatttgtccttcctcactgacagctgcaggtactgcgtgctgctctctgaggtttgaagtttactgcttgagtaagcttgagacccacctgatgtctccacctgggtgctccaaaagtgccctactcttaagtccaaagggaacccatgtcctctgtcccttgcccaccactgcccacacacacacactcatgatcctctttccatccatcatcatcacaagtcttgtctgtttaaaacatgctctgttgcttgcactgatctccctgtatcatagtctagtcttcttgaagccatgctgtgaccttcaactagaatgatcttatca

SEQ ID NO: 200595 - DNA, 430 bp, Homo sapiens
gagacgaggtctcactatgcccaggttggtctcaaactcctgtgctcaagcaatcctcccatcttggcctccctaagtgctgggattataggcatgagccaccgtgcccggcctcatgtctgcatgttaaaagttctgagaattcctatggaaaataaatttgactttgcttaatgcagttcctctaaacttacttaattcctttttctttttttctttactatttattaatttttctcttttctcagaccttgcagggatgaaaggtccccttttctcaaaaccctcttatgatcctctacactctgcaagggcttctgaggacagcaggctgagaaaggccgatcctagcacttacctctttgaagacacttttaaaactgttaacagtatttatagctttaaaagtatccatgttcttaggccagtt

SEQ ID NO: 200596 - DNA, 635 bp, Homo sapiens
gacagatcccctgaggtcaggagtttgagactagcctggccaacatgatgaaaccccatctctgctaaaaatacaaaaattagctgggcatggtggcaggcatctgtaatcccagctacttgggaggctgaggcaggagaatcacttcaacctaggaggcggaggttgcagtaagcagaaatcacaccactgcactccagcctgggcgacagagtgagactctgcctcaaaagtaagaaagaaagaaaaagaacctgcactatgaatgtgatgatgggaatcaaaaaaatttttcaaggttagcattattgggactttactggttctaagggattgaaggggagaaatgagccaaagctgactcttaagatagcagctgacagaagcaacaagggcaaataaaggttctttttttacttgtgcatgtttgaaggtagtctagaaggaacaatgtaaatggtagagcttcaaaataaaagaggccattttgctatgccttcaccttttggtagagaataaatgagattgtctgcagaaagggtgaatatgagtttgaagagaggtttgaaatggccttgtggatgaataactcagtgacccacagacttgtcaattagtgtccaaggctaatggaa

SEQ ID NO: 200597 - DNA, 594 bp, Homo sapiens
gtgactggagctgtatgtggttacatgtggtcacaagtgcacattcaagttcacatacacagagatatcattttagggcttgaacctggaagtttgcctccagggtcatctgaacctggattcaggttcagatccagggccatctgaacctggatcgtgtgtgtgggaaagacccaggacccacacacaatgtcatcagctgtgtgtaattgtgtgctctgtgtgtggctgtgaatctgtgtgtgtgatttgcctgttgattgtctttggcatggctgtgggtccacgggcggtgaggttcaggagtctcgagtgtctggaaatcggcacaagcctatccctgtgttagtctgtgctctctgtgagcggctctgagcctgtcggtattgatagctgtaagactatcgtcactctgtgtggccacgtgtgtgactgtcccatgagccattgctcttaacgtgcagtggtgagtctgtgtgtgttcatgtctgtcagtctttattctcttgtgtggctgtgagtctttgtgcacctctgtgagtgatggcgagttggcccccgtatctgagccccttgatggggctgtgatgggtc

SEQ ID NO: 200598 - DNA, 609 bp, Homo sapiens
aatgcatctgggcattattcaaagtcttccctccacctccagagaggggaccctcctcccctgaatacgacagctgcatccacaagaaatttggttacgtctatcatttttacactgtgcctccctgctagtttctttgctagctcttcagcagacccaagcagtggccagttaaactgaatccaaatcatcattctggccctctaacttagactgggactttgttgattagccaagatcagttgtgtttttctcgcacattattgcaaaaggtttctaatctgtcttcttgccttctgttatacctgtctctatactaaagccagggtgaagttcaaaagacagatttgatcttatcgcttttctgcttaaaaccattccttggctgcattccaagttcttcagcaacttctgagcccttcacgcctctctctaggttcattttcagccaccacttgccatgcctggagctctatactccagtcagactaaccattggcacagtgggctcttttgcttccaggcagtggaacatgccattctctctggctggcctttgactttcctccttgtcatgaactcataattttacattgctgcagcatctac

SEQ ID NO: 200599 - DNA, 158 bp, Homo sapiens
cagtgttccttatttgttgtatggcaagttgatgaataactcttgattaatatctttaatgttctgtttcacacagttctctcaattacatgtgaaaaatctgttatataagtaatgctatttaatgattaaaatggatatatgttttaaggtagtgc

SEQ ID NO: 200600 - DNA, 306 bp, Homo sapiens
aactaacactactgtaccaaaatctattcagagcaatactgaaggtcaaatatgatctcaaaagagcatagaaattagaataaataaaaacattgcttatccactttttatcctaatatgaaaaaaaaggtcaaatggtcaaagaaatttgttctaagtgcttgagctacacatacctaaattagaacaatgcaaattaatttaatcaaatatttgatggacattaaaacatttctgattattttgacttactacagacaaacattcactattttaaacttcttaggggatcagcatttttcttaa

SEQ ID NO: 200601 - DNA, 328 bp, Homo sapiens
ctcgtgttcagtctgaaaacagctgcttcctgtacttcgttcagttctctaattgctcacaataaaaagctaagtcctttcttacttcatcatggctagaagcagttcccatgcgaatgtcttggttaaaggagaaaaatgtataaggtaactataaactaagactttcacatcaattcagttggttcttttgttaagaattacagggttgggcacgatggctcacacctgtaatcccagaactttgggaggctgaggcgggaggatcccttgaggccaagattttaagatcagcctgggaaacatagtgagaccccgtttctacaga

SEQ ID NO: 200602 - DNA, 372 bp, Homo sapiens
atttctctctctctcaatggcttccacagatttctttgtccaccccaccagtctattctcaccaagcattttttgatgcttgttctgtaatgattccagaatccaggcctcagagcttcgccaggaggtagggccctccttgtcctgaaggcataaatacaagagcagttaaatagcaatactaaaaaacaacaccaacatgaacagggctcagctttaatattgaagagagggcaccaacccccaagctgttgctccatctgcctgtgctcactcatgttccccttggcatggcgttccctgtgatgttccctgcggcatcgcagacatgtccaagttgagaaagtgggttttaaatgctttgaatacttc

SEQ ID NO: 200603 - DNA, 368 bp, Homo sapiens
gcttgcagtgagctgagattgcaccactgtactccagcctgggcgacagagtgagactccatcttaaaaaaataaaaataaataaaataaaataaaatatgttactgctattagatgacttcatttattgcaagtcttacagcacaggctcttaacttcctttgtttaataagatttgtcagccttcggtgatgttgatgataagatgctctttttcctgtttctgtcatttcactgtcctgttagaaatagcttagactgatgctgggcacggtggctcacgcctgtaatcccagcactttgggaggccaaggtgggaggatcacgaggtcaggagatcgagaccatcctggctgacatggtgaaac

SEQ ID NO: 200604 - DNA, 423 bp, Homo sapiens
aaagtatggaaattcgattttaacttaggagatgctagaatctagccacttggccgtcagccaccacatattccatctcagtggcatgtggttggtgaaaatgtgtactatgccttgagaaagggagaaagtataataaatgaaagaaatctttcagctattcagtaaaaatttatttacaggagaacagaactttgggttggtttcagatgtttcctctgcaacagttagatgccaaacgactccactgtttttgaggagggaaaagttatgagctaagaatgttataaccagcaatttgtctttcactaggacaggcgagcattctcaaaaatgcaagggctcagaaaatattccacttgttgaaaaactattcaaagatacattccagtggttcatagggtttggaattatatagacaag

SEQ ID NO: 200605 - DNA, 454 bp, Homo sapiens
agatgctcttcctgcctctagctcttaccgcactccctgcacttccccgaggtcactgcactcacagagcttcctatgtgatcagttccaccaggcatagcaggaattcttctcatttgtccaaacgaacagagccccaggaggccccacctggtgcccgtgaccgaccccctcagtgaacctgcaaaggttcccatgcacaaggcgacgcttcagacatttcaccatctcactctccaggtcggacttgaaaacgctctgatcaatgatcaaatctgcttccacccaattcaaatgcaagcagttctgaggcacgattatacacaatacatgctatttattaaccgtcaccactcagctaggttctttgccaagaatttcccaaaagaagtcttcattctacatagcaacttgttcttatccatgggaaagatagtgtcttattttaaatgca

SEQ ID NO: 200606 - DNA, 632 bp, Homo sapiens
  misc_feature (599)..(599): n is a, c, g, or t
cctgtgttttttcataatcacataaccgtacttgagcactgccagaagaatttaatctcaggaagcagagaagcatgaggaaagaaggctggtgtgggagtcagaaggcctaggttttggtccttggctcagccaccgactttccctgtaaccctgatctggtcaccccaaatccccagccccagatatcattttcttcatctaacccaaggactggcatagagctggcatttaaaaatgtttgaagccaagtgcagtggctcaggcctgtaatcccaagctttggggaggctgaggcaggaggatctttggaggtcaggagtttgggaccagcctgggcaatatagtgagaccccatcaaaaattgctctaattagccaggtgtagtggcatgcacctgtaatcccagctactcaggaggctgaggtgggaggactacttgagcccaggagttggtggctgcagtgagctacgatcgtgctactgcactccagcctgggccacaagaaaaaaactctgtttcaaaaacaaaacaaaacaaaacaaacaaaaacaaacaaaaagggcaggttgaagaacaatataactctatttgcatnttttttaattgtagagaaagctggatgtggtgg

SEQ ID NO: 200607 - DNA, 596 bp, Homo sapiens
gagacaaatacttttgtatttttaatacagaaaagtatgcctcggcctcccaaagtgctggaattacagacatgagccactgtgcctggcctgctcactttctgatgctgcttttttgttgtttgtttgtttatttgtttgttttgagacggagtctcgctctgtcaccaggctggagtgcagtggcgcaatctcggctcattgcaacctccgcctcccaggttcaagcgattctcctgcctcagcctgcggagtagctgggactataggtgcgtgccaccacgtccagccactgatgctgttttgccactgatgctgttttgaaattgatattttgtctcataaaaactaggccaggcatggtggctcattcctgtaatcccagcactttgggaggccaaggtgggtggatcacctgaggtcaggagttggagatgagcctggacaacatggcaaaaccccacctctactaaaaatacaaaaaaaattagctgggtatggtgtcacgtgcctgtaatcccagccactggggaggctgggattgcaggtacacaccaccatgctcaactaatttttcttttttagcggtgagggcg

SEQ ID NO: 200608 - DNA, 240 bp, Homo sapiens
tcatccttggacaatgtccctaaccttcctaagccagcctaaatgaagaatcctacgaagtgatttcccacctttgatatctcatcaaggtcttcatcctctacccttaatgtctaagtccttggcctgcctttagcaagaatcttgttagtccagttcagcaactccctatccttgatgtctcctcttaaaaatcttccatccactgaccccctcactctgctccttgactataaatcc

SEQ ID NO: 200609 - DNA, 540 bp, Homo sapiens
ctgagaaccaggggaaccaatggcataaattccaatccgagtataggagaagatgagagatgttccagctcaagcagtaaagcagaaaaaggggtgaatcctctttcctctgccttttgttctattcaggccatcagtggattggagggtggccactcacattaggggaagacaatctactttatttagtccattgagtcaaatgctcatctcactggaaataccttcacagacacacctagaagtagtgtttaatcagttatctgggcagcctgtgatccagttaagttgacacataaaattaactatcacagtgaccatgggcacattgaaggaggggccgtagcacttgatgtgtagcttctaatgaaatcttagcctcatgttagggatctggggccaagccaggggttggtgaggcagatgaggttgggagctctgtggtactcaacccatcttcacttccagggctgagactcatagagtcactacctacctgtgactcatagagtactcagagctcaaggtcattgtccctcc

SEQ ID NO: 200610 - DNA, 436 bp, Homo sapiens
catgttggtaccatcctagatgctggggactcagagaagaacggaacccataaggtccttgagtccccagggctcccatgtttgggatagcaggaggactgcagagaaacaagcagccagctccaaaaaacatgaactaaatcagggtgatatcacagagtgagcagccatggccacgggcagccttccccgggcaggtaacgtctggacataagagatgagacagtggaaggatcttgccttcagagcagcttgggggcaaccactgcaagcaaagcaggcatgcacagcagaccctgaggcaggaacacactgagtaccttcgaggaaccaaaggaacatctatgtgacctgagaggggcaggggggtccaggtcatgtaaggttctcatagaccacgagaaggaagcttgtgttctaagctagtggacagccg

SEQ ID NO: 200611 - DNA, 446 bp, Homo sapiens
ctgtaagtcccaactacttgagaggatgagatggaaggatcacttgagcccaggagtctgaggctgcaaagagtccccagggctcccatgtttgggatagcaggaggactgcagagaaacaagcagccagctccaaaaaacatgaactaaatcagggtgatatcacagagtgagcagccatggccacgggcagccttccccgggcaggtaacgtctggacataagagatgagacagtggaaggatcttgccttcagagcagcttgggggcaaccactgcaagcaaagcaggcatgcacagcagaccctgaggcaggaacacactgagtaccttcgaggaaccaaaggaacatctatgtgacctgagaggggcaggggggtccaggtcatgtaaggttctcatagaccacgagaaggaagcttgtgttctaagctagtggacagccg

SEQ ID NO: 200612 - DNA, 522 bp, Homo sapiens
  misc_feature (465)..(465): n is a, c, g, or t
tcggtctcggtacccgtcagacgctgaactatgtgaggcatgatgctccagtctgcgcaacagagtgagaccttatctctaaaaataaaaactaaataaaacatcaatattattgtgagaaaatcatgtagtgtttgtaacttttttcttcaggtattttctgggtttttgttttttgttttttttttgagacgaagttgtctaggctggagtgtagtggagtgatcttggctcactgtaacctttgcctcccgggttcaagtgattctcctgcctcagcctccctagtagctgggattacagccatatgtcaccacgcccagctaattttttatttttagtggggacggggtttctccatgttggtcaggctggtcttgaactcctgatctcaggtggtccgcctgcctcggcctcccaaagttctgggattacaggtgtgagccattgcacccagccttcctngtttcttacttgactttgtttattgagatttttcccagcacacatagttcagcgtct

SEQ ID NO: 200613 - DNA, 430 bp, Homo sapiens
aacccagaaactagtaccagctcttccctaaagtagctctatggattgggacatgtcacagaacctctttggacctcagcctttttatctaaaaagtgaggttttacaccagccaacagtgactcacccagccctatgggaggccaaggtgggaggatcgcttgagctccagagttcaagaccagcctaggcaacatagtgaaatgctgtttttattttaaaaaatttttttaaattagccagctgggtgtggtggtgcatgtctgtattcccagaactattttttttttccttgatatttttgttttcctactctggaagctgaggtggaaggattgcttgagcccaggagtttgaggctgcagtgagctatgatcacaacactgcactcaagcctgggcaacagagcaagaccctgactgtaaaaaaa

SEQ ID NO: 200614 - DNA, 407 bp, Homo sapiens
caggccgcctggctgagctcctgctgtaaccagtcggcgtcgccgccggagccccccgaggggccgcgcgcggtgcaggcggtggtgctcggcgtgctgtccctgctggtgctttgcggggtcctgttcctgggcggcggcctcctcctccgcgcccagggcctgacagcgctgctgacccgcgagcagcgcgcgtcccgcgagcccgagccgggcagtgccagcggagaggacggcgacgacgactcctaggcgcccggctgcgctcggtggtcgcggcctccaggcagcccctgactccgagcggtccggagcatgcccgacggctgctgcggtcccgaccccttacccgaagcggcgcgccccacacaggtgagagggagggtagcaggagtgtgggcgcgggg

SEQ ID NO: 200615 - DNA, 644 bp, Homo sapiens
gggattatctgctcttacccatatatgccttatcttctctgttgtcaatagcctttgcattccctagacctcatttatgccatggatactagcatgacctttatccatgaaatgaggcttggcttaatccgcagaaattagtcatgcttacctgtgctgtaccttttcacttctgttgtcgtctgcctctggatccctcagatccagttttctttcctagggcttcgatccaaagcttggaattgagtttgggtcaaaataactgcctcaggatgttgcatggactccttaccaagctgaatgctaaggtcaagctgtggaattgagtccttctccaacaagggagagaaaaggggtgtcttctgagttgggatcctggctgagtaaaacatcttctaaaaggaaaaaagcctgtagcgtagagaagccccctctacttgcagggccatgttattgggttggtgcaaaaacagtcacagtcctcgccgttctaagtaatagcaaaaactgcaactacttttgcaccaacctattcctggcctggtggagaaaaggaaaagaaaaacagcgtaaatgcagggctttgttaactgctgacaggatggagaaaagaaaaagatgcccggagaacaaaccttttattc

SEQ ID NO: 200616 - DNA, 261 bp, Homo sapiens
tataaatattaatgtcctatattaaaaatactgtactatcaataatttcttatttgtggctcctactcacagttccccaagaggatggggcatcccacaccgggccacagaagaaaacactgaagttgcatgcaggcaaagagagaaaaggaactagggggctggagtctttaagaggtgaggcaaggtaagcaggtttaggactggctagtttgagtaattgtagagggctctggggggacaaggggttgtccctagttg

SEQ ID NO: 200617 - DNA, 373 bp, Homo sapiens
ataataataataaaaatttcttcttatatcaagatgtccatcatagcatttatcatagtaaataattttgaatagacctttagaaatggaaaaaagcaaagcactatattgtatctctactcaaactaagatttgacactgtactcggctctttttataatttttcccttaatcctcacagtaaaatcaaatgtttgacacaatgattgtctctttatgagtttttagctaacaaaatgtttatggtaaacatggaataaaatgaaaaatactcatgacagatgctaaacatgaaagcaagtgatttatgtatctagtatgattataaccaggtatatcgaaatctctctgtgaataaaaaaaattgaagtcc

SEQ ID NO: 200618 - DNA, 1270 bp, Homo sapiens
gaagactacgaaggggctccatggaattgtgatagctgcacctttcttaaccacccagcactaaatcgctgtgagcagtgcgagatgccacggtacacctgaattcagaaaagtctgcgccaggttgaaagtgaaactttgagcactaccagaagaaaaggaaacctcgggactctattcatccacccagccttttcattttcgattgcacagcggggaggaggaatggctttgtggtcgtcgttgtgctcacgaaaggaaaaatggggaggtcttttttttctcctttcttaactcactacagagtgagagatagaaagggatacttgaaactgggaaaggattcactctgtgaaagaatgtacacacagaagtcaagagctcttctgtggtggaatcccaattgttaaagttactgctgagtggcccttattttttaaagtagtactttgaatcatagtatgaaatgctacagtttatgcaaactgtgaattcccagagcagacttacctggtcaccgctctctggaaaaccaaggctccccgtgcttcttcccattgcttcctactaaagaggacaacaggaaaaagcacctagaatatttggggggggggggcaaattaattaagggtatttgtaattgctgcttttttcaggggtaatttccaacacacatacatgcacacaaacaaaatgttttaaaatgtgatttgtagcagtcaggaactaggcatatcatgcctttgtttaaaagtacaatcagaggtggtaagatgcctttggcttgtacagtgtgattcatcgagctctatcaacactggtaactaagacctacttatgccacataagagatgcatttttttaagttactgcatgtttttattaaggccattggttttcaaaataacaagtccttacaaagtatgattttataaatgatattctcgtaaaactgcgctttgccagtagcacagtgaatgtatgccaaatgcaagtccattccaaaatccatttggaaatcttgagctcagctgtggttcttaaacttttgcagtccatagggcctttttttttttccttccaattttgtgataaattcatgatgtttacagcacagataaaactttgtgccataatcctaatttagctgaaatcaatattaactgttcaataaaaacttacttgcatatgttaacaaaccagtgtgaggggaattacagttggccaacgacaaagttgcacactgcattatttaggaaaggagggattg

SEQ ID NO: 200619 - DNA, 194 bp, Homo sapiens
cccactacattatgctgccaagtgacaagctaataaacatgaggtgtttttcctctttggtaacaggacccaagacatgaaatatgagcttggcagagagtttcacattgcattaaaaggacaaatagatttatataggggtagtaagtgctcactctgagccgaagtgtgaatgattggattccagcctgact

SEQ ID NO: 200620 - DNA, 549 bp, Homo sapiens
tcccaccttccatcatgtgaggacacagcaacagggcgccatcttgaaagccgagagcaatcctcaccaaacaccgaatctactgctgccttcagcctggatgtcccagaactgtgagaaataaattccttttatttacaaataacccagcataaggtattctgttatagccacgtgaatggactacaattgtcatcttggagaagtcctttaatttctctaagcatcagtttctactcacttgcgactacattatcttatttcaatcttaaatgatattgtgaaaattgcttagaagcttacatttaaatatattctaagtctctctccaagtatgctaacttgttaacactaacagaagtctttcataattttttaaaagtcattaacacattttactgatgaaattaaaatggcaaatttaagagaaataatattttgatagatattaattaatgttcccccttgattagatttaacactaaataacaatatgtaaaaccaagaaacaaacaacagaacattgtgaagaaccaacatattgtccta

SEQ ID NO: 200621 - DNA, 734 bp, Homo sapiens
  misc_feature (19)..(19): n is a, c, g, or t
gcggcgcaccccgtgttgngtcctggtgatgcgttcgctcgcggttcaattgctacttccgcgtaggtgcctttggagcctccgctgcctctgtaaccccgtgcaagtgatttccacgcctttatgtggtccccgggtttgcccgcccggcgtgtaaacccgcgccgtgatacccgctcccattgggccgattgggtacgggccccccctgcacgtgtgttgagttttgctggagcccgagtctcactctgtcgcccaggctggagcacaatggcgtgatctcagctatctgcaacctctgctcccgggttcaagcgactctgctgccacaccacacgcccaactaattttttgtatttttagtagagatggggtttcaccatgttggccaggctggtcttgaactcctgacctcaagtgatctgtccacctcggcctctcaaagtgctgggattacaggtgtgagccaccgcgcccagcccagggtagttctataaactcaccacaaacactgactaattgaacgctgaaacatggctcctaggggaagcacagagctgggttcctgtgaacctctggtcttgagatggatctcgctctgttgcccaggctggagtgcagtggcacaatctcgggtcactgcagcctctgcctcctgggttcaagcgattctcatgcctcagcctcccaagtagctgggattacaagcgtgagccaccacatctggctaattg

SEQ ID NO: 200622 - DNA, 706 bp, Homo sapiens
  misc_feature (19)..(19): n is a, c, g, or t
  misc_feature (700)..(700): n is a, c, g, or t
gcggcgcaccccgtgttgngtcctggtgatgcgttcgctcgcggttcaattgctacttccgcgtaggtgcctttggagcctccgctgcctctgtaaccccgtgcaagtgatttccacgcctttatgtggtccccgggtttgcccgcccggcgtgtaaacccgcgccgtgatacccgctcccattgggccgattgggtacgggccccccctgcacgtgtgttgagttttgctggagcccgagtctcactctgtcgcccaggctggagcacaatggcgtgatctcagctatctgcaacctctgctcccgggttcaagcgactctgctgccacaccacacgcccaactaattttttgtatttttagtagagatggggtttcaccatgttggccaggctggtcttgaactcctgacctcaagtgatctgtccacctcggcctctcaaagtgctgggattacaggtgtgagccaccgcgcccagcccagggtagttctataaactcaccacaaacactgactaattgaacgctgaaacatggctcctaggggaagcacagagctgggttcctgtgaacctctggtcctagcattttcaccagccaatcaatacagaaccttgtatgtgtgtttcttcctttttttttgagatggatctcgctctgttgcccaggctggagtgagatcctgtctcaaaaaacaaancaagca

SEQ ID NO: 200623 - DNA, 442 bp, Homo sapiens
gtgcttaggaaggacattttaaacgggtattaaaagcagaaaacagtatcctgcataaatgtaaagccatggttcacttacacctggaatattgtgagccattttttcagcaaaccttaagcagctataatagggtaggagaaagtcctgaggatgtcaactgaaatgatttatggaaaagaggagctgctttatgaaaacaaacttgcaaagattaggattaatcagcctggggagatgaaggttttataaaatcatagggatatggtgcatggggacattcaccttggctaacatttaccctcctcatcatcaacagacatgggtcagagggtggctgtcaaaggaatagggcgtagtgtgagtttaaaatctacatcagtttaggccaaaaggcccgtaagttaaccaacaaataggcaaataaaaagtcaaggtagat

SEQ ID NO: 200624 - DNA, 611 bp, Homo sapiens
tggagaaaaaataaaaatctccttgtgaaaattagtaacgaaagacatactttaggaatagttggcaagtctgctatagcaaaggatagctccctgaaatttaaagtcatctttggctgtaagggatgctgtgtgagtacatgggggtggagaggagtcttgacaaacacctcactgtgctgtcctatcatggtcagtgggtggcatcatttttgataatgaagcttgttactataagcaaatgagaacgattataagaaaaaattcaacaaggaatatcagaacatggtgaaatctgaattttaaaaagaatgtagatgagtgtgattatgattgaatgttgaaattaaagcacttaagccttagctttggctgagtccttaacaggtatgtgcaaactactccatgcttcaaaatgagatgtgcaattactagatgaggcttgcaaagaacatggtcaaaagctagttttctgtaggaattcacccacactgaagttacaaaagggcagaaatggagattaaaagaggttttatggcaagaactatcagagaattgtgagtcctctacctcccacccccttattctacccagtaaaataggcatcagaa

SEQ ID NO: 200625 - DNA, 277 bp, Homo sapiens
tatattttgttcatccttgtatttccaggatctgaaacatcataggcaatctataaatatttgtggattaaataatttaatcttacaaagattcagcaagcagtttgggtagagggtaggatgtctaataggagggcagaggtgtcagggtgagaagggcagtcattagggacaacctcaccgatataaattagagtcaatatgaatggaggtttcttcttggcccttctcatgttcagtgatagaatggaaaataaatgttcttactctcctactt

SEQ ID NO: 200626 - DNA, 447 bp, Homo sapiens
gactctgttgcccaaattaagttatgtgcaccgaatgctttgtcaaactgtaactattttaatgttcattctaagccacaaatctttgccaaagaagatactgaattactctcttttgtttaggagtagaatacacaataacctaatatttaaaagtattattcagaagaagaaaaacttaggattgaatttttctttatcataaattttagatcattctctttgctcgattccatagaagacactaagaattagactgaactgctttctcattgtattgttttctacttgacctaaaaatccaggggtgggttatatagagagtttatttaggagactttggtaagggagagagaaaaataatgtacaagctggaaacgcatgaaaaatgtaaacaatgaaagttagaagaatggaagcgacagtgtgctcaggaaatgatgtgtc

SEQ ID NO: 200627 - DNA, 357 bp, Homo sapiens
actcagatcctctccatctccctgccttgctgtccttggaatgtcagcttggtcccaagacaactgctacaattctgggcgtcatactcacataaaccaacaatgtcaagcgaaaggacattctgattttttttttttaaataaaggaaacttttccatcagatatccctagaaaatttcttttgatgtcccctttgccacagtctaagtcagatgcccacttcattttatttttttcaagacggagtctcgctctgtcgccaggctggagtgcagtggcataatctcggaccactgcaatctccacttcacagcagatgcccacttctaaaccatccattggcaaggagaatggga

SEQ ID NO: 200628 - DNA, 156 bp, Homo sapiens
ggagtggatttcttctttctggctcttacaccatgtgggggcacagagtttaaagtgccatcgtggaagcagaaacaagggcccacaccagacatgaaacctgctggcactttgatcttggactttccattctccagacctgggaggaaagacatt

SEQ ID NO: 200629 - DNA, 284 bp, Homo sapiens
gggtccaaatgtgaaaggaaagagcaaacacaggggaaacataggggtgttcagaaatagttcccaggttactgcctgtttcaatatgtacagtcctcggccccacccacaagattctgacttggcaggtcagagttggagacgggggagctacctggttacgagggatcccagttcattttgaggcagctggttgttagactgcattgtaaaaattaccccccaaagatgtgaagggataatttatgtatttttaatagagataggttttcaccatgttggcc

SEQ ID NO: 200630 - DNA, 437 bp, Homo sapiens
ctgtcaaagcagttggtggtttgggttaataaaatttttagatcttataaaatgtattttcttttgaggtatttttgcattgtttttagaataatgagatctgagatataaacctgagactcaacagaagactgcatagaagttgatggccgaaataaaatgtagattctccctcaatggagaaacataatttttcccaggcacaaggcatgaaggagactctgtcccagccccttgctgcttttttgagacatatcagaagccgtagaaggagcggggagggatagcattaggagatatacctaatgttaaatgacgagttaatgggtgcagcacaccaacatggcacatgtatacatatgtaacctgcacgttgtgcacatgtaccctaaaacttaaagtataataaaaataaataaataaataaataaataaat

SEQ ID NO: 200631 - DNA, 451 bp, Homo sapiens
aaacaatgctgagagtgctgccatctcaggagagcaggaagtctatgcactcttttttcccgtctaaggcaggggtccccaactcgcagcaggggaccagtactggtctgtggcctgttaggaactgggccttacagtaggaggtgagcagcaggccagcgagcattaccgcctgagccccacctcctgtcagatcagcggtggcattagattctcataggagcacaaaccctattgtgaactgcacgtgcgagggatctagcttgtgcgctccttttgagaatctaatgcctgatgacctgaggtggaacagtttcatcccaaaaccatccccacaaccccgtccatagaaaaattatcttccatgaatcctggtgccaaaaagattggctggtgtaagggaccctgtgatacgtgcatgaggtgtgaactgactctgttgattatccgg

SEQ ID NO: 200632 - DNA, 532 bp, Homo sapiens
  misc_feature (102)..(102): n is a, c, g, or t
agaagtataccatcaaaccccccagggacctgtgcagcaggtttgagcaggagcaagaggtgaagaagcagcaggagatcagagcccaggagaagaagcggntgagggaggaggaggagcgcctcatggaagcggagaaggcaaagccggatgccctgcacggcctgcgggtgcactcctgggtccttgtgctatcggggaagcgcgaggtgcctgagaacttcttcatcgacccattcacaggacatagctacagcacccaggatgagcacttcctgggcatcgaaagcctgtggaaccacaagaactactggatcaacatgcaggattgctggaactgctgcaaggtgcctagggagggggagctgggtgggtgtggcaggcacagtgcaggtgataggaatagagggaagcaatggcagccagaccttggggagagcgagacaccaggccacgagggctttgaaccttctccatagctgcgtctccatggcccactcccttgcccatgaataaccattctgatacgaaa

SEQ ID NO: 200633 - DNA, 410 bp, Homo sapiens
ctcagagctttttccatgactgagttagaggagtaaggaatccttctctccagcccagcgctgtgttcctgtgaagaatcctttggtcagttggccattgagaaaggggtagcttggagatgtaggaaaatgtaaaatgttccctgtcctctggttctcaatttgggtgtgtggtcatggagcaattagaaataacactccaaaatgcaggatccaatgtcatgaatatacaaattgttctctaacacataactcaagtccctgtccttccagaatagtgaaaatagtgggagggataatacccaatccatttgaacacaggtgctacatttcactctggacagcaaatatgtttctagaaagttccacatggcatgggcattttgtaaattgaattaaatattttcttt

SEQ ID NO: 200634 - DNA, 684 bp, Homo sapiens
gtgtctttctgtgcctggcttatttcatttagcataatgacctccagtgctatccatattgttgcaaatgacaagatctctttttttttttatggctgaatagtactcctaaagtggttagttttatgttatgtgaattatgcctcaattttttaaaatcttaataaaaataaagctggttctttgaaaatactagtgataacatcagtaaattcaaaagcttaagaaaaatggggctgggcatgttggctcatgcctgtaatctcagcactttgggaggccacagcaggaacattgctggagaccagcctgggcaacgtagcaagaccccatatcgattttttaatttattttttttgaaacggagtgtcactcttgttgcccaggctggcatgcaaaggcatgatctcggctcacttcaacctctacctcccaggttcaagcgcttctcctgtctcagcctcctgagtagctgggattacaggtgtgtgccaccatgcctggctaattttgtttatttatttatttattttgagacggagtcttgctctgtcgtccaggctggagtgcagtggcgccatctcggctcactgcaagctctgcctcccaggttcacggcattctcctgcttcagcctcccaagtagctgggactacaggtgcccgccacctcgcctggctaatt

SEQ ID NO: 200635 - DNA, 342 bp, Homo sapiens
tgaatgggtagcaacaattataaggatatgtgtcctccagtgtgagaaaacacattgacttggatcaaggacattttcctcaggttgtaacctcaagaataaatgggaggtgtgtagatgaagtagacaaagttgatatggaaagaatgtttcaggtagagcagacagctgatgatgatttcccagtgaaaacaaataacaccatctgttgtcaattaaaggtggtgggggacgaaagctgatctttaggaagttgcatgaggtctgatgcagccactacagaaaataagtagggaaactgacccatggatgcggaaatcttctaggtgttgttgctagcct

SEQ ID NO: 200636 - DNA, 284 bp, Homo sapiens
tcaaaaaggtaatggtctaaaaagggagggagaggaaatggctctagattgaaagagacttagtgagatgtaagaaccaattataatgtgtgaaccttgttttggtcctgatttggaacaaacctattgtaagatattcttgaaacaattgggcaaatttaaatgtaaactggatattacataataccaagggaattattgttacttttgtaagggtgataacattctggtaacataacaaaaatgtccatggccgggcacagtagctcacacctgtaatccca

SEQ ID NO: 200637 - DNA, 442 bp, Homo sapiens
cattcagaataccaacttcccttctccaattccaaaataaaccccaaactcacaggatttaaacaaggcagcagtcaaaaaggcctctatttatgtcaaacaactcactgtctctgagaatgaacgtcaagtgcttccaaagtattaaccaattgcttttaaaagtagtagttggccgggagcggcggctcacacctgtaatcccagcactttgggaggccgaggcgggtggatcgagtttgagaccagcctggccaacatagtgaaaccccatctctactaaaaatacaaattagctaggcatgatggcgggtgcctgtaatcccacctactcaggaggctgaagcaggagaatcacttgaacctgggaggcggaggttgcagtgagccgagatgccgtcattgccctccagcctgggcaacaagagcgaaactccagctc

SEQ ID NO: 200638 - DNA, 609 bp, Homo sapiens
aaatgaaggaaaataatccctgttcttcttatttcactagatgatgaaagaagatgaagtgaataagtttgatgtgccaccatttttaaaactctggttggggccaggcgtggtggctcacgcctgtaatcccagcactttggggggccgaggcaggtggatcacgaggtcagagattcgagaccagcctggccaacatggtgaatccccatctctactaaaaatacaaaaattagctgggagtggtattgcatgcctgtaatcccagccacttgagaggctgagatgtgagaatcacttgaacccaggaggccaaggttgcagtgagctgagatcgtgccactgcactctagcctgggcgacagagcaagactttgtctcaaaacagaaacaaaaacaaacaaaaaacccagttggttttaaaaatacaaggagctgtttttaacagtttggttaacttttaaaggataccttcttatatttatttgctacgctttgtgtgcttggaggaaacaactgtttctttggttatttccttattcttagaatgaagacctcctttgccatcttcagaagagtttggatttgatttgtgggcatcagaggacc

SEQ ID NO: 200639 - DNA, 538 bp, Homo sapiens
agatggcaccactgcactccagcctggatgacagagcaagaccccgtctcagaaaaacaaaaaaaaatctccattgctgcttgccatgaacattttcactcctttaaaaaaaacctattaactagaactaatcaaagccagattgacttctcttcattcaccatggctgcaccataaggtagccaagcctaattttaggaactccgaaacagttgtaacttaaaatttgctttgatggattccattaggccaccttcatttccaggtcttcctaacccatcactgggattcaacctgaaaagaacaatcaaggcccaaagttttaaggaagccaagttcctggggtcagaaattgaatctgtagcaaccttgttacttttggaaaaccttaagaacattctcaacctcacagttctggccagccccactagagtagtgctaagagatttttatacagatatgactttttgcaaacctagaaggaaattgtgcaaggtgtacctttgcctctagcaaagaaaacctttggcttggaatg

SEQ ID NO: 200640 - DNA, 464 bp, Homo sapiens
gcctactctgccacggggcctacttatgttctctccaatcgccttcccaacctaccatggcaggctatacagatgaggaagctgaggctcagacgctgtcaagaactcaagaataggggccgatgtgtgtctgggctggggttggaaagcaggccagcatgtccccagacactctcacggctgcctcagcctctgctcagatgtcctcttctgatcattctgttcagcccattcctgtttcctgctttaatctctgtagtacatctcattgtgtaacttactacctattttacttgctcacttgttggtctgtcagccccaggaggacgggaactttgtccatctgcgagggatgcaggaaggcacagagaggcttcaaaatatattggctaagagctcagggtctggagtggtcctgattccagggttactggtgcacattccagattcatctctcacaagct

SEQ ID NO: 200641 - DNA, 468 bp, Homo sapiens
gacaccttatctctaaagaaaaacttttaaaaatttttaaaagaaatacaatgttatgagcagagttgaagtaccagtatgtctacctgtcttcctttccagggtaaacctttatcctggagtttgtttccttccgttcatgtttttgtgcatttactacatatgtatgtactattcttatgtcccagttctttcctaaagaaaggattgaaacttctctgaaactagctaactcattgtcatagagatgtaaagaaatgggacataagaatagtgagattgcctttaaaaagttaaactatagaatgaacattcaatgaatcagcagagatatgtcaaatcattttacctgactgaatgtattaacatatataaagaaaaatgtgttaacgaaagatcattggccatcccagaagcaaaatctcactgctaagtctctttgtaaattaataaattaattaaactaag

SEQ ID NO: 200642 - DNA, 465 bp, Homo sapiens
caattcacagccaaataaacttttaaataaatgttcaatcttaacaatagtcaaatgcatgcaaatttctaaaaaaaattatttttatttaaaaatattaataaaatgcaatgccttataccatccaatttatggcgcactgcttggctggccttatacatttccacaatctctttggaaaacagtttagcaatgtgtcttaagagagacattaactgttcttactctttcacctagtaaatccattcctgagaattaaactcttggggaaaaaaatccagaaagaaaaagccatcaacacaaagatattcattatacaattatccttaattttgaaaactaaaaagagaaaaaagcagtctaaatgattaacagaagaaatggttatgtaatttaggggaaatgaatgaagtggaccatcatgcagccttcaaaagtgatcaatggcctggcatggtggttcac

SEQ ID NO: 200643 - DNA, 278 bp, Homo sapiens
catctaattagtagacggttcactttctacacatagttggtcacgaccaggtcctcggcgatagtttgctcctgctgctcgtctttgcctgacatcttcctgccaccaccactgcagcctcgtttcccctgagccgcccctctgcctcccttcccagccacaggctgtggtcagagctccctcgatcctcgaggagagggccagcgaaagccgcgaacttagtcttttagcgtgacttctaagagcatctgaaattatacctgtggctcgcctggtag

SEQ ID NO: 200644 - DNA, 198 bp, Homo sapiens
gcattcaaatttaatgtactacagacttcagtttgttacagggtgtgggaaatcattaaaaggaggaaattaaaagatgaaaataaaccttaaagcctgacttttcatacatttgttcttcaatttaacgaacatttattggttttctcccttgtgcctagcactaagaataaagtataaataggacacagtttctga

SEQ ID NO: 200645 - DNA, 178 bp, Homo sapiens
aagaaataatttgtttataagctggaccatccagaaataatgcagttctgtttgaacatctctattcaccttcgtttaaagctacattctagctctgggcctttcatgtgagtcaaatttgccttttaagttacttcaaatagggcttctgaaacccacgtctcttgacaactatggt

SEQ ID NO: 200646 - DNA, 704 bp, Homo sapiens
gttttttaaagtttgtgacaatctgtacacaacacaaggaagagacccatgcccctccccccacctcccccccagaaagcccacaggactctgtcacctcaagctctgtgtctaccaatccttggtgactttttcttttatcaagaagattggccttgtccagtcacacaggatcctgggctcaataggcaaaaggtgtaaactcacgagaccccaggatcacagagtcacagaggatgctgagtgttgactgatgctctgtgtctttatgtacatgacactgtgttagctccatcagtgaagaacacttgaacccatgcacatttccatcactcaaaagaagtgagcagtcatgactttatatttgtgaagaaaagtgcacctcaatctataaccttaggtgaatgaagcttggggtgtgtgagtaattaaaccatccttgcactcctgtaatgagccccagttgatctttatgtattctttactggtctggtggctttaatagtattttctttataattttttatacatttcataagattggtctatgatattatttgtgtgttacctttcaaaagatgtcttatattgtttaatctaagtttacttcttatttgaattatttaacttttttaatgtttacttttcttttatagcttttgctatatgactgtcttcttttttgtaccctttggttatttaga

SEQ ID NO: 200647 - DNA, 506 bp, Homo sapiens
ccgcgcgggtgtcgcaacatccccattcacaattcccgaccaagaatcgaactggctccgctcccaggtcagcctaaggcagggagtccatccggacctggtcccatcagctgggcggggcctgggcggggtcccagggagcctccggcctgggcacctgagccctagaatgagacagcccggcggtcccgcggcgcgctggcgccctcgccctcgcgctccatggtctcgaagagcagccgcaccagcgccggccgtccctgggccaccagggcccgggccagccccaacacctcgtccgtgtgcccgcgccacacgcgctgcagctcctggcgcaggcgcgccgcggggtacttgtcctgggcgcggcgcagccaggcgtccacctcgcggcccagctccccgtcgctcagctgtgcctggctccactgcgccagcagcgcctcgagcaggcagccgaagccgtcggtgtggctggagcccgcgtcgtccagctccactgcgcg

SEQ ID NO: 200648 - DNA, 452 bp, Homo sapiens
cttggggtcttctatcaagttcacgtggtttttggcagaatttagttctttgtggttgtagggccgggcctgcagttctcttgctggctgttagccagcagtgctcaaagctcctggaggcccctgcggttccttgccatgcccttgcacacttccaagctctttcatcagaggaagccaggcactttatggcctcaccttatcagatcaggcccactgaggataatctcctatgttcaggtcagctgatttgggacattttttttaaatctaaaaaatttcaatttcgtctataaaatctcttcagagtggcacctacattagcctttgactgaataactaggaaaaatgtgtatgccagggttcaagaatctttgggagccatctcagaattctgcctaccatgatgcataataatcatttgaactcaataaattatatttaaaactatg

SEQ ID NO: 200649 - DNA, 351 bp, Homo sapiens
tactccttgacctgtagggcctcttcagtctcaaagataaggaactactacagcttccttttttaaaaaactcattcattcagtaaatgtttattaagtaccaaactagttgttaaatcaatgtttattgatcacccttccagacactaagggcacagtagtgaacaagataagaccctaccctaatcaaactcactgtggatgatttcaatacagtgtagtgaccatataatggggtaagcacagggtgctatgggacacactggcacctgatctagacttgggaggacagggaatgtctcctaataagtgtaacatctgagctgcaaactgatggatgctatagttagc

SEQ ID NO: 200650 - DNA, 583 bp, Homo sapiens
accctttggcaagcacgacttctggcttcaccgtttttttgttttttgtttgtttgtttgtttttgacggagttttgctcttgttgcccaggctggagcgcaacagggcgatctcggctcactgcaacctctgcctcccgggttcaagcaattctcctgcttcagcctcccgagtagctgggattacaggcatgcgccaccacgcccggttaattttttttttttttttttttagtagagacggtttcaccatgttgggccaggctggtctcgaactctcgacctcaggtgatccgcctgccttggcctcccaaagtgctgggattacaggcgtgagccaccgcgcccggccctggcttcacccttaaagcagaaaggccagaagtcatcaaggccatgggtttactagcttagcttccccagacttaatttcaaacaccaacaaccgaaatgtttcctagaatgcagagctaatgagacatcaacctctgtcatttcctatgtttttcacaatgtgccaaaacaactgcacacattggaggcgtttttgaatgtgatattcaggcgaccttgccaagcattg

SEQ ID NO: 200651 - DNA, 853 bp, Homo sapiens
tggttctttagtgcctttctcatcaaggggtgactggagtttgatggaaaacatagtctgtacagagtgaggaaatggccatttctgaggtgctcagaaccacaggctcacccctttcacagggttaggatgggagctgttacagggagtttcctgtactttaaaaaagttaaacaacagaatccagcctttgctagctttgggtactgtaaatgatttactgtaacataaaacacatcgagtgagaaaaatatagaataagttttttcttcttcaataagatatgcaaatatatatccaaattatgttgcttacacaaagtaactaaaaatggcgttgcttgtttggtctcaatgaattaaaccacacattgagtttccctgggttatcttcactatcatttcagattcagggttttggttcttaattactgatatcctttggaagacaataataataacaacaataataatacagtggtgctaaatgctgtaaaaactgcattagatgcatgaccccatttggcatctacttttcaaaggtgtgcatgtttcacgaggacactctatatatacatcttaaggctttgtaaggactaattgagataaagtacatgaagttccaagtaatggtgcctggcatgtgacaggcatccaagaattggtagttactattgccactgtatgacaacaatgccatctactctaagttatggcattgctttgtggacgaatcaggaaaaaaaaaccagacactgccaattaaactatgatgtaatagttttatcccttacttttatttttgtttttgaaagagctctcttagacttatttagacatacattttatcatac

SEQ ID NO: 200652 - DNA, 312 bp, Homo sapiens
atcgtctgccaagtaaaaatagacactctagaaaatatttcaaaggttttagtatgcttgacccaggactattggcaaccattgtgaacttcagggatgattacggtatttaataatgaaatgcttaagtacacctgaaaatggatgataggcacttttaaaacttcatttgtttttacctccatttcattagagtcgttatagtattaaaaatattatatttgcaactcaaggggacatcatagtatgctaacaagctaaaacaaacctatcatttatttccactgtttcttggcagcagatatgatgatt

SEQ ID NO: 200653 - DNA, 575 bp, Homo sapiens
caaaaagtccatggaaaatgtgtattatcaagaaactatgcatggattgcaaaatcttttggcatcaaaataaactggtactaactcgttaaaaaatatctcgacaggatctagtttgaggcattaaaaaggagaaagcatcagtgtgaaaagagctcctatcagcgaaaaatggattctgctaaaattgaaggaagaacaaacataaaatttaagatgaagcttgggtggaagaacggtaaaatcactgatgctttaccaaaagtttatggggacaatgcccctaaagagatcagcagtttacaaatggataacttgtaagaaaggacaaaatgatgttgaagatgaagcctgcagcagcaggtcatccacatcaatatgcaagggaaaaaattaggatgtgaaattatgctttatgaggaagtggtcctcacccccactgcctacaacacaagaaaggagaggaagggagcaaactagaagaagaaagatggtattgggggaaaggatatcaattaaagatggattttaaaaattgcttcgcaggagggagggccctcctgtggtttcactgg

SEQ ID NO: 200654 - DNA, 632 bp, Homo sapiens
aagatgtgagaagtgacaagacacagggcatattttgaaggtagagccaacagggtataagggagatggcgctgggaggaaaagaggcatcaaggataactgagaggctttagcctttcatttcacatcagctgtgcagatgtggtctgtggaagcaggcttgggagcactgtggaaacagttcattttttggcatgtccagtttgaggtgccaattagatatatcagtggagatgacaagaaggcagctagtctagtcatgtctgggatggagatgtagacctgagaattctcagctatgatacttcagcttcccaagtagctgagactacaggtgtgtaccaccgtgcctggctaatttttttaaaaaaaactttactagagattaggtcttgctatgttggccaggttggtcttgaactcctggactcaagaaatcctcccaccttggcctcccgaagtgctgggattacaggtgtgtgataagcagaattctaagatggcccccaagattcccagtctctggtgtagctgccctagacagcctcctcccttttgagtgtgggcaaatctagtatgacagctgtcactcttataaggctacaatatactgcaaaggtgaagggattttt

SEQ ID NO: 200655 - DNA, 288 bp, Homo sapiens
aattaaaatttagcataagggttttagtttagatcagagaggtttatataaaaggtatggagtaccctctgactgtttaaatatgaagctgctgactgctgtggaggaatgggatgatgactcaacacctgaattttacttagagtttgaatagtttgttgtattccagcaaaaaattgtagaatctcctttttaaaatagatgaaatagacttaatttgtaatgtagaaactctagtgtatctcattgtaaataaccaaacaaggttaacctgatttctttttaact

SEQ ID NO: 200656 - DNA, 348 bp, Homo sapiens
catggactccactgctgcaatcatcgtttgcatctgatggttctcaaatccatagcttccactcacacctcttctaaacagcttgtccaaagcactaacagagccagccatggtggtgtgcacctataatcctagcttctcaggaggctgagcagggaggattgtttgaggttaggaggtcaaggttgcagtgcactatgatcatgcctgtcaatagtcactggtctccagactgggcaacatagtgagaccccacctcaaaaaaaaaagcactaacaggtctatttggttatcctcctagtatcatcacttcaatatgctctaaactggataatttgtcaatcccct

SEQ ID NO: 200657 - DNA, 688 bp, Homo sapiens
aagggatctaggttgtgctccgtatgagcatctaatgtccagtgatctgaggtggaacagtttcatccagaaaccatgccccactcccacccccgcaacctgtttgtgggaaaactgtctttcaagaaaccagaccctggtgccaaaaaggttagggaccgctaccttagggcccaccaattccaatcctaggtatatgtctaacagaaatgcacatatatggataccaaaagatgtgtaaaagaatgttcattgcagcactattcacaatagctggaaatggaagcacagtgtccatcaatagaaggaatacatacagtgtggtatacatagttacaatacacagtattgtaaaggaatgaactacagcacgcaaaaaaacttggttcaatctcacaagcacaatgactaaaggaatttagacatgagtacatatggtatgatcctattcttataaaattcaaaaaaagataaaactcatctatgttatcagaaattaggatagtggttacctttgggaagaggaagggttacctttgggttacttttggggaggaggtagggactgactgattggagggacaaggtggtgctgctaatactctttatcctgctctgtatggcaggtacacagttgtgttcatgtagtgatgattcatagagctttaccttcatagcgtatttttct

SEQ ID NO: 200658 - DNA, 495 bp, Homo sapiens
ctgtgacagtccaagctctactacatgaatatctatgagaccaacttgcgcgcttctgaaattcatcaatagctgcaataatttaccaaaaaacacagtagactctgtcaacaaagagtttttctaagggggaaaaatatcttagaactataaaataaaaaataacctttcctttgaaaaattgcttttaatagtccaggcgatttgaagcagaactgcttttgataaacaagccaatttttttaaaactgtgagcattcaagcatttaataatttcagttagctcaaaaattataaagcatgaagaaaactcccaaaatgttggatacatttggaatcatttacacctatgctattaatatcttcatattccaataagcaattgccaaccattttcatgtaaatgtgctgctgcttgtacaatatcattacaatgattacatagcaccttgtttgttggggtggggaagggatacacgtagcctaacattcact

SEQ ID NO: 200659 - DNA, 901 bp, Homo sapiens
taagtacactttttgagcaaatccacccttcgttctggaagaagacactctatagtctcaggctgtttctttaccaacatcaacaagctagtcttaaacagaggaacctcagtgcctcactttcaagacaatcaagattatttcccaacattccactagtagagggtcagaaacagagttaaaagttctcagactagaggtagaattgaaaccccagctgagaagtatcaaggtgccctccttccccaaagctacatattcttgtgtcaggatcttaccaggaaatggaaggcacatttacacagggcagcccaagagactgtttcaaaggaaaccagcaagatgtgacaaagcaccccaagactagcgacactgggagaccttctcacttgacttaaaaggctggggcaggagagttacaggacccagtattagctgtagccaaagcctgggcagggccacctaacatgagctgcacccttctgtagagcagcacagaccttgtgcatctgaggcccagcaggatggggccttgctcatccttcccttgcagttcttgctaatgcttcctgttgcctgaacccagctggaagccagagggcaagggaaatcaattgagacagataatggaggtaatcccctgggcacagggcagcatggcagaggtaaggagtctgtctagagccacaaaggaagaggactgagtccagaggtgaaagcagtcacgtatccccaaagacacctgctacacatttgggctttgatttatcaatgagaaggcttgagggacagtgggaaaaatgatgaggagtcattaggtccttgtggaaatggtgcccttgaaggatgagcctgtaatcactaggtacacgtgggtggatgaatgctggtgaaacaggtg

SEQ ID NO: 200660 - DNA, 179 bp, Homo sapiens
aggaaatttttaaacatttttattgtactaaaaaatgaatgcaatggtgttggcattcgaaaagcaaatattaggtgtccattgttgtggttttgcttcctgaatggggacaaaagatcccactctgtgtgcaagaacagcttccttctaggctgcagcggatactttattccagattc

SEQ ID NO: 200661 - DNA, 543 bp, Homo sapiens
ttggataaggagttgcttcttatggatgggcaaagaaagtgatttcctaagatggaatctactcctggtgaagatgctgtaaacaccactgaagtaacaacaaataatttggaatattacataaacttagttggtaaagtagtggcagggtttgagaggactgactcaaattttgaaagaagttctaatatgggtaaaatgctatcaaatagcattgcatgttacagagaaatctttcaagaaaggaagagttcattgatgcagcaaactgtattattgtcttactttaagaaattgccaccccagccttcagtaaccaccactctaatcagttagcagccatcaatactgaggcaagaccatccaccagcaaaaagattatgactcactgaaggcttagataatcattagcaccttttagcaataatgtattttttaattaagatatatacatttttatacataatgctactggacacttatagcagtgtatatttatactgtaaactatagtataataaatatgacttcactgggaaacca

SEQ ID NO: 200662 - DNA, 353 bp, Homo sapiens
gagaaaagaagccttcactaagctctaacgctagtcatagtgaatcgtctgttgtgttctcaccttaacgcggaagagtgatgtttcagtcacacgaaatgattcctaccatacaatacaacacttgtgtgaggctctgtcctaaatatctcaattaccaatatgtggtttggtagtatttctcatcattctttgctcaagtgcaatgagactacaactaggatgtgaattttgagtatcctgtctaaaactcaaacaacgataggaaaaatccatttgttttttcatttgatttttactaaggactcagctcaatcttaaatgaatactagtctttttccaaagcattgttg

SEQ ID NO: 200663 - DNA, 537 bp, Homo sapiens
  misc_feature (438)..(438): n is a, c, g, or t
  misc_feature (461)..(461): n is a, c, g, or t
  misc_feature (474)..(474): n is a, c, g, or t
  misc_feature (516)..(516): n is a, c, g, or t
agagcaaaccaaacacaaaattagaagaaataataaagatcagagcagaaataaataaatttgaaacaaaaaaatataaaagatcaatgaaacaaagagttggtgttttgaaccagatgaagtcagaaaaaagagagacaagattcaaagaaatagtatcagacatgaaaaaggagacattaaaccaacatcacaggacttcaaaggatcattacaggctaccacgagcaactgcacaccggctggaaaacctagaagaaatggatgaattcctatacacacacaacctaccaagacctgatggcttcactgctgaattctaccaaacaccgaacaattacatatatacatcagtgaaattcaacgaactagatcaacagagatcaacagagatgtcagaaaaacaatgttgagtgaaagtggcatggaaaatgtgtngctgttgatttttaggggctgtngatgcatcttttngtctctaaaatttaaacgctgatacagactttttaaaaaatngctttttgctaatgttgtcgc

SEQ ID NO: 200664 - DNA, 218 bp, Homo sapiens
agtaaaacataacagtcaagaaaataaaaaggtgagagtaactgtgcagtggggaaatcttgtgtgtggaaagaatgaatctgtaaaactgttctttcctaagagagttcagcaggatttggatgatagagagctttgtgtacaagggttccagttccacatagtttaggtctaatttcaaaggcaacttctagtgcaacctgtgactcacgctgtcc

SEQ ID NO: 200665 - DNA, 528 bp, Homo sapiens
cattcctgagatgccattttgaactcatttttgtcttctaactgctgatttggttgttatggtatttccgtacatttggaaatctagtggctatgaatattttatacaggttgagtatctgtaatctggaaaccagaaatgctccaaaatctaaaactttgagtgccaacatgacactcgaaataaatgctcattggaatgtttcagatttttgaattagggatgctcaaccagtaggtaaaaaggcaaatatctgcaaatctgaaaaaatcccagtctggtgtcaagcattctgtataaaggcctctcaacctgtatttgccttctttcgctgtctggtcaagtacttgtacattatgtatcacttattttaagcaagttagttgtacttagcagttattagagatgtgattgttggaagtgaatgttcagtgttgcaaagtgaaaatagcactcaggcaaaagttttctcagcaaggcagtttacttctgtagaagggtgtgtcttgcagatggagcaatcgtgag

SEQ ID NO: 200666 - DNA, 301 bp, Homo sapiens
ccactgggttcctgccaataaatggggtttggggttggctgcctggaattgctgtcgaagttggcagctgcttggcagctttgctttctgagcccaacaacagctccaagaatgtgtccggcaggatttaagcctgagctgggaacgcacatctgtgaggctctgatgtgaatattcagcagggagatctggatttcttctcgattgcctgtagcatcaaatctgtgacgaggcttacccaggactttcttctcctgacataattgcggttttcaaattcagttatgttcccactcttgta

SEQ ID NO: 200667 - DNA, 446 bp, Homo sapiens
gaccctgggttaggatggcatccagagacctgagccttgaacaatggtgtgatggttgatactgagtgtcaacttgattggactgaagaatacaaagtattgatcctgggtgtgtctgtgagagtgttgctaaaggatattaacatttgactcagtgggctgggaaaggcagacccacctttaacctgggtgggcaccatctaatcagctgccagtgctgctagaatgtaaacaggcagaaaaaatgtaaaagagagactggtctagcctcccagcctacatctttctcatgtgctggatgcttcctgccctcgaacatcggactccaagttcctcagttttgaaactgggactggctcttcttgctcctcagcctgcagacggcctattgtgggaccttgtgatcgtgtgagttaatatgtaataaactcccctttatatatata

SEQ ID NO: 200668 - DNA, 242 bp, Homo sapiens
ggaaaaaaaaaaaaaaaaaaaaggatgagctcataatgtacatgcaattgtgtaacttccttttttcaataaaaaatatcctaggcatccataagatttttgttatcagagaatggagataaaaatatggaaaggaagataacgaggatgaaccttctggagttggattccaaattgagtattggtggaaacattttcttcaatatatatggatagatttggaaataaatatacatatatgc

SEQ ID NO: 200669 - DNA, 513 bp, Homo sapiens
tagaggcttccattaattaggaaatacaggaaaagaatctattcatttccagtctctttttatattagaaatcctgactcaattttagttttccctggttctgtaccaggtgttctctgagttcctagaagcaaatcatgccttaaggatttaggagaaaaggcccaaagctcagtgtactcgacaggggcacagtgttagaaagtgtactaacttcgaccagatgtggtggctcatgcctgtaatcccagcactttcagagggtgaggcagcggatcgcctggggtcaggagttcgagatcagcctggccaacatggtgaaaccccatctctactaaaaatgcaaaaattagcaggctgttacaaatgcaaaaattacagctggtgcctgtaatcccagctactcgggaggctgacgtaggagaattgcttgaacccaggagatggaggttgcagcgagctgagatcacaccactgcactccagcctgggcaacagagagagattccgtctc

SEQ ID NO: 200670 - DNA, 107 bp, Homo sapiens
ccaggcgtgaatacttttccttggtcataaaccaaagctaaaaaagaagagttaagaaaactatttttttttttttgagagagagtcttgttctgttgcccaggctg

SEQ ID NO: 200671 - DNA, 906 bp, Homo sapiens
gtgcttgatcaggaagttcatctgtattgcttattaaaaattcatactcctaagcctcatccccagatcgactgaatcagaatttctgggagggatctccagcagtctcttaacagacatcctggacattcttgagatcaggcatatttaagaaatactgaattatgtgatccttctcccagcagattacctttctgattatatttttttgaaatcatatcatcccttttgttttcttgaacatactttaccccagcagcagtaaagaggcagctcaggattgctagtttagtattgaaaaccagaaagtgtgtatagctaaatactgcatgatattgtttgtccataatgtaagcatacttgattaacgagtattaacttagtgtgagtttattaacttattaacttattcatactattgtctgttccatggatagtgtcctgaagatggcaagtgttacatttagtctgcaaggaaacaagatctaaaacagtaaaatgacgaaccgtcatgaagtacattaggggtatatgtgtaggggctgatggggagaggttatatgtgtgatttgccatgtcttactctgcaactccttttcttaacattaaacttgtgagtgtgcttcaacctcagggacaaattgttgttatttagagaaatgaattatgcattcttttccttataattacatagtttatgtaccatcctctttgaacgtagcagaaggatttgtttcttataaagaaataaatgtgttggcctctaatttagtattggagtaatccttgtgtctcagacaaaaagatgaattatcaaatactttagggtactactgtgttacacattgttgaatctattatttgtgtgtataaatccatgattaaattaagtagtgttatctaatt

SEQ ID NO: 200672 - DNA, 415 bp, Homo sapiens
catactatatagtatgtttccttttcatatttgctttttttcccactcagcataattcctggaggttccttcaagttgtgacatgtatcaatagttcattcctttttattgctggatagtatttcatagtatggatgtactataatttaagcattgtcaattttggtagtttccactttgagctattccaaataaagtttctgtgaatattcatatacaagtttctacattaacataagttttcatttctctggggtgaatgcccaagagtgccattgctgggtcatttggtaaatatatttttttgtttttctgagatggagtcttgttctgttgccaggctggagtgttgtggtgagccaagatcacaccattgcactccagcctgggcaacaagagctaaactccatctcaa

SEQ ID NO: 200673 - DNA, 490 bp, Homo sapiens
ccctctagcccccttccttacctggtaagtcaaatgaaccaaatgtcaaacagtttggaaaggagagttgaagcagaaggaaacttccttctgcccctttgaatttgttactttttcttccaattaaaaatgtgttatttttacaataccattatattgacattgcaagggtccctgatgtttttattgttttctgttgtcactttgtatctcttctcccattcccatcccactcccattagcatcttctctgatgtgtttaatatgtatccttggatatatatgtattcttacatggtgttttctgtaaatttatataaatagtattacatgataattctcattctgatcctttcttcatttaaaactatgtttttcagttctgttggtgttgtgtttatatggtgcttttagccactgcattgtatttttattgctctgtctactgcgttttatttgcctgttcccctaagtgacagacaccttattt

SEQ ID NO: 200674 - DNA, 503 bp, Homo sapiens
aggcatttcacagaagcagaaacccggagggtcaatatccatgaaaagattgtcaacttcatgaatagtcgggaaacaagtgaaacaccaatgagataccatttcacttccatccaattaacaacaaagttcaagatcaacatggcctggtggcagcaagaatgcagagaaataggagcctcttatgctgctggtgtgacagtgcacacgcagacatcttttaaaaacaactgacaatacctggtaaaggggaagcatccacttctatgtatctgtcctaaaatcactcgcatgtgtacacaagaaaacagccacagaatgtgtggcagcattgtttgtagtcataggaaatttcaaacaagtgtactttgcaaatcacaggacagtcataaattatttgtgacatattccaataatggaaaactccactgcagttggaatgaatgaagggaatcaagatgcatcaaaatgaatagaaataaaaatatattgtgttggacaaa

SEQ ID NO: 200675 - DNA, 1094 bp, Homo sapiens
tgaaatacctcttcctctggggttgggaggtgggcagcaccacaagctgggaagaaactattggcaggagggaagatgacagaaggagtgctgctggaaaagctgattcatttcacccaaaacagctaggtcatcccagcaaaattctttgaatccactccagcttctcctctctccacccctactgattcccaccaggcagtgggacctgtggccaggccagcgggaagcactgtggaccttggccatggcttctagaggtggatggtaaagtctgaagggttctgccctggagtggttttgcctctcatggctgagggccttgaccttaccatggctgagggccatgacctacacagttggtctgtggagccatcttcctttgggtcatctgaaccagaaaggattggaaactgacagctcctgtagcacccaagcacatcctaaggacagccacctcctaccccaggatacagagagaaaaagtccagtaaagcagatggcctagccagatggagctagatccaggcaacagattgcagaccttcagggcagtgtgttagtctaagaggactgcctggaggagagggagccagaaggagggattgagatggattctaggttggagaacctgcagaaggcccaaagtggagttgggagagggagcctggtaagtggaagagtctgtggatataagaaggggaagtgagaggttgggtgatattgagagaaagctgcatgtgtgaggccagtcagcactgcaggacaatgggagctgctgcgacttagttcctaagctgggggagaaggggcagggcctagagtgaggaaagtgggctggatctccactaaccacttctgggactggctgactgcccagtggacagcaggaggaatggttagtattcacctggaccacaccaatatcaggtctcaggagcagtcaagggataccaccctccactgttgctgcggtaatccttctgtcccctccttcacttccattcattccacctggactatacagaactgtgctgggacctggcacaaagacaagggggtgtggcactaaactccaagcctagagaaggaaa

SEQ ID NO: 200676 - DNA, 643 bp, Homo sapiens
tcgaagttacacaagttgtttgtagaaaatatggaaattaccaagaagcaggaaggggaatccgaatccctcaaatgcagcggggagacggtgtgactttgcctcctgttctccttcgttcctgctgagtgtgagaggcctgcttaggtgctgagaggtgtgaggggcactaagcctccaggcatccagcaaccctcggccgcgtgtcgcacacatcccgggtttcggacgagtgtgaagctcacggaaaagccaggtgggttctccaaggtggagccacagggggacaggagagcgtcggtgaccagggtcagcatccggtgaggtgcagttttgtcctgcctttcacctgagctcctgaggggtgcccggtgcagaaaaagtcttcagagacccccccagtggccgcgcgcaccacgtggttgaaccccgaagaaggctgaactccatccaagcccctgaggccagacatctccacggttcccagttttccaatactgcggagagttttccagcctctccagggcagaggctgtgtctggtgaatgtccaggcactgcagcgcctggcacacggcactgggtaggtgcttaacacaacatgtgaacaaatatttattgaactacataaaggtaaaccactc

SEQ ID NO: 200677 - DNA, 642 bp, Homo sapiens
ataatacatctacaaacttacagttggaaggccctctggctgtcataatcatatagttatttaacatttgaaacctaaagcaataggtccttggtaaaatcagggccggcacaattagttgatctaaaatatactttatatccttttcatttaaacatgtcttttaagaataatctgggtatgtggttacctctgcccattcacttttgaaacgtaagagttattacttttccaaaaagcttcttaaaatttttctgattacgttttttcattgtaaaagaaattggaaagtaaaaggtatctgaaaagttttaattgatttttagcttgagcaaaactaataatccattttccataatttattatataaaatgtgatgatggtagaagaaagaaaagaattctactaagatggcaacaggtcccaccaacaccacttcctcagggtccagctaatcccatgagaagagcccttgcaatatgtaaaagatgggagcgccattatgcttgtcaccgtgagtagtaagtaccacgccactgaaatgtgctctacacttattcaaactgacaaatacaatgaacacattttaaaagtcaaatctttatagtaaagcaatttgggaggctagtttgctttctcgtg

SEQ ID NO: 200678 - DNA, 283 bp, Homo sapiens
ctggtgatggagaaaaggaagtgtcatccatacaagatgaatttacactctgaaccccaggaggtcctgcacgtaggaagtgcctacaatccaagtaccatgctctttactgcctctcctgcttccagcactgtccctggggtcatccaaaccagtacagtaacccagctggcctctcttcttctgaaaacatctccaacttcaacaatactttgagataccatattgctggtatttcaaaaactgctgccagcagggaggaggccaatggcgtgtccataga

SEQ ID NO: 200679 - DNA, 352 bp, Homo sapiens
cctggaagactgcaaaggagaagaaggtggcataaccgaggacccaaggccagcgtgggtcgggctccacgcactggtttggtattgcacgtggggacaaggaaaccaaatatgctgagagtcaggtagctcaagatacctctttatcattaagaaatttacaaaccagagcggctgaggattaaactgaggggagattagaaagatagcagtgggtgccttcattcactcccccttgttcctatgatacctctttgcaggaggaaggtccaagatccatctggaagaatatttcccaaagtgggtctctggagctcatataaagagatgctgcttggagaaagggagtcat

SEQ ID NO: 200680 - DNA, 480 bp, Homo sapiens
cccgaccaaaaacagggtatggtggtcaatcaggttatggtggcaagaaagattcttggagggagagaagaggaggcctggctagcagaggtggccctgtcgtgtagatgaaacctcctaggtagcagccctcacagagaaggcagatgtttctttcagacctttaaagatgtcagactctcagtcaatcttccctagatctggacaagggagggccttagagaaagatggcctcccatcagtgcagtttcctccccaggtgcaaatctccccccacagacctgccctctgaacagccattcacagtgtatcaaagaggtatattttggggtgaaatatttttattcccttcacccctagtttatcatgtgtttccttgatgggctgagggcttgacagatgagcagatagacacaatcttagttcatggaaaaggcacagaatagagatgggtagcggagagtttttaagttgctgctg

SEQ ID NO: 200681 - DNA, 439 bp, Homo sapiens
ccactcagattctgtgccccagagacctgctgggtgtgtgtgggggtttgggggtagggcatggggctcctgctcactgatttagcatttgctgtggctaaactacaaagtggacagtccacatggagacagttgagagctacttgcacccaggtcctttctttgagaatacagtgatgtaacaggagacttcttgcattttgcctatgtgaaaccagctggattttgctgaagctgtaattgtgtctctacattctttgattcctgtctaaaaaaaatggtttccacaaatgctgtgaagaatagactgacagagctggaaagcgttaagtagggatcctttaaacagatccctacattgtacattgatcccttcaaccacagccagagaggggcagggacttacttgctctgatcacacagtcagaacaagaactaa

SEQ ID NO: 200682 - DNA, 601 bp, Homo sapiens
gtctgaaatgtgttgagccaagatttactttgagctatacttttatataatttttttttgagacagtttctttcttgttaaaagaaaacagagttaacatataacccagcaattctactcggagatatattcatatgataaatgcttcggaggctgaggcactttgggaggccgaggctggaggattgcttgagcccgggaggtcgaggctgcagtgaaccatgttcatgccactgcattccagcttgggtgacagagcaagactccttctctaattaaaaaaaaaaagcacacacatggtggctactcttattttacatttttagaaaactgattggtggtataactcagctaaagctaagcaattttttaaaattcagttttaaatttttattaaatactgactgcaacctccaggaggtgtagtaatttagcagtggggacagtaatggggagattggaattctagctaaccaattcaactataatggctgggaaaacaagatttcggtgtaagtttaccagaggagagctaacaaagaactcaggcctgaagggttgtcaggacattactggggtgactatcttctcatctccgaac

SEQ ID NO: 200683 - DNA, 171 bp, Homo sapiens
tctgcatccttggtcacacagcagcccacctcagtgtcattgtaagttgtcctcatcctagatctggttgggggtctgcgtctagcttccaggctgtggctgctccctgtcacaatggcttatagttggcacgctcagcagaaattgctaggctcagaagcagctttttat

SEQ ID NO: 200684 - DNA, 355 bp, Homo sapiens
tcacgtttgaggaaagatgggttacctttgtattataaaatgcttattaaagtggttattttgcaatctcccaaatcaggggttagcaaactttttctgtaagaaaaattgcaggccttgtgggcccacggcaaatcaaagatattatataatgagaaaaaacaaaatttccaccatacaaaaacaggcagtggactgcattgccccataagctatagtttgctgatgtccaaatcaaagaagcaatgattttttttctagaatgggtgagggtcacaaaaatgaagagtaaacaactctacttaaaaatattaaatgaggccgggcgcggtggctcacgcctgtaatcccagca

SEQ ID NO: 200685 - DNA, 661 bp, Homo sapiens
tccttcaccaaagagtatcaacatgatgctagatttccaggcagtgcctcctgacttgagatgcaggcctcctgcgtggagcaaatggattccagactccagtatacggctccccgtggtgcaggcttcagtttccctctccccagcggcctcactaacagggtggcagcttagccagtccctgggcagcttcaacagctttgattaaatctggtctgcttccagtcctggagatgccagagaaatcacactgattaccctaacagactggatgaaacactaaacacatacattctgcacagcctcaacaacttcaggagagagagaacccagactctgggcaatgcctgtctgaatgactctttctgaatcacagatcagggatctgccatcagccctcacagtgattgttctgcaagtctggcagccctaaactgattcctgcttattctaaaatacagtattgagcactgggctggcttcgtgagtgtgcgacctgtgacctgtgcagtcatacagaggtcctgtgcttgtctgagaatttttttgagacacagtctcactctgttgcccaggctgcctcccaggcttaaaagcaagcctcccacctcagcctcccaagtagctgggactacaggcacacaccaccatgcccaactaa

SEQ ID NO: 200686 - DNA, 1035 bp, Homo sapiens
  misc_feature (1035)..(1035): n is a, c, g, or t
ctgctgtaagatgggggtatagaggctgggcaattcccaccccctgttgtatagttggactatgttataacgcacaaaagagagctgaccccagggggagccagagggtgatgggttccttgcctccctttccttcccctttctgcccaagcttgtgctgcagttgaacctcttcctgggggtgggagtaggtaaggggtgggtgaggccccaaacccctctctggtagggaaccgtggggatgaagatgaagcttatatgcagttctcttctaggggctgtgggcaaagggcattttgtaattaatattttcaagaatcagatgtctggagtgtaggggtgggcttggtggtggtggacgggcgggcctgctggagggggagcttggtcgctgttgtgattttaggtttgtttttgttttgttttgaatttggggggttgtggattgttgggggtagggagattttttttttttaaagctgcttcctcaactgtttcaagctgcaaatgtttaagagaataacagcccccactcccacaggaaccgctgtaattaaatcagacagtaggaagactgggctgctgccctcaaagccacagcccttggatgttccttttccgagagcagaaggtctaggctacagggagggggagattggctcccgtgagtcaggctgtgtttggggcttgggccctgggattgggaaaaggggatggggcagactttgtaagcatatgctaggtatccgatagtcctgtagaatttagtgaagaaaccttatacagtttttaatttttatataaactataactcagacccaagctacaaggttggaattttggttggttttttttttaagtaccctgcctgtataattgcatcagaatcccccaccccaccccccgcccccgtgtttgtattttgggttggtttacactcgcacatactcagttttcagttttcccctttacagtcttctcccctcacctccaggaccctccccctttttaaaaaataaatcgctgacaagtgtn

SEQ ID NO: 200687 - DNA, 360 bp, Homo sapiens
ctgctgtaagatgggggtatagaggctgggcaattcccaccccctgttgtatagttggactatgttataacgcacaaaagagagctgaccccagggggagccagagggtgatgggttccttgcctccctttccttcccctttctgcccaagcttgtgctgcagttgaacctcttcctgggggtgggagtaggtaaggggtgggtgaggccccaaacccctctctggtagggaaccgtggggatgaagatgaagcttatatgcagttctcttctaggggctgtgggcaaagggcaagttttggattttgcttcttccaagtttgtttttaaacgacaaataaaaaaagaacattttaaata

SEQ ID NO: 200688 - DNA, 424 bp, Homo sapiens
gtggtatcacattgtggtttcgatttgtgtttccctaatgactaatgatgagcatcttttcatgtacttctgggtcatttgtgtacttttgctggagaaatgtctattcagatccttagcccatttaaaatggggttatatgtctttttattgttgagttataatagttctttatatattctggatactagactcaacagatttacagatgttttctcccattctgtgggttgtcatccattttcttgatggtatcctttgaaacacaaacattttaaattctgatgaagtccagtgtatctcttttttctttggttgctgtgcttttggattggtgtctaaagaagtcattgcctaatccaaggtcaggcagacttatggttgcgctataagagttttacagtttagcgcctacgttcatacc

SEQ ID NO: 200689 - DNA, 425 bp, Homo sapiens
ggggcaatgttgaatggttatcactgtgtgtcactgaggttttagggttgtttctcgggcagtgttgttttggcaatagataattcatacaccctactactagcactgcccaagactggattatctgtgacagggacttatatcagacttgtgacctatgaccttcgtctgatcacttttatgtataccaatttccctacctgtgccatccaacatggtagccaccagtcatgtgtgactacagagtgcttgaagcatgttagtctgaagtgagatgtgctataaatataaactacacacctgattttgaagactttctacaaaaatctaaacgatctcactgacaatttttattgattacatgttgaatgtattatattttagatatatcaagttaaaataaaaatatttggaaaattaaaaat

SEQ ID NO: 200690 - DNA, 243 bp, Homo sapiens
catgggtaggtgaccaagtctctccttacacagtgacttatgtgaggtcttatttgggatcaggagcctggcatcttgtgataccatcacaagatataccccccatgtatacatcacaagtatacatcactgtgatactctcagtttagtgcgtatctgttatcttttggcaacaattgctacatatcttactgttaattttattgaactcttattcattgaaatacatatgatatttattgg

SEQ ID NO: 200691 - DNA, 508 bp, Homo sapiens
tggtcctgaactcctagagctcaagtgatccacccacctcagctcccaaagtgctgtgagctgaaatcgcaggcatgagccactgcaccagaccctgtcccctctcttgttctctcctacagctccagggctgtaaggcttcacctgtcatcttaataacagttgccatctctgtcactcttctccctcctgggctggggatggggcaaatgtaagcttctccagttccccaagcatatgggtccatttaatataaaaggctttatggccaatcatgactggggaatagtcagataggatcggaagtgactagatttaagggaaattttaaactgtcagtggggcttcacctcaaaccactaaaaagccagaagaacgaagggatgtgtacaggaaggctggggatagtgtaagcgcctcatgactgggataatctactgtggagtcacacgggaggaccaggccttcaaagatgctttgattgaacacgtccctttaggaccttttt

SEQ ID NO: 200692 - DNA, 470 bp, Homo sapiens
gagagggagaatgctcaaagcagaggtggcagagggctaggaggtgggagcagtggtgggggaagaattgaacacacagttttagaggccacagtggggttgggtattattgatcatcagagcaacgggagccttttcaggactgcgcttgaggaggagcaagacaatgagatttgcaccccagctgctggatggggaggccagtgtggaggcggagggggtcagtgaagagactgttgtacaagatgagggaaaacatggtgataacttggaataaagtggatgtggagccagagagaaatgggtggatttcagagacacttgggaagaagaaaaggacatggagagaggtgatgaaatcagtaatggctcacagatttctggcctgggcgttggatggggagtggaatcgtgcttgagctagggcacgtgggaaaggaaaggtgttctctttttattggcagaggtaa

SEQ ID NO: 200693 - DNA, 291 bp, Homo sapiens
ggaggcagaggttgcagtcagccgagatcgcgccatcgcactccagcctgggcaacagagcgagactccgtctcaaaaaacaacaacaacaaaatatgtgatgcgaaaactgatagaactacaaggggaaatagatgagttcactgtctgcagttggagatccagcaccctctatcgtaaatggacagatccagcaggatgcagttgagtttaacagcaccatcacatcagtcagctgggaataatttacatctgtagactgcttcatccaacgatagcagaatgcacatt

SEQ ID NO: 200694 - DNA, 153 bp, Homo sapiens
agtttctttctgggtatataggagatgtaacaacacagaggtatcttgtaatctttcatctggaaaatcatattctgtggaggccagttggattcaaagatattagtgttatgaaaagcccttttagaagagcacacatgaatttaatttatt

SEQ ID NO: 200695 - DNA, 612 bp, Homo sapiens
  misc_feature (11)..(11): n is a, c, g, or t
tcaacgcttantatattctcaacgctatacttctcaacgctttatacttccgtatgaattcaagtataaagcgtgagctcaacgctttatacttcactaatcttttcttctggaatgtctaacctattaatctcatccagtgtatttcctatctcagacattatagctttcatctgtagatattagttttgggtttcttatatatattatatctctttacttgctcaacctttcctccagcctctttaatgcatgcagtagttacagttacaatgtctttgtctactaattctatcacctgtgtcatttttgcattggtttcacttggctttttttcttctcactattggttatattttcctgcttctctgcatgcctggtaatttcactttagctatttttgtattcctataaatattcttcagctttgttctgggatatagttatttgaaaatgtatttcaaataaggatcaaatgtttgatcatcttaggccttgcttttaaacttcattgggtaggaaccaaactaacattcagtctatggtttattttactacactatggagcaaaactctgagtattctacccaatgccctgtgaattatgaactt

SEQ ID NO: 200696 - DNA, 415 bp, Homo sapiens
agaccaggcggccgggcagagacgctactcacttcccagacggggtggcggccaggcagaggcgctcctcacttcccagatggggcggccggcccttatttcaaataaacctaattcagtcaaggaagttagcgaaaataccaatttcttacattttgttaagaattttttcatctaagttcgtaagagatattgctccgtaactttcttttcttgtaacgtcattgtcaggtttcagcatcaagattatgctggactcaaaatgatttggaagtgttcctcctcctctatgctttgatggcatttgtacacgattggtatttcttctttaaatgtttgatacaactgacaagtgaaatttatctgggcctagttttgtttgtgggaaaagattaataaaaaattcaatttattt

SEQ ID NO: 200697 - DNA, 322 bp, Homo sapiens
gaggacggaaggctggagacccaagaaagggttgctattgaagctccagtggaaggcagtctgttggcagagtccttccgtcttgggagggtggtagtgagtctttgctttattaaggtctgtaggtcagatcatgtaagctggagttcaaggcaagggttgaacctcaaattgaggaactggagtgaaaatcaagaacccaggccaggtgcggtggctcatacctgtaatcccagtgctttgggaggccaaggcaggaggaatgtttgaggctgggcagttcaagaccagtgtaggcagcgtagcgagacccctgtctctc

SEQ ID NO: 200698 - DNA, 666 bp, Homo sapiens
cttttaacataatagctttacaatctttttcattactatttttactgagcattttatttagtcctgcttgtttcagcacaatcgaaactgttttaagagtattagctgcttcatgaatcaaagagaagtcattccttcttgacattcccataattcccatcactgtagtatctgggcacagagaacaagatgatctacagctgtgttacccacaggggagaaggatttagacaatagttgccaggactatttgactctcattcacccaacatggactgaatgtctatgttactgacactatactaggctcagttcacagagctggaagaatttaagggccactatgcctattgactcctgcaggcaactaatcacttaaggttttcacacctaggattcctatagtgttactacaaaataaaacattttctgcttcaggctggcaaggtacaactcagaattaataaattactagtacagtcccatcttacttcaatactctgaccttaactgctttcttccttctctcaactctccaactctctgggctttccacatcttcacctcttcctccactcccttcggcaatttggattagagaaaagaaaacaaaggtgaaagatgagactaaaggcataatgaactgtttaaggggaatacaaggta

SEQ ID NO: 200699 - DNA, 712 bp, Homo sapiens
tttgaataccagaggacaggactaacacagagatagaagagacggaaaaggcacgcagaagatttattgagtacttcctgattacgacagtgtggaatttatataaagaccaggacaagacttaattttttgttttttaaacaactgtctccagttgtttaatggtaactagctttctcttaaggaaagtttttagaggctacgtatgcttatatgtcactggttagaacttagttgcatgatccgatgctagaaaatctagcctttattctgaaagagtatgtgcacagcaacagaaaacaaacctagaacaaatattgaggatgacctgctgtttgaagaaaaagcaagaaattaaatttagctcatagtttacttcctatgtaaaatataaataatcttattgtcagatatctttgttttagaaagtgactgctaatgttgggctagtactagagagaattttctgttatgtacattttatttagatttgacaagctttgggtcagtaatttcgttacgggtaggcactaatttttcaaagctttgggataagtaggggcagcaagagaaactagaagttgttttatggtccccttagatttcttcatctctgattgttagttattaatggccatattttaattaactgtggaagcaggtaaaaatgactttatcatgtgtttccttctttaaaacggctttacttaca

SEQ ID NO: 200700 - DNA, 392 bp, Homo sapiens
agaatctggaatctccctttttggttgccatatttccaagagaagaggaggaaaaagggctctacctgcttttcatcattatcccggataatcttggaagtccatagcccaggaataaattagtgttagaaaacggagtatgtagcaatgttctccctgaatcataacataaacctgtttgcctggtgtgtacacatttcattgtaccaaataagtacttctaaattctttttacatttaactggtgccatccagtagccagagcttgctttagactaaggtgacctgcttctgttggaagatttaccttaacttctccaacagaagaccaacaaatgtgaattgtttctgaagttggattaggtcctatggatgacagaagatagtctgcc

SEQ ID NO: 200701 - DNA, 353 bp, Homo sapiens
tgtgttgctataaaagaatacctgagagtggctcatggttttggaggctggaaattataagagtatggtgctggcatctggtgggggcttttttgctgcttcattccatgggagaaggtggaaaagcaagagagcatgagagcaagaggaagcagaactcactttaataacaacccactctcgcaataaccaacccaactccagtgtgaatgacgttaattcactcatgaaggcagtgaccccacgatctaatcacctcctgtttggccctacttcccaatagtgttgcattggggattcagtttccaacacacaaactttggggacatggttaaaccatagtaagagggaag

SEQ ID NO: 200702 - DNA, 486 bp, Homo sapiens
taaacattagcctggcatggtgacacatgcctgtagtcccatctactcaggctgaggtgggaagatcgcttgggctcatgaatttgaggtcaccatgagttatgatcatgtcactgcactgcagccggggcaacagaatgagaccccattttttttttttaacaaaatatccactagataaaatttgcaggagcctatagaaatccacagaaactcagagctcaggtaggagctaacaagcccagggtgtaaccactccatgcagatttaatagcagatttgatcagccagctgaatggattagtgaattggatgacggatcattaaaatctcattgaaactgaatcagagacatagagagagagagagagagccaaagaattggccaggcacagtggttcatgcctgcaatcccagcattttgaaaggccagggcagaattgcttgagcccaggagtttgagactagccaggcaaacttcagggg

SEQ ID NO: 200703 - DNA, 594 bp, Homo sapiens
cacaactgtaccttttcccatcgcccaaactctgctgtattcactgaagttaccagcccaagtcttacaatcctgtggagttattaggaattttacattttcctatagaaaggatttgttcaattctcctgccagataagcacatgtaatgaatgtccattctgatttctttgaaattattgaattctaaagtgctaatctgatgactatacagacatatctattttaaggtggacataaaatggacatacggtaagtgctagcaattcctgtgttctttttaccatattaaataaagatatctttcacacaagcaactgtcagtagtaatgttttactttaaagactattatgcctaagagttccttttgtttttatacattttgcccccttaatttggctttaatgatcagtcataatctgctatgaattttagggataaacatttgaatgaatgtgtacatcacatacattcattttctattcttttttcagtttagttgaaagtcacactgtagacctttagattgttgttttgaatagaagctctcagtgagactggagtgttattagagaagacattgcctgctgaat

SEQ ID NO: 200704 - DNA, 449 bp, Homo sapiens
cgtgcctgttatcccagctactttggaggctgaggcaggagaatcgcttgaacccggggggcagaagttgccagtgagcagacatcgcgccactgcactccagcctgggcaacagagttagactccatgtcaaaaaaacaaaaaaacaaaaaacaccattcccagtctgcactttttaggattattaaggttaaatttatgtgaaagcacatttcctatttaatcacttggcatcaatttaattgattttgtattttgttttaacttttgcagagtttagtaagaattaaactatttgttaaaagatattttctatgaattttaatattaaataaaataaggtttatttttgtatttgaaatataatgcacatcaggcaagaatagcacgaattctgcagtttgctttttcaaaatggtctttgtaatttaaagttcacccctagaggg

SEQ ID NO: 200705 - DNA, 439 bp, Homo sapiens
gtcacagggagccaagattgcgccactgcattctagcctgggcaacagagtaagactctttcaaaacatataaataaccagaactctggcactgctggtgggcgtgccagccagcacagcatctgggagggctcagcagcccctcgaaagttggacatgtgcatacaactcagcaactgtactcctaggcaggtgtcccagagggtgcctgcacagataacccccagaggcattttcacacaagtgttcctggcaccagcgttctgccgaccaaacagaggcatctgagtgcccatcggtaacagaatgtgccagttgttagggtctctgctaacgtagtgaaaatacgcaaatgatgtgaaattgaaacacagctttggggggtttctgtgtgtgcacccctttccagtgacatcagcacagtgtggatgcttctcag

SEQ ID NO: 200706 - DNA, 481 bp, Homo sapiens
aacagagatgtacaaggagaagagacgaatgacctatggagcttaatttataaatgcaaacagtacctaacaaacccacaggtcctaaactaccaaacctgctttaatttattaatgcaaacagtacctaacaaacccacaggtcctaaacttacaagagaagagacagtaatgctgtgtggactatgcattcagacatttagaaaatattgcaggcagagctggggattccgtggccagagcatatttggtgaaccgaggacgcatcaaagagcttctctggtgttcagtaacttgcactgtatttcagaggtttataaagggaagggacaggaaagcagtgtgccagtaagacaactcctcttctcgtctggattttagaggaatgcagtgaacaaatgatgaaaaagtctgaagggactttggtaattcagtatccgaaaaacaatcagtgttttgtgacattcttagttgtgatcta

SEQ ID NO: 200707 - DNA, 661 bp, Homo sapiens
tcaacaactgattaaagcatttccctgctaccatgattgccttgacaaattctgcagtgctggagtattttacctcccattatttcttccgctgaacaggacgtttggttctaattgttaagcctgcctaatgctgattgaagcgggccatagtatcaagggtggaagaaggtgggaatataaactagatttgctcccttctgtaggaataactctatgaagactttctttttggagacaaatcatcttatgcaggggggaaaaaaaactccctaaaaaagacaaatgacagcgcaagatccaaaaagacaagtgctcagtcattttgtcataatgccagaagagacagtaatgctgtgtggactatgcattcagacatttagaaaatattgcaggcagagctggggattccgtggccagagcatatttggtgaaccgaggacgcatcaaagagcttctctggtgttcagtaacttgcactgtatttcagaggtttataaagggaagggacaggaaagcagtgtgccagtaagacaactcctcttctcgtctggattttagaggaatgcagtgaacaaatgatgaaaaagtctgaagggactttggtaattcagtatccgaaaaacaatcagtgttttgtgacattcttagttgtgatcta

SEQ ID NO: 200708 - DNA, 504 bp, Homo sapiens
tgttgatatgggcaggaggcagggaaatattggataccagggggtgattccccgacaaaggccctaccatcaagcctgaagacccacagccctaagtgggaacagcatttctgttttcatgtccttttggcctgccatgcccccctatcctgtacccatataaatcccgaaacccaggctccagaagcagacctgtaggtgaggagacaagcacacgaactgtggaatgacgtggcagagaaagagagaagaggagggatgtctgaatgctgagatgagtttggctgggggtggtcagagaggagtttggctgctggacggccaggcttcaagggaagatcgtgttcccactccaacccctctttggctccccatccatcccactgagagccacctccatcactcagtaaaactcccacattcatcctttaagtctgtgtgtgacttgattcttccaggatgctggacaagagctcaggatacagaaagctgtcacactggccc

SEQ ID NO: 200709 - DNA, 447 bp, Homo sapiens
cttacacaaccggggattgtggggtgaggagttgagattgaggatcaagggacaagatcaaatatggaaactaagaaaatcctaaaatgcagaagaggagaaaaattaacacttctttaagaggaatcagaagcctctctctctctctctctctctctctctctctcctctctctttctttcaatctctctctctctcacacacacacatacacacatacacatacacaaacacacatacacacacagtcttagagaaatgattcagccttttaaatacacagatgcctgcattccctctcgctctccacataccctctggagattctgactgagtcagttcagtccaggactctatatttttaaaatattaatatcattccagggatttcagggaatatatcctggggattgccggacgtatctgctctagctctattgtaaaggc

SEQ ID NO: 200710 - DNA, 488 bp, Homo sapiens
tgctagaagatcctgaagctccttggccagacagctggaaggaaggctggcctttgctctggaggaccactcggctggcgaggaacattcgatgaggatttgggaaatgaagtgatttttaatattttgtatacgactcaagcgacatactaaaacacacacagatctgtcttgaaaaatgctggtaagcaaaacaaacattcaaactccaatttgcaccaccaggataatccctgttaaaacttatggcttgcgatgggaggcaaaactgccacttccatattaccttaccaaactaggatcaggtggggaaaaaaagcatgttgcactgtcagaaaaattataccaaacttagataaagtcaccttcagttactggatgtcatttcagggcagtgcaggatgtctattgatttacctatttttcaactctgtagacactgatgttaacatgtagatattttattcaataaatatgtaaatgattta

SEQ ID NO: 200711 - DNA, 302 bp, Homo sapiens
aggtgggctgaatgctgctgagaggtcaagtcggatgagggctgggaagtagccattggatttgacaaggagaccttggcatgcatggttgtagaggaggatgaaggcaaaagcctggcttgactgattcaagagcaggagatgagaaagtggagacagcatgcaggggcagccctgccaaggactttgctctaaaggggaacagagaaatggaggagaagcaggagggcaataatccgatagagaggaaaaatctgatgatacagaagagagatgaactgcaagagtcaagcctttgagtt

SEQ ID NO: 200712 - DNA, 409 bp, Homo sapiens
tggctctggctttggtgggcgagaccttggcctgagaactttggttcacaggaagcttcccttgacaatacttgagtgcaaagcttcatccaggtcccacctgggctgttgccaaggatgctcaagcgttctcttcaatcttccctgtgacttccaagaaacgacaagatctctagcccatccatcggtaaaccaagctgccaagtggcctggaaaacgcagtcagtacagataaaaagaacagggcttctcattactcttaaggactgctgagaacaaatcccccctctgcaatcagcaagttgctctctctttaacagaccttcttctggatgcagctatgcgagaggaagccttgtgctccaccatcctgttggaaatagccctattgaggacggcagccagaaca

SEQ ID NO: 200713 - DNA, 474 bp, Homo sapiens
actaatagaaaggctaggaccaaacctataatagtttatgctgtaatagtttatgctgtaatagtttagctgtccacagctgtcgaatctccagcacccagctgtatctggcataaaggtactacataaatatgtgtggactgagtaaacaaatgaacagataatgtgaaaatgagataaccttgtaagacgttcaactcttaaatgtggtacctagctatacagggcattacaatattattataatctaaggtatgcattttaatgaaaaactggctagaatagcatattgtgttagaaaacaaatgcatttaaaaattttttcttttgataatgttgccatcaaacaaatgcatttttaaatcatgtttaaggaaattttcggcgtaattacttaaattcatttctgttcttagaatacccttttggaacttctacttttttacctcaactttaattattgggactaaacca

SEQ ID NO: 200714 - DNA, 485 bp, Homo sapiens
tcctaagattagacatgtatggggaaacactaaagatggaaacggccctacaagcaaatggcccacaccctctttaggctgatgaaccaagagagaaggagctcccagacagggcttggtataggtggtgccttcagctcaaacctactccttcctattcagagccaggggacatgattgcactatttgtggccttgttgctgaacccccagcagcagagattatctgcggccctcttcccatttatctcaaagatgaaaaaacacagagaataaagggcaaagcagaacaaacccatgctatgtgagataagaacctgagctccaaagaagggttttggggaaagtagtagacataggccacttggaaccgacattagttttctcttccgggaagtgaggatgctgtatttaccagcaccttctatctcatatagttaccctctggatcacatgaaaaggcctctgtaaaagttcctacagaaa

SEQ ID NO: 200715 - DNA, 376 bp, Homo sapiens
gggtatggtgcatttacacagtgaggggtgggggaatcagtaacatgtgaggagcccgtcatgccgccacgtgggagtgtcctctctcctgctcacagggagtagttaggactggagatgagcccaagtttgtgaatcttaacaagggtgttgatgcctcaagactggacataatcaccaaggaagttggtggcagtgcagaagtgcacactggggtgccaacatgaaatggggaatgagaggctaggagggagtagctggtgcaagtaaagatgggaacacctgctgtgggtgctgccaggatggtgcaactcagatagaactgaccactaggatttggtaggcgttgacacataatgatgacatgtggggctgc

SEQ ID NO: 200716 - DNA, 220 bp, Homo sapiens
ggctgagcactggatccctgaagtggcactggtcataggcacgctagaaacatggatctctgtctatttagctgagaattctggattaaattcctagaaagccgctgaaggcttttaagcacaaaaatgtcttcagaactgctgcaggaatatacagtacggcgcccaacaggtacggcgccggcgtaccgacgctcgagattcgtacatcagtggtcat

SEQ ID NO: 200717 - DNA, 425 bp, Homo sapiens
atgcagcacaccaccatggcacacgtatacctatgtagcaaacctccacgttctgcacatgtaccccagaacttaaagtaaaattttaaaaaaatttaaaaaagaaaaccctaaaagaaaaatgtcactgtacaccaccaattattattcataaaagaggtatgctgtcttttttttaagtccattaatgggcaaaatctccttagggactttcataaatgtatgcaaattttaacttatcaggtttatttttcctagaaggtcttaaactattcaatcataagctctagtattatgtggtttttcaagaatatctggcctgtatatgcactgtatttccagcatagaacctaatactgatttataattgatgctttagtgctagtattcataacacaattattaaaatattaaacttgaactaa

SEQ ID NO: 200718 - DNA, 451 bp, Homo sapiens
ccatatgcaaagagtcatgcagagtttttctaattctccatcaggctgcttgagggagatgtggttttgatgccatgtaccaccagcatcctgggttttgtcccccttgctcctttattaactgttcttcctgtggtgtgtattcaggctccattggggaatcacagaaaagaagtagagctggaatctgttgggattgcaccctgagaactacagctttcgcttctctatcagcctttctgtttccttgtgctataagggttaaggccctttgatgctccctgcaatgaattacagctacagcctttggcaggtgtattgcttccaaaagctgcagaatttcaggcctatgctttacaggggagtgtttgctagttagcagccctcttcctttccagattgtagcatgagcatggcaagggttacctggtccggtggaacctcccttact

SEQ ID NO: 200719 - DNA, 543 bp, Homo sapiens
atctgtcttcttgactgagtcacagggtacagatatttggtgagacattatttccggctgtgtctgagggtgttcccagttgagacaggcatttaacttagctgactgagaaaagcagactgccaccctccccaatgggcggcggggggggcatcactcagtccagtgaggctctaaacagaacaaaaccgccaaggaagcaagaattctctgcctcagcctgactgctgagttggtatattggtcttctgctcttggactgggacttacaccattggcactccttctctggccctggaatggaaccacacctccatctttcatgggtctccagcttgtagacagcagactgtgggacttctcagcctctataatcacgtgagtcaatttctcacagtaaatctctcatccatccatccatccatccatccatccatccatcttcttattggttctgtttctctggagagccctaactaatagggtatcatatgtctcattgtatcacaagccatcattttaatataatttgctacattcaaa

SEQ ID NO: 200720 - DNA, 494 bp, Homo sapiens
ccgcatggcgtttctttcccggatcccgtttcaggaacgtttctgttggctacaaggaccgtctccaacatgcttaggctctgtgaactttcccaggatcctgagtagggtatccgccattcgtccttagggctccgggatgtctcgttcttactgtgtccctgccaaccctggtcccatctcgtcatgatcacccactgcagaagagaggaggtgctagagtgaacagggtcaggggagccccgttcatccccagggtcccagaatgaaccagtgttaccatgtacccctgcccttgccttcctccctgctctaatggccgtgtgttagccggagatcagtttgggtctgggtgctatgggtctgttgcgcctgtggccttggtccggcctctgtccttgtctctgtgaaatgagagtgactgtgcctgagagcgttccagcaagacaatgatgatctccactgtctgattcccgcttcccaggttctcacaa

SEQ ID NO: 200721 - DNA, 721 bp, Homo sapiens
cagagcagaccacagagttcggaattcacaaaccacatcttggcaagagctcaagcttggataaacagctgccaggccccagtggtggtgaggaagaaaaaccgatgggaaatgggagtccaagcccgcctcctggcacatccctggacaatcctgtacccagcccctccccttctgagatctttcctgtcacacactctttccccagctctgcacattctgacactcaccacaccagcacagcagaatctcaaaaaaaagccacagcagagggctccgctggtagagttgaaaattttggcaagaggaagccactcctccaggcctgggtctcaccctcggagacacatccagtctcagctcagccaggcgctggaactgggtcagccaagcacaggtgagagatgggggagattgtctatgtaaatgtgagcaatgtccccctttgcttcctacctgcagaggttacggctttctaaccacacagacgtctgatgtgacaacccacctgtcactgtcctgctggtagggctgccccttgtggtggtaatacctcaagacactgctgcgtttatagcaagaacataatagtagtctgtaaatatagcttaggaattgttctgcacggtcagatttggagctcgcacattgcagaaacgcaatgccaccagtatcttaactgtctcagaactaactggcattgagtggtagtagtatctac

SEQ ID NO: 200722 - DNA, 446 bp, Homo sapiens
aaaactaaaaacagtagaagagagcaaatattagccgagaaaaatgaaagaagacctaaataaatggagaagcatactatagtcatacattaggagacttgatattattaatatgttagttctctccaatctgattcatagactcaatgtaatcataaccaaaatcctggtaggctgtttttctttttctttttattcatttatttagagacagggtcttgcattgtcacccaggctggactgtagtggcgggatcatagctcactgcagccttgacctcttgggcttaagtgatctcctgcgtcagcttcctgagtagctgggattatgggtgcaagccactatacctgtttgtttattattatttttttttagatggaggttgctgtgggccgagatcgtgccgttgcactccagcctgggcaacaagagtgaggctccgtctc

SEQ ID NO: 200723 - DNA, 545 bp, Homo sapiens
ataaatgaggaccacgtccagatgcagagctgtacgtagaaattaatctttctgtccttgctccaaactctatgttttctttttttagacacaaagattaacactaaagaggtagatgaagaaactaaaaagggaaaaagcaatagtaaatttgaaagaaatagcagctgcaacagcaggtaatacatatccccagcagcttattagaagcaagacttgagcacagatacagagccgctcattaacgataatgccagttccagaattagcaatgccatttcttcctttcttcctgcatatttgtttaccctcacattgtggctccacactgcatgtgaagttcctaccttgtgccacatgctgggaatacaaagatgtgggaccctaatcttgccttcagaggactgtaagtctagagtggacattgctcactttctccttccccctatctcccatccaccacttattatctcctggatgccccattaagccatgaaaatgtgggagaaatcttagaagaaaaacagggactacttatgtttcaa

SEQ ID NO: 200724 - DNA, 468 bp, Homo sapiens
atgagcgctttggtctgatatggttgggaaccagtgtaagaggaaatattttatggctttcagtcttgataaggaaaataagaataaacttccacatattgaaaaaaaatggaaccctaaagaccgttatttccattgatgctttctaaaagcaatgattaggaaacaaataccttagggcagtcatggtggctcatgcctagaaccccagcactttgggaggccaaggtgggtaggcagattgcttgagcccaggagttcgagaccagcctgggcaacatggtgaaaccccttctctcaaaaagaaaaagaaaaaaaaaattagctgggcagttgcacatgcctgtagtcccagctactcaggaggctaaagtgggatgatcgtttgagctcagaaagtcaagtctgcagtgagccgtgattatgccactgcattctagcctggacaacagagcgagatcctgcctc

SEQ ID NO: 200725 - DNA, 367 bp, Homo sapiens
aggcttttaaaaagaggtaggcagcagaacacaaaagtggaaaggcatagatgtggcacagtgtggatgaggaactctaagtaactcaggctggctagaggacaagttatgcatttcatggcgtagtagcaaaatacaagaagtaggtaggagccaggatcccagaagtcttgagagccattcaaagaatgtgaattttgccactgaagagttctcactttttttgagacagggtctcactttgttgcccaggctggagtgcaggggtgagaacacggctcactgcagcctcaacctctcaggctcaagcaatcttcctgcttcagccccacaagtggctaggaccacaggtatgcaccaccacacc

SEQ ID NO: 200726 - DNA, 505 bp, Homo sapiens
cctgctgttctcagttttctcactgttcttagtttcactatggccggggggaggggagggaggaggccatgttaacgaaggagaaacagagctaaggataggattatctataaagtatagatatccaatgactcctgtgttcttaatgcccacgccttccgccacacctgcactggttgaactgtgcaccccccaaagtcctaaaccccagtatttgtgagtgggaccttatgtgcaaacacgatctttgtagctgcaatcaagttaagatgagatcatcctggcttaggatggggaataattgcttaacagatacaagttctcttttgggatcgtgaaaatgttctggaactagagagaggtgatggttgcacgacatggtaaatgcaataaatgccactcaattgtgcacggcaagatggttcaaacaggctgggtacagtggctcatgcctataatctcaacgctttgggaggccaaggtgggaggatcacttgagcctcag

SEQ ID NO: 200727 - DNA, 661 bp, Homo sapiens
tgggaggctgaggtaggaggtttccttgagcctaggagttcaagaccagcctgggcaacagagcaagaccgtgtttcaaatttattcattcaccctcattcatttattcataaataaataaatacataaataaataaccaaccaagcagacttgatctcaggaatgcaagaatggtttagcaacagaaaatgaatttatgtaatctgtcatattcatagattaaatgacaaaatgattgaaattatagagatggcaattatatatttaatgcaaaatcaaatcaaaatcccatcagaatttttttgtagaatttgacaatcacatgagtgaataaaagggcaagaataaggcaattttgaagaattattatttaaacagtaagcacagaccatgaagaaaaatgaaaaactggactgttatgacaaacaacaccataaacaaagttaagatatgttagatcctagaagaaagtatctgccttgtatataagcattaaaagggtggtatccagaatttctaaagctgccaggtatgatggctcatgcctgtaatcccagcactttaggaggccagggtgggggaggattgcttaaggccatgaatttgagaccagtctgggcaacacgatgagatcctgtctctacaaaaaaaaacaaacaa

SEQ ID NO: 200728 - DNA, 757 bp, Homo sapiens
  misc_feature (16)..(16): n is a, c, g, or t
ctactactactactanattcgcggcccgtcgacggagatagaagtttctaaggaaaaatatatctgcttctatactattggtgtgatgaatgaggtatgttaaggatgaggtttaaagacaattacttttaaaaatattatgcatggtagatattgaacttatgacctattctaataaattagagattggatttcaatctgaatttggttgtttttggcatgtccgtgtagaaaaacaattagcagaagtgtagcaaattaattttctatgaatagttataaatggttaatatttctaccagtttttagagcgttttcttgaaaaatgcatggggataaattttttctcttgatatactttttctctcatagtctacatttgttatgtatttgtaaaaactgttaggttactatacattaaactagtagtatagaattacttttcctggttgtgtatgaactatattagttttatcaagcatttttttaaatacttcaaaagatttttttcaagataattttttagtgagaacagtacagacgactcactttctatttttatgttgaaatgtgttttcttttactgtgactttgaaacatacttaacctaaatatattcttaaacttaagatttggattcatctatctgtgggatatctacctcctgcatattaatgagtaatgtgttggtgataaatagaaaaaaaaaaatcactagatgatttcagtagacattactattgtcaaaaaaaagaaa

SEQ ID NO: 200729 - DNA, 588 bp, Homo sapiens
ccagtagctggggctacaagtcctacacttcttaaatataggggatattgttgattaccaatatccccttgccttgttgaactgtaaaccaagagcagaacctttgtgtcctcattaatgtatcctaaattcctagaaaggttcctagcaataaatatgtggataaatccaagagaacaataaatatgtggataaatctacaataaataataaataataataagtccacaataaatatgtagataaatccaagagaactttgcttaagatgtatgtaagtccctttggatccttgtagcacatctgaggcatgtgtgtcagggatgatcagcctcattttataggttagtatatgtgtgtttgtagtgttttttgtttgtttactgtttgtgcagtgagtgttcccctctctctccaacttaatggtaatgtaagctgttggagaattaaggctgtgttttaaagctctattttccattgtatggggaaacttacacagtactaacttttttatcttctagttctttgacactaagtatgtaataaattgtagttaaccatattcaccctacagaattacagagcacc

SEQ ID NO: 200730 - DNA, 400 bp, Homo sapiens
gtgtaaacattatcattttctgtcagtgccagaatgtgagttaggcttgggaagcataatttcactcagaaatggaaagaagaagaaatgttattttgttacttttatttttaaactagttctctctcctattgtttaattgatgatgagatatataaatattcatattggatttaaaacttgaaatttgtactgggtagtttattgttagtgatgtcaaaagttatagcataaaagttacttgcataaaagtgtaaacatttcctgagcaatgcaatatgtggccaccagtcagttgtgttagttgacaaagggcaaacatgacctgttttctgagagtgctgttcacctgggttcttttcattttcagtactccttttggagaagtttggtttactag

SEQ ID NO: 200731 - DNA, 298 bp, Homo sapiens
gaccgagacaagtgaaccataaccaatactaccaatcaatactcatcattaataatcattatggctatacgcaataaaaccaggaatagccccctttcacttctgagtcccagaggctccccagaagcttctcctcctttttgaggccttctctggacaccaaccacgcaccagcttcctcaccagcaagattcatcacttctcccttctgcccctctggactgcaccgtgtttattcatgtgtctgacgcctgagcaaagtggagttccttaaagtcccggagctgtgacactcatc

SEQ ID NO: 200732 - DNA, 588 bp, Homo sapiens
ttttgattatttttgtaaaaagaattaaaaattttatttccagttgtttgttactagtatatgaaaacacaattaatttttggaatttggacttgtattttaccatcttactaaattcattataaattctagttatttttggtagaatcttaaaaatgtagatatcatgccatcttgcagagacaattttagtgctttctttgtaatttttatgtcagtttacttctttttctagccctattgtactagttaacaactccaatataatactgaatggaagtggtgagagtggacattcttgtcttgctctcagtcttaccgtcttagtttttcatcactagatgtgatgttagctgtaaatttataataaatgccccttattgagttcaggaagttgcattctattctgagtttttggagattttttaaaagaatgttacattttgtaaaattctctttgttctatatctacttgaatatcttatataaattttctgtttttttcttataatgtgttgaatcacaatggttgattttcaaatgtcgaatcaatcttatattcctaaaataaagctcatttatttagtt

SEQ ID NO: 200733 - DNA, 999 bp, Homo sapiens
caggtagtggcaggagaccctttagctcaaagggcaacgtgagtcttcgctgataattgctcgcgtcgcttcattgcaggccaactggccgctgatcgaacaggtgtctaggcagaaggagtaggagaccttgtgctaggtaggtgaaccagaaaccaccctgccacaacgtaaaggttgtggcagggcgaagccagaggaaactctggtggaggtccgtagcggtcctgacgtgcaaatcggtcgtccgacctgggtataggggcgaaagactaatcgaaccatctagtagctggttccctccgaagtttccctcaggatagctggcgctctcgcagacccgacgcacccccgccacgcagttttatccggtaaagcgaatgattagaggtcttggggccgaaacgatctcaacctattctcaaactttaaatgggtaagaagcccggctcgctggcgtggagccgggcgtggaatgcgagtgcctagtgggccacttttggtaagcagaactggcgctgcgggatgaaccgaacgccgggttaaggcgcccgatgccgacgctcatcagaccccagaaaaggtgttggttgatatagacagcaggacggtggccatggaagtcggaatccgctaaggagtgtgtaacaactcacctgccgaatcaactagccctgaaaatggatggcgctggagcgtcgggcccatacccggccgtcgccggcagccaaccgtggactagtagcctaccgtggactagtatccaaccgtggcagctagtatgcccaaccgtggactagtacccaaccatggactagtagccaaacgtggagctactagccaaccgtggactagtagccaaccgtggactaatacacaaccgtggactagtagccaaccgtggactactagccaaccgtggactagtagccaaccgtggactagtagccaaccgtggagcatagtagccaaccagtggatctagtagccaaccgtggc

SEQ ID NO: 200734 - DNA, 882 bp, Homo sapiens
gttgaggtggatctgaccgcagctttgatgacccgttctattgttttatcattctgcctgtcaggatactccctgttgaatgtcgtgttgcggctccgtggcgggtcctccatctgcagttcgcccgtccgccttggggtcttggggctgagccgttgttcgacaccctctattactggttccctccgaagtttccctcaggatagctggcgctctcgcagacccgacgcacccccgccacgcagttttatccggtaaagcgaatgattagaggtcttggggccgaaacgatctcaacctattctcaaactttaaatgggtaagaagcccggctcgctggcgtggagccgggcgtggaatgcgagtgcctagtgggccacttttggtaagcagaactggcgctgcgggatgaaccgaacgccgggttaaggcgcccgatgccgacgctcatcagaccccagaaaaggtgttggttgatatagacagcaggacggtggccatggaagtcggaatccgctaaggagtgtgtaacaactcacctgccgaatcaactagccctgaaaatggatggcgctggagcgtcgggcccatacccggccgtcgccggcagccaaccgtggactagtagcctaccgtggactagtatccaaccgtggcagctagtatgcccaaccgtggactagtacccaaccatggactagtagccaaacgtggagctactagccaaccgtggactagtagccaaccgtggactaatacacaaccgtggactagtagccaaccgtggactactagccaaccgtggactagtagccaaccgtggactagtagccaaccgtggagcatagtagccaaccagtggatctagtagccaaccgtggc

SEQ ID NO: 200735 - DNA, 692 bp, Homo sapiens
gcctgcaggtgactctatgagatccccccgccgagccaccgcccccgccacgcagttttatccggtaaagcgaatgattagaggtcttggggccgaaacgatctcaacctattctcaaactttaaatgggtaagaagcccggctcgctggcgtggagccgggcgtggaatgcgagtgcctagtgggccacttttggtaagcagaactggcgctgcgggatgaaccgaacgccgggttaaggcgcccgatgccgacgctcatcagaccccagaaaaggtgttggttgatatagacagcaggacggtggccatggaagtcggaatccgctaaggagtgtgtaacaactcacctgccgaatcaactagccctgaaaatggatggcgctggagcgtcgggcccatacccggccgtcgccggcagccaaccgtggactagtagcctaccgtggactagtatccaaccgtggcagctagtatgcccaaccgtggactagtacccaaccatggactagtagccaaacgtggagctactagccaaccgtggactagtagccaaccgtggactaatacacaaccgtggactagtagccaaccgtggactactagccaaccgtggactagtagccaaccgtggactagtagccaaccgtggagcatagtagccaaccagtggatctagtagccaaccgtggc

SEQ ID NO: 200736 - DNA, 120 bp, Homo sapiens
acccggccgtcgccggcagtcgagagtggacgggagcggcgggggcggcgcgcgcgcgcgcgcgtgtggtgtgcgtcggagggcggcggcggcggcgggggtgtggggtccttcccccgc

SEQ ID NO: 200737 - DNA, 216 bp, Homo sapiens
aatccacatctataaattctagacttttatgttcaaatataaatacaagatagcaagactgcttatggagattatctaatcccccaatttataaatcatgaacagaatataacatgtctttaataaaccagatctcacaatgcctctttagaagcagctttttagagggccagagtcctggaccaatgtcctcaggcactcttataaggtcactgg

SEQ ID NO: 200738 - DNA, 780 bp, Homo sapiens
gtgaagccaagacttttaaccagaaagtctagctttttgagcatgcattctgataccaggtaggagagggcacatataatggaaaaacatggagagaaaagggtactagagttctcagtaaggtcagagaactgataatattaggacatctgaaagagagaaatagagcagattgagatcagagaaagagttgtttgaatgtaagatttcataagtaacatagttacaaagcaggatatggctagaccaggggtgaaggtctccaagatgaggtctttatagaattaagaggctggggtattttgtgtgtccctaatgtaaaccataaagttggacagaatggtagcaggactttacatgagaatggaagagtgatgttaacacctcttaataccaccacagtggagtttaggtttcagcatgaatttgggaggggcacagacatttggaccatagcaaatggtgtcttacattcttttatcgggaaatagttttccattttcctcattgactaggattcggtatttctttaatacacttacaaagctttctattaaaataataagggccctaaatttagcaagccctaagtgtgttttgggatgagtcataaaatatttttcttaagttttgagggtcacataagaaaaatgtatatagagactgggcatagtggcccacacctgtaatcccagcactttggaaggccaaagcaggcggataacctaaggttgggagtttgagaacagcctggttaacatggtgaaaccccatctctac

SEQ ID NO: 200739 - DNA, 306 bp, Homo sapiens
agtgatgtgttgatggtatattaattcaggtaagacaatatgaactgtaatagtgttatgcttcacatgaatgtcagcaacatacaaagaagcctaataaacgagttcttatacttttggtggaagtatatatgttagtagtttttaatgaaatatatgaatatatgttattgaattctattagtcttctgtatctttcagtggaaaatctctaatgataaaaataactgctcaaaaataaaattacataatgtgtatgaatacatatcataaccataataaaaagatgttatttaaatgctattt

SEQ ID NO: 200740 - DNA, 575 bp, Homo sapiens
ttaaaaaggggggaaaaaaagaatgtaacggaaatctatttccacaatacacccaagggtaactaatgtaactaactggctaatgacaatacaagattaaaataaacaccaaaacccactatacctggattcatattacttagatgagaagctaagttaagatattgtagggaagctcacttaattacactggtgatgaaattgtcttttctcttttcttgagtttaagcagttatgccttgggcccaactttcctgaccttgtgagtaagttgagccacatgttcagcagaagatatcacagtagctgtatttttataagaaaattcctttttaattataaaactaaagcagagaaaacaaaaaaaaaaaaaaaaaaaggaagaaaaattattcctaatcccaccaccttcagataccagaacggttaaatctacatccacgactccttttagaatgaaaggatgaggttcctccagatctttggccggcagatagaagtaggctttctatgtaggcagtcttcttaaaggccttcagaagctatttcactaacatttaccctttccttcaaat

SEQ ID NO: 200741 - DNA, 688 bp, Homo sapiens
cattgtcactgaatctcaaccttgtcacttgtatactagcacaagagcaactagattcagtctcagctgttttgtattttatgcgacagaccaatttgaaagaggcttcaactattgtttgtctactaaagacctcattaactaaactgagggtttggaggcagggtttttttgtgggcttgaacccaggagttggagaccagcctgggcaacatcggaagacctggtctccataaaatatttaaaaattagctggatgtggtggtacgtgcctgtggtcccagctacttgggaggttaaggcaggtggatcaattgagcccaggaggtcaaggctgcaagtgagctgtgctcgtgccattgcactgcagcctgggcgacagagtaagacactgtcttaaaaaaaaaaaaaattagttctgtcctgcaggattattgccaaaaataaacactgagttgtatcatactctaaaggtattggtgacagctggcaaattagagtatttgtaagtggccttataaataggagtaacagggacctcctgccccatttttgagttccttgttcattgagcaactaattttgttatggcttcttcatttgtagttgagacaaacttagtatgtcaggtcataaaaacattggttttaccttcattagtctacttcctctttgctcttttaaaaaa

SEQ ID NO: 200742 - DNA, 749 bp, Homo sapiens
gcctttagatgtctacagtaccactgacggagtaccaggtcacatggagtataggccccaggaagaaaagatatccatctcccttgtctcttggtgttgatccatctccctgtctagaatagtgaaagccttctggaccagggagtctcttggctcccacttggcccgagtcagccgcagcagtgtgaactcttcatcagtcctttgcagcgtaacttaactgggagtaaatgtttgcaacccctggactgcctcaggtcctttagctttggtgacctggggccatggagtcagcctagcattctcctctctgtggctctatgtacctggcatggtgcagtgaggcagaggggactggagagataggcacaagaaatgaggtcttggtccagaagttctgagccagacccagagattgctcatggtgggtgatattagcatgactcagatttaatctaggttttatttttcttctcatttttatgagtaacaataatcatttatcagagatagcagataggatctgatagcagatgcttagacatttgcaacttatcttttggactgtttttattgaagaagaagtattctgtgtttgaaaatatccacatcacctttgaatgtgctgttgaagaagttatttgggtggctaggttttttgagaagtgatcaggatatgaaagaactggaaataccacagattgtgcatttgtgacactccgacccccactcctcagccaccagtgaag

SEQ ID NO: 200743 - DNA, 467 bp, Homo sapiens
aactcggcattgtgtgatcaaagcaaataaatatattcttgttttctggaattactaaagctttgaaaatggacttatcgacctcaaaccaatgggacatattcccatgtggcctgctcccctgttaggtttcccaggagtatttgcaaatatgtctgaagagggaagagaaagaaaatgattccaaaaaagctgataacattaagacatctgtttatagaagatgtaaatttgcaaccacaaattaaaagcttataggagctacacagaatgtgaagaaaaataaatgaaaccaaaccactacaagaaataaccaaactaagaagacagcaagagaggaaaaataaagaactgcaaaacatatgaaaaacaattaaccaaacgcaagttactccttacccatcaacaatgactttaaatgtgaaaggattaaactatctaattaaaagacatagagtggcacaatg

SEQ ID NO: 200744 - DNA, 733 bp, Homo sapiens
tggctaataacaaagggaggggacagtgggtgctgtgtgggcaaaaggagcaaaaaataatcctaatctgtctagacttcatctcagaagccatatacaaccttcttcaatggaaatatttaacacttcaggagtgccaagaaggctatgaggaacatatctcttaaggacttaagttagggcattctagaatgtatgctttatggatttaccttataaatatataactgactaatacacacagaaaatatattgcagagtaacatagatgacagaacttgaaatacatgacattctaccgcagtctatcattattttctaacttatcaaaagactcagaggatcttttttttcgtattgatagatttttaactagagccctatttacttgtgtcttgaaaaacagtatttgcaaatatgtctgaagagggaagagaaagaaaatgattccaaaaaagctgataacattaagacatctgtttatagaagatgtaaatttgcaaccacaaattaaaagcttataggagctacacagaatgtgaagaaaaataaatgaaaccaaaccactacaagaaataaccaaactaagaagacagcaagagaggaaaaataaagaactgcaaaacatatgaaaaacaattaaccaaacgcaagttactccttacccatcaacaatgactttaaatgtgaaaggattaaactatctaattaaaagacatagagtggcacaatg

SEQ ID NO: 200745 - DNA, 560 bp, Homo sapiens
tacatagacatgaaatgaaaattggagagactgtgttatccatttcgcgatacaccctggcagtgatacctgtgatggctgtgacccacagcaggtcagagctcactttcaccttgataagaaaggtgaatgtttgtcggtccaacactaagaagaaaaagattctggaaataagaaaataatttgtaaaatgtgagtaaaatatggtttacagaatacagactatgaagatgaatagacactagagcttccaaaatataaaaatagagctggaaaatgtagtgagaagattggaagtgaaggaactttccaaaaagatgatgcttctgcatctattcattctgaaattactgacagcaacaaaggtcagaagacgttgaagaagatgggttggaaaaaaggagatggactgaggaagatgatgggagaatgaaaactccaatttagtgtcaagttcaccaacacacataggctcggagacaggaaatccatcctcaattgaagatgttcaccttctccgaaacaaaacaaacaaacaacaacaacaacaaaaaactggg

SEQ ID NO: 200746 - DNA, 525 bp, Homo sapiens
caaaaaaaaaaaaagaaaaactgttttttggtttttttttttgttatcctaacttttgaattacttcataaagaagtttagtgatctatttgattatgtagaagctcttctgatagttatacatgcttaatcatttaagaataattaaaggaactatattgtcatgttatcaggcattcctttatgaaaatgttagaaactcctctttcatctataccttccccactgtttaaccctccaatcaaaagcacatattctgtggtaagaacagagaatatctattttaaaggtcatttgtgtcaaattgtcctaactagctgttgggattgggaggtgctatttgggtcataaatagcaagttttctctcccaataaagcaatgtctgagaatcccaagattctcatttagtagatctgggttgagacctagaagacagttaattcatttagccaccaaatgtgtattgagtgtcttcctattatatatttattaccatattgtgtaggtagtgttagaagacatcc

SEQ ID NO: 200747 - DNA, 387 bp, Homo sapiens
aagacatgagctgtttaagacctggagcgatgaatttcttcaagactgtgcttagcatgaagcaatgtcaggtatatagctagtgctaatagatgctggtggaatcctattaatctgagagctcaccttgttaagtatgtgttaagagatacaaagattaacttggaaactgctcattgtattcatgcctcccctccctggtctgtagctcagcccaataatgtcaacattgactatcttatactgaccatttcctgtgtttctgcggcaaacgataagtaagaaataagcaatttaaatctaaagtgtcttatatgttctatttccatgtagctcaaaaatactataaatttactaaaattacaataaataaatttcaagtcttta

SEQ ID NO: 200748 - DNA, 301 bp, Homo sapiens
ctccagggcactagagaaaggagctggctgagataggcgcggagggtgactgtgtctctgcatgtcctcaccggctccacagccgtgaataagagtgtttgaggccatctttttttcaagtgcttttagaaatcaaacaatacatctttattttttcttcctatcgagtgttcatgagcaaagatttggagcaaaaccttgtgccacgcaaatcagaatgaattgtagttctgaacttgatttaaaaaaattaaccacagggtagaagaaatccagtagagcagtgtgaagccaaatgaaa

SEQ ID NO: 200749 - DNA, 366 bp, Homo sapiens
aggggggctggccaaattagtagggtttatccattaaaaatttaattatgaaagtataacatacctattgcaaaaatttttgagatagattttatatctactgacataaaaagatgtcaatgtgtagttacatgaaaaatgcaagttgtaaaacaataatgcaatgtatgatcccattctggtttgtatgtttatgttggtatagaaaatatcctggaaggatacacaacatgctgttattagctacgactggagagtaggatttgtttggggatctaaggggagaatacactttttttctttctttctttcttttttttttttgtgacggagtctcgctctgtcacccaggctggagtgcaatgg

SEQ ID NO: 200750 - DNA, 578 bp, Homo sapiens
attttgtgtgttagtttatcatatcaaggtgttcatgatgtagtatattttgttattgatgatgtgtaccttgatcacttgtttgccatagatactttcaacgcagttgggttgactaggttatgtaagtcctgatgagcagagtagcacccatatttccgaaacatccatacaggccattcagtaaaagtgtcctaccagtacaactaaatgtgatatatctttcctccaaattacaagataccctccatgaattttatctatttcttaataggaaatgaaatcagtcaaatgcattttctgtgtctattgaatatggtcctatggattttctctttgcgttagctttttgttgctgtcttaacgaattaccacaaatttagtggtttaaaacaacacaaatttatcatcttattgttttgtaggtcagaagttccatatgggtcatactagaccaaagtcatagtattgggaggctatgttcctttctggagattctatgaaataatttctttcccgttcagttagactattggcagaattcagttccttgtggttgtaggattgaggtagtgttc

SEQ ID NO: 200751 - DNA, 809 bp, Homo sapiens
tgcgggtttggaggtttccagttgtccatctgtgttagttgtaagtgttctgggcagaatagtattgttgccccaatgcttgccctagcagagctggagtttgtgaacgtgctcagatgtgtgtctcctacaaagaagggaaaatgaaccctcgtctgagcctagaacaagttttaatagggcatgtctgacatttcaaattgtttttctcttgctgacagtctgcccccaggtgcatctagggccttggtcagcttctctgttaccagtggctcactttataaaacagcccacagggataagggctgaaaatatagccacttggctacatcattgactaattaagtaagttaactgtggatttatagcatcttttcaggatgttagtgttttgtgagccagtggaaaaaataagcttctatttcttcatttgtaaaaccagagagttggattagatgaatctctaacgtcctgtccagctcaaatgtgctttcctctatactagggtatagatttttgaagagcctagctgacttcagcatcacctcaccctttggtctccagtattacttctttacattttacttcattagctatttcttaatattaaatgtctgaagagtgtggcactgtatcaggagttggggcattgaaaggttgaagacatcatgaaatatctgggaaactctgctcttaaggaaattgcaccgatgttggaactcattgtccagttaaagagctctttggggactcaagcatattattcaacatgttgttttgggattatcttcaaatgatagtcacctacc

SEQ ID NO: 200752 - DNA, 517 bp, Homo sapiens
ctttctgtgtgattcttcacactgtgaatgcagctactaataacaccgattttacttcagaggagttccctgtgcaagggaagcacatggtagggttaatgctacatggaacatgaactctgaagaccctcattttggtttccatgaaggtggtgaaggttctccaaataaaagcatttccaataagggtgaagagtagagagcagtgatgtttccaaaaagtttagaattcctccttcaaatgacttcctaatgaatatcagaaggcaatgtgtggagtcacaagtcattggaatggcacccactgtgtaatttcaacaaaacacttcatccctctgagcctctggtggctcatctgtaaattaaggcaaattctatcttcaaatttcttcactctttgatcaacaacttttattcaactttgttgaaaagaacaaaaaaattgcatctctggttgaatttggtggctctttttctggttaatataaaacgtgactgtcagaatcccatctctaaa

SEQ ID NO: 200753 - DNA, 557 bp, Homo sapiens
aagacttgaggataaactaagataatcaaaatgatgcagagaaagaaaacttctctcttttaatatgtacagttttatttgtttgtttgctgaggcaggaggatcacttgagcccaggaggcagagctttcagtgaacggagatcaggaccctgcactccagcttcagcaacagagcaagttcagggcaggaggcggggtgtggtggggggaactagccaggggctcatcagtctcccttcattttatgaggctatgttccccttttctgcagggcagtgggaatttgtgaggatgagcattggtttaaccctcacacttcgaagaaatcagaaggatcagggctgctcaattagaattgttattcccactggtccctcatgcatacatattgcatttattcattcaacaaataattgttaaggacccattgtatgcccagcactgctttaggctctggagttatagcagggaacaaaacaaagacaatgctctcataggctcacaaattctgctgagaattcggataagaaataagcaaacaggctgtgcttggtg

SEQ ID NO: 200754 - DNA, 199 bp, Homo sapiens
gctggtaaagaatttttaactagggcaggctgaccaagttcgttttaaagataacacccagtgttgaggcttaataataccaccgctatgaaccttgcacataagctagtcatacatacatcttatctctggctagctttcagcctctggaggaaagcattgacgacattcatctttgattgcactataatatccagcc

SEQ ID NO: 200755 - DNA, 165 bp, Homo sapiens
caggtggatcctaatggtgagttgtttgcttgagctgagctgcagaaatgggttggagcatgagcaagggcaagccccagacaaccaagaacatttcatattctgctccccataggatgcaatgtgagattgatactcgagggacctccaccctggctgtgttca

SEQ ID NO: 200756 - DNA, 644 bp, Homo sapiens
gtgacaggaccaccaaaaatcttatttcaaacatttaataacctgaacaatgacacgctgttaaatttaaccgaacataaaactttacgaacctgatcatctgaatgtccttataaaatgtatgtatataaaagatcggaaatattacaaaacattaaagatgattatctttgcatggtagaaccaagagtggtttttattttcttgatatttttctgcatttctctaagtcgccataataaacacagactgtatctgtagggtttattttaggctattaattctttaaaggaaaataacgagcatcaacatttagacagattttcctctacatctgcccctcccagatcccctctcattggccaggaggagcagatgggactcaaaggctgtaacttttttcatttgtccctcagcccctctgatttacctagctcctgaaggaaaacagagcatctgggatggacttctgctaccctctgaattcctgagggcctgctttgcaagccacctaagtctgctctgaagcctgctggtgctctgaaatccttggagggaaaaatcaccacccaaacgtgtgcagataaacaacactgctaggtgtctgtccacattagagtgccggtgacgcgatgaactctccc

SEQ ID NO: 200757 - DNA, 237 bp, Homo sapiens
tgcaggcaagagcaaaagcagcagtctcaggctattcaacttccacaaagcctccttaactccggttgggaagtacagttgctgattaactgtgttaacacagcacagtgctcagaaggccaaaggtcaaagactaaggtctgaagccccacctcctctgtgcctgggcgccctgcacatctgtggccggcgtaagcacctctgcgagctttctgagcacctgctgcccgagcgcct

SEQ ID NO: 200758 - DNA, 479 bp, Homo sapiens
tctgctttcctgccctgatttgaccatcagaccttttatattagacatgatcttgaaacttacagaaaaagtacagtgagaaaggtctttatgataactaacagcttctccaattactgctttagttgtgccaagaacttaataaaggaggcttaataatttataggggaatatcaataaataaacaatgtgcacactttaccatgtttagtataaatgatatcgtctggagattagtgaatggaaaggagaggagataaaagatttagtaaacctatcctttggcaagactgcccctaatttaaacatcatcatatgcatcttaacagttaacacttatggaacactcactatgtgcaatgatcttgcattatggttttattttcttttttggagacagagtctcactctgttggagtgcagtggcgtaatctcggctcactgcaacatctacctcctgagttcaagtgattctcctg

SEQ ID NO: 200759 - DNA, 676 bp, Homo sapiens
ccagccttggcccccgtcaggcagcggttcactccctcaccagggatgtcatgttagttctgctgctctcaaggtgtgtgccctgggggagacgctgtgctgggcagtaggagagaattgaggtaggcatctccacccccatgggtgggagcttctacaccttgggtcagaagcttaggagtgggggctctgtctaccaggctcctcaacccatgccaggcgttgcttggggagttgggctggaagctgcgtggtctcagtgccctgaggaaggccttggcatctcctgcagggagtaggggtggcagggcccctagtcacccaaaactggctcctcagaatgcctgaggtgtgtccttccacctgcctgcccccactcacagaagagatgcagctgatgtgcagaagccaggctgagccgagccaagctgcctgtcacccctccgttcgccggtcaccccagttactgggaagcctggcttgttggagccgctccctgggactgtgtgtggggtgtcagggtctctgaagggaaaggcagggctcctgtctgagcaaccagctccctccaggcctcatcaaggcccagtgcgtgccctgcatgcaggctcggccatggtctggctgtaaccccaccttgcttgtaccctctgtgcagggaggaggagtctcctga

SEQ ID NO: 200760 - DNA, 258 bp, Homo sapiens
tggtattatgccgggactttgaagagtctatcagatagtgaaggaattgcgaagccgtactatgttgaggtctccagaataaacatcctcagaatggaaggtccagatgagaaggttaccttgatgagaggcctttatgctttttgtgctattttcctttatgggctctggtagttctttagtgttttataatctcttttcagagaaagctttttgtaaattcttcagattttactttttaagtaacacttacaaaag

SEQ ID NO: 200761 - DNA, 463 bp, Homo sapiens
ggtggcacatgcctgtaatcccagctacttgggaggctgaggcaggagaatcacttgagcccaggaggcagaggtcgcactgagccgagatcgcaccactgcactccagcttgggcgaaagagggagactctgtctcaaaaaacaaataaacaaacccaaaagaaacacacctaaacaatattaatattaccaacagtataccattattaaatgcagttgatttttttctgattttaggctttgtcacactaaggatatagagtcaaattaatgagttttacagttaatttgtgtggttatgccagtgactcaatgtactctttatttcttttcttttaggaaatgctttgttattttcttttaaaaaaatagttatgtaggctcttgagctgcttgctttggcccactcttgccctgaggagtatactttcattttcaatacgtctctgcttttgttgcttc

SEQ ID NO: 200762 - DNA, 551 bp, Homo sapiens
gaaatcagagtagggtttacctctggataggcagggatggaggttgtagtgataatatgttctgaaaagaaacacagttgagttttacggggttttggaaatgttttgtgtcttgatctgcatggtggttacctgggtgtatacatgtaaaaataatctaactgttcatttaagattagtgcacttcagcaaaggaaaatgtcagcagagtgaacagacaacctacagaatgggataaaaatttttcaactatgcatttgacagaagtctaatatctagcatccataaggaacttaaatttacaaaaaaaaacccattgaaagtggggcaaggacataaacagacaaaagatgacatatatgcggccaacaagcatatggagaaaaagctcaacatcactaatcattagagaaatgcaaatcaaaacaacaaagagctaccatatctcaccagtcagaatggctactattaaaaagtcaaaaaccagcagatgctgttgaggttgcagagaaaaaggaacgcttatacactgttagtaggagtgtaaatta

SEQ ID NO: 200763 - DNA, 660 bp, Homo sapiens
gcccaggccgaagtgcagtgacatgatctcagctcactttaatctccacctcctgggttcaagtgattctcttgcctcagcctcccaagtagctggggctacaggcgtgcaccaccacacctggctaatttttgtattttcagtagagatgggcttttaccatgttggccaggctcgtcttgaactcctggcctcaagtgatctgcccgccttggcctcctaaagtgctgggattacaggcgtgagccaccatgcccggccccttgagatgacatttaaatttaagctgggtttgaaagagaaataatttgtcagatggaaggaggaaaagagtgttttataggaagggaaagcaggtacaaaggcatgaaagtgagaaactgagtagtttgaggaactgtaaatgattccattattttggagcatcaaatgaaatgagatacaagcagagaggaggttgtttccttgataaggagctgggactttgttctctgaacctgtgttcctcaaagtgtggtccataaaccacatgcacgagaatgccttgaggtgcctggtataatttaaaatctctgaattccaaactgctcttacagaattagaatctcttgagatggaccaaggatctgcattctgcaagctccagtgctacttatgcac

SEQ ID NO: 200764 - DNA, 671 bp, Homo sapiens
acagtcccatatgggggtgatgggaaccagtgacagatcatcaggcattagattctcataaggagcatgcaaactagacccctcacatgcgcagttcacaatagggtttgtgctcctatgagaatctaatgctgctgctgatctgacaggaggtggagctcaggtggtaatgtgaatgattgggagcagctgtaaatatggatgaagcttcgtgctctctctgtccctgctgtgtggcctggttcctaacagaccacagaccagtactggtccatggcccgggagttgggggccccgggcttaaacaacagaacttaattttctcccagttctggaggttaaaagtccaagatcaaggtgttggaaggtttgttttctcctgaggtctctgtccttggcttgtggatggccaccttctcactgagttctcacatggtctttcctctgtgtgtgcattcctggtgtctcttggcatgtgcaaatgtcctcttcttataaggacagcagtcagagaggattaaggcctaccctaaggggttcattttaacttaatcacatttttaaaggtcctgcttctaaatgcagtcacattctaaggtcctgggggttagggcttcatcatataaattttgggaggatagttgaggccacaacaagtgctgtcagctttt

SEQ ID NO: 200765 - DNA, 151 bp, Homo sapiens
gggaacacaggacagtcagaacaggaaacaggaggcatgaatagttagagcgatccaggtagagtcaaagaaagcgataaaagaacgggggtactcggaaggaacaagagacatttagagggaataggaaacagagggaccaaggaaaagt

SEQ ID NO: 200766 - DNA, 327 bp, Homo sapiens
gaggagttggagaaaatagtattttaaaggtgacagagaaaatgaagcagcatgtataaatctctcatgaatactacccgaagatttcaggtaatagaagaggggaagtataatctaaggaaaatgaatattggtaattatttttgtccttgaattcctaaaatagccttaaataagaaattaagtgcattaggggctgggcacaggtttcaccatgttgcctaggctggtcttgaactcctgagctcaaatgatccgccctcctcagcctcggaaagtgttaggattacaggcgtgacgactgtgcctggcctaaccctgcctctt

SEQ ID NO: 200767 - DNA, 488 bp, Homo sapiens
gcatcactggcacagttaggcagcgagagggtaagagtcacagagcccgccgagggtggggagcgccatgagtcccatcggagagagggtgagcgggactctgaggcctggggcagtgccacaggtgcgggtgtgaagctggcggtgggccactgaggtcctcaggctgaggggcggccagagtgagggatggagagaagccttccatgaacagcaactcaggctaccaaggtccctttggggtggctccagtgacagagaatgggcggggacgctggtctcaggactgcttcttcccatcctgaccttcgggccccttacctgcgggccttttcttccaggtgagccaggccagcagcggggggacgacgccatcccccatgcctggcccctcctggctgcctcgcctgcccgcccacccctcctctctctgtgtgcacctctctgcctgtttgaactgcagcttttaaagctttttgccttttgaa

SEQ ID NO: 200768 - DNA, 372 bp, Homo sapiens
acagcataaactattctctcagattcatcccttcctttcctttctcacagcctctgccttgatctaactggaatcatttgttcactggtctgtactacaaaaacattcattgcaattccacttacaacagagaaaagctgtgaataacctgtatgtccaacaacaggggattggttaagtaaatcatgactcacccatccattaggacattgggcagctattaaaaataatgctgttgaaggatttagtgacacagaaatactattacatgaaaaaaggcagtttcttgaacacttccattttctttttttggctggcttttttttttttaataatagttatgctcgaatagtttatgctggggcaccgagc

SEQ ID NO: 200769 - DNA, 271 bp, Homo sapiens
cgcccccgtccctacacaagatgaagaccccctcctgtcattccctcacccagggcctcccccttctgtcttccctcattcccagacggccgtaccctctaccccgaggtgggcctgctgggcagctggccctgagttcctgggctctcccagtctgcccccatctttgctgagagatccaggtgctccttgtgggaaatgccctggggatggtgctgtggagtgccagcctggggtcctgagttgtaccctctgtcccaggatccaggag

SEQ ID NO: 200770 - DNA, 147 bp, Homo sapiens
tggaaagtgttgggattacaaggcgtgagccactgtgcccggccaaattcttaaagtacctaacgtcaaagtcagtcttgaataattactctctaatttagattaagcttgataataactgttaaaaaacctttcctctgtaggttg

SEQ ID NO: 200771 - DNA, 837 bp, Homo sapiens
agtgatctgcctgcctcagcctcccaaactgctaggattacaggcgtgagccaccgcacccagcgtgatctcacctctttaaaaactttttatatgtggcaactagaaaattttaaactatagatgtagtgcacatcatattctatcggacagtgctgctctaagcagaaaattcctgctgattactttggcaagagcaattcactaacaaacttgggcagctaaaaatgtgttactacaaataaaaaggtgttactagtcttggctaaacaaaggttctggaggatacccattatttggtgccctacttacattttggaaaaacaatattgcacccaggggaatcttcttggaccctttccatcaagttattcagaagaaaatgtaattgtttttctttttttctattctagtgacaattacactgtcactggcagtgtagttgccccaaataataaaagagcatgtatttaagtaaacaaaatggattccaactgaagaccaaacctaaagacagaaagaagatggtggggggcccttgtaaaaggacactcaggaggggacactaagaaaatgggctcacaaatctcgtaggacaggaaggcgttgccgtcgaccaaggagcgtgggttggaataggtgacgacgatgccggagccaagaagctaagcatgcttgggacacaagggctggcagaggccaaccgtgagggaggccacgccgtgggggccggccgatagggggcaccgcacctgcaacaaaaacaggtccggcatgaaaaacctggctgcttggcggacacccaatggggcgaagacggccgtgaatgatacagag

SEQ ID NO: 200772 - DNA, 495 bp, Homo sapiens
  misc_feature (113)..(114): n is a, c, g, or t
  misc_feature (120)..(120): n is a, c, g, or t
  misc_feature (127)..(127): n is a, c, g, or t
  misc_feature (137)..(137): n is a, c, g, or t
  misc_feature (141)..(141): n is a, c, g, or t
  misc_feature (143)..(143): n is a, c, g, or t
  misc_feature (153)..(153): n is a, c, g, or t
  misc_feature (158)..(158): n is a, c, g, or t
  misc_feature (160)..(160): n is a, c, g, or t
  misc_feature (167)..(167): n is a, c, g, or t
  misc_feature (181)..(181): n is a, c, g, or t
  misc_feature (191)..(191): n is a, c, g, or t
ttcacaggatcttctgacgtcacccaatcaccactacaaagcaatattacagtatctacttaaggaaaagaacctactaaaatattgttatgctggcttttttggtggatggnntctatnacacaantacagatcanagcnangaacacatanacatntnccaatanaatgtggataagtntaaaatcttncataaataaaaattacacttatgagatcagaagatctcactgccatctatttatggtagtgtgggattaaattttgcatcatgaaggtaccagaaatgtcatacagccttaacttttattcaagtttagtcacatgtcctaagatcacagaaggcactataaatgagacatacttctcaaccatacaatgaagtccaccggccccaatgcaaccatctaaaagctaaattacagtatctacttaaggtaaagaacctactaaaatatgttatgctgctttttttgttgattgggttgacgtcag

SEQ ID NO: 200773 - DNA, 570 bp, Homo sapiens
gtcaggagttcgagaccagcctgaccaacatggtgaaaccccgtctctactacaaatacaaaattagccaggtgtggtggcacatgcctgtaatcccagctacttgggaggctgaggcaggataatcgcttgaacccgtgaggcggaggtttcagtgagccaagattgcgccattgcactccagcctgggcaacaagagtgaaactcccatctcaaaaaaaaaagaatactcgatgtcagcatgtcaacaacttcaaacacaggataacctactgcattaggtttctgaggctgctttaacaaattacctcaaacttagtggcttaataccacagaaatgtattatttcacagttctggagaccagaagtccaagttctgtttcactgggctgagatcaaggtgttggtagggccattctctcccaggaggctcctggggagagtctgttcctgcacttctagcttctggtggctgctggcactccttggcttgcagccacatcactcgagtctctgcctctgtggtcatatcgctttatcctcttcagtgtgcatacatctaatctccc

SEQ ID NO: 200774 - DNA, 244 bp, Homo sapiens
attccaccagccctgttccaaatcaggaaaacctgccccaccttgcctgccactagctctggctttggtagcatccttttgttctgttagtgttgttcacttaagttcttcttacaagattgtaaattttgaattacaaaaactttgttttattaatctttgtttctcctaagtcagccagcaaagaaccttgtttacagtaggtgcttaataaatatttaatccatttatcaattgaatgcaa

SEQ ID NO: 200775 - DNA, 801 bp, Homo sapiens
gccttcgctcaatgcaggcaaccactccaagtcagaaaagacacagtgatactcaaagcagacagcctcaattcacgtgtgcgttactggctgaccatgcggtctctttattgtaaggacaggagaagggcccctttcctgggtttcttcaaattcacacaagtggactcttatgcaaagatcctgggctagcctccatccatatcagccacctccaaaaatcccttcgggctagctctcctcaccccaaatcttctcctggaagaaagtcccctaaagaaaaggagaatcacttcctaacccaaaattgcttaacaataccctaaatccattttgagttcagagcagaaatccgtgttccttccaatctgctcagataaccaggaaatgctgtacctgctgggtctgcacgtttagctcccgacacacctgctactccagccggcatgagtcacccacgcaggcattgcacggtgtacttgtcaaccacggattcagtggctcagcagcttgctctcacgcacaccagatggcaaacgtctacccccaaaaagacgtgtcagggcagaccggctaataacccaatttcactcaatgacacattcccactgtaggtttggggagaggaaaggagggagggggtacacagagatgctttccccacttatgggcaagctcccataggccctggaagcctgatacggctctgctaccgtcagtagaggaagggcaaattcacctggggaggaaaatgaaaatgacgtcccaatttcaaacctcctcctgaacaaaggctgtctt

SEQ ID NO: 200776 - DNA, 705 bp, Homo sapiens
atggtctgggtctgtgttcccacccaaatgtcatgtcaaattgtatccccagtgctggaggtggggcctagtgggaggtgactggattacaggggtggcttttccccttcggtgctgtctcagaaagtgagttatcgcaagatctggttgtttaaaagtgtgtagcatctccaccccaacttcttccagctctggccacgtgaagactacctgcttccccttcaccttcctccatggttttaagtttcctgaggcctccccagccacgtttcctgcacagcctgtggaaccaagagccaattaaaccccttttcttcataaattacctaatctcacacatttctttatagcagtgcaagaatgtactaaatataccgtccaaagtgacagtcctagaaatacaagtacatcatgttcctaaaactgtatctttttttgtttttaaaacggagtctcgctcttgtcccccaggctggagtgcaatggcgtgaccacggttcactgcaacctctgcctcccgagttcaagtgattctcctaactcagcctccagagtagctgggattacaggcacccaccaccacgcctggctaatttttttgtatttttagtagagacggggtttcaccaggttggccaggctagtctcgaactcctgaccttaggtgatctgcccgcctgggcctcccaatgtgttgggattaca

SEQ ID NO: 200777 - DNA, 579 bp, Homo sapiens
aaagagaggcaattcattgtcataatttgtcatcaaaagcattataacaaattataaaaatactagaaaaggtaggtatagtatcaaaatgataaataccagtaaacatgatgctccagaacatgtaaaatatatattttggagtatcatagcatagcacggggaggggaaaattaagtttgcaagtcaagaatagtgtgggggagggagtttggagggaaaagacaagttgggtagactttggaggatacggcaggtgctaaatcttagaagaatctgcaatgctcacttggttcccagaagtagctacacccaagtcaacccctggcttgttttccactaacggagccaaatacaaactggggtggctacagatatggaaagctggtatcaagatcttatttttgataagtaaaaaggactatacatgaggagtgccatcaagatggggatggggtgactgggaggaggaagagaaaggtgagtcagtcatgcacaaaacttaattattttggctcctcagcagttttgtttgtcaccaagtgtgtgtagacaaataacattaaatgctcttaaaaa

SEQ ID NO: 200778 - DNA, 1090 bp, Homo sapiens
gctgaaatatttaccatctttcctcttatagaaagactttgctgagcgaaaccccatctctgcaaaaaatacaaaatttaggcatggtggcgtgctcctgtagtcccagctactggatgggggtgagggtgggtaacgggaggatcgcttgaacctgtgaggttgagactgaagtgacccaagatcctgccactgcactctggcctgagtgacagagcaagaccttgtctcaaaaaaagaagaaaaagaaaaaaaaggaagtttgccgactcctgaactagagcaccagagcatctcaagccccacccagtttggccacctttactaaagatgaactaggccgggcacagtggctcacacctgtaatcccagcactttgggaggccaaggcaggtggatcacgaagtcaggagttcgaggccaacatggtgaaaccccatctctactaaaaataaaaaaaattagccgggcgtggtagcgggcatctgtaatcccagctactcaggaggctgaggcaggagaacagcttgaaaccggaaggcagaggttgcagtgagccgagatcacgccactgaactccagcctggacaacaagagtgaaacaccatctcaaaaaaaaaaaaaatggataaactaagcctgccgagtgaaaggcacacatcatttcactgaatgataactgcagggtgtcccacaagctgctggccattctctacattcatcatagtttaaactgccttaattggggtgatttccctgcatcatttgtctgtaaaatatgtgagatctcttcctagaggtctcaccaagccacattgtaaaggaaacaaacatcatcaagtttcaggttccacaaagagcctgtaaattccttaggttagggagtttagcacaaatcattttctcacagacccaaaacactataatattcctattttgtcttcatttaattcccatggtcttaatgttaaatgtgatgttcattttttaaatgtgaagctcaagaataagttgctaactaacttgttgctaaaatccagttttatatgtagttaaacattttggctgagtgcagtggctcatgcctaca

SEQ ID NO: 200779 - DNA, 703 bp, Homo sapiens
ggatggttgtcagtcaaaggagtgagtcagatgatgagaggggaggacagcagagcagcagttgtttcttcagtctcgccgggactccaggatcggccatgttctgcagccaccgcctctacctgtctccccatgtgggatcctgaaacctcaagctgcatttagtttcagagtccggggaggtgctcactgtcttctgactcctgagatgccgactccctctgccataccccagggaaggaaccagtagcagaagctccagggaaactgatgaaggtcaacagaaggaagaacttctagcagcccaaagggattggaatgggcggcccgtgggagtggacatgcagaggcactggcctggggtgaagccttggaccaaattcttacttgcaggccctctggacccaggagaggagtctgcaggcctcggctgggccggattccgcagattctggcctaggtcctgaatgcctggtgagttactgagaaaggccctacaggctgagggtgccagtcagggtgaagcagccccgcaattggcccacctccttttgtaccttaacaaaggtgtctttgttacctttcttaaaggaaataaagccggtcaggagcaaggcctggcatattcagggggtcatctgtatttggtcgtccagcgggaaacccaaatggaaggaaagaaaaaaaaaaaaaaccatgcatt

SEQ ID NO: 200780 - DNA, 827 bp, Homo sapiens
gtcttgaactcctgacctcaagtgatccgcctgccttggcctcctaaattgctgggattacaggtgtgagccaccgtgcctagcctacagcgacatttatatttataaattatataccagtactactgaaccaacacattgggtacattacagaaacagaaaacaaaacgtatgagaaaaatatgttatttccaccctcacttgggtttgaagccattgccctggtggggacagaccatacggtgtcaacagacattttaaaaaaagagttattttctcccatcgcctccttatttctcctttcacctctctgtctgtctctaccttctctgccctcgttaggcacagagcccctgctttgtgcaaactcctgagctgggtgctggggacacagggaaaccacccagaccctgtcctcagggagcttatagcccagtaggtcgtggtccatagtacactatgagttgcagtcctggccttgccatgtctctccatctcagtagtttttttttttctttttctttttttttttggcagggtcttgctctgtcaccccaggctggagtgcagtggtatgatcatagctcactgcagcctcaaacttttgggctccaagcaatcctcctacctcctgagagtagctgggactataggtgtgcaccaccacactgggctaatttaaaaaaatttttagtagagatgaggtcttgctatattgcccagacaggtcttgaactcctgggctgaagtgatcctcctgccttggcctcccaaagtgctgggattacaggtgtgagccgctgcacctggcccatcttggtagtttt

SEQ ID NO: 200781 - DNA, 594 bp, Homo sapiens
tcaatgcccacagcttccctggggctcctagcagttgctgaccccctcagtgtgtctgagaccatgcctgactgacagttgctaagctaaggtggggaccctgactcccggctggcttggacttgagccatggccacacacagcctttgcacttaccggaaacctggaaaggtgttcagtccctgggtgtgtggcagcctcacaagcacccactttacccaggagcaccatgccagagggaaggctgaggtgggggagctcaccctgtcctaccccctgccaagatcactggcatttatagagaaacaggacagggtgggtcaggggagagaaaaggccccttggctggctcctgtatggcctcagacaagccttccacctgtgctcacgtctcctggaggatgaagtggggcctcagctaaggctgcgtagccggggtgcttgtgccgggtggttagggtgaaagggccttgcaaactgaccacaagggctaagacagaccctgtgcctggctcttgtttgtttacaaggcaagatggcttcagaaacactaacggaactgattctccactggactggagtcttgcctgtacc

SEQ ID NO: 200782 - DNA, 397 bp, Homo sapiens
ggctcccttgagcccaggaggtcgaggctacagttagttgtgattgggccactacactccagcctgggtgacaaagctagaccctatctaaaaaaacaaatcagagtcagcgcattgccagcgttactgcttgcatggcataggttattcctgaagagcccactgcaagatggaacagcaggacccctaccccagtgctgttatttatcagctgagtttcaccagggctggggagacacagcctaggggatgagtaaaatgaggagcctggggggtgtatgaagccatgtcccctgaccggaatgtgatgtgttaagtggaaaaatattgtcattatgtgtaacagggaggtgactttggcaaaatgtctgaactgtaaatgaaaactggaagagca

SEQ ID NO: 200783 - DNA, 477 bp, Homo sapiens
ccgcccttctccccagcccaaagcttccttcacgtcttcctctcgtatccccccaccttaagccacaagtatgggacatctctactccttccctggcaactgatcacatgcccattaccatcccattaaaacctaatcacccttaccccgctcaacgccaatatcccatcccacagcatgctttaaaaggattaaagcctgttatcactcgcctgctatagcatgggcttctaaaacctataaactctccttacaattcccccattttacctgtccgaaaaccggataagtcttacagattagttcaggatctgcgtcttatcaaccaaattgttttgccatccaccctgtggtgcccaacccgtaccctcttttgtcctcaatccgttcctccacaactcactattctgttctccatcttaaagatgcttttttcactgttcccctgcacccctcgtcccagcctctctttgcttt

SEQ ID NO: 200784 - DNA, 330 bp, Homo sapiens
acattcaatatttaggcagtttacacatctgtcctagcttttactttctatgttagtaaggcctcagatccagccaggaatgagtccctttgctagagccctctgtggtgtctcctgggcatgtgtgcaacattgtatatgggcacagccctccagaccatcacagataagtagtatcttattaaatctaactctggctgtctcatttcctggattggccttctaaatttctgactgagatgccagtctgttacttccccaaccagtattgttatctcaggctggctatggtgttggctttccctgactttttgccactaagatcactcc

SEQ ID NO: 200785 - DNA, 480 bp, Homo sapiens
aaagaaagtggaagatagtaacagagaaagtggaaaaaaggacgagaagggatagacatgcaaaactccagcattccaaagttaagggaaagagaataaccatgttgtgcctataaccctagaagattacaaaaattatttctagcaaattgacaacccttctttctgaaggtagctttgggcaaaaaggtgctgttttgagcttttaccctgaatcacctggggtgcacttgaaaagaagccattttgccaatgcattaaaagtgtctgagtgaaagctgccacttgattgtcctaagaggcttttaaccccagccacataattatttcataacaaacaatcaggaacatttctcttcctcatcagtttcccagactacctcatagcacatgcatgatacaatgtgtgattttgcagccttccatgtaacatcggagtcctaaagagatggacttgaagaggctcatggtgattttaat

SEQ ID NO: 200786 - DNA, 445 bp, Homo sapiens
cccaccacttaatagcaatgtgactttgagcaaataacttagtctctgcttctcctatctgtaaaataagaataatagtaccccccttcaagagggttgttttgaggattaaataaaatagtgcatgtaagtacttaccatgtggtaagattataatcctaatcagagatgtagttaaaggtattcatgatattgttacttatattagcaaggatttatttaacctgaatagttgacataaaggggatgatgttatagtgccatctgtataattaattattaggtacagatttacctaataagctcttttttggaaaacttaatgaccaaaaaatgctcacaatgttaagtgagaaaagcagagcacaaagatgtttattttatctcagtcatgcttttttaaaaaagatgtatatacgtacaaaaaaggctggaaggaaacaca

SEQ ID NO: 200787 - DNA, 278 bp, Homo sapiens
cagagaaagggggaagagccacttttaaacatcagatctcacaagaactccctatcagaagaacagcatggggaaaaccaccccatcatccaatcacctctaagcaggtccctccctggacatgtggggattacaattagagatgaggtttgagtggggatacagaaccagaccatgtcaaaagccatttcaactgaggtggtatgacatttcattgtggttttgagttgcatttttctgatgattagagatgttgagcatttaaaaaatatacctgt

SEQ ID NO: 200788 - DNA, 336 bp, Homo sapiens
taatggacaatttgtgaagaatagtccaacttacctttttaaaattggaagatcccttttacacaaagatttaaacagataatctattatatgaccacttatagctaaaacaccctcaagtttaacaaaaaggacagttatttgatagatttaggtatgtggacagccaaacaagcagaaaccatttaagataagataatccaggtaacggttggtgaagataactaactttaggatcgagtttagacttaatgttgactggcacgaggatgctgagatttaaagaagttaatatgacttgttcagagtcacaaagccagaaattggtagtcatgt

SEQ ID NO: 200789 - DNA, 266 bp, Homo sapiens
aatttttgtatttttagtagagatggggtttcaccatgttggtcaggctggtctcaatctcttgatctcgtgatccacctgccttaacctcccaaagtgctgggattacaggcatgagccactgcgcccgaccataaaagattagttcttttcaggtgactttaatttggatgtatcatctctactgagtcttctcagttatattaattaaggctactttaaacactattcaaagacagatgtactttgtacctgggtaattttgt

SEQ ID NO: 200790 - DNA, 513 bp, Homo sapiens
aataaaagtgttatactagcttttttatatctaatgactacagcaatcagtaaacatagtttatagttttatcagtgaaacatagtttacagtttcagtgtacaagcttaccactgtgcaaatgcaagctattttaaaagtaaacccttataggccgggcatggtggctcaagcctgtaatcccagcactttgggaggtgaaggcaggaggatcgcctgaggtcaggagttcaagaccagtctggccaacacagtgaaaccccctctccaatataaatacaaaaattagctgggcacagtggcaggcgcttgtaatcccagctactagggaggctgagacaggagaattgcttgaacccaacaggtggaagttgcagtgagccaagatttttccaccgcattccagcctgggtgacagagtaagaccctgcctcaaataaagaaagaaacaaattaattaataaataaacccacccttatatgagtctatgatttctgcatctggtacattat

SEQ ID NO: 200791 - DNA, 677 bp, Homo sapiens
atgttccttccactgttacactatacccctaagatccattgccacaaatcaaatactcctccaggctcctgactatacagtggcaaaactatacaatcttttagagtgcagcatacctttctcatgggtcacctcactctctggggcctgctgcaactacagtccagccacagatctacaagaaagaaggattacagggcagattctgaggaagacagtaccgtgctgggcaactacccaaagggaggccaattacaggtttttcaggcaaacggagattaagttcctctgggaagggttggaaaggctgcttctccgggaaaggcagcagagcagcatttaaggatttaaggactccagcttaaacagaatctgaccatatgcctccaatccaattttcaggattccattcctaccaatcaatgatctcacccacaaattaggaattacatttgcatttttagagcagtcacagaaaccttcgggtcccttacgtgtagcctgagctaaaaatttaaaagcctgagctgatcattctgctttgtatggtttgaacttggctgagctgaactacattccccagaatttcctttcctttatgtttccaacttgcatggctcacaagagatttttgtgcagcaactgaagggtgcagaagataaagcaaccaccctgca

SEQ ID NO: 200792 - DNA, 322 bp, Homo sapiens
taaggacaatgtaggcagaattagcagaaacaacactaggggcgtagtttttggacaccagtgagacaccctggccaggctgacactcctccttgctcagaagtactaaaagctttgggctgaggccacagcagacaggcgtgactatcagttccattctctgcctggagtgtttgtgtgtgatgctgtaaacgtgcatatgcggccaggtgcggtggctcacgtctgtaatcccaacactttgggaggccgaggcaggtggatcacttgagggccaggagttcgagaccagcctgaccaacatggcgaaaccctgtctcta

SEQ ID NO: 200793 - DNA, 483 bp, Homo sapiens
cacattatttttattcttaattttgcaagtggatataaatatacatagtcagccccctgtgtccatagttctgcacctgtggattcaaccaactgcagatcaaaaacattccagaaaaaaaaatccacaaagttccaaaaagcaagacttaaattttcttcacaccaagtactacattgaatccacatgaatgaagtgatgcacaggcgttgtgttaggcattataagtaatctagagattatttaaagtatataggaagaggggagtaggttatatgcaaacactaagccatttatgtcaggaacttgagcatccttggattctggtatccacagggcatcctggaaccaatcccccatggatactaagggtcaactgtacctaattttagaattatttttaaattagcaagtcaaaaccccctggacagagtgttttaaacaaatcaaatgatatcctatatctggtcttgcaacactctt

SEQ ID NO: 200794 - DNA, 643 bp, Homo sapiens
ctgtactgtatttgtagagatggagtctcagtatattgctttggctgatctcaaacttctggcctctagtgatcctcccaccttggcctcccaaagtgctgggataacaggtgtgagccaatgtacctggcctcttctaatttccagtttttgtttctaaaaactgaatatcacatggtacctaatattagcaaatgaggaaatggaagcaaaggaagtgtgaactttcttttgtagtagtcaacttttggcttaatgttttgggaatatagttctgtggaacatttctctgcttttacagtggtggaatagtaggattcactgtgtagctaaccttgaaatactaattccataaaataaaggatatacataataagaatctgtttagcaatagggtaaataagcactaaggtggtattctcatactagggaaaatgtttgctttattacatcagcaaataatgtgttccacaagttttgatttattattttaactgtataggtggtcttacatctaaaaaagaataccgcttaaaagacttgtagtacagcatataagttatattagacatggaactatgtttctgccaataacttgacattttgaggacagatagcatctcatttccaatttgagattggg

SEQ ID NO: 200795 - DNA, 791 bp, Homo sapiens
tggagaaagtaaatctaatttctgaaaatctaatttcagaaatcatacaccgaacactctgtttttttataccttacaaaaagttcagctttatatacttagggttatagtaaaattaccatctatgaagtatgagataattttttcaaaaagtagtccttagtactactaagaatcaataaagtgacttggaatagtcacatgtatttgtttcacactttttcttaaattgtttttgtgtgatatagaaatactgagttggctactaacgatgtggctatctggatataaaaagtgttattggattggttatgtctgaacaaagagaataactggagttttcttacagggacctgagtactgcccccaacatatatttttgcaacatttctctttaactttcataagctcatagagttgattttcttcgtcagtctttgtttcctctgaaatgcatgtcataacagtaagctttgaaaaccttaattctcttttcttagctgagaaaaaaaattctagtgttaactgttgttgagtgcagttatttaaatccacttttatgtgcaaagtgcatagtatcaatgttgaatgttcctgtatgtttacatcatagtagtaaagagataccacttgaagttattcctccaaattaatagttaaatttgaggtttcagattcttgtaagtatatgaagtacagaggataaagttaataactcgagttaataacttcctgtatcattaaaagcaatcaacttgattctgtttgttacttttagaagaatatataaa

SEQ ID NO: 200796 - DNA, 325 bp, Homo sapiens
gtagattggggcctgacattcaataggtactcaatacacacttgccaaatgagtgactcacctttgagaaagattctcttttagcaccttatgttaatacttaactttattatgacatttattacattgctgtctcatctcactaggttgttcgctacacacgattgcagttcacagacttaaaaatatgctcatgcatgctttcttttcttataccttccccctgaggttaaactctgccttaggtcacattactcatgctttcagaaagctctgcttctagctttctgagcgggggagattcagccccttgtttattttatgt

SEQ ID NO: 200797 - DNA, 526 bp, Homo sapiens
ggaggccaaggcaggcggatcacaaagtcaggggatcgagaccatcctggctaacacggtgaaaccctgtctctactaaaaatacaaaaacaaaattagccaggcgtggtggcaggcgcctgtggtcccagctactcgggaggctgagtcaggagaatggtgtgaacccgggaggcagagcttgcatcatgccactgcactccagcctgggcgacagagtgagactctgtctcaaaaaaaagaaaataaaataatggtagtcaaagtggagatattattgcaattaataactgaaacaggcccagagcacttggtgatgtagcaagcatccctggtaagtgtgtgaatctctgatccaagtggtgtcggctgcagcctggtcctcattactgacttctctgtgtgacattgggtatgaacatactttctctgggcctgagttttcctatctgaaaatcatggagtttaaactacgtgatctcaaggactcttttagcttttaaactgaggctgctttgtagcttct

SEQ ID NO: 200798 - DNA, 321 bp, Homo sapiens
tgaaacgggaaacagtgtcttcccttgagcttggacagggtcctccacagccacaggagtccaagagtgttgacctcttcccatctcttcaccccggaactgactgcagcatcacatctcatgaacggtgaactccaaaagttggcttaaaaggccaaagtctagtcctatccatactttatttacaaaaaaatataaaaattagccagtcatggcagcacatgtctgtgatcctagctgctcgggaggctgcgatgggtggattgcttgaacccaggaggtcgaggctgcagtgagccgaaatcatgccactgcactcca

SEQ ID NO: 200799 - DNA, 217 bp, Homo sapiens
gcccttccatacaggctagaccatcctggactcccacctgcaaggtatgagtgcctgtttactcacagcctcgcctaactgagtatgtcatccagctttggagttttgttattatattctgaaaggcgagaaatgtttatcagggatattgacctgaagttcccttttttcagtgtgtctttgccagattttggtatcaggaagatgctggatttgt

SEQ ID NO: 200800 - DNA, 489 bp, Homo sapiens
aatgttctagaaaaaaacacagggagctatgtgaaacaagatcgatttgataagatattgataattgtcaatgctagcataggtgcatgtgaggtagggaaatttcagcagtatctctaaatgtttgtgtttgaaaatgtacataatggaaagtcttaaaaaaagacactcaagagtactatgcctatgtcttatactctatggatttcatttgaaattaaaatgatgataagcataatgagacctaacatttactgagcaagtcttctgtgagcagagctccttaccaagcattctgcatgaattatctcatttaatcagcaaactacccccaggatatgggaagtatcattaactccattttgcaattaaagaaaccgaggcacaagaaggttagataaaatgccaaaaatcacacagctaataagtatccagggtgagattcaaacctaggttattcagtgcaaaaaataaaacaaagtaatgaaa

SEQ ID NO: 200801 - DNA, 390 bp, Homo sapiens
tttgttttagtcaccatagggtaccacacatttgctattacctatacttctatggaattattgcgtagagtcttatcaaaatcaactatttaaaaagaccttctggctgggcatggtggctcatgcctgtaatcccagcactttgggaggccgaggtgggcagatcacttgaggtcaggcgttcaagacccgcctggccaacatggcgagaaccctgtctctactaaaaatataaaaattagctggtcatggtggcacgcatctgtaatcccagctcctcgggaaactgaggcaggagaatcacttgaacccagggaggcagaggttgcagtgagccgagattttaccactgcactccagcctggacaaccagagtgagacttcgtctca

SEQ ID NO: 200802 - DNA, 472 bp, Homo sapiens
agcatgtgtcataatttccttctttagggctgaataatacttcattgtatggatatatcacgtgtggtttactcattattcatcatacacagttggattgcttccaccatttaggtattgtgaataatgctgctatgaacatgggtgtacatgtatgtgttggagttcctgccttcaattcttttagatgtatatccagaagtggaattgctggatcagatggtaattccatttttaattttttaacaaatcgtcatattgttttccacaccagctcttccgttttacctttccaccaacaatgcacaatattcccaattcctccacatccttaccaatgcttgctgttttctgggtttggctagtagtcatcctactaggaggtatctcattgcagttttgtttgtttgtttgtttgtttgtttttgaaacagggtctcactttgtcatccaggctggagtgcagtggtac

SEQ ID NO: 200803 - DNA, 923 bp, Homo sapiens
tagcaaactagaaataaaatggactgtcttaatctgctaaagaatgattacaaaaccctatagcaaacatcgtttcaaatagtgaagcataaaactcttcttgagtttgggaacaaggcaaggctgcctcctcttaccatttctattcaatattacagtgaaagtcctagataataaataaagaaaaaacgcataaaaagtgggaagaaagtagtaactttatatgattgtatacatcaggaaatctacacattaattattaaaatgaatgtgtgaacttatgaaggatgctagatataaagacaatatacaaggctgggtgtagtggctcacacctgtaatcccagcactttgggaagctgaggtgggaggattgcttgaacccaggagttcaagaccagcctgggccagtgagaccagtgagactccttctctacaaaaattaatttaaaaaattagccaagtgtagtgatgcctgcttgtagtcccagctacatgggagacagaggtgggagaattgcttgagcccaggtgccactgcactccagcctgtggtgacagagcaatgccctgtcttaagacaaataaacaaaagtcaatatacaaaaattagttatgttcctatataccaatagcaaataattagaaaatgaagattttcaaatatcatttaaaatagcataaaaacttatcaaatacttagaaataaaactaacaaaaggtgtaaaacctgtacactgcaaacattgctaaaagaaatcaaacacgacataagtagagagatatattatgttcatgagttggaaatctcaatatttttatatgtcaattgtctccaaattaagttacatagtcaatccctaggtcaaaatactgtctgtgtgtgtgtgtgtgtgtgtgtgtgtgtgtgagtttgggtgtgt

SEQ ID NO: 200804 - DNA, 532 bp, Homo sapiens
ttgaaacaaaaacctaaactaaactcgtatgaattaattttaaattgaaacagacaaatattcaagaatggagagttgaaagatgatcaaaatgactagctttataatctaagataattatacaatttataattatctaaggaactgttagatgactctttgcttttaaggcgagattagtcttttttaacagtgttattactagaaaaaagttgctgagcatggtggctcacaccggtaatcccagcactttgggaggttgagggaggcaggcaggtcacctggggtcaggagttcaagagcggcccggccaacttgatataaaaatataaaacatatttataaaaataaaaaatatatttataaaaatataaaaattaggcatagtggtgcgtgcctgtagtctcaactactcagaaggctgaggcaggagaattgcttaaacccgggaggcagaggtggcagtcagccaagatggcaccactgcattctagcctgggcgacagagcaagactccgtctcaaaacaaaca

SEQ ID NO: 200805 - DNA, 529 bp, Homo sapiens
tttttagtcttggacctggtgacttctctgtgttttcttatctatagaatggggattagactgcatctgcccagagcgttgttgagaggattaactagaggcagataggaaacactgagcgtctctgcagggcggagtcatgttctcagcttggcctcacactggggtcacctgggcacttataaaaagcacttataaatgtatacttatttcaaaataaaatctataaaataaaaaatattgatgcctggagtctacccccagagattataatctaatcatatggtgtacagcctgggagtctggatgtgtgaaagctcctccactgattcaaatgcatagaaaaatttggaaccaaagtttagtgttttaaggccaagaaactggaactagaccagctaggttctaactctggtcatgctattcactatttgtgtgacctcagacaagttctcaaccttgttgtgtttgtagtactattatagtgctgaccttgaaggacctctgtgagccagtgccgggcacacag

SEQ ID NO: 200806 - DNA, 112 bp, Homo sapiens
aatgtaaaaatcagcccagaattttattttccgtaaggtgcttaggagagcgtgggcatagccatgagacctccgtgttgggttgtgtttaaagatgtgtattcatttctca

SEQ ID NO: 200807 - DNA, 386 bp, Homo sapiens
ccaaaacttaaaggagttgagagagtgaaccatgtagttacttgatgagagagtattccaggcaaaggggccagccaagtactaagtatgctgggcatgttcaaggaacagcaaggagactgatgtggctaaaagagagtgagtttgggagaatgtaataatgaggtcagagagatagcaggggctcagttcctatcggctttaccactgagggagatagaaagcctttttaatctcatcagcagcatgataataacttattcatttaataagcatttaacctactttgtatccagcatttgataattcagaagtgagtaagatacagtgtctgctctcaaagtcaaagtctgtgggggaaaaagatataacaatacagatgctcc

SEQ ID NO: 200808 - DNA, 349 bp, Homo sapiens
ataatttcccctacattatgctttatataaaaatctgcattgtatatttctttacatttcagatacagcaaattcatagtaaaaatgtatcctgaaaagtttcaatatgtatgtgtacagttacatttaaattattttccaacataggcctatttatgtcatgctgaaaccagaaaacttagttttgtagaatagtaatgttattttttaggacaaccaactaaaactgccatttaggcattatatatgactcactgctgtagttacgataccgtttttatttttaatcaaatcttccagaggccttatggcaagtagtattaaaactactaagcaaaagtttatataa

SEQ ID NO: 200809 - DNA, 480 bp, Homo sapiens
ccaagtttactagcttcagcttgtagggccttaggaaaaaagaaattttaatttttagtgattccaagtcagaagggtaggagaaaaactcaaaaacaatgaacagggctagaatctaacaacagatgcaccattgttttcttctgaaatgtaacttttctctctttagccttccatttctaccaaagatactcataatgagactaatttgtttgtaaaataagttagttttattaacttggcctgattacttgcataaagtacaattagaataatgatttattatataggcacttttcaagttggctttgctgaaaatttttataaggaatctcagattagacttttaaaagcctctcaaggctataagctaaatcaaagatttgacttgccctcagactacgtctgtaataactacacaaattgagtgaatttctctctttttgagcctggccgacatggtgaaatgttgtctctact

SEQ ID NO: 200810 - DNA, 624 bp, Homo sapiens
tctgggattacaggagtgagccccacgcgcacgcggtccaaaatcttttattgcctctaggaattgtgaggcaattcttggctattgtgcttctactccacagttaaggacatccccaggactcctgaactgacaaatgacaatgagaaattgactaggaacaattgtttttttcttcgctttaaaaagaagcaataaccaatacaacacctccttggggatcaaaatctcaaaatttgggtatcgatgggtaaagcatccacaatgcaactccttcttgtaatctcttttggggtcctagttgtttcctttcttctttgtccatgcaaaagaggatggcaggaagggagcatgagagtccttgccgaatctgcttccggggttgctgtgtggattacacaggcagacaggtgtgaatacgtctgcaaacatcacagcactctacagatgccatttatgagcagaaggcatgcttttttaatgcaaaaacttgggtgtctcctctgagctccccagcctgggtgaaaccattctggaatcttctgtgtttcactccaccagagcactgttattgcattactttcatttccctacttgcgagaaacaatgtaatgaacggatcct

SEQ ID NO: 200811 - DNA, 732 bp, Homo sapiens
aacacattgcctggtatatgcttagtacatgtttgttgattgactccccagaatacacgattaaccccttgaacttgtcatgttccctttgtataagatatgcagtgtaaacagaccacatttacttacctgggaattttgttaaaatatggtgatggtggcatttttaaaagcattatacagaagatggaaagtcttctggatggtcttgtaccttttaaaataactgtagtttaatttttctgcatttagttttataattaaccattttctgtacttttttttctttatttagtcatttttccctttaggtttttgatttagtgatttgatttttccttctaatgaatttcatataaattggcaagttttatggatgagtcattttctaaaactttgtaaaaatggttgttgagaatttcaattgcatttttccatagaacagatgtgtttaagatatgtttacagggtagcaaataaaatattaattttttctctctacttttggggccatgtcataaaagattcttcatcatctcaactacttctttttgttcgttttattcatttttttcatttatttatttgtagagagcctactgtgcagtaggaattatccccctcacttcctgtttattaaaacaaccttctacccctgccctccctcacctccagattattaaacccttttccctttactccacagtcattttatctcagctgtcatacttt

SEQ ID NO: 200812 - DNA, 562 bp, Homo sapiens
cagagatcccttatcggagataaagaaatgaagtcttgatgtctgtactttaaatattgtagtttaatttttctgcatttagttttataattaaccattttctgtacttttttttctttatttagtcatttttccctttaggtttttgatttagtgatttgatttttccttctaatgaatttcatataaattggcaagttttatggatgagtcattttctaaaactttgtaaaaatggttgttgagaatttcaattgcatttttccatagaacagatgtgtttaagatatgtttacagggtagcaaataaaatattaattttttctctctacttttggggccatgtcataaaagattcttcatcatctcaactacttctttttgttcgttttattcatttttttcatttatttatttgtagagagcctactgtgcagtaggaattatccccctcacttcctgtttattaaaacaaccttctacccctgccctccctcacctccagattattaaacccttttccctttactccacagtcattttatctcagctgtcatacttt

SEQ ID NO: 200813 - DNA, 339 bp, Homo sapiens
tttgtcctacatataattgccagtttgggaaattaaaatgtgaaacttaaattagaaaaaaacccaccacttggaaatcctttttctaaatgtgacttaaacctagatttactataatatggtaaagcataaaaaagcaaacttgtaagaaactatcacagctcctaataattgagtacaaagaagcaagtttccctactctggagtagttcttttataggatcttcagaacagaatatctgtatcacatgttccttgtctttcctctatgaagaggaagctctatgtctcgtttgtcaagtctgatgacatgaataacatgaacatgtattactttgc

SEQ ID NO: 200814 - DNA, 302 bp, Homo sapiens
cttagtctcaatatgcaggtggtgtttactcttatattgaaaactgggatgtgtctgggagtgttaatctcatctgtggacctttgtgcagatgagactgtgacatatacctctgcccatcacctgatttgactcttctgcctgggaccagacaacagatgggactgtgacatcactggacctagcatttaagtaatgtgactccatttgtctgccttggtactgtgtggcaaggggcattgtgccatgttgctgggaattgcacccaggtgatgtaaacctattcccctgccttggggctg

SEQ ID NO: 200815 - DNA, 231 bp, Homo sapiens
gtcttgctctgtcgcccaggctggggtgcagtggtgccatttcggctcactgcaacctccgcctcccgggttcaaatgattctcctgcctcagcgtcccgaggcaatctctgtaggtaaattatataatcttccaaaggccctcttacaacttgcagagaggaaatcaaggagttgctagcaatatgagaaaagttaacaccttgtcaacttttcgtatttttagtaaaga

SEQ ID NO: 200816 - DNA, 334 bp, Homo sapiens
gttcaacctctgcatgtttggagtcaagccagaccatagtcagaaaatacctaagacagagtagcttagcgatccaaggactgaacatcaacctcacactgttccacctgtcacctaggacctaggcttctgccttttctggattgagtgtccatcgagttccctcctgctaatgaccagatggtgacgtgcttccatcagcctgggccccaccctgacaccaagcacctcagcttccttaaagcaagggtgattccccattcctcgctggggaatcctgttcctggctaggacctcactctttgctactcagaattttctgatggcatctgct

SEQ ID NO: 200817 - DNA, 143 bp, Homo sapiens
actgtgggaagggacaggtccccagagagaggtgagacggtgcaacgcgagggtgagttcggagtcatcctccagatgtccacaaaggctcgagaggccctgctgtgtgtcaggcactgcgtgaaggttgtgggcacagtagg

SEQ ID NO: 200818 - DNA, 385 bp, Homo sapiens
atattaacatttaaatgttggaggagtgagcattgaggaggaagaagaaatagagacagtgaatttgaatcttctcttgaaggctggacagaatttagacacatagctatgtagacatgggagaaggggcattccaggctgagagaattgggtaaattagagttgtttgttattaagaaatataaaataaaatagtttacatattgttcaatacatagttcaaagtattatccatggaatgttaagcaaatcaaagcaataaagaatccttctttatatttaaacatagctacaaaaaaggtaggaaggtagcaacacagattagataaaagagccctgcttattgagtaaggagatttggatggctctttgtcataacagtggg

SEQ ID NO: 200819 - DNA, 790 bp, Homo sapiens
gaaagttgaatgctttccctctaagtgcaggtgaaggtaacaatgtctacacaccacttcttttcaacattgtactggaaattctgacccaaaataacatgaaaagaaaaaaaggattcatacaaattggaaagaaagaaattacttacatgacacactcatgtatgaagaaagtctattaagcttctattaaaaagctactaacagccctacatatctaaggggtctgcatccactgattcaactaactgctgataaaaaaaaaaaaaaagccaatacagtataacagctatttacaaagcacttacattgtattgggcataagtaagctagagatgatttgaaaggggacaggatgtgtggtgtgtagagagcatccacagacttttgtgttgagggagttggttactgaaggatgactttactactcaatgtagcaaggtcacaaagtcaatatataacattgtatttctatttgctcaaattgtacagttataaaaatatgagctactggccaggctcagtggctcacacgtcttatctcagcactttgggaggacaaggcaggaggatggcttgaagccagaagttcaggaccagcctgggcaacagagagaccccatctctacaaaaataaaaatttttacaagttagccgggcatggtagtaggtgtttgtggttccagctacttggcaggctgaggcagaaggattgcttgagcccaggaggtcgaaactgcagtgagttaagattgtgccactgcatgccaacctgggcaacagaatgaga

SEQ ID NO: 200820 - DNA, 221 bp, Homo sapiens
tcctagacctgacaagttaacagcatgaatgagcatgaaaaggtacaccaagatgggtggcggggacattggttagctgggattttgaagataatttaatgatgggactgttttcgaagaatgggcagggttaatgcaatcaaagagggctgttgaggcaatgaaggataaatatggtgagtgctgttaccacctctagtctgaaagacatcagggaggaa

SEQ ID NO: 200821 - DNA, 404 bp, Homo sapiens
acttttgggactcaaggctaagggctattgttagtgtgattccagttatattatactttaagtttacttttcatgactggtgtttggagttttccattatttatgacataatttaatagattaggtactgttgttgtaaccagttgtttagctaattatattactgtggtgatttttattatttttttgcatagaatgaagatgtataaaaaatagtagcattaaatcagaaacatagctgttaaatttatcctgtttttaccagcatgccttttgtaaaatattacattcatcctttgtaatttcattagtaatttagcatgattttaagatttttctctagtaaacataaaaatctaataattcaggtatagtcttactagtaataatctaatttcagttaa

SEQ ID NO: 200822 - DNA, 505 bp, Homo sapiens
atcttcggtaccccacgccgcaccgccggttcaaatgtttgagggtttttctctccacgtttcatttgtaaaccaaaaataaaattctaaggccccccaaccatctgaatggactgccttcttggccaggacactctaaaatttaacctgaaagactggttcaggccttgaccctggacgggaagtagtggttgggcttttgcctcattacaccctccagcacaatcaatacagaccttaagtcagataaaaagcatttaggaggccgggcacggtggctcacccatgttatcccagcacgttgggaggctgaggtggacggatcacctgaggtcaggagtttgagtccagcccggccaacatggtgaaacaccttctctacttaaaaaatacaaaaattaactgggcgtggtggtgtgcacctgtaatcccagctacttgggaagctgaggcaggagaactgtttgaccggtcgtgcggcgtgggagtgagctgagattgcacc

SEQ ID NO: 200823 - DNA, 496 bp, Homo sapiens
cagctctatcagtttggttctttgttaaaacggttattttgtctttcggctcatctcattttattggattttttagattccttggattgaaattttaactttctcctgaaacttccttgccatataaattttgaattgtatgtctgtcacttcagtcatttccaaaatgttaaggaccattcttggggagccagtggacttgtttatgggtagggggacacactggctatttgttttgccagaattcttgggctcgctctttttcaactgggaggactgacattccttcaactgtattgtaatttgattatagtcagttggctttgtttctggatgttttcagagggccaaggctctgtggtgggccttttttgtggctgaaatattgcccttggtttcacagatgagtatattagcaaaatatttttggtgttctagttcgggctgcaattcagtagatggtgcttaagagtaacagtaaataggctcttattac

SEQ ID NO: 200824 - DNA, 439 bp, Homo sapiens
atccagctacgcaggaggctgaagcaggataatcgcttgaacccatgaggtggaggttgcagtgagctgagatcatgccactgtgacagagcaagactctatttaaaaaaaaaaagaaagaaagaaagaaaagattgtgtgacatcatagtctgtgtattgcagcccccgtgctgtcctggtgctatggggagtagaagagaggctttgagaggcactgggatggattaaaagagggctggacttgaagccaaggctcacattctacaggtaccatttagtaattgtatgaccttgagcaaatttcatcacctccagagcctctatttcctcatctgtaaaatgaaaggggaggcatctctgctttactcatacaattgttatgagtttcacctaagagcatgagaggtagtttttacacaataaaactctgcacaagt

SEQ ID NO: 200825 - DNA, 660 bp, Homo sapiens
tttttgtgcttgtgccgtgtatctaggacagaaataggcagtgttgaagagtctgccaatctagggactgattcaggataaaagggacaaatggcaagaacactaaaggcatacgagggatgagtgcacataaaggagtgaaaggcaaaccaaggaaaaactatggaaggagcaagccaaaaaaaatgaagactttccagctgatcaataaaaatttgtgagtaacttggaattgtggatgagatgtaagtaaagtgaaggaaagggattagggataggactaatcctaaaaacacctgggacagcagggacccaaggactcaggcatccttgtggcgggactgtgaggccacatgcttgtagatccacaaaccagtaagaaataatagaaatcctgggtgccttggcccacccccaggggatatgctgcagcacagcaggtagaccttgataagatctgcatacctacatccctacaacccatcctgactcctgctgccactcctctattctccatctctgacctgttgttgcaggaatgttacataagtggaagcaccgtttgcaacattttgggattggttttttttcactccaggtaatttcctggagagtcaccggttctgtatgcagccacaggctgttcctctcagtgctggg

SEQ ID NO: 200826 - DNA, 415 bp, Homo sapiens
taggatgagagtagagaatttgtctggataacctctcaagtttctttctatgctatggtcctatgatgctcttgcctgtttctggagattactgactctgtctttttgcctcatcagctgcaatttttttatactaatagactaactctctctgaatggtgtcctttgccaacaatctattcaaagtcacagcattttaagttgtgctttgaagccaagtgcatatatatacatatacatatatatatacctatacaaatggctgcgtcatgaacttctcagaatttcaattttaaaatttaaacctacacaattatatgtctatcattacagctaaggtatagataaaactaggtatggttgtatgcatttagaacatttccaggaaggtacacaagacatcatagaatcatct

SEQ ID NO: 200827 - DNA, 447 bp, Homo sapiens
aggcagatagcttgtcatattttgaaagcttcaaatagtttaatattgatgaaacataaggtataagtagaagatgagatcacaggaaatcaagttattgaggaagggaaggtccagtcatgaaatacagtatctgctatgcagaagagcttatattttgatccatcaggagttttgttgcctatttaaacagggtgacagcgactgtagaggatgatcatttggagaatagcaagactggaataagagacaaggaaaaagcattttgtattattgggacaggatactacaaaagccctaaaatagatagtgtcaatgggaatgaaaacaagagagtagattcaagggagaatgaaatgtagacaggccttcaggaatgatgaagacccgagggattttttcccccgtcgtacagaacttcccaatattgctttaacagtgagaaaa

SEQ ID NO: 200828 - DNA, 209 bp, Homo sapiens
atcagatttgtagaatcggtgttaattctttagacgtttgatagaattctccactgaaatcatctggagtaaagatttcttgggggtgaagttttaaattacaaattcaatgtccttaatagttataaagctactgaaattatctacttcatatcgggtatgttgtagtagtttttattttttaaggaattagtccatttcatctaagt

SEQ ID NO: 200829 - DNA, 426 bp, Homo sapiens
aatccacagaaggaagacaatggagctacaaggtgggagaagctgcctgggtctctaaatcactgtaagataatcaactgcttgggaaaacctatttggattttaagtgaacatgaaataaactactagcctgctctcaattgactggggatgccattcaagaggagatgaagaagtctgtcttctgaattctgacctgatgtctacatacttaacaatctggcaggatataatattctcgggtcacaccttctttcagaacttgcagacactgcattatttcttttggcactgaattcaactgggagaagtctgaggccagccaaatgtttaaccatttgaaagtacttcttttttgcctaggttttccattttctttttaggaactctcttttttaatcactaaacttttatttaaatactata

SEQ ID NO: 200830 - DNA, 397 bp, Homo sapiens
acagagaacaccaagcagaattaatattttaaaaacactgtttgacatatcatagacaaattgcttaaaaccaaagataaagagaaaatctttcatacagccaaaaaaatagaaatattatacacagaacaacaaaagaattattacaaacttcttgttaaaaataagtaagccaaaaaacaatggaatagcattttaaagtgctaaaagaaaaaagaactgtcaactctgaattctataaccagcaaaaaatatctcagagctgaaggaaaaaaggctttttcagacaaacaaaagcagagaacatgaattgatggcagatctgtgctaaatgaaacattagagggaattcttcaggcagtacaaatgacactacatagaaattgggatttacaca

SEQ ID NO: 200831 - DNA, 198 bp, Homo sapiens
tgcatcaggtacccaccctactccagtgtgacctcaccttaactgattgtatctgtaatgaccatatttccaaacagtcacattctggagaactgggcattaggactttaacatagggggacgcattcaactcataacagccactaatgagactcacagacaaaaattgctaatgatataacagatttgaacaataca

SEQ ID NO: 200832 - DNA, 366 bp, Homo sapiens
gtgaagagatgcgtgattttctcagggtcagcaattatctatgagttcttgagtactctgacacaatttttaaaaatattttatgttattttcagaacatcttatattgtgttttatatatgtatttcatatacatgaagagctttaaacacttattttaaaagtcactaactcctaaaattttcttcctttatatgaaaatataaaagcatgtttatttcatctgaatacgctcttcagacattctttctcttataaacaaagactgtttccaaaaataaaacacaaaaaagaggggcatgaatttaagatcaccagaccaactattctctctttctaaaaatgcatcatgtcttactttgcatg

SEQ ID NO: 200833 - DNA, 407 bp, Homo sapiens
tctttcacttaatacataaacaagaagggggaaatgttgggagccaaaaaggccaaagggatggtgaccaactcagcattccactggaggctacatgatcaaacagcaaactgtttatcatgaatacagaatgtgggcaaactcgcttctgtgcctgcccagaaggtttgctgagggccatcgctccctggccccggctccttgaggttatctactgggacatctagagcctattgtttgaggaatgcagtcttgcaagcctactctggaccgagcagctgacctcttcttccacaccccttctcactatctcttttgcctaataaatatggagggctgtgtaaagctcagggcccttgtccactagaggcaaggtgtcccctgacccttcttccaaacatactctt

SEQ ID NO: 200834 - DNA, 592 bp, Homo sapiens
gcaatggcttatgccttcacgtcattcagttatttgctcaaatcacacatatccacctatgcacctgccacatctctctctctcatcactttgcacttttctacatagagcttatagtatgacccaatagtatttctttatgtgtctacttgtttttattgacctcttttattagaatattaaggaatttttgcctgttttattcttgaagctatctctggtatttttaacagtgcctggtacatactaggcacataaaatattttttgaattaataatcaaagtatataaacactagcatctcaaagtgaaaatgttgttttcttaaaatagtttctgattttattagagaaaagtattaaagaagtaattcaaaaaaccaatagtaaagcaggtgtcaggtatggggctcaggacatgaaaagacattttattttggagaggaggggaaggcagcacatcagttcaggacctacagactggacagatccgtcatgaaatggcaaaaaataaaggcagttttcagatgctggtaatatgagcaggtccagataggtggatttttgtcatcaaaaaggattgtctggcaata

SEQ ID NO: 200835 - DNA, 429 bp, Homo sapiens
tcaaggcaggccagacccacttgtactaaccctaccatccccagaagtctcttgggtgaataataaaatttctctcaaattttgttggcgtgtggagtgcttccagcatagacatcctacctgttaattggaagggttattttctacctccacagggtgtccaaagaatagaaatgaaagagaggacatctctataaaccttacagaaattaaaaggattataaaggaatacaataaacttagaaaaaaaatggacaaattcccagaaataaaaattactaaaactgagtcaaaaagagaaaatttggccagatgtggtggctcacacctgtaatcccagcactttcagaggccaagacaggcagattgcttgaacccaggagtttgagaacagccacagcaatatggcaaaaccccaaccctattaaa

SEQ ID NO: 200836 - DNA, 409 bp, Homo sapiens
tcgatcaaaccaagaaaaagggtgaaactgaatgcctgctcactgactcaagatttcagctgctcagcgagcctgacgtgacggcttatgagcccagaaaaggggtattttaaacccggctggctggatcatgtcactttcttatagaagccctgcctttccagagacctaaagtgtaacgcaatcagagacctttgaggggctcgaggctcggcggcttccgcccctcagcaccagcagagaccccagttttcaggggacatgatcccatagtgtcgccctcacttttgaagggccattaaaagcctggggcctcttatctcaacggctttgggcgtgaatgtggggcaagaagggggggggagacctgtgggtgtctcttttgcctgaggagttggagacacttgtg

SEQ ID NO: 200837 - DNA, 604 bp, Homo sapiens
ggcagagtggggagcaaggtgagatccctgggaagggggtcaggtggcccctagggagaatcacaggagggaggtcagacccaaagagcgcttgggtgcagtgaggtatgcggctctcactctgagtgtgatggaagcaccagagagtggcaggatctcctttgggtcttaaaagggccaccagctactttgcggagaacagactacagtgaggacaagggcagaagccaggaggagagtgacaagacccttgcaacaatgaatagggctgacctattaccttgcagaaatgacttcacaggtgtgtgactgcacaggctcagtcagaaaagttagcatggttcctgccttgctctctcttagaccactcatgccattcagcctctgacagaggctgatggctacggggaggctgagtgacttcccaaagtaataaagagttgggaatcagaattccaggtctgactcccagcagactgttctatttccttacacacctgcactttcatcaatcttctccagctccaatttcttgtgccccttcaacagcatctgcaggcaggatgatctttccgataaaaaccagttgcagaagttcctgttg

SEQ ID NO: 200838 - DNA, 488 bp, Homo sapiens
accccattttccgaggtattcataaggctaattgacttgttggccttgtttttaaagtggaggtaagctgttgattttagcggagtgaattaaaaaatctgaacattcgtgagccactacacccagccgcagaaattgaatagaataatgaactgcatgtgtttatcatcgacttttaactatttcagtcttatttatttcatatccaatcttaatttatttccctgtcccatgttatttcgaagcagtcttagataccaaataattacatatataaatatttcagtgtgtatctctgagatagtttcttaaaatagagctatcataacttaaaacaatttattggatcaaaatatccagttttcattcaacatttgtgtcagttttttctaattctttgatttatctcattttattagaactttttattcagcgtgatatttaatagcagttgaactttaaaatatttaaataagcttatccttatg

SEQ ID NO: 200839 - DNA, 435 bp, Homo sapiens
ttctcactggggaatgaggaaacttagaattagggctgccttatactgagctatataaagcataatacaaactatgaaaggttcctttggagacatacacaacaaccaaataaagcaccccaacccaaacaaaggaaagaaaaaactctctgagcactaactattcacacaagttgtactatagcaccagaagattccatcaagttgctctaccttcacctttggttggtggtcatgcgcctagaattaaaaaagcctataagcttaagaatctggcaactccaggtaataattttttttaatattgccttattgaatatatgtaataatttttcctctttgcaaacagaatacaagacaatattaaaaatctgtgagtacgactgggcatggtgggaagctggacttctaagaacggtaggtgatcctctagag

SEQ ID NO: 200840 - DNA, 728 bp, Homo sapiens
ttctcactggggaatgaggaaacttagaattagggctgccttatactgagctatataaagcataatacaaactatgaaaggttcctttggagacatacacaacaaccaaataaagcaccccaacccaaacaaaggaaagaaaaaactctctgagcactaactattcacacaagttgtactatagcaccagaagattccatcaagttgctctaccttcacctttggttggtggtcatgcgcctagaattaaaaaagcctataagcttaagaatctggcaactccaggtaataattttttttaatattgccttattgaatatatgtaataatttttcctctttgcaaacagaatacaagacaatattaaaaatctgtgagtacgactgggcatggtggctcacacctataatcccagcaccctgagaggcagagcaagactctatctcaataatcaaacaaacaaacaaactgtccaggtgtggtggcacagccctgtagtcggagctaataaagaagctgaggtgggaggatcgcttgagcccaggatatggaggctgcggtgagctatgatctcaccactgcactccagcttgggggacagggcaagtctgtctcaaaaaaataaaagaaattgaatacattgatattttgccaggaccctgccttctacaggcatctagtctaatgggactgagagtaaccaaggcagatgagctaatcccagtgtc

SEQ ID NO: 200841 - DNA, 563 bp, Homo sapiens
acaaactgaacttcacattatagaatttccaatgttcaggtcttaaattagtattaatgtctaatacatgagttttgcttttttccataatacattgtaaggtctagaccagtcattgtcaagtaggggtgattttgccttcaggaaacttttggcaatgtctggaaacatttgtcattgtcacgctgaaaatggtaatgctactgacatctagtgggtaggggcagggatgctgttacacattgcacgatgtacagcacagcctcccacgagaattacttatgccaactgtggcaacatagagaaaacctgtacatgatggtacataataattcattttatcctcacaacaacccttaggatacacactaatatatcaacatattttgtctaaaagtactgagccacggggatgttaagcagaattttcaaatttatagaggtggaatagaaacccagataacttggatccaaatatctctcgcttaactcccattctagagtctctttgtactttctaggattttcccctcaagtttatcactgaataccatactttacag

SEQ ID NO: 200842 - DNA, 657 bp, Homo sapiens
agtgaaataatacccatttctggtgagtagaaaggaggaggggaggaagttattctcatatgtattgctgatgggaatatgacatctttgttttcttataaaactttgaagtatagtatacttacaaaagatgaacatatcaatatgtatagttgattaactgttacaaattgaatacatgtgactagtactcagataataaacaagacattatttattccttgtgcttctcccagtatatctaacacaattcttctgaaacaaaataaatatcctgacagattgctgagtcatggctcattcatgctgagctttaatgtgttctccaaagtaattgtatcagtttatacttgcactggcaccagccctgtgtaaatgttccagttgccctgctttccatgattatcactttgaaaagcaatgtgtcaatatattaagagccataaatatatttataccaatttatctagtaattctaattgaaaagatagagatacatgcacaaaaacattcaatgaagcagtctaaattttgtctggtgcaaccccacaccgtttgttgtctgtggttgcttttgtgctgcattggcagaattgagtagttacgatagagatcttgcaaagcagaaaatatttactatctgacttactccaggaa

SEQ ID NO: 200843 - DNA, 340 bp, Homo sapiens
ttctcagagacttaattctttctctgacctaagacgttttgaatgtcttacacaattattgctttactggcactttgatgactcataattatttttaggatcaaaaatctaatgtaaccatcctcccattttccagtactaccaagtataacaaatacacacatctattgctgacaattaaattaatttcctccatctacaaacactgtcattcagagaaagtttactgaagggcaggaaacagattgtgaggggctgctgagccccacaggcagaactttaaacaaaacttatttttgccaatagtagtaaagaggctaatatgtaacttagagtgttc

SEQ ID NO: 200844 - DNA, 564 bp, Homo sapiens
taaatcctaactcaaccagaaaatatttcttaattgatgataatttgctatccctttgatgctttaaaaattctcaattagagtgcttattaaattgtactctgccaagataatacaaagttcttaaaagcaaggcaaatattttattcatctgacaaagctcatggaacacagcgtccaatcagtgaaaaatgaagtcaccaatataaaaaatgaagtcaccaatatcattttagttacacagagccatttattgcttaagttaataagaaaagcatcattagggccaggcacggtggttcacgcctgtaatcccagcactttgggaggccgaggcaggtggatcacgaggtcaggagatctagaccatcctggctaacatggtgaaaccccgtctctactaaaaatacacaaaattagctgggcgtggtggcgggccctgtactcccagctactcgggaggctgaggtaggagaatggcgtgaaccccggaggcagagtttgcagtgagccaagatcgcaccactgcactccagcctgggtgacagggcgagactccgtctc

SEQ ID NO: 200845 - DNA, 551 bp, Homo sapiens
gaatgctaagcatgtggaagttctttatatcctgctcaaggtcattgccaaggtctgatttttcacattcaacaaattgcaacctctggcataaatgggttaatacctaggtgatgagttgataggtgcaggaaaccaccatggcacatgtttatctatgtaagaaacctgcacatcgtacacatgtaccctggaacttaaaaaatttaaaatatatatgtatatatatttaatatggaattttaaaaattactaatgagttcttttatctgagtaattttgcatcaacatgcttttattatggaagagaagattcagtgagtacaaaattgcagatacatgtgtcagaagatccctgaatataataaggcttagtattctgtgtcataattgcctgtttgtattcctctctggtctttaaacttcattagggcaaggatcaactccatcttactaaccatttgattccctatgtattacacgatatatgaccaataataagccttcaataaatacttgtaaaataaagaatgttatgtaataaaaaaaaa

SEQ ID NO: 200846 - DNA, 2042 bp, Homo sapiens
  misc_feature (891)..(891): n is a, c, g, or t
  misc_feature (1832)..(1832): n is a, c, g, or t
catgggaatttgtttggttttattttttatgcttgtttttgtttttaaaataatacataaatgtagtttgccttaagaaactgttatttttgctgagaatataaattatatacaaataaaaccataaagtccagtgaaaatacaagaatacaatgctgcattacagaactccaaatctgaaagtacctccctttatcattcagttctcagatcaaaggtcatttctttaaaggtaattttctgagttccctagctaaaatatcacatcactaaccaattcagttcactctattttctgtattatctttttcatatcattttatttctacatgaaatcatctgatttatttttaaaatttttattgtctatcttatttcacttaaaagagaggagcaagaaccatatctgtcctgtttattagtgaaacacctaaaagaatacctggaacatattaggcaatcagtgaatttttattgattgaaaccatagaatcaaaatagcttgatttctagctttgttgtttcatagtctaactttagacaaattatgttctctgagcttcattatctgctctgtaaaatatcttaaggcttgattgaagattaaataagctaataaatgaaaataactgacacaataccggacaaacaggagcattcaataaaatatgtattttagatggtatacgcaattaatcaaggcagtctgtttacaaagaaagaaatcagcggggagcggtggctccatgcctataatcccagcactttgggaggcagaggcaggcagatcacttaagctcaggagttctagaccagcctggccaacatggtgaaaccctgtctatactaaaaatacaaaaattagctgggcatggtggcaggcgcctgtantcccagctatttgggaagctgaggcaggagaaccacttgaaccccagaggcagaggttgcagtgagccaagatcacgtcactgcactccaccctgggcgacagagtgagacccccccaaattaaaaaaaagagagaaatcaaggtatttttataattgttacagtattgttttgccacaaaaataagtttgctaagaaaattatgtttaactatcttaagcaattttgtttgtttgtttgttttgagacagagtcttgctccgtctcccaggctggagtgcagtggcaccgtcttggctcactacaacctctgccacacaggttcaagagattatcctgcctcagcctcccaaatagctgggactacaggcgcgtgccaccatgcctggctaatttttgtatttttagtagagacggggtttcactctattggccaggctggtctcaaactcctgacctcaggtgatctgcctgcctcagcttcccagagtgctgggattacaggcatgagccaccacacctggccatcttaagcaattttaagctcacgtttattttaataaacttcagtagatccttaaaacttctggtaagttgtttaatttttaatgtataattaagtaagtatttctaagtagttgcattttatttttgttttttatttctgtgttgggaagtctaagccctgatgaaactgcctggtggaccctgaccaccacccctgcagcacaagccccgcgtttaaaaattatagacccgtgctcacttcagcagcacatacactaaaattggaaccttatagagaagattagcatgacccctgtgcgaggatgacacacaaattcgtgaagcattccatatttttctgaaattgaggcagtaattaatagcctaccaaccaaaaaaagcccaggaccagatggattcacagccaaattctnccacaggtacaaagaggagctggtaccattccttctgaaactattccaaacaatagaaaaagaggggctcctctctaactcactttatgaggccagcatcatcctgataccaaaacctggcagagacaccacaaaaaaagaaaatttcaggccaatatccctgatgaacatcgatgcaaaaatcttcagtaaaacactggcaaaccaaat

SEQ ID NO: 200847 - DNA, 601 bp, Homo sapiens
gcactaacacaaaacttttaaaaggagtggaagaaactgtttaatatcatgggatgtagaaattgaatagatctttagactagcatattggtatagtaagtaaagctttctactttgatgctgaaaggcataataatgagaaagtacccaatgagcactaaataatacctaaacgcagggtaccaccaatgctttgctgaactaattcctatttataaccaagtctcagtttaaatgctccttcccgaggaagtaatttcctaatctaccatattaggttatgttatcattatattcaaacacactgccttgtacttcatcttttatgacacttattactcttgtaatcatctaagtgtctcatcttccctactaaactgtaagttccatgagggcactgactatgtcttctcttgtatattcaatgcctggtacaataggatttttgaaatcaattaattaaagaatgaatgcatacatgaaataaagatacatatcctatgcttatctctagatattataaaagattaactgggaaagttaatgtttataaagagaatagagtgaaagcagaaggaaaacacaaacttcccacatccat

SEQ ID NO: 200848 - DNA, 440 bp, Homo sapiens
cttgatctcctgacctcctgatccacctgccttggccccacaaagtgctgggattacaggcgtgagccaccacacctggccctcaggtctcttataggagcactaatcccatcatgagagctccaggcacatgacctcatcacctcctggagtcctcacctccaaataccatcacatcgtggttaggcttcaacatgcctactccaggaggatgcaaacattcagcccatagcagtcatgtacctgaggttgtgatgaaataaatacacaaaataacatttctatctatcaccatcctcctcctttttgactgttagctgggctggccagcacctcgaggatggtgggtttgctggcatcttccggcagacaatgggggccctgatgatgggctaagagacccagtggccctcactctgtctcttaagcccttgaccctg

SEQ ID NO: 200849 - DNA, 147 bp, Homo sapiens
gcctgaggtcctaaccatgactctcccacttcccctcccctctctgtggtcctttcctttctcctccacttgggcacctccacttggctctccctaggctcagtcccctgggagaaggacaccctgccagcctgcggccctgaaaaa

SEQ ID NO: 200850 - DNA, 239 bp, Homo sapiens
ctccctagtagctgggactacaagcttgcaccacagtgcctggcacgacctcattataaaagaaatataatctacacagctgatggttgtcagttgaagctgacagactgctagatgagggtcatataaataaataatattaaaatagagcctgctgttatagattgaattgtgtcccccaaaatgttgaagtcctaattcccaatacttattaatgtgaacttatttggaaatggggt

SEQ ID NO: 200851 - DNA, 308 bp, Homo sapiens
cttgacttgctggggaatactaaaaagctggagggagacacaggaacctgccttccaggggacaattaattcctggtctttgattcctaagcctctacccataatcaaaggcaggaacaacactcttgggtgctccgagcaccccacacttgctccacgggtgagttcatgcttttcaaggagactttgttaaggctctttgccacggtagacaccatgaaaaatttatctcttcaaattttctcttcccttcttatgtttttcttaattactctagccatcctctcgccaacactcagtacttttgc

SEQ ID NO: 200852 - DNA, 426 bp, Homo sapiens
tttggaaatgttttactattgtcaagtttcttctgtatgtctgaaaaatttaatgataaaagctgagagtggggcagccagccctggcctcaggcaggagaacagaccacgacagggctctgctgctcaggggcagcgacccacgctgctggtctcttagcctcagcccttctctgagatgaaggagtcacccaaaacccacactgtcaaatgatttctctaaggcatgtaaacacttctctgaatcaggtaaggactgggatataggaagcaactgcaacacaactggccttactttcagccatcggactgtcagtatccaattattttcaaggagttcaggcaaaagcagaatgaatgtaaaacttacaagaaaggggagaagaggtgatgcttacgctcatgttagagtcacattctcaggca

SEQ ID NO: 200853 - DNA, 866 bp, Homo sapiens
ttaaagtgtaaacaatttcaggaaaggcagatgtcatgttttatatggtaacttcttaaaaatctttaaacagatataactcaggctcttaaaaaaattgtctagttgtcatctgatgtactaacatgggggagagagagagagaaatgactggcatttccaaacacacagtaccattaaattgcaaaaaaaaaaaaggaaaggaaaagtgaggtcaagcccactttttacttaaagtgttaaacctaaccttttttgtttaaataagcaaccgtagaagtgaagaagcacgcacagggtccctattaagtgacttctgacagaagaaaatgtaattcccacctgcagtggcaccacaggagacatcttagccctgagttctggtctgtgctgccctctctcagtctttgcaacaggctggggcagcttgactcccagccatcaatcacgggctgactgaaatctggcacctccatttgcagatagaacagctccccaggtctcctgagctctggtctgagacagatgtagagtctgttgttttcatagtagcagctttgtggcctgaactcctgaatcccagttctggcctgatcgcagtccatagttccacactaagagaagtacggctgctttggacacacgaggcctcttctttctaacttttattaatactatggttgaatgtcttgcttgtagcgttagccttcaggcttcagttcaggctgacatcgagaagcacggcaagtcacggaaacatctcagggtttgatggtaaatgcttatgtctccccttgaaaaaggaagttcacatgtctggagcgaagagtctttacggttgcagtctgataccacaaagaggttac

SEQ ID NO: 200854 - DNA, 450 bp, Homo sapiens
tccctcctcccagcctgcctcagatcatggccctgaaagagaagacatcctgtttttccaactcaagagacaccactgcagggggagcagtagcaggcttggggacgttttccactcaagaagctggctatgggaagagcttaccctgtatttcatgcaatacaaaggaagatggctgtttggggttgccgtgtctcttagcaattaaggagatggctacagccaagcagtgtgaagtgacagcaccagaaagttttctacaccagaggctgagaacaggggctgtgcagtcatattcaatattgagtccccaaccctaacccggacctggcacatacaagacattcagcagatggctattgaatgaaaatatataaatgaatcaacgattaccagctgcctccactcccttaacctgctacagaattaataaactaatcttgagcatag

SEQ ID NO: 200855 - DNA, 320 bp, Homo sapiens
aagacatactttcccttcccccatcaccatctagcactcttccctgtcaccttagagctttcgacttagatgtgttcacacccagcagtcccagcagagctttctgctcacattatatgacataaaaaagcaggcaatgaacaattcatgcttctaagtgcttgcgataaagccaggctgagctgacctctcccatcctatacagctgcatgtcagaaacataagcttaaaggactgagagtagcaagcatgtgcgtgatgtggtataaacaaacaaattaaaacctgaggcctttcctctggctggtgcctaatgggac

SEQ ID NO: 200856 - DNA, 741 bp, Homo sapiens
acaagttgctggcatctgacatgaaacactgccacctaagatactttgattcatgaatatttgacctcatattttgaggtcttgccccaggagttaatatttttctgtctctccattgtgaactgttgagaaatcctttattaggtcagtgcaaaagtaattgcggttcttaccattacttttaatggcaaaaaccacagttacttttgcagcagcctaaatagcctgttgagatcccgcagaaccatgattatctaaaacagctttgcttcaaggaataaatgctgctggatgtatgagtttaggatataaattccagatgtttcttacctcatggggaggttgggagcattttgcactgtatctgttggacactaaatatgtactcctttttaggtgtaatttggagggaagggctttggtcttcaaatttattcattgtataagtagaatatattgagattctgtgccaatttttggtcagcttaattatgggtggaatagtaacagaagcaaccgttgtacttggagtgacagtcaactatgaatccatcacccatccttttgggttaatgggttacatcatgctttcataaaatatcactgttgaggttatgaaaagtcagcttaaggtaaaaagatctaaatttctttggtaattgggcaggtacttttattaggtattttaatactaatgtgatactgaaataaatctgacttcagtttagtctgacttacatt

SEQ ID NO: 200857 - DNA, 731 bp, Homo sapiens
gttaacattgagtgtcaacttgattggattgaagggtgcaaagtattgttcctggttatgtctgtgagggtgttgccaaaggagattaacatttgagtcagtggactgggcgaggcagacccatcctcaatatgagtgagcaccatttaaatcagctgccagcacagctagaataaagcaggcagaagaacgtggaaggactagactggctgactcttctggccttcatctttctcccatgctggatgcttcctgccctccaatgttggactccaagttcttcagcttttgtattcttggacttacaccagtggtttgccaggggctctcgggctttcagccacagattgaaggctgcactgtcagcttccctacttttgaggtttggggacttggactggcttagttgatccacagcttgcagacagcctattgtggaacttcaccgtgtgactgtgtcagtcaatactccttaattaactcactttcctgtatatatctatcatattagtcctatccctctagagaactctgactaatacactccctactatgtgcaaatgaatatgctagtttcagtaatgtgtggcgggggaaggtacagtagccctcatatgctcatgagggtgagcagagggcaattagcattgtgtagcagcagtggaaggcagtggggaccaggcaaaaacttaagagaacttcacacttacagcaggtgttcagtgataagt

SEQ ID NO: 200858 - DNA, 558 bp, Homo sapiens
cacgtatagcacggctgccccacccctccccggcattgcagtggggctgtcttccaaggcctggtgggatccccacatgggtccagtgtagactctgctttctgtagatgagactgaggccttatggcctcgcttgcctgttcattgctccaggaggccgccagatgccagcccaggcccaacgctcccgccagtgaccatccctcccccgagctggctgcctgccagggaggaacgcctcccagacctcgggggaacttaaaccctgggcctgagcagcaccgtcccccatcactccaaagcatctgtgggcatggcggccctggggagagagttggggacagctacagtggctgtctgggtcctcctgaagtgggggcaggggtactgcagcaattgggagagaaccttcaggcggctggacccctgcccccacttcagggaaggaggcaggtgtttgcactgaaggtgctgtcaggtaggggttggggagggcccagcagaggggtcctgggaggctgcaccggagttggacaagctttctgagtaccaggccgt

SEQ ID NO: 200859 - DNA, 413 bp, Homo sapiens
atgtggtagctcatgcctatcatcccactactttgggaggtggaggtgggcggatcacttgaggtcaggagttcaagaccagcctgcccaacatggaaaaattttgtctctactaaaaatataaaaattgtggtggcgtgcacctgtaatcccagctactcgggaggctgaggcaggagaatcatttgaacccgggagggcggaggctgcagtgagctgagatcacgccactgcactccagcctgggcaacagagtgagactctgtctcacaaaaaaaagaaaagaaaatatttgaagctaagactgtggtgatggttgtacaactctgtgagcacacacacaaaaaacgctgaattgtgcactttaaacgagtggattttatgacatatgagtcatatttcaataaggtcat

SEQ ID NO: 200860 - DNA, 300 bp, Homo sapiens
ctatatgcagccaaaatatcaatcaagtatgagaacagaataaagatgtttgcagatatgaaaggattttaaaaatttacctctgagcaactttctcagaaaatcactggaggaactgctgcaatgaaacctgggagtgaaccaaggggaagaaaatggatcgaacaggaaaggcaaagggaatccctaggatatgggtgaagggagatctcaggatgacaactatgcagcagaacagacagacagaacacaaggccagcctgacagagatgaaagtgactgaatgcctgatgaatctgg

SEQ ID NO: 200861 - DNA, 440 bp, Homo sapiens
tctctaaaaagtaaaaatttaaacatttttttaaaataagctacctaaagataattttgacaaaatgtgcaaaacctgtaacagaaaagaagacctaagcaaatgcaatgcaaagtgataccatgttcatggattagagcagttcaactccaaactaatctatagattaaacaccatcccagtgaaaatccgggcaaggaaactgagaaagtgtttctaagatctatgtggaaatgcaaaaggagcaagaataatcaaaacagtaaaagaactaagtcatgtgattttcactatctgacttcaagacttactataaagcagccggacaccgtggctcatgcttgtaataccagcactttggaaagccaaaggaggacagaccccctgaggccagcagttcaagaccagcctgaccaacgtggcgaaaccccatctctact

SEQ ID NO: 200862 - DNA, 597 bp, Homo sapiens
tggtttgaaaataggtgaatgcagtgcaatgacatactttgggaaagagaccacattcatataacttttattatagtatattgttgtaattttataacattattattaggtattatttgttaatttcctactgtgcctaatttataaattaagcttataggtgtgtaggcataggaaaaaacttagggcttggtactattcaaggtttcaggcatccactggaggtcttgatatgtgtcctctgcagataaggagggtctactaaataatgaaaaatatttatgatactgttgtttttttcatagtttcatttgcttgtttattttctcatttcttttacatattgtagtgccttagagatctgtagacctctctatcatactctttctcttagtcatctcatggttttgaatttaatctgtaaactgatgattctcaaacttccatctccatttaggatcttttagctccatacttgtttatgcaactatcttcttggcatcatcacatggatgtctactaggtatttcaaactcattatattcattattgaactattttttcttccttagatcttctccccaagccttttcatcc

SEQ ID NO: 200863 - DNA, 449 bp, Homo sapiens
attgacacagagaggtgatatgactcatagagcaagtaaatggcaaaagccaggtcttgaacccagatctttagaaatatagggaaggactgtttctgctattccacactacctcttaaagctttaaaggaaaaacggaggagtgtatactactacctttcatgccagtgcatgtttttctttttccttttaccactatctacccactaaatgcacatactcaaaactccttgtccagcagacttctcttaacagtgaggagaagcacaaaaaaaaaaaaaagaatatttatggatccaaagtacagtaaactttccagtaatgcctttataactgggtttgttttggtaaaactgtatttgtaaaaagagaaaagatgatagggaggggaacaattcagatgcttccacagcctaattccagttctgaaatgaaaataacagtacatg

SEQ ID NO: 200864 - DNA, 548 bp, Homo sapiens
cgatgaagatctgactgaatgctgagtgtggactagcttgagagtaagaaactcctggggatcacattcttagggaatcccgcacactttgatgactctcacctctagggatcccatcaggttcttacggtaaggaactaagaaaaagcaccttttgtctttgtcagggatggggaaaagtaaccatctgaaatatgcctagagaattctctatacataagcctcttccaaggagaaaacactttaccagtcaaatatttatctcaccaaggagaaagaattcttactgaattccaggcctctctaacctttctgtccacattacatagaagaaataaaactgtgatggttaattttataatatgtgccaatttaatacactaagaaagacacagcccagggatacaggcccacttaagaccagctgtaattgtaagattatagaatgttttccctccccaactttttaacaccacatcaacaggactccagtataataagtgaattatagctgagagagctggaaagcacatgctgcaacttacaaa

SEQ ID NO: 200865 - DNA, 690 bp, Homo sapiens
aagattataccactgagtcattgaaggattactgacaggataatggcatgttttagaaaaactacactggcaatatagatcaaagattggatggaatacagttacgcaagaatcagaagaatctttaatgatggcgcacgtggaagtgataaaaacttataaaacagcagaaatctgtaaatattgtgcaagacaacttactagcatattgatctctactaaagctacaaaatatctaatagagttttatagcacgcgatatatatgcttaacaataaatatttttggactatatctaatgttttctattttagtaaaacagaatttccattcagtaaagcaaatcattttcaagaaaattctttctgggtcatgaagtgccccattgtcctcttttccacaagcaagagagcttggcgaaaactcatgaatgtccctcagtcaacccaacagctggttttctaaaaactccatgatgctatcccttcccccacaccctttaatcctagaagaatacaatattttaatcattgttcaccacagaattaacatcaaaacaacttatttacagcattaccaatatggtgaaaccccatctctactaaaactataaaaaaattagctgggtgtggtgacgggtgcccgtaagtcccaaagtgctggatacccggcggacccacagtgcctgcc

SEQ ID NO: 200866 - DNA, 193 bp, Homo sapiens
gaattatatattaaaaaaagcactgaagtgttgaaagttgtagtattagaaggtttagaaaggaagttaatgacaaagtgcagttaaatgttattttgaggaaggtctggggtatttaatatctttggataaaagcaaacattttgatacttttttagtgactagtaaaaacaattttttgggcagaaatgtc

SEQ ID NO: 200867 - DNA, 314 bp, Homo sapiens
ccatttgaaatctctcaatatcttgtttaatcaatatacacactatctgaaaatcttaaacattaccagtttacaatatacattaaacatcttcaattctgagtgacagaatcatcattcttatgctcctttagaacataaatttaattgactcttctagatatactgtagctgcaatcacattcatgctccttttctttatcccatatgttcacaaacaattaaaataataacaaaataatagctgcccctggttccactataaaaatagtgctttagaaagagtttatttcaggttatcaaacactacttat

SEQ ID NO: 200868 - DNA, 409 bp, Homo sapiens
tagttctgccaacaaaatagggaactttagtctgatcaagcttctacatctatcaatttacagaaattaaactgagtatcatgttaaatggcaccatggggatgcaatcagcaaaacagacaaaatccataacatgggaatctttatacaacagagggtacaaaatgtttttagcacaaaaaggggtaaatggagataaaaggggaacctatagattaaatgagattaaggaataccttgatttatcttaatgtgtatggcccttatttggatcctgattgaagcaaacacgttgtaaaatggaaaacattataactagttgggaaaatgtatgtgaatattggatttttaggaacggatcattcatattttttaagtgtttcctgacattttggtttttattaataat

SEQ ID NO: 200869 - DNA, 442 bp, Homo sapiens
taccctaaccaaggtcttagcaacggaaccttttctaaaccttccccagccccaccaacgccacacagagctagacccttagtggtgggcactccctgaggccccgcttgattgagatacaattcacacctcatacaatccatctactgaaaccattccactcaagggtgtctcatgtattcgcagagtacacctctggcttcactgtattcacactgtattcttctgtgcttgtttgttcatctattcatacatcaaaaaaaattttttcaggcatcatcacgggctggctctggaagtacaggcaatggagacagaaaagtgaacaggaaggtgaggttcctttccttaggagagtgcagctactaaatatgacaaacagaatcataaaatctgtccactgctagaccgggtgcggtggcttacgcctgtaatcccagca

SEQ ID NO: 200870 - DNA, 661 bp, Homo sapiens
gaaaaaagggaaaaaataaccattttcctgtcaaaagagaaaaaagttaaagaaaaaaacctaccccaaacccctgaataacctacataatgtgggttttttttgtttgtattaaggagtgtttttaatatttaaaaaatacttttcaacaatggttctactgaaaaaataacagttttacatgacatatagatttataaaaattacatgttactgtgtttatagaaaaaaatggtggctgtgttttaaaaagacattgaagcaactcttgtgtgaaaatacacaggtggtgttgaaatagaaacaagcctaggcactagggttcctaaggtctgctttcatctcagcctctcatttgttatgttacatttcagggctatcattaatactgccattgtatcccatttttctttcatcttctcttttcaccccggaccctgtttgggggccaggagttcctttgagaatgtgaaggcggccctaaaagctctcctctaaataatgtgcaaatacacaacagatttgcatgtaagtttaggggtttcatggtttctggaaagcatctttggaccttagctgagtgtgcatgaattagaatgcattagtaagaacatggggctgcaaaatataccatatgaacaatagttagagcatttcactg

SEQ ID NO: 200871 - DNA, 621 bp, Homo sapiens
atcactagcgagcaacaaaagtcaacccccggggcagagggctcctgggtaccagcaggggcgttatgcactcccggagagggtcgggcagggctgaggggctccgaggtcgcttcacccctagatgctgcggcgcagtgagaggagctaccagcccaagacagacaaaggagaaagcaggcccacgctggggcgggggcggaggccgcgctggtgttcatgggccgcaggtgtcccggttgccatcaagcacgacttccttctggggccacctgtcctcccccaggcctctgtgagacggagcgccgcctgggcagtcgctggcctccagggttgaggaaaaagacggtggtctcaccaggggcagttggctggagggactctggccagtggccgagtaggagccgcagtccgaggtggcggagcagcctgtgccacctcagccctcccacctgccggcactggagcacctgacggcttctccacatgctccagtcctccatcgttcccatccggtgccagctctgcccccaccccggtcaggacgcgctggtggccctcgcctcgccgccctctcaccctccttttcttcactgttcccccatatccccatacccagac

SEQ ID NO: 200872 - DNA, 401 bp, Homo sapiens
aagaatgtgtctgtattacaacatcccaggaagactagatagttatataatgaacaaggcaactgtgttttcttcttgaaggatttttaaagacgacttttataaaagctctgttgcctaggcgggagtgcagtggtgtcatcatggctcaccaaagccttgaactcctgggctcaagtgatcctcccaccttagcctcctgagtagctaggactacaggcacatgccaccatgcatggctagattttataattttttcttttctttttttttagagatgagtcttgctgcgttgcccaggccggtgttaaacttctggcctcaagcaatcctcccacctcagcctccaaaggggcaaagattatagtgcaccaccattgcaggccaacattaaagtaaat

SEQ ID NO: 200873 - DNA, 534 bp, Homo sapiens
aagggtggatggtggggctaggcagggttggtaatcccaacactttgggaggccaagacaggaggatctctggaagccaggagttcgagagcagcctaggcaacatagcgagaccatatctctacaaaaaatttaaaatattttgccaggcatggtggcatgtgtctgtagtcccagctacttgggaggctggggtgggaagatcgcttaagcccaagaggtcaaggctacagtgagccgagattgtgccactgcacttcagtgcagccacagactgggtgtggctcacacctgtaatcccagcactttgggaggccaacggtaggaggaaagcttgagcccagaagtttgagaccagcctgggcaacataccaagactccatctctacaaaacattttaaaattagggccagtgggtcatgcctgtaatcctagcactttgggaggctgaggcaggtggatcacaaggtcaggagatcgagaccatcctggctaacacgatgaaaccctgtctctacttaaaatacaaaaaat

SEQ ID NO: 200874 - DNA, 714 bp, Homo sapiens
tgatgattaaggtgggccctaatccaatctgactggtgtcctcgtaagaagagaagatgaggacacagacaaacacagagggaagactgtgtgagggcacagggagaaaatgactctctacaacaaggagagaggcttcagaataaaccaattctgctgacacctctcaaacttctagcctccagaagagtgaggaaatccatttctgttgtataagccacccagtttgtggtgtttattatggcggccctagcaagggaatacagagggagacaggttcagacatgtaaagcgagcctttaaaagacaccacgtgcaccagtggagccccaggcccaggccccacagaccttgcctcctggtccagtccttactttatctcaggatgtgacattgcgtttcttatggaaaagatctcactaacctacttcatttaggaatgcaatttaattggcaactcaacggtgatgtcgcttcttttgccatttttctgcaacaccaaaggaaaaaattttaagccagctttttttagctgcaaagatgacaaatgttatcaacaatatccaaccagagtatattttcatcccttttcatcccgtcacgataagccagaagtatttgttgccagaaatggaaaacagcttgttcatcagccagatgatcgcagtgctcagaagttccactcgtttgccatgtgtgaaaagttaagaattg

SEQ ID NO: 200875 - DNA, 715 bp, Homo sapiens
aaggtgatctatataactgatctttgatgttactattgtaattgtttttggagtgccatgaaccactcccatataagacaacaaacttaatcaacaaatgtatgtgttcacatatttttcagatgggaactgaagcagaaagtacccaggcaacaattgatatctatgaaaaagaagaagcctttgaaatagactacagctctctaaaagaggatttgaaggtaatggaaagctttctgttgtttatcactcacagtaatacggaatatttaaatcttaccgaatcatttttggatgatagaattaagtttgtttttttttaaaagatttcctaatggttttggaagaaatatacaaaggaaaaacactgtaatcatgaaacttctgacacaaattgtgggtctctgccacaccaagcaattctctaattctttgaataccaaatgggggttctacaattaagttcaattctgacactgtctacctggagttagcatcagatcccacaaagtaatggctcagtcccacaagactggccactcttcagataccaatcacaagtccaggcctcccagactcatggccagttggctgtaaatcaggagttttcacaactccttccacagatttgataatatgctagaatggctcatagaactcaggggaatactttatttacattaaccagttcatttttaaaggctacaactcatgg

SEQ ID NO: 200876 - DNA, 394 bp, Homo sapiens
ccgattatgtgatttagaagaagtcttctaacctctctgcttcacttttactaaacagggatagtactacctaacttgggggagttgtgaaaatcaaatgcggtattgtttctgaagtgttttttaaactaacatctattataaagacttctagtcttcattaacaaaaacacagcaaatgtttactaaacatttttaaacactagtgtgctttataatgctcatcacatgttaatacaattatctccattgatagatgactaaaggcatagagaagttaaatgatttgcccaaggttagtgatttgaaccagaagtaagatgttcagactttagctttgttcttttcaccatactgcactccagcctgggcgacagagcgagactccgtctca

SEQ ID NO: 200877 - DNA, 421 bp, Homo sapiens
ccatggggcatgttctgctagtcatttttggcgcatttacatatacacacacatatgtacacttttaaaaactaaggccgggtgcactgactcacgcctgtaatcccagcactttgggaggccgaggcgggcggatcacgaggtcaggagttcgagacaatcctggccaacatggtgaaaccctgtctctactaaaaatataaaaattagctgggcatggtggcacatgtctgtaatcctggctactcaggaggctgaggcaggagaatcacttgaaccagcgagtcggaggttgaagtgagccaagatcctgccactgcactccagcctggcaacagagcaagactttgtctcaaaaaaaaggaaaaaaaaattaattaagattgattaaaattaaataaaaatttaacccacgcgtccg

SEQ ID NO: 200878 - DNA, 733 bp, Homo sapiens
gaggcaggcccaggagcgagcccatggtcttccgccgcggggccaggggcgggccccaggatccggagcttcgtgcggggccgagtccaggtttggggcccgggaggcggggccagttagggcgagggtccctgggatcgtcgggtcaggccttgggctaacgtaggcactctcgcagttcctccgccttcaggaaggtcttttcagcaggggccttacgggtgcatgcttcggtcctggaggccttatcctagcctcctctccatcagcgccacccgtctggggcccgaaaggagggagctttccctctgtcccccagcctttggactgtcagcaaacaagccattcgttcatcaaatactttttaagcgcctaccatgtgcctgacaggggagatgtaacggtgagaaaaactaggtgtggtccaggcccttcaggggctcaggtgctcgtggaagaagtggacattgaagtacttatcacacaaatgaggataaaagtacgatagcgatatctaccacgaagctgttgttccccaccagaaccaaatgagcgcaagatctgacaaagaaaaaaaaaggttcatcttttattcctcctactacattcctttttgctgaaataatgaagataataatcaataaaaactgagggaattcagagacctgtgccagtgcaggtccttagcatgctaagcgcaggtcccctgggcccgctgttgtttctctataaa

SEQ ID NO: 200879 - DNA, 1494 bp, Homo sapiens
gaggcaggcccaggagcgagcccatggtcttccgccgcggggccaggggcgggccccaggatccggagcttcgtgcggggccgagtccaggtttggggcccgggaggcggggccagttagggcgagggtccctgggatcgtcgggtcaggccttgggctaacgtaggcactctcgcagttcctccgccttcaggaaggtcttttcagcaggggccttacgggtgcatgcttcggtcctggaggccttatcctagcctcctctccatcagcgccacccgtctggggcccgaaaggagggagctttccctctgtcccccagcctttggactgtcagcaaacaagccattcgttcatcaaatactttttaagcgcctaccatgtgcctgacaggggagatgtaacggtgagaaaaactaggtgtggtccaggcccttcaggggctcaggtgctcgtggaagaagtggacattgaagtacttatcacacaaatgaggataaaagtacgatagcgatatctaccacgaagctgttgttccccaccagaaccaaatgagcgcaagatctgacaaagaaaaaaaaaggttcatcttttattcctccaaacactttcatttaaatcaagaggatgggatgtggttattgctgtgtatttagacagaatcaacggtttctgggtctgagatgttgcatacaccttctcagtccctgtatcctgagatggagtcacctgagaatccacagcaagtcctaaccagggatgggtctgggtgattaaggaaggttggcttcagaactgggccaggggcactgctttgcttttgctgttttgatcagctctctgcctgaaggagacaagaaaaaccaacgggaacagcccagtaaaggcgccattccccattttacagctggggaaactgagttacagagcttgtctgcactgagtcatcaggagcaaatgctagatcagatagggtctctctctctgccacccaggcccgagtgcagttgacgcagggcaggggagccccgaagtggagcatagtgtgtccggaactggtgggttcttggtctcactgacttcaagaaagaagccgcggaccctcgcgaaactcctggagggcagaggcatgcctgccatcttcatcattgcattaccagcacccaacactatcaggggacctgccctgataactcagtctacaggtgtatccagcagctccagagagacagcgaccagcgagaaggggccatgatgatggaggtggttattgtcaaaacgaaaatggggatatgtagggaacaagaaagagagatcagactgttactgtgtctacctcagacaggggaagacataagagaactccatttcgacaaaacgactgtacttgtaaccaattgctttgctgagatgtcgttaatctgtacctttgccccagcactttgcccaagcaatttgaccaatctggagctcataaaaacctgtgttgtatgaaat

SEQ ID NO: 200880 - DNA, 968 bp, Homo sapiens
cggggcaggtcctgggtagagtccaggttggcggttcctggggcagggccaggatagggcgatcctggaagctgggcttcggaagcgtccagctgttgttccccaccagaaccaaatgagcgcaagatctgacaaagaaaaaaaaaggttcatcttttattcctccaaacactttcatttaaatcaagaggatgggatgtggttattgctgtgtatttagacagaatcaacggtttctgggtctgagatgttgcatacaccttctcagtccctgtatcctgagatggagtcacctgagaatccacagcaagtcctaaccagggatgggtctgggtgattaaggaaggttggcttcagaactgggccaggggcactgctttgcttttgctgttttgatcagctctctgcctgaaggagacaagaaaaaccaacgggaacagatagggtctctctctctgccacccaggcccgagtgcagttgacgcagggcaggggagccccgaagtggagcatagtgtgtccggaactggtgggttcttggtctcactgacttcaagaaagaagccgcggaccctcgcgaaactcctggagggcagaggcatgcctgccatcttcatcattgcattaccagcacccaacactatcaggggacctgccctgataactcagtctacaggtgtatccagcagctccagagagacagcgaccagcgagaaggggccatgatgatggaggtggttattgtcaaaacgaaaatggggatatgtagggaacaagaaagagagatcagactgttactgtgtctacctcagacaggggaagacataagagaactccatttcgacaaaacgactgtacttgtaaccaattgctttgctgagatgtcgttaatctgtacctttgccccagcactttgcccaagcaatttgaccaatctggagctcataaaaacctgtgttgtatgaaat

SEQ ID NO: 200881 - DNA, 198 bp, Homo sapiens
gggatcctgtgacggcgggggaaggcagcatgagtcttaggagcaattaggagacaaaggttctgctttccaccaaaccttcttcggtctgggccctcccttagcaaccctggggctttagactctctctccaccaatccctgatgaccccggtggtgcctcacaatggacattccaagtagtgcccgcatcatccca

SEQ ID NO: 200882 - DNA, 470 bp, Homo sapiens
agataatctgtaagacttggtgactgattaagtaagagggaggaatatggactaatgcctggatgtcccacttaggtgagagtaatgataatcctcaagataaaggaaacacctctgtcctttcttctcccattgaaacaccacagtttcagtcttcattcatcctcttccacatactatgggatcctgggagtgaagggtaatttgtgattgctcctaacccatgggtaacccattccgcaggaagccataatttaggactggtcctatcaaaatttaacattgttttgccatcatgactttgcaaagtaatgcatgcatgaatatgccaaaactgattttcatttttcttttattttctccccagaatatgtttcaaaaatgcttctgagtgtttaatgaagaagtgcaataccatcctcaacatgtagatatctatactactatgcttaatatatgtattgaagctg

SEQ ID NO: 200883 - DNA, 589 bp, Homo sapiens
gggaaacagagcaagtaaagtgttaagttatatgtgaaataacatcctcttcacccttggcgctaccagtgagagagtcaagcacatgaaaactaaatttgacagggccaagtttgctgcttttaaagggcagcgtaagcgcctgatcaaagccactctttgaatttccgacagggagaatgttggttaaaatttctaaagtttactacacaagatagtgctaaaacatttaagagggggttggagtgccttaaagtgctgggtaggtgggtctcagtcccaaactgcaaattcctctgccctccaaatgtaggtgctaacggaattaatagagtgtttaacagaaagtttccctaggtcttaaagctcatccacctaggaggttttatctgcctcctgctgctctgccagtgggtgggaagggcagaaaggaaattactttgattatcctctgttttcatggtgccgtgtggcctcaacctaacttaggctttgatttgctttgtttcttctctagattttgttgttgttgttgttgttgtgtgtcctttttttttttattatcgttcctgtttgaatatgcaatttt

SEQ ID NO: 200884 - DNA, 698 bp, Homo sapiens
ctcctgacaggtggatgatttatgctcatagtcagaagaatcggagggcctgcggaggagacagcatgagcaaggtggtggcgagacagatgctctcagtgggcttgcaggggctggcaggctccaactagttcaggtgcaacctggacactttcagtgctgaactcctattgcctagattccaatactctgatgtgtcatttgcaatattatatgcaatgtacacaatgaataaactgtcaaatccgagcaagcattgtacatatgctgcatatacctcttacatatgtcaaatgatgattatgatacagatgtaaatattctataccttcaggatcctcagttctgaaaatatttagcccaggtatggtgagtggagagtgacaagatttcctaacaattggatcaatattaaagattgcacagtgggattaggagaaacacacctcaccagaaaactgacattcctgtcaattattttaattatttttcagatacatgacatgctttcatgacattttattctgagaaagcatttgaatatttcagaagaaaattattaagagatggataaaaggaagaatccctacagagttgaactgctttgagatcaatcttcaaaatagttttccagaatttctctcaatagctctaaacaataacaatttggtaaagattatggtattggttaaaagggt

SEQ ID NO: 200885 - DNA, 485 bp, Homo sapiens
ccacagtggagaagcatggacgtgaggagaaaggttggaaggattgactctgaaaaggagacattctttctctgaaccttgatggaaagaacctgtgtagaattgttacgtgtgatctgtttccagaaaaataaggaagttagacactctttcttcacttctgttcctatagacttgaaatatgatttctcacatagtagttattaaagtaaaaatttaatatactaaaaatgatgggtattttgcttcactcttgaaatgggcatgtcctgtacattagtcctatacattagttatgaatagattatttttctcttagcatgatgtaatttcataccaaacatgcagagaagaaatgggctcctgccattttttttttttgccatccaagaaggtatttcttatgcacctttttgtacataaagtagaaatcaacacccaacgtttcttatatatatcaagcttaagcttctggtgaaaatact

SEQ ID NO: 200886 - DNA, 328 bp, Homo sapiens
aagatgactgaagcccgacacggacctgagcgtccagaaatggtgctcaccatgcttccagctcacaggtctagaaaaccagcttgcgaataacagtccccgtggccatccctgtgagggtgacgttagcattacccccaaactcattatagttgcctaagcattgcctggccttcctgtctagtctctcctgatatgccattcttgctgcagcaagaatggcatatcagtgcaaaatgagcacatgggaccccttgttgaaaaagtaagaagaaaatgcccatgaaaagcactgaaatccagagccttccacttcttcccagtctct

SEQ ID NO: 200887 - DNA, 547 bp, Homo sapiens
aattattgataacattattgtaatatttaaaaataaatgaaaaattaataggcacacatttaaacacatggaaaatggacatttggaactctagagttttctgccataaaacatggctacaataatttaagtctagaaaaatgtggaagggggaataactatccaataaagggggaataattatccaataaaatcctcccaaacacccataaatattacttcctgcaaaatcattcaagaagtatttgctacacaatgtaacagaaaacaagtgatttgattctacttaatatatctttgacaataaattgattaagtcttgggtgaaatttatggaaaataatttttttttaggagaattgctgttcagccattcttactgataatagtcaacagggccatctatctgataagctcatttctagttcacagcattgacccatccacagagtggagaattgtgccctttcattctctagagtggttaatgatgtcaggagttgtatttttgactcaataaagtgaaaatatttacttttaaaataaa

SEQ ID NO: 200888 - DNA, 403 bp, Homo sapiens
tgaggtatacaccggtgtaacggatcaggttttcgaccctgatgaagatttttatgattgttaactgggaatcttttttattactttacccctcttactctctagattctgaaggatcttttgtcttctaatcaaaaaaactgacagattgagagggagggctgccttcttttttttccttgtaagtaattaggaaagaggtttaaaaaaaaacagaaaaatagaaaaaaaaagaaactattttctttctcagaaatttattttttattattttggtttttttttgagacagggtttcaccatgttggccaggatggtctcgaactcctgacttcaggtgatccacccacctcagcctcccaaagtgctgggattccaggtgtgagccaccgcgcctggctga

SEQ ID NO: 200889 - DNA, 299 bp, Homo sapiens
caggctaatcctaaaattcacatgaaaatttaaaggtagccaaaacaatcttgaaaaaggagaacaaagttaaaggagtttcactttttcatttcaagacttatttcaaagctacagtcatcaagacagtgctgtagtggcataagaatagacaaatacattaatataatctaattaagagtccagatgtaaacccttacaatttgcagccaatttatttcaaacaaggatcccaacacaattcaatggggagaataacagacatttcagcaaaaggtatctacatgcaaaagaatgaa

SEQ ID NO: 200890 - DNA, 386 bp, Homo sapiens
gagctttgcaaagagcattcctcaggaagattcctcagaggtcctctacaattctccaaaaccagcataatgtagttagtaagaatatggattcctgaagtcatatcccagctctctcactcacttctctgtaaaatgaggacaatgatgatgataatgatgatgattagtactcctagaggtatgatgaggataaaataaaataatacatgaaaacaattttgaattgcgctcagcacctgtaaaagcattcaatcaaaggaagtgattatgctacatgttacttttttatttgtataaaagtaccacaaatgtattttatccagatgataaacatttagttgatttccaatttttcactttaataaacaatgtcaagctaaaca

SEQ ID NO: 200891 - DNA, 691 bp, Homo sapiens
tgtaacttcctttgtctgtttgtttgtctgagacggagtctcgctccgtcgccagacgggagtgcagtggtgcgatctccgcccactgcaacatccgcctcccgagatcaagcgattctcctgcctcagccttccgagtagctgggaccacaggcgcgcgccaccacacccagctaatttttgtatttctagtggatttgggtttcaccgtgttggccaggatggtcttgatctcctgacctcgtgatccacctgccttggcctcccaaagtgctgggattacaggcgtgagccactgcacctggccaactctttttcaaaaaaagaatctcctgctataacacctatcatcagttggattggaactgtgcaaaatgtggatgtaaacaatttaggattaactagacataatgtgacaattttggatattttatattttagattccactttttattttggtctactgatttccagtagaaaaaattttaggatttctgtaacacgtaaataattgcaacttcaataacatatgattacttgaaatagcgactctatttttcatttcattgaagtagtaactgcattttgtttcatacctatactcctccctgcttcaatataggtattttgaagtcctaatccctaatgtgataatcgaagatggagaccttggaaggtaattaggttaga

SEQ ID NO: 200892 - DNA, 199 bp, Homo sapiens
gatcttaacccttgacatcatagtatagtggttaagagtagaggaaataaacaactaggtaaatctagaatacaggttattctacaaagaactaccctgaacttgtctccccctaaaaagaaacaagagctagggcactgttctagactaaaagacactagcaagatgtgatgaccaagtgtaatacatgaacctaaat

SEQ ID NO: 200893 - DNA, 436 bp, Homo sapiens
gtttgggagtgttaagtgcattcacaatattgtgtaaccaatctccagaacacttttcatcttgcaaaactgaagctatatacccattaaacaactacttgttcctcccaaccccgattccctggcaaccaccattttaccacccatctctatgaatttggctgcttgaatcatatagtatgtgtctttttgtgactgtcttatttcacctagcataatgtcttcaaggttcatccttgtagtggcgtcagaattttcttctttaaaaatgtctttaaaaattagccaggtgtggtggtgggcgcctgtaatcctggctacttgtggggctgaggcaggagaatcgcttgaacccaggaagcagagattgcaatgagctgagaccgcaccattgcatgccacctttggcaacaagaacaaaactccgtctcaaaaa

SEQ ID NO: 200894 - DNA, 171 bp, Homo sapiens
cgataactttgaagttaaaaattaaaagataggctgggtgccgttgcttaggcctgtaattccagcactctgggacgctgaagtgggaggatggcttgatcccagagatgcgagaccagcctgggcaacatagcaagtcccccgcccccaccataacaacaaaagtaccaa

SEQ ID NO: 200895 - DNA, 240 bp, Homo sapiens
aggtttgatctcatctacaattaatgtggttccctcttagttactttgtaggtatgtgtggtgatggagccaatgactgtgggggaaggacgtgcagctctcgttacctccttttgcatgtttaagtacatggctctgtacagcatgattcagtatgttggtgttctgctgctctactgggagacaaacagcctttcaaattaccagtttctgttccaggatctggccattacaactctt

SEQ ID NO: 200896 - DNA, 446 bp, Homo sapiens
cgacgttaatcgataaagcttgattaccattctggaaccagcaccatctgaacaatttagctttgctggacaaaaatagacttgagagggagaattgtacattgaaacaagaagaacttacactcttacaatttttcaacactctcttccttttaaggaatacttctcattaaagggaccatacattaaattatatccaaacttgagtagttttaatttcttttctgtctgaaatccctgttagaacaatctctaaaactactccatagacacagaacttgagtagatttattgagcgccatctgctggctttgttttaatggaccaaataggtggtgcctggacatctttaagaattatcctgtatcttagtgttgcaaaattatgaagctggaagacagtatgaatttgggctatgactggtagtagtatttaaaataatagtt

SEQ ID NO: 200897 - DNA, 410 bp, Homo sapiens
ggctttcttcccttttcccatggagtgccacggaaaggtcatactctgccgttttgtctcttaatgcatttgcctgggaagttgcatctccctggcatctgcattcaattaacactttagtgcaataggtgtggaccatcaggaaatggcgtctccctgaccctaggtgccaatgtatgacttttagagaggcaatgtgataactgctgagccatcacccaacattcctggtgggtgggagaagagccctttcctgccctgctcatgctgtctaatggcctgtgacagcatgactttagtaggctttgggaaatcaagagttttgaagattattggtaaaataaagacatttggttgaaattaggtcagacattaggtttgctaaatgctttaaggtaataaactgcttc

SEQ ID NO: 200898 - DNA, 469 bp, Homo sapiens
agtgcttttttcatttccctattttacctgctttgcacatgcctcccgccctcacccgggaggcggcgaagacgcccactgggaccgcgcctggccgttttctgggcgcgtcctgcccccacggcctctgtctcttagggcgactgggcgcggaagaaaagctggagagcccctgcggggtggcaggaggagggtgcctgagtcccgcgagaggcccgggcgaggaagatgcgcagcctgctgatccgcgtcccgcccggcgccagggaccctcagagggaggagagctcaaagacctcgccccgcgccttcgcgaggaccaacccagtccccgcgcctgccccagagcggcttagaaactcagggcacagtgagagcgcagggcgcctcccgaggcttcacaccgccggccgggccagcggaggctgtgaccggagcgccccctctgtgccgcgcacgccgcggccgc

SEQ ID NO: 200899 - DNA, 475 bp, Homo sapiens
agggctggagggagagtggaatgtagtgtcccctccgagcgtgagggggacctagtagggtgtccagggtttgggttttagcctcaggagcacttggcaaggggctacgtgggggcggttatgttcaccctgagagacaggtggcccttataaaagggggtcatctatactatctagtcctgtctttggactttctttgcggagatgattaggttttggcgtagggccgtgaaggcctgtacatatggtatttctgaccatttgccctgccaggaaacagctgctgcaagactgaaaagaaaaggactcaggtccctcacccaaaccgggtggtggtgatcaggcgcttccacacggaaccctttcagtttccctggagagtggccccaaccacaaacctgcggttgcctccatgcctaggcactgtccaccgagagtcccgagttggaaaggaaaagagagagaaagaggacaa

SEQ ID NO: 200900 - DNA, 189 bp, Homo sapiens
aattctaaatccagctttgctattagatactggtagatcagaatgttaggtcacccacacagttttctttgaacaaaattcaattcaccataattaacaccaacacccagctcagtcataatgttgagctgtgtttagggatttctgaaagcaaaagggaaccaagtaccctaggctctaaatggcaca

SEQ ID NO: 200901 - DNA, 615 bp, Homo sapiens
gtttcgtatctttgcaattgcaaattgtgctgctataaatgtgtatgcaagtgtctttttcatataatgacttattttgcggggggggggggaggtggttacccagtgtgggattgctggatcaaatgatagttctacttttagttctttaaggaatctccatactgttttccatagtggttgtactaacttatattcccaccagcagtgtaaaagtgttcacttttcaccacatccatgccatggctgctttttattgagcacatattatatacgagccattgtgctcaacactttacatctgttatttactcttagggttattctaaggattaagtatttctgtccttttacagatgaggaaactgagacttacaggggttaagtcactcactcaaggccacacagccagtaaggtggcagagccctagagcagcctctcaagcttcaatgtgcgtttgaatcacctggggctcttgttaaactgctgctacagattcagcaggtgggagagtggaactgaggtactctgtttctgacgtgccccctgggtggccctactcctggtccctggagcactttgagcagcgagagtttctctgcctgtatggccca

SEQ ID NO: 200902 - DNA, 501 bp, Homo sapiens
tccagcctgggtggcagagcaagaccctgtctctaaaaaaaaaaaaaaagtgtattgaggatacatctgaaattgataaaatcatttctgtatcggaaagaaagccactgcaagaaggtctagaaaacgcactaaattgtagttgtggtcttaggcgacgcgcacttcagtcttcctgcccctcccctccctgaaggggcgaagggctgagcgtcatcatggacactttgctcatggatggccgattggggtggcccatgggctcctctggctggccctgtcctggagctgccttgtggagcgtgcaattcagtgtctagtggaaaggacgggatgatctgggtggggcacagaccaagggcgtggaactttgtcagcagcaagagatgcaggccctgctggccatcttgtctttgtcctgtctggccagagactgggatgccccagagactcaggtcaagccaggggtcatttgttttcagcttagtgacctttgacatg

SEQ ID NO: 200903 - DNA, 178 bp, Homo sapiens
gtgagccaccgcaaccggcccaacgctgtttttactgttgtttccttttttaacctaaggtatcttagaagtcaccctacattagtgcatattaaacattgttcgtcttaatggctgcacagtattccactgtatggattattttttaatttggttgccggtactgttatcagccagg

SEQ ID NO: 200904 - DNA, 781 bp, Homo sapiens
gtactactctttaccaatgaataatcaggttaaatttacactaaattattcagtaaaagttaagaacagctgaatggataaaaaacaagattcagctatatgcggcccacaagaaagtggctatacctgtgaagatatgcatagattaaaaataaaggaatagaaatggttattccatggaaatcagaatcaaataacactaggagtagtgcacttatatcaggtaaaatagatttcaagacaaaaactacacaaagagacaaagaagatcattacatgatgataaagtggtcaaatcaggaagagaatataaccgttgtatggaaccccgatatataaagaaaatactattaaaaaagagagagacaatggtagcaggtgacctaaacacctcattttaatcattgcacagatcaaccagacagaaactcaacaaagaaaggttcaacttaatcgtcactctagatcaggtgaacctaatatacatttatagaacatttcatgcaacagctgcagaatacacatacttctcatcagcacatggaatattctccaggatagaccaaatattactccacaaagcaagtctcaaaaaattcaaaaaaattctgagcaagcagcctgactagatgcagctgagaagtcctgctcccacggaaagaaaatatgatttcaactacaccaacataaattgaacagatctttggacagaaaatgccaaatgtggacggagaagagaagcagatgctgaggctgtaaagggaggaaactgggaacacgg

SEQ ID NO: 200905 - DNA, 598 bp, Homo sapiens
gagccctgaggctctttggggttgataatattctctaaagctggggaggggagagctgataaaaagtgcttgttcacacttagcagcatgaaaggtgactgagaattagcctaagcctctgtgcctagcctctttataatgtactgaaagtttcatagctctatgcagggcagagactgggcagggtacaattctttacaagactaaatcttcagggctctaaggaaagggaaaagaatgaatgagaggcacactagcagggttgggataaatgggtgcaggaggagaaaagctgcttcttcctcttctctggagagatcaaggatgagtggatggagggctgtgtgagcacatacacttcagaacctgatgatgggtagtggctgaggccactcatacaaacatgaaaaccactgctgagttgatgcacattcatttctgatagctcagcaatcttactataaatagggaacagcagatgccattcattgttctggaattggaggcacgggctcattgtcttgcttgggatatttggaccggcatcatttattaatctaaatattcagtaaaagtggaaagtcaaggattctcaggt

SEQ ID NO: 200906 - DNA, 122 bp, Homo sapiens
tgtaagacaataaaaaatggtggctccacatgaaccttattccataagctatttctatatggttagttaatttctattctttttcttaaaaataaaccaaaaaggagtttttttaaagtcac

SEQ ID NO: 200907 - DNA, 669 bp, Homo sapiens
ccggcagtcacagaatgggtcatttcaaggcaggccctggtgctttgggataggtgtgtgctgacctctctagtaactgagatatctttgagcaccctaacatggagatgtaagggttaactctgaatcagggtgactggcaaggaccactatcagaatcagccaggtatttattgagcatctaggcacaatgctacttggtgacctgcttcttaggaactacaacgtgagcctttattttgcctcgtctgcaactccatccttagcctttgcgttgtcagcctgccttcctttgccacacttgagtcttcctaaccttaccccttaatagcaatcacttcatcatcatgcgctttcccactatcccttctccctgtctcttcccacccatgaaaacaaatttagaaaatgaagggaaataaacaaacaaacaaaaagtcaccattatgatgggattgaggcataatatctgagtaagaagggaataaattagttttccttgacagtatatactgcctgtttctgtccatcctcttatttgcttctttttctttgctcttccactccagtccttaagcgagtttagttttattcgttcctcttgtcccttttcatgataacaatgtgtcatagtctgctttaaagtttttcatacttaccgatgttagt

SEQ ID NO: 200908 - DNA, 438 bp, Homo sapiens
taataataagaaagggccatgagcccttgaagttcaagagagaaattcattcaggctccaaatcaagacaggatttacctcatgtgttatatctcatacttgatttaagaaatcaaatttaataaaaggcatttataaaatgtaagaataacccaaattgcacaaggttctgaaaatatcattacaggaaagaatgaggacttcagaggtagaagaaaggttgtgataagatcaatctgaagggcaggcttgccaataaaagaggaattaatctgattcaggcagctctacaaggcggaggaataagaagagacagaagtaaaagaaacaggcttcagctcaatataaagaattaacatgtctctaaaagaatcatgtagtgagctgaccgctgcactctagcgagggagacaaagtgaaatttttgtctcagaaaaa

SEQ ID NO: 200909 - DNA, 364 bp, Homo sapiens
tgtcagtaccttttttgtcattaagataaccatcatttcctagttaaagcctaaactgccccatatgaattagctaatttctgatactatgctggcccaagagtagcacttttataagctaaaaacgaaagctcagagcatacaacttagagactattcacacaattactcatgtaatcaaacccagaagaagggcaacaccaaccaagtcttttactggtctgttgctgctctacagctaccaggatggtacctaaaattatcttttgaggttcagtgaggcctcataattcccttaaacagtcaagtcatagaatactttgaaatcccagaagtcaagttaatagtattactcggctagcta

SEQ ID NO: 200910 - DNA, 944 bp, Homo sapiens
ttgggttgcttctaccttttggctattgtgaatgtggttgctatgagcaacactagtgtatgaacatctgtttgggtcccagctttcactttttttgggtataggctcagaagcagaattgctggatcagatgataattctatgtttaattttttgaagaatggccataatgttttccatagcggttgcacaatttgcattttcatgagcagtgcataagggttgcagtttctccacatcctcaccaacacttgttattttctgttgttgtttatagtcacgttaatggacgtgaagtggtatcttattgtggttttgacttccatttccccaatgattagtgatgtggagcatctttttgtgtccttattggccattggtataccttctctggagaggtgtctattcaagtcctttgcccattttttaatggaggtgtttgtttgttgagttgaaagcacgttttaattgccactgtgctggcctgacagccaagccccaccctcgtactgccgcatgctcagttcccaggcagcagtgtctcacatcctccacccaaccccatctcagcactggtcacacccagcacaggaataagggcctgatgggcaactgcctcccattttcctgggaccaaggagactatacttggcccaggtgtctatttgagctatcaaaaaatgtttccggagaccaggcattcgggaaggtataccaggaataaaaacagcagacagttacagctgtcaaattgtgacttcacagtcagtgagtgaccaccccacccctgctgcctcccccagaggtcctccttaacaaaaacgcattattgtggtatctgcagaatcaagctttaaattttaaaacctgagcagggccgtagctctgaaaagccctgctcactcagtgatgtgagggagagcctgtggggaggggcaagggcc

SEQ ID NO: 200911 - DNA, 535 bp, Homo sapiens
caacattctatgtgagggtctccaaagaagctctccaaaagctccccatgagaaaaagtgcggctttgtgtatttgtcacatccagagagacccatcaccagatgagatccataaccaccatgtgatgctgtatcctttctctcatctctcctccccctgaacccaaccttggagaagtgagaaattaagactggtgagtgcagaggaggagcaaggaacatgccagggaggattgacgagtgcagaggaggagcaaggaacaggccagggaggaccagcgagtgcagaggaggagcgaggaacaggccagggaggaccagcgagtgcagaggaggagcgaggaacaggccagggaggactggcgagtgcagaggaggagcgaggaacatgccaaggaggactggagagtgcagaggaggagcaaggaacatagcaggaagggggccaagagaagggcctcctgtcttcccttccccagtgcaggtttccagacccacagccgctcaagctcacagagaggaaaagtttctctct

SEQ ID NO: 200912 - DNA, 402 bp, Homo sapiens
cttatacctcagttttcctacctgtaaactaagatgatagtgagcttaaatgagataaagcatgcaatatgcctagtacataagcattaaaaatgtttagctattatgggggagagactagaggaagtaggtggttacagcttgagtcacattgcttctttaaagagtttttgtttaattttctaaaatttcttaaacattgttgcaaatttgttgaggtgaatctcatagcctctggctccattttccaacctcaagtattcaaaataagcttgtgatctttgaagtacagaagtgcagtcccaattaccacaggttaacactcacctgcagctcatatctatttctttgaaaaaggaaattaaaaagttgaactctgagttttaatgttggttcactcca

SEQ ID NO: 200913 - DNA, 279 bp, Homo sapiens
gcagcatcatcccagctccctgccaaatcaggcgcagcctgtgcaaccccaccttcaactcctaggtgctcactggagaactgagacaaacgttcatggcagcatgaccccaacagccaaaaagtggaaacggcccgagtgtccgcacggctgcttgtggctgggctcacgtggccggtcacacagggcgtgagctggtcctgggcacgcacgatgggccacgcagcaggaggaacatgacaacgtggcccctgagacagcccggggagcgcagccctg

SEQ ID NO: 200914 - DNA, 292 bp, Homo sapiens
tgtcttccgaggtccccaaagctttccctgggttggactgctacgggtgagtctatgcatagccagtgaagattctcagcaccagaagctcttttcattctcacaggagtttctttcctcactttccttcttccacccgactgttcccaagcatagccttcatgtctgcttgctcaacaagtgttagtaattggtagtctacaatcccaacaaattcttgagtaattattagaatttaagtgtaactaactcaatgaataggaaggttggtttctcagcatagcatccgtta

SEQ ID NO: 200915 - DNA, 681 bp, Homo sapiens
tttattccatgattacaagctctttaacttattttcccagcatcccactatatcctcaacagttattctgcaatcatagtcccaagttttaaagtaatgagtgaaatgttcattcctaattatttccgccttaaaatcctctcagctatgtgtgcctatatgaactacaaaatactaggcattaggtaatataatggtatgtagaaggaagatgacagagaacaagccctatctactctttatggtgttgcctccattctccccaatctatcagtccctcttagcctctctgactctcaattcccttatatactctgtccttccaccaccaggaaaactaaacaaataataactaaaatgaaaatttcaccagaggggctcaacagcagaagaaagaatcagaaaacttaaagacagacaattaagagtatccagtctgaccaacaaaaagaatgatgaaaaatgaacagagccttggagagagatccatgggacaccatgaagcctataaacatatgtataatgagagctgcaataagagaagagagaaaggaaaggaaagaaagattatgtgaagaaatgatgactgtggtggggtgcagcggttcatacatgtaatcctagcactttgagaggatgaggcaggaggatcacttgagcttaggagtttgagatcagcct

SEQ ID NO: 200916 - DNA, 1173 bp, Homo sapiens
tccagctcattgctcatcaccccatggattgtttgctcatagcaaatctgcgccaaataaattccatgtcctccaaggtttgatacttaatagtaatataactaatcctgtttaagggtttattgtatgccaggcagagtgctaaattctttacattattatctcactgagtccccctaacaaccttgtgagagacatatgcttattaactctatttacagataagaaaattcaggtccagaaggtttacattcggatgccacacagccagtaagcaggagaactgaatgcaaacccaggctatcttattgccagcttggctgttctgaaggaactaattagaactggcttgagatcatacttgaggaagaggtgaagtattacaagtgtattaggacaaacctgggttcctgagacttctgcttccttaaccattggacttttctcttttttttgagacggagtctcgctctgtcacccaggctggagtgcagtggcgcaatctcggctcactgcaagctctgcttcccgtgttcacaccattctcctgccttagcctctcgagtagctgggactacaggcgcccgccaccacacctggctaatttttttgtatttttagtagagatagggtttcaccatattggccaggctggtctcgaactcctgacctcaagtgatccacctgccttggcctcccaaactgctgggactacaggcgtgagccaccatgcccagaaatttttgcatttttagtagagagggggtttcaccatgttggcctggccacttttctactctttaattctcctgggtcaacaggtacttagttacccagggatggtaagggaactatagccagagagatcttcctgagatgcaaatctgctaagtctggtcccgactaataatttttcagtggtttcttgtggtctatcagatgaaggtcagactcctttgcatgacatacaaggccctttgtaatctggacccacctgccttctatgactttctgtcccatgcttgccttcttatgccctgagaagctcatggcagccccagaataatctgccatcctgattcctgcctccacatcttggtcacatcttggtccatactgtttcttatgcctcgaatgccttccttcccccagctatccatctgatgagtttgt

SEQ ID NO: 200917 - DNA, 1015 bp, Homo sapiens
gctaagccagtattaagaaaagcttgaaagctaccatatacaacagaaccctgaaaggtaagggaattaatagtgccaggtacctccagaaatgagagtgaaagtagggctaaaaacaggaagattggttgacaatcttaagatagagttagactctggtccctcccccactccatgctgcactccaggagatgtctggaggtttattctgcagaagggtaaaagaaatggtctctgaactgaaggacaccaggcacagttaaacatgggaataacttactgaaaagggcatttaagtaattgtttacacattgaatgttaagaatctatccatatcacttcattcaactcctggaacataaacattaaggcttattaccccatagacaagacgttgaaaaatccttatttgatcaatctgactagcctaagaggaaaaacagaagtattgacattggaggtgggaaatgctcacccacatcactctgcagtgaagcaaactccacccacttaaaagctcagtgtttccaatcagtgctttagttccttgctcttaaatatgagcatagatctaggatcacaggatacctcagggaaacctcttaatgtgaaaaatagaggtcaaaataaacagaaaaaaagagaaacttacaggaaacagactatataggaagataatttaaataaaatcatgactgtctttagagataagagtttatatttgccaggagtggtagcccatgcctgtaaatcccaacacattaggaggagaagtcaggaggattgcttgagctcaggagttctagaccatcctgggtaacaaggcaagacccagactctaccaaaaaaaaaaattagctgggcatggtggcatgtgcctgtggttccagctgctcaggaggctgaggcaggaggatcgcttgagcccaggaggtagaggctgcagggagctgtgttcgtgccactgcacttcagcctgggtgacagagcaagaccctgtctcaaaagaaaaaaa

SEQ ID NO: 200918 - DNA, 361 bp, Homo sapiens
tcagctctgcagagccttggagctgtctactcaagctggaatctctttgaaggggattttctagaggtagaatagtatttctgacagcctcacaaatatactcatcttttaatattttgccacctttaaaagttgttattcagaataatagatgattccatagcagcctgtagctcagaatattattatgtgttaatttggaaaaaaaatgtgactagtattcagcacttctttgaaccagggtatattacttattagctgtattgcttgatttttcacagactgttacatctccatttaaatcataaatctgaattatgctgtattactgtaaagcctaccagtgttccctagaatagca

SEQ ID NO: 200919 - DNA, 323 bp, Homo sapiens
ctttgacccacttcttcctcccagcatgtgagaaattatgataacacagactgcaagcacagaaagagatcaaaattcaaaatttggagtacagtttctaccgaatgagtattgctttcacaccattgtaaagtcaaaatatcataagttgaacccttgtaagttaggggtcatttttatgctattttaattatgattgcaatgaccaatcaggtctgtggagctgttttttcccaccacaaaatggcttaagagtgctgtattttgctatcttttcttattgatattagaataactttttgactgttgacacttaaatttaa

SEQ ID NO: 200920 - DNA, 787 bp, Homo sapiens
caaactttgttgttcttttctgtccctcatgtgatcccacagccaccaagatagaagagtgttctcgctgctgagctactttaatcccgtggtcagagtggcaagagcttaataaatacttttgtgcaataggatattttgattgtttgttttagggttatgtttgtttctctagttcttttgtacaacaaaatctttgactaagtctgaattgtgtttggtattggcccggcaatcaatgtgacgaattttgtcatgggtgacactcttatctattttagtccctgcagctaccactcagacctctttttccctagacacgagtgctggagagcagccatcctcaactcctctgttcccttctccctctctggggcagtggaataaaccccatttgtcagggctgtattggttgttctgattgcttattacgaggcctggtgttgtgcaaggctctctcatgactattattttatctggtcctcaaaacagcccgtttttacagccagcatgctttggaaagaggcgggaggggaagcaacaacccattttatggttaagaaaacacagaatcagagaaataaggtaacttcctcccaagtacacagctaggaagtaatagaacaaggacttaaatctacagttttttatttgtttgttttctttctaatatatcactccaaaggacatttggattaggaaatcagtttattccaggtgttatattcgttctgaacaagtcctctgtcaggaaatgaactgagcccatcttcctaaacatgtcctt

SEQ ID NO: 200921 - DNA, 220 bp, Homo sapiens
atttcaccatgttggccaggctggtgtggtctcgaactcctcacttcaagtgatccacctgccttggcctcacgaagtgttgggattacaggcgtgagccaccgcacctggccaggacaggcaaatttaatggtagacttaagccaagctgtgtggattcgagtctcagtgctgcaccttcctagctgtgcgactaggcaaatcccttagcctctctgtg

SEQ ID NO: 200922 - DNA, 473 bp, Homo sapiens
ttaagtcatcaaggatacactggtgactaagacaataaatgtgtagtcaaattcaagggtcctgcatcctagatgacattaagttcatttttcctactacctttttcatggattgagaacaggtaatatcttagatggtgggaaaatcatcattcgggaaacatttatatccttcacttttaattggtacagggtaaaaatttaaacatttttaaaatccctttgtctttaaaaataattggaaggctgttgctggactgacagaaacttgaggacagggacgttgctttatctttatagtcccagcattgagcccaatgcaatgcccattctaaatgttcaaaaatgaatgcaggccgggcatggtggctcgtgcctgtaatctgagcactttgggaggccgaggtgggtggatcacttgaggtcaggagttcgagaccagcctggccaacatggtgaaaccccgtctatat

SEQ ID NO: 200923 - DNA, 468 bp, Homo sapiens
tgtcagaggcgcgtgcgaggggctcggaggctgcggacccgggctgccccggtgcccctgacatccgcacgagcgggcgcctcccgggcaattcggcgctcggggagggctgattttcaacccctgagcgaaagcaaattcttttttaggaggtgtcttccctccgactccccatcctgcgcctcttctcttctccaccccctccagccatcagtcccccgacctctgggggtccccacctcttcgctccctcctccgccaggatttcttaggaggagaggagggggtatcggcgagaagctggggaagccgggcggcggggatgggggtggggacgagggctcagcgagctgtttactagaaagtcccggggtgatgtgttcgagccgccccggcctaggcctgggtgcattgtgttggcccgatccccgggctcccgcggcggcccgaggccaggtgcagtgacga

SEQ ID NO: 200924 - DNA, 477 bp, Homo sapiens
aaattttttaaaaataaaatcaagactcagtttagggcttttttctacaaatactggagtatatttttatacaaaacatgctttaaaatgatcacttctaaattaattgtcattttttatactaatttcttcacaaagcaagacctaattgtattgtgtacagcctttctaaatctcacacagagaagacttccaaacttgatgggggttgaagtcattctacactaaaatagactcaagtttcttcattgacttacatcaaaccattaaaaaaagaaatccaattctattctaggaagagttttcctagtgaagctatgttatactggcacctctcttcaaaagattcatgccatgagaatatgctgcaagactccttcatcaagatcagccaagattttgtgactctggacagaagtcatgagttctttctctggcacgtaaggcagaaggcagaagcaacagagaaggaatgct

SEQ ID NO: 200925 - DNA, 348 bp, Homo sapiens
acaagctctttctgcctgccgccatgcacgtaagatgtgacttgcccctccttgccttccgctatgattgtgaggcttccccagccatgtggaactgtaagtccagttaaacccctttattttgtaaattggccagtctcaggtatatctttatcagcagcgtggcaacagactaatacaggcatcaagctatgtgcagagttattaataacttagcatttttgtttttaattaagttattaataacttagcatttagtttcacaagaattagatgatgcttgtctctcaacctcaaacgggctgtttcatagaagtgttgtgatttggagtctgcaggatctttaat

SEQ ID NO: 200926 - DNA, 1882 bp, Homo sapiens
agcggggtgcggaggggcggacggcgttggtttgaagaccttcagcgttgccctggcggagcagagacaggccctcggggtggaggtctttggtttcataagagcctgagagagatttttctaagatatgtgtaacacaccaacgtactgtgacctaggaaaggctgctaaggatgtcttcaacaaaggatatggctttggcatggtcaagatagacctgaaaaccaagtcttgtagtggagtgatggaattttctacttctggtcatgcttacactgatacagggaaagcatcaggcaacctagaaaccaaatataaggtctgtaactatggacttaccttcacccagaaatggaacacagacaatactctagggacagaaatctcttgggagaataagttggctgaagggttgaaactgactcttgataccatatttgtaccgaacacaggaaagaagagtgggaaattgaaggcctcctataaacgggattgttttagtgttggcagtaatgttgatatagatttttctggaccaaccatctatggctgggctgtgttggccttcgaagggtggcttgctggctatcagatgagttttgacacagccaaatccaaactgtcacagaataatttcgccctgggttacaaggctgcggacttccagctgcacacacatgtgaacgatggcactgaatttggaggttctatctaccagaaggtgaatgagaagattgaaacatccattaaaccttgcttggacagctgggagtaacaacacccgttttggcattgctgctaagtacatgctggattgtagaacttctctctctggctaaagtaaataatgccagcctgattgggactgggttatactcagacccttcgaccaggagtcaaattgactttatcagctttaatcgatgggaagaacttcagtgcaggaggtcacaaggttggcttgggatttgaactggaagcttaatgtggtttgaggaaagcatcagatttgtccctggaagtgaagagaaatgaacccactatgttttggccttaaaattcttctgtgaaatttcaaaagtgtgaactttttattcttccaaagaattgtaatcctccccacactgaagtctaggggttgcgaatccctcctgagggagatgcttgaaggcatgcctggaagttgtcatgtttgtgccacgtttcagttcagttctgaagtgttattaaatgtgttcctcagcgacagtgtagcgtcatgttagaggagacgatctgacccaccagtttgtacatcacgtcctgcatgtcccacaccattttttcatgaccttgtaatatactggtctctgtgctatagtggaatctttggttttgcatcatagtaaaataaaataaacccatcacatttggaacataaaaaaaaaaaaaaaaaaaactcgaactagtctctctctctcaatggcgtcagttggtgagtgtccggccccagtaccagtgaaggacaagaaacttctggaggtcaaactgggggagctgccaagctggatcttgatgcgggacttcagtcctagtggcattttcggagcgtttcaaagaggttactaccggtactacaacaagtacatcaatgtgaagaaggggagcatctcggggattaccatggtgctggcatgctacgtgctctttagctactccttttcctacaagcatctcaagcacgagcggctccgcaaataccactgaagaggacacactctgcacccccccaccccacgaccttggcccgagcccctccgtgaggaacacaatctcaatcgttgctgaatcctttcatatcctaataggaattaacctccaaataaaacatgactggtacgtg

SEQ ID NO: 200927 - DNA, 436 bp, Homo sapiens
cagtgagctgagatcacgccactgcactccagcctggggaacagagtgaaactctatctcaaaaaataaaaaaataaaaaaaccaagtttttattttaaaatagttttagatttatagaaaagttgcagagttagcgtatactccacacccagtttccctgttactgtaagaatagtaattatgctattgagacagttcttgctctgtcgcccacgctggagtgcagtggtgcaaccgtggctcactgcagctttgacctcttgggcttaaccagtcctcctgcctcggcttcccaaaacactggggttacaggcatcatctaccgcacccggactccctatggttaacatctacatagtatggaacatttattataattaatgaaacaatattgatacagtgttatcaaataaagctttgttctgatttctagtt

SEQ ID NO: 200928 - DNA, 1177 bp, Homo sapiens
tggtgaggctcaaaccatcattaagagagaatttattggtttattgatttatttaaactatatatatatggttgaggctgcagtgagccatgactgtgccactacactccatcttgagtgactgaacaagaccctggcatcaaggcattggacttttccactccagcagaatgggctttgcaggaaaaggaagaaggtatctggaagcaataggagacaaaagtaaagaaaaggcagatgtgatgggtgctgctttgggtttaacttgagacaccaaagataggtaggtctgaagccgagagaatttatttatttatttatttttcttttgagacagagtcttgctctgacgtccaggctagagtgcagtgacgctatctcggctcactataacctccaccttgcaggttcaagcgattctcctgcctcagcctcctgagtagctgggaccacaagcgcctgccaccatgcccggctagttttttgtatttttaaagtagagacagggtttcaccatgttggccaggctggtctcgaactcctgacctcaggtgatctgcctgccttggcctcccaaagtgctgggattacagacgtgagccaccgtccccggccaagaatgtattttaaaaaggtcgtcttacactgcaaggatgttcattaaacatcacaattaagcatgtcaagagagttttgctcctcttcctttttaaggtacacttctcaggttagcttggccctgacccactgcagtctctttgagctcttggccattattgtctgcatgcaccttttttgacaattatagtctactgccttgtgacgtttggtgttgtcttgtgtaacatttcttgtgtttttgacatattttctcaatggtactggcaactagaaagaactgaaatacaggcatcatccatttaacttccacaagccatccctaaaagcagacattctgcatgcaaactttcagagccttttactcctttatctcccctgatctcagccaaaggccaaaaggcaatactctgttatttcacatagaaaaatgatatgatagctactaaccacaaattcccaaccaatttcccaaaaaagttatttatttatttatttgaaggctagtcaagtgaagcagtgggcgtggaaaaggaacaaagaaatctaactgattgta

SEQ ID NO: 200929 - DNA, 407 bp, Homo sapiens
gcggctgcaggagcgcgcgcggccagcagagggcgcccgcgccacacctcgcggaggcctccccagaggggctggagtggaggcagagccacaaccgggaagcgcacttcagggaaccgcacttagggtccgatgggaaggagaatggagaccatcaggtcggaagacactccccccactaactgagaactgatgcctgaattctccttttccaccaatgagatcgaagaaacaagtttctggacaactagattctggctagggatgacgcacggggagggggtccaccagggctcctcacgtggcaacccgaaataatcgcccaggccagggtttccagaacaacgttcattttccgtaattttctcattttcaataaaggcataatctttaaatgtgaaattgaa

SEQ ID NO: 200930 - DNA, 615 bp, Homo sapiens
gccttggcctcccaaagtgctggaattacaggcatgagccaccgcacctggcctcattgtggggttttaatgtgtatttccatattgactaatgaggttgagcctcttttcatgtgctaattagatatttgtgtgtcttctgtttttgtgtcatctattcaagttttttgcttctgggggaaagttgcatgagacttccgcatgatggtgaccagtttgcagagtccctgatgactctacagacagaaatgatccaggaacatggcttttggggcctgatgtaccacctgcactatagctccaagaatcatgaactcaaagtataaaattgaggcaataaataaatctcaatggatttctaagatataaatggtatagaattggatgtacgtccagactaatagtcatacatgagcagttttatgggacatggttttgatttttatgatgatctggagaaggaattgtttctcacagaagcagtaagagcagtggtttggaacttggactctggaatcagatactgtattatatttctacctctgccatttactatgtcttctttgggtgacttcctaatacctttggacttcagttccctcatcaaaaatagga

SEQ ID NO: 200931 - DNA, 294 bp, Homo sapiens
gaaagaacaaatgagactactaagccaagtcgctctgaaagatgagtgagagaaaacttggcagatcatctggcgcaaaggtaggaagcaggtttaattctcttcttggtcaaatgccacaatagcgtgaactgggctcactatgactttttttttaatttttattttttgattgctccttcagaagaaaaactattaatagcaattacctataaagactggtctgaagagatcagcgaataggaagagacttttgttttgagacacagtctcgcactgtcacccaggctggag

SEQ ID NO: 200932 - DNA, 280 bp, Homo sapiens
gccttatgcgagggaggcaggagcttcagggtcagagcagagatcaacggaacatgattgctggctctgaaggtgaaagaaggggccgccacgagcgaagcaatgtggacctccttaaagaactgggaaaggcagggaaacagatgtcccttggagcctccagagagaaccaactcggtcagcacctcggcttcatcctcatgagacctgggtcagacttctgacctctaaaagtgtgagaaaatacatttgtcttgctttctttttttttttttttttt

SEQ ID NO: 200933 - DNA, 299 bp, Homo sapiens
agcaaggtgaagaggagcatcactgagtgacagaaaagctcagatgagaccctggagtgggtagctcctctctgcaacctggtcatcatgttaagtgtttagccctcagcagataggaggccctggagtgggtagttcctctctgcgggtggtcatcccaacatctgcagctgtcaacagagaggaggccctggaatggctagctcctctctgcagctgatcaccccgatgtctgtagctctcagcagagaggagttcctggagtgggtagttcctctttgcagcttgttgtcctggtg

SEQ ID NO: 200934 - DNA, 341 bp, Homo sapiens
caagtctaaaattcccactgggcaaaacagatgggtccagatggattcccacctacatcaataggctgtattacaggagagaaaacttgagcttagggaacttgaatctgctataatgatcagttagcatgtctaactgcttgttgtcataaacattttgcccatagtactggagggaggcactctatcttctaaggttgttcattatgcaaacatccctgtgtgaacaaagttctttgagaaggaatttggaggaaagagactttattccagtgaacagtttacagactgaggagatgtagccttaggcagccttcagtgtaaaatgaaggtgcgttcta

SEQ ID NO: 200935 - DNA, 1372 bp, Homo sapiens
agatgcttacagttcttcatatcctacttgaaaggaccttctatcttcagtcactgtattttgctaatttcttaaagaggaaataggtggtagtgagtggccgagtttcatttttcatttctgttctccaaagaacagaatggttcatgtaggaatcctttgcagcttcagtctgcaccaagaaaggccaagaggaaagaatagcgagtggcttttctcactctcagcctcaagactgaatttaaacacacttagctttgtgagggcaggacttggtcttcacatagtggaaagtgtgcacttggctactttttcctggggcaagggctctgctttcctgccactgtgagctgtggggtcagactgcatccttaagccagacattccactctcgctcccctggaagacttttaggcgaggttcatcctggaactgttgactcagaacaggtagagctggaggaagaacaagcggccaccctgctcccatgagccctcttccttggtggataggttgtggttctcctgtttgatggggaggccgctgcatctgactctccaactcagtgaaaagaatcacagcacagaccagcctcaattctttctgcaccactgctctgtcgagttgattcagtacctgtagtcccacatagttaaaatctgcttagctttgctctctgttgtgtggacaatgaaatggttgactaatataaccctggcagtgtcagaccttgtcatgactgaaatttgtccaaatagatattgtcatcaaatgtgcttctggtccttgctagtgagactgtagttaggatccctgtccaggtctcaaagggcacgagaaactatgaagaggcttggcatccctgttcagagtacagcctcatctgccaaattcttggggtcactagaactgtttgggtccctgctggaagctcttaacacccctgagcaactcacgttggaactgatgaaaataggtctcctaagacctccatctactgctaagtccattctggagtccaggtgctactaggagtcttttgcccctgggactgagatgtttttctgacttgaatgagggagtgaatggatgactgcccatgccgctgtcactgtaataaaggactaagaagacaagatttaagaggaagagataaccgtaggacttacaggtttctttgttttgtttttttaacttgtgatctagtactaagaactaaacgttaaatagaatagcatttatgaacagtatctggaaaggagccttcattaatgatctcaataagaataaatgaaagtaagttatttttctgccccccaaaatccctaaaacatgaatttgtcttccacacattagtgccagaaaagggaat

SEQ ID NO: 200936 - DNA, 391 bp, Homo sapiens
cagaacaggaaatagaagctgtggaagactcgaaatacacctttgtacttctctgttcttcacctgctctctcactgtctctacacacacacacacacaaacacacacacacctatatttgcattaaaaatgggtagtaaaagcagtgaagggcaaacagaaggtacaatacaatcaagtaagaggttgaatataaactggaacaagtcttaattttttatttcactttcattcggatacgtttactaattttctttgctagctttaagacttttaaaacattctttggccctgggagggagttgtataaccataaaacttgagaatcctggccctagaataaatgttccttttaaaaccccaaggacagaaaattgaatacagctgtgca

SEQ ID NO: 200937 - DNA, 692 bp, Homo sapiens
atgtcagaattctaactacatctctacagactagcctaacaagtgggtcaagtgctaatagttttaagggtgtttcgggtttttgttttaaaagttaattatctgtaaagacaaatcaatggagacagatagtagattagtggctgcctggggtgtgaacagattaactgtgaattgacaggagggatcttactgaagtgccaaaaattttctaaaattggattatggtgatgatttcacaaattacttttttttttttttttttgagacgaagcctcactctgaggcccaggcaggagtgcagttgtgtgatctcagctcactgcagactccgcctcccgagttttcaagcaatcctcacacctcagcctcccaagtagctaagattactaaaggcacatgccatcaagactggttaatttttgtatttttagtagagacagaatttcgcagtgttggccaggctggtctcaaactcctgacctcaggtgatctgcaagcctcggcctcccaaagtgctgggattacaggctagagccaccgcgcccagccacaggtttctttgaaaagggccaaactgaatgaattttaatactctgcccttataaggcatctccttctgtattttttcctacatagactaaagtattctgtgcttatttatagcttgcagccccaaaaaacatgaagcc

SEQ ID NO: 200938 - DNA, 2583 bp, Homo sapiens
gtctcccaggtccatgtctcagccatgctccccacggaggtcccccaatcccacccgggcccctcagcgttgcttctgctgcagctgttgctgccccccacatctgccttcttccccaacatctggagcctgctggctgcccctggctccatcacccaccaagacctaactgaggaggcagcgctcaacgtcaccctgcagctcttcctggagcagccacccccaggccgcccccctcttcgtcttgaggacttcctgggtcgaacactccttgctgatgacctctttgccgcctactttggacctggttcttctcggcggttccgagcagccttaggtgaggtgtctcgtgccaatgcagcccaggacttcctgccaacttccaggaatgaccccgacctgcactttgatgctgagcgactgggtcagggacgcgcgcgcctggtaggggctctgcgggagaccgtggtggcagccagggcccttgaccacaccctggctcgccagcgcctcggggctgcacttcatgccctgcaggatttctacagtcatagcaactgggtggagctgggcgagcagcagccacaccctcacctcctctggccaaggcaggagctccagaacctggcacaagtggccgatcctacctgctccgattgcgaggagttgagctgccccaggaattggctgggcttcacactcctcacctctggctactttggaactcatcccccgaaacctccagggaaatgtagccacgggggccattttgaccggagcagctcccagccaccgaggggaggcatcaacaaggacagcacatccccaggcttctcccctcaccacatgctgcacctccaggctgcaaaactggcccttctagcctccatccaggccttcagccttctgcgaagccgcctgggagacagggatttctccaggctgctggacatcaccccagcctccagcctgagctttgtcctggacaccacgggcagcatgggtgaggagatcaacgctgccaaaatccaggctcgccaccttgtggagcagcggagaggcagccccatggagcctgtccactatgtcctggtgccttttcatgacccagggttcggccctgtctttacaaccagtgaccctgacagcttctggcaacagcttaatgagatccatgccttggggggtggagacgagcctgagatgtgcctgtcagccctgcagctggccctgctgcacacacctccactctcagatatctttgtcttcacggatgcctcccccaaggatgcctttctcaccaaccaggtggaatccctgactcaggagcggcgctgccgggtaacattcctggtgactgaagatacatcaagggttcagggtcgagctcggcgtgagatcttgtcccctctgcgttttgagccatacaaagcagtggccctggcctcaggaggagaggtgatcttcaccaaagaccagcacattcgagacgtggcagccattgttggggagagcatggctgccctggtgactcttcccctggaccctcctgttgtggtgcctgggcagccacttgtgttcagcgtggatgggctgctccagaagatcacagtccggatccacggagacatcagcagcttctggatcaagaaccctgcaggggtctcccagggccaggaggaaggcgggggtcctctaggtcacactcgccgctttgggcagttctggatggtgaccatggatgaccctccacagacaggaacctgggagatccaggtcacagctgaggacacccctggggtgagagtgcaagcccagacctccctggacttcctcttccactttgggatccccatggaggatggaccccaccctggcctctaccccctgactcagccagttgcaggtcttcagacccagctgctggtagaagtgacagggttgggttccagagccaatcctggggatcctcagccgcatttctcccacgtcatccttcgaggggtcccagagggtgccgaactaggccaggtgcccttggagcccgtgggacctccggagcgaggtctcctcgcagcctcgctgtcgcccacgctgctgtccacccctagacccttctccctggagctgattggccaggacgcagcggggcggcgcctgcacagggctgcccctcagcctagcactgtagtccctgtccttctggagcttagtggcccctcgggtttcttggccccgggcagcaaagtcccgctcagtctccgcatcgccagcttctcgggccctcaggatcttgaccttaggactttcgtcaaccccagcttctccctcacctccaacctctccagggctcacctggaactgaatgagtcggcctggggccgcctgtggctggaggtcccagattcagcggccccggattccgtggtgatggtgactgtgactgcagggggacgagaagccaacccagtacccccgactcatgctttcctccggctcctggtatcggccccagccccgcaggtgaggaactactactttccatcacagggaccggcacaccacccctaccggctcatctga

SEQ ID NO: 200939 - DNA, 544 bp, Homo sapiens
gtctcccaggtccatgtctcagccatgctccccacggaggtcccccaatcccacccgggcccctcagcgttgcttctgctgcagctgttgctgccccccacatctgccttcttccccaacatctggagcctgctggctgcccctggctccatcacccaccaagacctaactgaggaggcagcgctcaacgtcaccctgcagctcttcctggagcagccacccccaggccgcccccctcttcgtcttgaggacttcctgacttgtacaagatatggttacatcagacataaccatattataaactggatgttcggctcttgggacacatcgctggtggtgcatacaaaatatgactacttgaggaccaacaattctgcagccaagctacaaaaaagagaaaagtttaaatgagttaagaaggaaaagaccaccagtcttacaaaattacattttgtaacattcaccaattctttaccaaagttgatgaccactgtagagaaatcagcaaatcattacaagaaaaaaataaagaccgatcggccag

SEQ ID NO: 200940 - DNA, 1675 bp, Homo sapiens
gtctcccaggtccatgtctcagccatgctccccacggaggtcccccaatcccacccgggcccctcagcgttgcttctgctgcagctgttgctgccccccacatctgccttcttccccaacatctggagcctgctggctgcccctggctccatcacccaccaagacctaactgaggaggcagcgctcaacgtcaccctgcagctcttcctggagcagccacccccaggccgcccccctcttcgtcttgaggacttcctgggtcgaacactccttgctgatgacctctttgccgcctactttggacctggttcttctcggcggttccgagcagccttaggtgaggtgtctcgtgccaatgcagcccaggacttcctgccaacttccaggaatgaccccgacctgcactttgatgctgagcgactgggtcagggacgcgcgcgcctggtaggggctctgcgggagaccgtggtggcagccagggcccttgaccacaccctggctcgccagcgcctcggggctgcacttcatgccctgcaggatttctacagtcatagcaactgggtggagctgggcgagcagcagccacaccctcacctcctctggccaaggcaggagctccagaacctggcacaagtggccgatcctacctgctccgattgcgaggagttgagctgccccaggaattggctgggcttcacactcctcacctctggctactttggaactcatcccccgaaacctccagggaaatgtagccacgggggccattttgaccggagcagctcccagccaccgaggggaggcatcaacaaggacagcacatccccaggcttctcccctcaccacatgctgcacctccaggctgcaaaactggcccttctagcctccatccaggccttcagccttctgcgaagccgcctgggagacagggatttctccaggctgctggacatcaccccagcctccagcctgagctttgtcctggacaccacgggcagcatgggtgaggagatcaacgctgccaaaatccaggctcgccaccttgtggagcagcggagaggcagccccatggagcctgtccactatgtcctggtgccttttcatgacccagagacggagtttcaccgtgttaaccaggatggtctccatctcctgacctcgtgatccgcccgcctcggcctcccaaagtgctgggattacaggtgtgagccaccgtgcccggccgccattttcaattctctccatttcctatagacagagattggtatcaagatggggttgttggggccaggcttctgggaagcatctgagataactagctacattgtattccttttccattgattagaagttagactctctggcttgagtctgactgtgtgtctttaggctggtcatgtaaactttctttgcctcgatttcatcatctgtaaaatgggtatcagttatcacatcagggtggggcaggatgttggaatgtcatcagttaaggctattttcacttcttttgtggatcttcagttgcttcaggccatctggatgtataagtgccagtcacaggggatatgattggttagcttgggctcagaggcctgacacctccctcatcctgcctaactcccagagttgaaatgatgatcaaataaaatgcctactggactgagagttgcctaaa

SEQ ID NO: 200941 - DNA, 2661 bp, Homo sapiens
gtctcccaggtccatgtctcagccatgctccccacggaggtcccccaatcccacccgggcccctcagcgttgcttctgctgcagctgttgctgccccccacatctgccttcttccccaacatctggagcctgctggctgcccctggctccatcacccaccaagacctaactgaggaggcagcgctcaacgtcaccctgcagctcttcctggagcagccacccccaggccgcccccctcttcgtcttgaggacttcctgggtcgaacactccttgctgatgacctctttgccgcctactttggacctggttcttctcggcggttccgagcagccttaggtgaggtgtctcgtgccaatgcagcccaggacttcctgccaacttccaggaatgaccccgacctgcactttgatgctgagcgactgggtcagggacgcgcgcgcctggtaggggctctgcgggagaccgtggtggcagccagggcccttgaccacaccctggctcgccagcgcctcggggctgcacttcatgccctgcaggatttctacagtcatagcaactgggtggagctgggcgagcagcagccacaccctcacctcctctggccaaggcaggagctccagaacctggcacaagtggccgatcctacctgctccgattgcgaggagttgagctgccccaggaattggctgggcttcacactcctcacctctggctactttggaactcatcccccgaaacctccagggaaatgtagccacgggggccattttgaccggagcagctcccagccaccgaggggaggcatcaacaaggacagcacatccccaggcttctcccctcaccacatgctgcacctccaggctgcaaaactggcccttctagcctccatccaggccttcagccttctgcgaagccgcctgggagacagggatttctccaggctgctggacatcaccccagcctccagcctgagctttgtcctggacaccacgggcagcatgggtgaggagatcaacgctgccaaaatccaggctcgccaccttgtggagcagcggagaggcagccccatggagcctgtccactatgtcctggtgccttttcatgacccagggttcggccctgtctttacaaccagtgaccctgacagcttctggcaacagcttaatgagatccatgccttggggggtggagacgagcctgagatgtgcctgtcagccctgcagctggccctgctgcacacacctccactctcagatatctttgtcttcacggatgcctcccccaaggatgcctttctcaccaaccaggtggaatccctgactcaggagcggcgctgccgggtaacattcctggtgactgaagatacatcaagggttcagggtcgagctcggcgtgagatcttgtcccctctgcgttttgagccatacaaagcagtggccctggcctcaggaggagaggtgatcttcaccaaagaccagcacattcgagacgtggcagccattgttggggagagcatggctgccctggtgactcttcccctggaccctcctgttgtggtgcctgggcagccacttgtgttcagcgtggatgggctgctccagaagatcacagtccggatccacggagacatcagcagcttctggatcaagaaccctgcaggggtctcccagggccaggaggaaggcgggggtcctctaggtcacactcgccgctttgggcagttctggatggtgaccatggatgaccctccacagacaggaacctgggagatccaggtcacagctgaggacacccctggggtgagagtgcaagcccagacctccctggacttcctcttccactttgggatccccatggaggatggaccccaccctggcctctaccccctgactcagccagttgcaggtcttcagacccagctgctggtagaagtgacagggttgggttccagagccaatcctggggatcctcagccgcatttctcccacgtcatccttcgaggggtcccagagggtgccgaactaggccaggtgcccttggagcccgtgggacctccggagcgaggtctcctcgcagcctcgctgtcgcccacgctgctgtccacccctagacccttctccctggagctgattggccaggacgcagcggggcggcgcctgcacagggctgcccctcagcctagcactgtagtccctgtccttctggaggtgagacgccaggggaaagtgcggctggggctggagagagttagagcggccccttccctgaagaacccttctctgcagcttagtggcccctcgggtttcttggccccgggcagcaaagtcccgctcagtctccgcatcgccagcttctcgggccctcaggatcttgaccttaggactttcgtcaaccccagcttctccctcacctccaacctctccagggctcacctggaactgaatgagtcggcctggggccgcctgtggctggaggtcccagattcagcggccccggattccgtggtgatggtgactgtgactgcagggggacgagaagccaacccagtacccccgactcatgctttcctccggctcctggtatcggccccagccccgcaggtgaggaactactactttccatcacagggaccggcacaccacccctaccggctcatctga

SEQ ID NO: 200942 - DNA, 441 bp, Homo sapiens
caatagacgggaaaactagttgggcagaagttggcaaacaatgtagcacattgctaaaacagatgtacaagtacactttgtatgttttcagttgtgtgatttgaggaggccctttgggttgccatccatctaagtaccagtaaggtgagatcaccagggtaaccaataaatgcaattgtattttcatagtttgttgaatttgcatcttagatgagttccacagctgactagtaattcattttaagtatttttttaattagaccaaagttagttgtaatagtaggcttcttgctttagaaattactttattttatgcaataggtatataattttccatgcaatagatacatacatttgggtgccatggcattctatttgataagaagaaaaatacgtgcaacgactagggaatggtaaaaagaagttgaagccataataagc

SEQ ID NO: 200943 - DNA, 473 bp, Homo sapiens
tggccttgtcattataatagtacctacctctaatgagttttgaggattagatgaatcagtacctgaaaaatgcctgacacacagtgagtgctcaataaatgttaactactgtaattattacattacagaggttgtgggggggccttttctgagtcctccaaaaggatgactttattagggccacattaagactgtggaaacagaagagtattcaacagataaatgaagtctatgagttgggggtacaatttatggagttttagattaaaactgcatccaataagttggtctgacacatctttcaaacctatagaggaataatcacaagtgactagtattcctttgggtccaatagaggtctctgatcttcatacagattgaatgtacccagaaccgtaacctagcattttacttatatagcaaccttaactctgacacaaaagtgtttcttttgttttgaggccaagtctcac

SEQ ID NO: 200944 - DNA, 264 bp, Homo sapiens
aactctaaacgctttaagcttctgggaaatatctttcagctgtcagcctctgctctaccagggtcctggttccagatgtgggtaggcagctgctgcagctcatgaacagctctgacttaattctctatttattcacacttttcttcctgattcttgtaacattcttttcttccttgcttagcagacacacgtggcttgaagttgtcactctccatcgtaaaggagctagagaaaaagctgcactgttgcctggggttccatagc

SEQ ID NO: 200945 - DNA, 470 bp, Homo sapiens
gaagaaattgatggttagacatgttcagaatcagatcatgaggacactaattcttccggaaatcccttaacactaaattgatgtttcgatgggttaaatgctttggctgagatcacatagccaaggtagaaccaaagccctccaaatcaatgctgccctcctgaaacacagatctcataatacacccattgtgcatctcctcagcttaaaaaggaggaccgctgatgtgcatcacggaagatttccatcacatcatggtgactggagatttatatagtgcttgcagtatactttggttacttttacgttgagatctgctaccatggaatacagtccagataaccacagtgccaaagtaggttaaagagggtctggaattgccgcttgaactagtgaggcagaaaagttgggaatctggagtgcatggtagaaggaagaccacttcaacagaagaggagaacaattgctgt

SEQ ID NO: 200946 - DNA, 306 bp, Homo sapiens
tatgaggatccctcatcgaaacctattgtgaagcagaattcaccaagcgttggattgtcacccactaataggagggtttgatgacagggtttcgatcatcaaacccttaggaaagaagacagtagggagggggaagagaaggaacaggagagaattagcaccccatagggtttcgatgaggtcatcgaaacccttttgtagtcaatcacctgctactgctgtagttaacaattgtttatattaatttttctattttggaataaccagtgtggtttgtgtctcctgactgatagatagggtttgtct

SEQ ID NO: 200947 - DNA, 425 bp, Homo sapiens
ggaaggaaggaaggaaggaaggaaggaattagacagagattcacttttccactgttcctccaatgtctctgcccaccctttcttcttatattaattcataaagtatcatctctcctcacttctgctcacttcatcaagccccattccacaaggtgaccagtgttggctttagctttggatggctccttttggctcactgcttgattcaagcatcatcccagatctctgcatagctgtatcttcctatccctcaagttgaagcattatcgaaaggtccatattgcttgatctgagcatactgcaaagtgtcctaaaagccatatgggagatagacttcttcgcagctgcaaaggaaacatttgcagaacagaaaacaccagaaatcacaatacattcttagtcatagtaaaatggaacgcacgcga

SEQ ID NO: 200948 - DNA, 233 bp, Homo sapiens
tgcagtttatgtgtttagatcaatattccagtaaggtccatatgttaaaattggtctctgctagtctataacattttcttcttcgtttttattttatttttttccttcgtatttatctatggaaggaactgggtcgttggtactatagaattgtctgcattctagatttggctgattatgtccccttgatgttactgaacatgttttttctattccttgtatttcctataaac

SEQ ID NO: 200949 - DNA, 463 bp, Homo sapiens
cacaccgctgcactccagcctgggcgacagagcaagactatatctcaaaaaataaataaacaaataaatacatctggtgcaggtaaagtgttcaggaagtaatttcctggaagagggaactctgcagttgcaaatgcggccttcttacaagtcgcttgtagggtgttgaaactctctcgcgatcccagtgacttgagatgctctgttttctggataactaagcttttccaccttcactacggggtaccagggtctttgtagcagagaggcagctgtcttgatggtggaaccactcccgccagtgtgtggtggggtgcccccggggatttagggagagagaaggccagtggcagggactggctggaggaagagggtgcgaggaaaaacactggctgacatttgaaggaacgtgcttcagtatcagggaaggccagcgtgggataatcggtgtcttggcagatgg

SEQ ID NO: 200950 - DNA, 521 bp, Homo sapiens
ttgttgaattgtttgctttgtctctggtgcttatatcccagctttttttaaattcctttttccttttgtcttctttttttgtttaaatttaagattactctggaacagaggttcctaaacgtattttacactcattagtatggctataataaaaaagatggacaataccaagtgtttgggaagatgtgaagaaattgaaaccttcttgaattgctagtagagatgtaaaatagtaaagctacttaggaaaaactgcttggcagttgctcagaaatgtaaagagagttctcatgtggcctagccattccattcctacctatatacctagaagaactgaatacatatatttgtgcataaacttatatatgaaagttcacagcagtattgttcataaataaaacaactcgtatctccttaaactgatgattggataagcaaaatgtgttatatccaaacaatgtaatattgtttagctgtgaaaaataatgaattaataatacatgctaagacaaagggaaaca

SEQ ID NO: 200951 - DNA, 623 bp, Homo sapiens
aagttgggttgatcacttgagctcaggagttcaagaccggccgggggcaccatggatgaaatcccatctctactaaaaatacaaaaagtagccgggcgtggtttggtgtgcacctgtagtctcagctactcgagaggctgaggcactaaaattgcttgagctcgggaggtggaggttgcagtgagtggagattgcaccattgcactccagcctgggccatgaagctagactttgtctcataaaaaacaaaaaaataatggacccccaaagaaggaaactggagttagggtgaccgggacttaaaatttttcaaggtttaccaaagacccatggtttagaaaagctggagttgggtcgggggccccacacggggagtagtctctggcgttgctgggccatgaggactagtggtccttggctctatttggcctcggagtgcccccgatgggggtgtgcctttcgtgtgggcagtaaaattagggctgccatgatcttctgaatgctcagattcctccctcttattctgactgtggggtgggctccatctccctttttttgctccccctctccctgaagcttgcttaattccatggctctcagttgggtctattcccagagctgtc

SEQ ID NO: 200952 - DNA, 739 bp, Homo sapiens
ttcctgcgtgtgtcacacagtgagggccttggagcctacatatgtaaagagtgccaacaaatcaataagaaaaaaaaagccgggtgcagtggctgacatctgtaatcccagcactttgggagaccgaggtgggtggatcacttgaggtcaggagttcgagatcagcctgggcaacatggtgaaactccatctctactaaaaatacaacaaattagccgggcgtggcagcgcacccctgtagtcccagctacttgggaggctgaggcaggagaatcacatgaactgggagatggaggttgcagtgacccgagataacgccactgcactccagcctgggcaacaatagcaaaactccatctcaaaaaataaaaaataataaagtaaactggctgggcaccgtggctcatgcctataatcccagcactttgggaggctgaaatgggaggattgcttgagcccaggaatttgagatcagcctgagcaacacagtgagatgccatctctacaaaagttagctgggcgtggtgacacgctcctgtagccccagctactcgggaggctgagatgggaggatcacttgagcccaggaagtcgaggctgcagtgagccatgattgcaccactgcattccagcctgggtgacagagcaagacctggtctcaaaaacaaggtaaaaaaaaacaaagtggagtatggacaaatacacttattcaacaaataaatattgagcacctactgtg

SEQ ID NO: 200953 - DNA, 223 bp, Homo sapiens
tatctttcccaaccaaattaataattcttaattatctaattgatggtctgtgttcagttttttccagattatttaaatatactattttaccctgttaaaaaaaaatcagatccaaataaggttcacacatggcagaccagaatgagattatttagacattagtattccctaaagttaactgaactatactgcaaaggagtcttaattcttacgttacaccctt

SEQ ID NO: 200954 - DNA, 590 bp, Homo sapiens
atgttgtgttgttttaaattgcagaatgagtatttagaaatcaagatttggatgccaggtgtattcgtgctgttgagctgttagctgcatccaggtcctcatagttagcagacctatgcacatatatacacacacatttatgtctatatttatttttgtatttatctatatatattgaaaactgtttataccaatacctccaattttagtgtaacaccataggtctcatgctaattttctatcttttcatatttataactgccttttctgacgcaaggaaacctgctgtcagtatccttcatgtatttatttattggaccagaatgccctgtatataagcaatctcctgtcatcattgctgccctagttggacgcccttctcacgctgctcaggctccagaagatcccatttagtccactgacagcacaaaaccttatgccagactgcagctactgcctcatagatgctatctgtctcacttgggttccaaccacacacaggctgccgccacggctttgtccatgtagacaccctcgtcaccatgctgaggctccagcaccctttgccaggctattgcctcccttccact

SEQ ID NO: 200955 - DNA, 216 bp, Homo sapiens
tatatacaggcattctggtccaataaataaatacatgaaggatactgacagcacaaaaccttatgccagactgcagctactgcctcatagatgctatctgtctcacttgggttccaaccacacacaggctgccgccacggctttgtccatgtagacaccctcgtcaccatgctgaggctccagcaccctttgccaggctattgcctcccttccact

SEQ ID NO: 200956 - DNA, 594 bp, Homo sapiens
agaaacagacatctggaaagactaattaaagcctacctggttttgacaatatattacttatctctggttgcgtaacaaattaccccaaagtatagaggcctaaaacatttattatctcactgtttctttgggtcaggaatctgggtgtggcttagctgaaccctatgcgcagggctgcaattgagggttggatgtgctcatatgaagaggttagggctgggcagacatcccaaatggctttgatcacagccacaaaccaaatataaaaatgtctaaggccgggcacggtggctcacgcctgtaatcccagcaccccgggagcccaagggaggcagatcgcgaggtcaggagttcaagaccagcctgaccaacatggcgaaaccccatctccactaaaaatacaaagattagccgggcgtggtggcgcacgcatgcaatcccagccattcgggaggctgaggcaggagaattgcccgaacccggaggcagaggttgcagtgagtcaagattgcgccactacactccagcctgggtgacagagcgagactccatcacataaaaaacaaacaaacaaacaaaaaaacaaaaaacgtc

SEQ ID NO: 200957 - DNA, 423 bp, Homo sapiens
aacataaaatattttaaaatgtgtggaagttaaacagagcatgtcttctttttaaggggactcttcttttctccagcatttcatgtgttacaacattggcttggcaattgtcatgccatagaaacaaaagtactaattttcacacttaataaataaatggagggcccaggctttatggaatggatccatagataccctgagagttgaaagagtgttccaaaaaaggtttaatcaaacaccccctgcgtgcaaacacgcatctagaaaacaggcccaggcatggtagctcacacctgtaatcacggccctttgagattacctctcctggcattcccctctcccgcctccaactcctccatttcccctgtccaaaatcttgatcatcctttaagacacatacaaatctatcaagaaatggacagg

SEQ ID NO: 200958 - DNA, 702 bp, Homo sapiens
  misc_feature (252)..(252): n is a, c, g, or t
gcgcttgcaattatttataaatgctgctgaacaggtttacatgcagaactatgcataaaatataaatagggtagtagggccatttgagatcagagttgtttagcatgactaaacactctgctttaaatgtcaagagtcctatgggaaaagtagaggtattgtgactaatattggagtaaggccatgggtggaataggttaaacatatacatcttatatgctgaaaatctgcctcttaaacctctggttcccncatgtcacttgctgagcctgaccagagaggtatatttcttcagtcttatatctcttctctatacttttctgaaagttacatggcctctttaattcccatattacttttttgtgtgtctttcttaagataatttcattttcacttttattgtaataatttatgcacatttctttaataccttttttgtgaactctcttgaaggcattgaaagtacttaatcatttttatataccatataacacatatagttttcctttgcatagagttgttttttaaaaaattcagtgaaatgggggatgtattcataagacctggaagagatgtaattgagaatatttaggaactccttggacatgcatcagagttgattctaaaatcaatttaaacacctcattgtgaggaaaagtatgcactgatcactgtagtcattaatagagtttaggtggagtc

SEQ ID NO: 200959 - DNA, 614 bp, Homo sapiens
cctgtgtgatattttgcttgtttcttcaatgtctgtctctccatagatcacaagcaccacaggaggcaaaaccacgtctctctgtggctttgcggctgtgcgggcactgacctgggacacaagtgtccttgcagggcagaggctgatatttaccactggggcagtgcttgctctgctcaaggtatggttctgagcttaaatgttatagtgactctcagttaatgcacaagacctcgatggcggcaggactgaaacaatattcatttcagaggctcagacaacttaggtaacttgctagaagtcacacgggttactagtcaggattcacattcagcacatcctaacttcacagtctggggttgttaccactacgccctgctggtattttatcctgcagcctgaaattggtagattttgtgaacttctacaagccttcttgagataagcaaaaaatacattaaatagtgactcaaagcttcagtaagcctatgtgtgtgcataatatacacacatataaacatatcagaatttttctttcctcagaatgaacatacaatgtggacagaaagaccttatcatcctcatttttcccctgaggttacgaaggtgaagtg

SEQ ID NO: 200960 - DNA, 847 bp, Homo sapiens
gagtgtggttgagggggagtgtggttggtggggggagtgtggttggtgggaagagtgtggttggtgggggagtgtggttgttgctgtgtgccatcggaaggctatgcaagtttgagcgcttgcttcaccttgacaaacatttcacttgttagagccctggctttctcatctgtgctctgagctagtcattcctgccaagcttccctgcaggtttaagtgcagatgcagtcatgactgtgaaagcaccctgtgaactgtaaagtctgggcagttgggtggtggtaggagaggcagcaactgtgagaggatgaacttgattctgctgatctcggacggaaactgattcttgggagagagacagaatcaaacggctctgacatttgaaaagccatggcctcgcttacctacagtgagacttgagaagaagtgctggggaggtaaaggctgagataccacctccgctgcctgaaagactttgcaagatactccagctggggataggagatggctagaatgacctccaactatcttcacacccgaggctggggctgcccttccaggcctgcagttctgtattttcccttagaaggttctggaggcagacggaacctcagaagcaaacggtttattttttaggtttttcagtttatttttaaatttctgactgtgatggtgtttattttttccttttccctttccccacttccccggctcagcatcagaaagggaccatctgtccgttgccttgctgtggccattttagaaccagcgcaaggctgcttgaatctggtcccctcttctccctcactccctcccccaccacctggctttctctactctgcactgc

SEQ ID NO: 200961 - DNA, 471 bp, Homo sapiens
ggtcagggctgcagtaagccttgatcgcaccactgcactccagcctggctgacagagtgagatgctgtctccaaaaaaaaggaacaaacttctgatgtatgcatcaatatggatgaatctcctatatgtgaaagaagctagattcaagtggctacatgttatatgattctacttatataatgttctggaaaatgcaaaactatggggatagaaaacagacaaatagttgccagaaattggtagtggtaggtagatcgacttgacaggggaacaagggaattttcttgggggcgataggactattttctgtgtcttcattgtgacagtagttataaaactgtatgcatttgtcaaaacccacacctgtacactaaaatggtacatttttctttatgtaaattaaacctcaaaaagactggatttaaaaaatcaaaataaaattacttctaaattaaaaagtaatcccatttt

SEQ ID NO: 200962 - DNA, 533 bp, Homo sapiens
atttgacaaagatattaatattatgtatcttctaaaatatagcatttattagaatatcattactccagatgaactgttagtgtaataaaggactttaaagattattagctatgttccataagaactaatctaaacctttgaagtaaaatgtctcaaagttgtttgtttgtttatgtatttatttatttttgagacacagtctcactctatcaccctggctggagtgcagtggtgtgatctcgggtcactgcaacctctgcctcctgggttcaagcgattctcctgcctccaccttgtgagtaacttggattacaggcatgtgccaccatgcctggctaatttttgtgtttttagtggagacagggtttcaccatgttgggccaggctggtctcgagctcctgacctcaagtgatccacttgcctcggcttccccaagtgctgggattacaggcatgagtcaaagttgtttttaacagagttttcaaagacagtttcataattactgaagaacaaaattttattccatgaaatg

SEQ ID NO: 200963 - DNA, 377 bp, Homo sapiens
tgaaggtttaattaagagtgttagaaatggcaggtaactactaaccaagtagtaaaacatagtattcccaaaataacagggatcaaggatgatagtgagcacagaggtaagcaggccaggaaggaataaagagaagtaatatcaaattagcaaaagcgaggagaggaaaaagatgaaatgagttaacaaatagtaaacaaaatcaagtggaaacagtaaagccaaatgagcagccccacagtaaatactcatcagctaaactcacctattaaaaaacaaaggtccagaatattagtgtcagagcaagatgcaagaacaaaagcattgaacaggactaagaggtactatatattggtagaaaccaaaaatataaagta

SEQ ID NO: 200964 - DNA, 263 bp, Homo sapiens
aacaagagtgagactccatcttaaaaaaaaagaaagaaaaaaagaaaaagaaaaagaaactgacctcagtgatagattagcctctctttatagcacagaacccctgagagcgtaagccctgttgtgaactgcgtatttgaggaatctagcttgtacgccccttatgagaatctaatacttgatgttccaaggtggaacactttcatcctgaaactatccctccccacccccatctgtggaaaaattgtcttccatgaaaccgg

SEQ ID NO: 200965 - DNA, 520 bp, Homo sapiens
caggacgtgtaatcagcagcaggtgattgtgtagtgtgtctaaacacagttgagtaagatgtgccccaccagttatgatgggaatcaatttaaatagactttcttgatcccagaagttcaactacgtggacagtggtaacacttgacaggatgatttgttatagcacaacttatatattttaaatggacaaaaaattagtatcatttacagtatcttaagataaatttcctttgaatgggagcttcctttccagtactttgaggtctacaagacgtatctagaaaatttactactgtggaaaatgaagactgattaaatcgaatggaggggaaggggaagggcctgtgttttttttttttgattagttgctgtaacactgtccttcgggcggctgagggagtttcatattttctttagacatcgttaggcgccgaagctcttgcaggacaactttgatgctatatgaattctgccattttgctagcactgatatgctcttgggtccaccactccattaga

SEQ ID NO: 200966 - DNA, 522 bp, Homo sapiens
tatatatatatatatatatatatatatatatatatgcacccattggtgttacattggtattgaaacacttttattttctattatactagttacgtgactcctcttatctgagtcaattaatgtattgaaggatttatatgaaattctatctttgagagtagtaatttataccatagttttctttagtagctttagcagattatgcaagagacaagtcagttgcagttataaatttctacctgggaaaatagacctaggagacatggctgttgataaaggagatgctggcagatcactgggttgtttgtttctaaatccagtggatttttctatattttgatgtcatatataattcattcatatatagagattgaatgaaaggtctcctcctaaaagtatttcttaataaagaaaagtttaaacgggccggacgcggtggctcatgcctgtaatcccagcactttgggaggccgaggcgggcggatcacgaggtcaggagatcgggaccatgctggctaaaat

SEQ ID NO: 200967 - DNA, 575 bp, Homo sapiens
agtcgaaacatttatgtacatgtggggatcagtataatattgcccagtttttattttgctaagtcactgctctgtcaccgttttttgttacctctttcattaaagaaagaacattttaacatgaaaaaagcaggaaagacataacatcacaacaaagaacagccacttaaaattagtttcgttttatgaaaaccccgcttacattgtccttatttttttggttttggcactagtgaaaatgtcatcacagactgacgtttgggaaacactggcttgagtgaggcttcactgacaaaatgcctggcctggaccctgaatgtaggttagggcccagcaaggagagagggattgtctgatgggttaagaagcaagaataaactctgggaggtagctggggtgggtaaaaggggctaatccaagctataccatgaggaataatggggaataaatgtgttgttagggaatgggaaatcttaatacccagggagaaactcaggattcacagtaaaatacagagtcattagagatttttgttgttgttgtttgttgttgttgatgtttttgcataagaacat

SEQ ID NO: 200968 - DNA, 254 bp, Homo sapiens
ttctatgaggatcccagttccatttcacctgctgatgggttaagaagcaagaataaactctgggaggtagctggggtgggtaaaaggggctaatccaagctataccatgaggaataatggggaataaatgtgttgttagggaatgggaaatcttaatacccagggagaaactcaggattcacagtaaaatacagagtcattagagatttttgttgttgttgtttgttgttgttgatgtttttgcataagaacat

SEQ ID NO: 200969 - DNA, 134 bp, Homo sapiens
gggcggctatgcatgcgtcagggcagggagttcataggttatcactgtgctttcaattttgcagtgaacctaaaactgctcttaaaaaaacaaaaacaaaaacagaaaaaacaggctaggcacggtggctcacg

SEQ ID NO: 200970 - DNA, 1262 bp, Homo sapiens
  misc_feature (52)..(53): n is a, c, g, or t
agggaaagggcctggtatccaactggagaaggaagtgtccaaaggacacccnnagcattcctgacataagaaccaggggaacaaaagtgtggcccacttaagagggaatagaaaagaaaaaaaataggcaaaagtgaggaaacagggaagaccatcagaggctgtagtgaaatgctcgtggtggtctgatatgaatgacaagtcctgggttcaaaagggttctgggatggatatgaatgacaggtcctggactcaaaagggttctgggctggagatacttggaagtttaggtggagacaggaggcaatgcagttaccagtggatgagatgagaacaaggaaagtgaaaagagagcccaggacagaactccagccatgctatgatctgaatgtttatgtcccctcaaaattcttatgttgaaacctaatccccagtatgatggctctgggaggtgattaggccatgagggtggagccctcacaaatgggattagtgcccttataaaaaagacgccagaaaaaaaatccctcgccccttccaacatgtgaagacagtgaaaaggtgcttctgtgaaccagagtgtgggccctccccagacagttaatctggtaagcaccttgaacttggacttccagcctccagaactgtgagcagtatttctgttgtgtgtaagccactcagggtatgggattttgttacagcagcctgaatggactatgtcaggagaccaccgttaaaagccagactgagggaagggagacagagaagcggcacctgtgggggtaggaagagactcataagagggtggcgttggaagacaaggaagaagaatcaaccacaccacatgtcagggggtgccacacaactatgttcttactgaaaggaaaccactgtacacagttctttaagggtcaatcgctctttaggaatgactcaaaaatgtataaaatccactcctaaatccaaaaagaaccgagaaatacagaagtgtgcagagaacccacagagggatcacgtccatagagggagtagagtctactacgctgccagacactgcagagtcacggcacagaaggagtttaaaggacagtgccaagtgaaaaccgcgcaacagcacgacaaaatcgagtaggctcaacgatttcacacacacccttgacatgtttctccagatgttctccgtagttctacagccagccaacagaagattacctgaatgggattcttctgtgcttaatgttttcgaatggccatcttaatgc

SEQ ID NO: 200971 - DNA, 691 bp, Homo sapiens
  misc_feature (52)..(53): n is a, c, g, or t
agggaaagggcctggtatccaactggagaaggaagtgtccaaaggacacccnnagcattcctgacataagaaccaggggaacaaaagtgtggcccacttaagagggaatagaaaagaaaaaaaataggcaaaagtgaggaaacagggaagaccatcagaggctgtagtgaaatgctcgtggtggtctgatatgaatgacaagtcctgggttcaaaagggttctgggatggatatgaatgacaggtcctggactcaaaagggttctgggctggagatacttggaagtttaggtggagacaggaggcaatgcagttaccagtggatgagatgagaacaaggaaagtgaaaagagagcccaggacagaactccagccatgctatgatctgaatgtttatgtcccctcaaaattcttatgttgaaacctaatccccagtatgatggctctgggaggtgattaggccatgagggtggagccctcacaaatgggattagtgcccttataaaaaagacgccagaaaaaaaatccctcgccccttccaacatgtgaagacagtgaaaaggtgcttctgtgaaccagagtgtgggccctccccagacagttaatctggtaagcaccttgaacttggacttccagcctccagaacgaatcctacaccacacagcaccagcacgatcccttgggatcctcta

SEQ ID NO: 200972 - DNA, 381 bp, Homo sapiens
tgggagaagcaagggcaggccggactcgggggaggcgccaggtggacactgatagagaggacaggtccctgcaaacctcatctggaatatggaaacatttattgctgtgaagggctttggaaggatgactgttattaaagcagccaaaacatctccactgagggagcttcctaggggccagggaccttctcacagcctccctgtagtgggtggctcaaggttgtgggaccagcctgcttgcagagcgagtcccggctctgcacatccacaccagtgagcacacacccagctccagtagccgtgagcccgttccaggttgggctcagtgctgctctcctcagcctggggtctcagggactgtgggcacagcgcagggcactg

SEQ ID NO: 200973 - DNA, 775 bp, Homo sapiens
ttctgagacactattttgcctctagagatggtttgttaacaatttttcttttaaagagtgaatgtaatatgtggtggtacagggggaaattgcagggctgagagttaggaggtgtggattttaatccagattctgaaaatacctttacctttctgatagggtaatgctgggaattctcagaggtcttgtacagctctagaattttacaattccataatctcataaatttaataacttttattcaaccctgaaaaaggccacaactagaattataactgctattttgcaaatgattaaaactaaggcagaggacaattaagtgtttctttctgaggtcacaaagccagtaaatgttaaaactaaatgtagaactcatatctcctgactcttagttgaatgctgtttccattaggccacactgtttaggtgtttaagatacctgttgtttcttcatagctcagattttttactagctcagcattttcttaaaccatgattatggagacactgatcttgatggatgaccgtggaaaaacggttccacagtgaaataactttggacaccattgcgtatcagttgttccctcttagaaattcagattgtactttggaatgttaaagactctgaaaaaagaaaaagctgatttaacttttttagcctacgacaccccaaaatcacattaggcacagaaggctttttgtaaagagcgtcattagcttctgagaaactagttttctgtaggacactgggaaatgtttctggttatttaaagga

SEQ ID NO: 200974 - DNA, 233 bp, Homo sapiens
gagtgtaaattccaaaggtagaatatgagtctgttttggtcaccgatgtaactcagtcacctagaactgtgcccagtgttcaattattggttgaatgaatgaaggagtgagtttcaaaacattgttcatgtcttcgttctgtctaccctgataaaatgagagaagtgcacaactaagcccaaagacaaaacagtgatgggaattaacctggcctagctcaaatgccacctgct

SEQ ID NO: 200975 - DNA, 352 bp, Homo sapiens
ccgaacatgacatttaggcaggtttcatcatattgccagactattctcaaactactggcctctagcgatccaccacctcggctcccaaagtgatgggattacaggcgtgaggcaccgcctcctgcttttaataccaatgcaaaaattctacagatgaagaaatggggactcagagagattaagtagtttgcttaaggtcacacaactaggaaatgaccaaattggcatttaaatgagacaggctggctgaagcctggactgcctctgccttttttttttttttttttttttttgaatcagggtctcactctgtcacccaggtgatcacggctcactgcaggctcgaactccc

SEQ ID NO: 200976 - DNA, 226 bp, Homo sapiens
aggcaccaaggaggacctgcatctgccgtccaccaactactatgtttactatgacacggacatggaccaggcgtaaggtgcacgtgtgtgtgtggcccgtgcctccctgcttgactcagagaacgagcagaagttatggaatgggaggaagtaggcaatttccaatttgcacctggaagtttgtcacaccaaggctgtggctcagcttcacccctgtggggagtcc

SEQ ID NO: 200977 - DNA, 386 bp, Homo sapiens
cttggtatcctaatctttctttcttgccatattttggcttggttgatttctctttcttatttgtttttcatacataattatatattctattgctattctttttaaggatactatacagtttaatgtgattatctgatttaacaggagtcaaccagactaccatggctgctcacatctcagatacattttcctacatattttgtggttgtgtgattttgagtatataacttaaactcgcagggctcagtagtcctagtggtaaagtggggacaatcaatgtagcaatgtcataggctgttgtgtaaagtaaattagctaatacatgtaaagtgttacaataatttcatggaacataatggtatcaaataaattcctagaacatgaaa

SEQ ID NO: 200978 - DNA, 473 bp, Homo sapiens
  misc_feature (31)..(31): n is a, c, g, or t
ggaggactggtaggttggactggggttgggnttggcgttggcgctggggcaggggccggcacagaggtgagggctggggctgcgggccgggccattcgagtccagcgttccaacaggcttctgtcattgtcactgagcactagtccagccaaggggtcagtggaggggcccccagaggccccagccccccgttcctttcgctcccgctcctgccgccgtttctcccgctccttggctcgttcttgccgcctccacaacctctacaagttgtggcaggattcattaaaaaaaaagaaagaaagaaaaagaaaaaagcactgtcactatcactgggcctttgcacctgccctttgcctgaaattctcagacccaggttctctgcacgtctaggtttcaggtcaaatttcacgtaataagaggcccttcctaaactccataaaaaagtagcacctccccaacccttggagcgtctc

SEQ ID NO: 200979 - DNA, 598 bp, Homo sapiens
ctttctcctccattcttagcatcaagtctatctccaaatatatctcgcattgtccactgtactctatccccatgaatgttgtgtggtttgggccattgtcatttcttgcctggatttcattgcaggtaaagagcctcccacctgatctccctgcttccactccttgcagcttccctgcagctcacatatacacacacacatacacactccagtcaccagacaggagcccaaatcatcatcgttaaatataaattagacccttcaatagctttctgttactcttagtaacaaatttcttgccgtgcctatgagccatagtttgcctcctgtgtctgtcactgccctgtctgtaccattcttctccaagtgcactgccttttagccccactagattctattcccattcattaaaaaaaaagaaagaaagaaaaagaaaaaagcactgtcactatcactgggcctttgcacctgccctttgcctgaaattctcagacccaggttctctgcacgtctaggtttcaggtcaaatttcacgtaataagaggcccttcctaaactccataaaaaagtagcacctccccaacccttggagcgtctc

SEQ ID NO: 200980 - DNA, 480 bp, Homo sapiens
cttacataactgtagtacagtgccaaagccagcagttgacatttgtcacaaaccatcaaccttacctttccccagttttacacacactcattcgagtgtgtgtgtctgtgtgtgtgtttcgttcaatgcagttttattgtatgcgtagatttgtgtaaccaccagtcaagacacaacagtcccatcacaagaacatctcattctacccttttctaactgtatccacccccttacccatgaaaccactaatctcttctccatttctataatattgttattttaagcatgttatagaaatggagtcatacactatctagccttttgaaattggcttttttcacttaacgtaattctctgaagatgtctccacgttgctgtaggtgtcagtagttcattccttcttgttgctgcgtagtgttccaaggtatgaatgcaccatggttagtttaaccattcacctgttgagggacatctggattg

SEQ ID NO: 200981 - DNA, 507 bp, Homo sapiens
gaatgaatatgggctttgacgcacaggctggagcgcagtggcatgttctcctagcccacagtggggctgggagggagtcattgaagtgagctgccctcttcctgttcacctgcctggtgtttatgtcacaagactgccctagtggaggactctccaggttgaggttaggggttggaaaccacagctgaccctcaccacggagagtgggtctccatggaggccttggccactggtgcagcatcagcgtgggacacgtggtggtcagcatttggtctccagctgtggtagctgttcccgacctccttcctgcagagtcagtgacatggagttacctctgggagtcgagatgttcactgtaattgcatgctgcgggtagggcagcagggccttagcccatcatcagctcctgggtctactttgttcctcgggggacttgctcatctctggtgtcctcaagcctgagttttaatggccatgcaagcagagaacaagagacaaagggaacct

SEQ ID NO: 200982 - DNA, 162 bp, Homo sapiens
cccctccagtggtgtgtctgtcccatggcaagcatttaacatgcaatatgatgctaatgtacatgctggagtgaagcaaatgcctaacaaggcttccaggagtcctggtgggcaagtacaggagccagttaggaaaacagaaaataggattaaagacttgag

SEQ ID NO: 200983 - DNA, 326 bp, Homo sapiens
aaaaagaacatctttttatatctattagagaaataatctgagacttgggtttcctaaggatttgtccttcctaagctaagttatttggtccaaagtacgtttctctaaatatctctatagccaaggtagttatgttccccagttacccaaagtaaattaacatatatgatctctcttaaattggaatccactgcacttttttatcagtcccatctttatctgggtaacttctcatctcctcaggtctcagtttaaagtcgctcctctcacctcccaggctatgttagttaggtagatatagaagagtgcacttttgggatcctcaa

SEQ ID NO: 200984 - DNA, 419 bp, Homo sapiens
aaaaagaacatctttttatatctattagagaaataatctgagacttgggtttcctaaggatttgtccttcctaagctaagttatttggtccaaagtacgtttctctaaatatctctatagccaaggtagttatgttccccagttacccaaagtaaattaacatatatgatctctcttaaattggaatccactgcacttttttatcagtcccatctttatctgggtaacttctcatctcctcaggtctcagtttaaagtcgctcctctcacctcccaggctatgttagttaggtacttgttttatttacatgttaacaactttgtacttcctaactcttttgttttttttgttttttttttttttttggaaagggtgtttggttttgtggccaatttggacgcgaggggcggaaaacagg

SEQ ID NO: 200985 - DNA, 563 bp, Homo sapiens
tgttgttgggaggttcacagatcacttcacctgaacaggagacaagaattccactgcttaaggtccagtctacagcctaaccacaagacaataaaacaaagagaaaatgagctgagcgaagaggatgcaagggcaagggcccatccatatgctgctgggaggagtgtgagctgatgcaactcttcaggaaaataatgaagcaggccgggcgcggcagctcatgcctgtaatcccagcactttgggaggctaaggtaggagaatcgcttgaaaccggaaggtggaggtagcagtgagccaagatcacgccactgcactctagcctgggcaacgagcgaaactgtgtctcaaaaaacaatgaaacaaacaaacaaacaaaaaagttttggaagaaggtcaaaagaatgtatccggtattctaaaattgctttctaagtgttacagctcttttagaattggtctagcaggttttccagttttcactggaacccctccccctcaaaaagaaaaaaatgcattctaaaacaaacctaaagaatgctttaggaagtatggactatcaga

SEQ ID NO: 200986 - DNA, 334 bp, Homo sapiens
caggcaaaagctctgtggtcctgagccccttaggaattttatgtatttgaaatgaaaaccagaaagagtgggaaaaaaataaagacaggactaaaagaaaaaatttcttgtttctaattctttgtatgttaatttttattttattttattttattttattttattttattttattttatatttttttggagacaaggtctcgctctgttaccctggctggagggcagtgatcatagctccctgcagccttgacctgctgggctcaagtgatcctcccaccttagcctcctgaatagttgggactacagacatgaaccatcatacccagctaatt

SEQ ID NO: 200987 - DNA, 341 bp, Homo sapiens
ccacagactgggagaaaatatttgcaaaacacatactcgggatacagtatgtatccagagtgtgtatatgtgtgtgtatacatatatttcaattcttttttttccccccgagacggagtctagctctgttgcccaggttggagagcagtggcacgatctcagctcactgcaacctccacctcccaggttcaagcaattcttgtgcctcagccttctgagtagctggaattacaggtaccctccaccacacccagctaatttttctgtatttttagtagagatggggtttcaccatgttgaccaggctaatctcaaactcctaaaccaaagtgatccacctg

SEQ ID NO: 200988 - DNA, 214 bp, Homo sapiens
aaaggagggagaggagaataaagagaagaaaaagaagaaagactcacaaaaaaatactaaaaatggaaagtctatgagaagaggataaaaggcagtggcttatgtctgtattcttagcattttgggaagggaagcaggaggatcacctgagcccaggagtttgagaccagcctgggcaacatagtgagagaccctgcctctacaaatcagtttt

SEQ ID NO: 200989 - DNA, 739 bp, Homo sapiens
aagagtgtcttcctctctgccccttacaaacatgcacattttcagacagcttacccggagatgactaacccttgatatgtgttttaattaggtaattggctttgggaaatagtagatagtgggtaccactcacagaactaagaaacacagaaaggaagatttgaggggtgaagaccatgagttgacttggtggcactgaatttgatttgccaactgaatggctaggtgaaaggatgcaacaggtgaaggaacccagagatgcaggggagggctgaagctcagggggactgttgggaatatgtttgaggtgaccaatttatcgggtaagcacaatggacatatatgagatgagcctagaggaggaggattaccagggcacgaggctattcttctggagaagtccatctctcagaggacaaataaagaaacaggaagaagaagcagagaaacagatattgaccaatcagaactcagctgcatcaaccaatcaaaactaagaaaatttcggtccttccattgtatacacagacctgactgagagtctcagaggtattgtggaagaaaatggaggcgagagtttcaagaaggaaaggctggaaattgcagcagaatctttaatacggtggttttgagagaggtgtggaaggcaagggcaggccaaagccatacgaaagggtcacaccaagagtcaagttctgccaataaactgaagagtgcatgaggaaaactgatgtagcaa

SEQ ID NO: 200990 - DNA, 548 bp, Homo sapiens
caggattgataagctgggtggttcttgttcagaatctttcaagaggttgcagtcctctgaaagtgtagtgggttggggtatccacttccaaggtggcttgctcatatggctggcaagttggtgctggctgttggcaggaggcctcagctcacaatgcaggctttcataggactacgtgagtgtcctttcaacatggcagcaggccttccctagagctagtgaaggatgagaaaacgacaaatcgcaatgtcttttatgacctaggctgggaagttatactccatcatttatgcaatatcctgttatcacacaggtcatccctattcagtgtaggttggtactacacaaggacatgaatatcaggaggaagagaatctctggaggccatcttggagcccatagtccgccttctgccccctaatgattcacgtcttcgtctgttcctgctctctaagagccaggaggcagacttcccttgagctttcttgcagctaaagtagagcatcattagcagtaaaaattaagatatcatcacaaaggccaggcac

SEQ ID NO: 200991 - DNA, 386 bp, Homo sapiens
gtggttctttatataatagaatattatacagcaataaaaatgaggcttcatgtaccgattgtactgatagagaatggtctccaagatgtatcattaattacaaaagacaaggttcagaacattgtttgtaatatatgctgccatttgagggatcaaaagagagtgcacatttgtatttgtttgggtatgttatcacatatccctcgaagtatacacaagaaactgtcaacaatggttgtcttgagggaggggagctgggaggttgggagaagggcctacccttcctgtataccctttagaaacttgcatggtttgagctatgtgaaccacttgccaattcaagaaacttataaaaattttaaaggacgtagacagagaaaggattt

SEQ ID NO: 200992 - DNA, 559 bp, Homo sapiens
tatagaggcagctttattgccaataaaagctatagcttagatgtgaggtcacagtggtatttataatatttcacccctgaattaagctcacacacccatcatagacaaagttcaacaacccagaagcttactgatcaaggccagagcctttccccagcaagcttaccacctggctggcagcagtccagaggtaccctattcatacacaagtcaccaggtgtgcacctatactgtcccaaagatatttggagaggtgagaggaggggttggtggaggagaggccagggcctctattgaatctatagtgacatgatgtttatacaatattaaatgtctgtctggaaacaaactaggaaaggtaagtaattattttcctatttggaaagttttgagtttatacagattaactgtgttatattttactaagtttattttcagtcatgaattgctgcttccaatccactaaatggtcctctagggacaaacatccttcaaaacttactacatttcctttttataatattcacctctaagtgaatttgtgttttacacagaattg

SEQ ID NO: 200993 - DNA, 185 bp, Homo sapiens
attagtcagggcgctactactgattattccaaagtctaatcaatagtgagaacaaataactttattctgtactgccttcccactccgatttagtaaagccacatttgttggccttgaagaagagtacagaatgcttgaagaatagtacaaaatgctatgtttggttggcccaacatgtattttaa

SEQ ID NO: 200994 - DNA, 322 bp, Homo sapiens
gtcctcaccaagggacagatgtgaaagttctggaaattttgaagctaaaggaagtataggcagtatatggaaaaatggaagtataggcagtatatggaaaaatggaagcaatgtaatttttaagcatcttatttttttttcaatttttaaacttaaaataggaaacatctcccagctctaaatgctcttaaaacaattacatttgttatattttgagatgagaagtcttcctgaaaacaacagaagaatttgtcggcaaaacccactgtttttaaatattggcatcctcatttgtagtgctaatgagcatttctgtttcttc

SEQ ID NO: 200995 - DNA, 342 bp, Homo sapiens
agggcagtttgtaagaacactgctaaacataattattgtggtttcacacggtgtattttgccattggtagccaatttgttggtaaaattactaatgtaaaaataatttttagtgtatataaacatatcatttctgaccttgattcttttctctgcttatgtataagcatgcttatctttactgcaatatatttgctcttacaactattaccaattcgtagtatggagggttattgtttaaacttaatttaagaaagtaacaagaaggaaagccaccttttgtccagcaaccaaacttcccttccctccctttctaccatccaaccaatttaccagccaagca

SEQ ID NO: 200996 - DNA, 225 bp, Homo sapiens
aatgctgccattgctaacattattatagattgtttcggctgttgatgaggttatgtaattaaaattcctcctttcacagaagactaactgaagtctatgacagttaagcaatttttccaaagtcatgccaccaactggcggtaacgctgggtccccatgttcattacaccacattgcttcctgagaaatcagctcaatttaacaacttccaccataaatagaaag

SEQ ID NO: 200997 - DNA, 509 bp, Homo sapiens
ttgggaggctgaggcaggagaatcgcttgagcctgggaggcagaggttgcagtgagctgagattgtgccactgcatttcagcctgggtgacaaagtgagaccacttctcaaaacaaacaaacaaaaacaaagaaaaaaaacagatcttaacactgacaaaacagattctttgtagcaataagataccaaagtccaacctgactctagtataacttcacatgataaaaatggaaataaaaatattttaccccaaagtatgttttttggccctattttgaaatggacctgcagagccattgagaaacatttgcatctgtaaagcatctcattaacataactagatctttcctcttccaggccttccgaaacctgaagagattaactgagaatctagcaccttttaaaagtctaaatagaaaacatttgctatctattatctctaagggcagccacttatgagacttcatctatgtaataaaaaccttggtctccacaaccccttatgttaa

SEQ ID NO: 200998 - DNA, 174 bp, Homo sapiens
acaaagacggcaacgcgcttatcagcgctatgagaaattattcttctgctgttcagaaattttcccagacgctgcagtcatttcagtttgatttcattggagacactctgactgatgatgaaattaacatcgctgaatccttcaaggaatttgctgaattgctcaacgaggtag

SEQ ID NO: 200999 - DNA, 182 bp, Homo sapiens
catgcagatcacgaggtcagcttcccaagtagctgggactacagattattcttctgctgttcagaaattttcccagacgctgcagtcatttcagtttgatttcattggagacactctgactgatgatgaaattaacatcgctgaatccttcaaggaatttgctgaattgctcaacgaggtag

SEQ ID NO: 201000 - DNA, 478 bp, Homo sapiens
ttcccttgtctgtctttttggttcttctctccattttcatttctgccacccacattttagttttcaggatcactttctttttctctgaatgcttctgtttttgtttgtttttcaccttattcctgtttcaaagttgcacatcttcttatatttctctgagaaaattatgattttgcttaacacttgatttctgcttcctgctttttatctgtctcctccaagttccttgtttcagtgtgtttgtcatggtctttgtgtctcatgctagaggctttcctcactatctcatgattattggctgtctgttcatatttaaaagagaagcattcaaatttgattggaagttaaggactgtatggagacaaggtatagaaaatattttcattgttttattagtcagggttctgtaggggaacagaataggagatagatatagataatagagatagagacatagacatatagataaaggggagtt

SEQ ID NO: 201001 - DNA, 233 bp, Homo sapiens
agtccagccatcacatcatacatcatagcagaaaggaggaggaaagggaagggagctgtgccagcagatttccactgttctctacccgtggccacctagtaagggagttttcccctctgtagtagttgcaggcaagggaaaacgctagggcataggggtgcatgtgctcctgcctatgcccatggcaggcattaccaatcgatcactgcactgtttcctgcagaccccaaatg

SEQ ID NO: 201002 - DNA, 413 bp, Homo sapiens
ggatccccggacagcacgcgctaacaatatactgattggggttagaaatgagaacagttttatatagcatcgtcctctggtggtgcctagaatcctgaaatgtaacattgccaccataaccaaaaaaaaagctgctaccaagagtgaatagcatttaattcagtaaactttatttctactcactaaacacaatacagattacaaatccatgcaaatcacttgacacttttctaacaatttctcctctgaacaagtatgctaatattcctcccatcttcaagatactaattttaaccaaaagctaaaattttgttaacctaattcacaaagttctaagacccttaaacagctaacaagaaactaaattgaagaacatgaatgttttttttttagtttctgttagcgcgtgctgt

SEQ ID NO: 201003 - DNA, 598 bp, Homo sapiens
cgaggccctggttctgtggtctgaggtggactcaggtttacacctggagctgcccgggtgacacgtctggtctgggactgcacttggacaagccacttccctgcgtctgcagcacctctggcctcgtgtgctgtggagcaaggaaaacgcagccagcacagtgttcggtgtggttaagtttaaaaaccactaacttggttcagtcagtggaaaacaggtacgttaggaacctgggtgtgtgaactgtgaatctgcagatcaggtgttctaatgaaaaaatgtttttaatttttaaagtcttgagaaacaaagttctgataatttaatgtccaaactgagatgtatccagccgggcccagtggcttatgcccgtaatcgcagtaccttgggaggctgatgtgggcggattgcttgagcccagatgtttgagataggactgggcaatgtagtaagacgttgtctctcaaaaaaaataaatagccagacagatggtgcatgcatgtggtcccagttactcaggagacgtcaaggctgcagtgagctgtgatcacaccactgcactccagcctgggtcacagagagcaagactgtctcatta

SEQ ID NO: 201004 - DNA, 361 bp, Homo sapiens
aaggtgcctttcagtgttgctccgtggtgctctgttgtatgtgtattcgaactaatgcccaatttcccccgcctcccttgaatatttggctgctttaagggaagttttttgcggagaacgctgggtggttggtctgggccaggctgctccgaggtgagctaggggacctgctgtgcccgctttgagccgcagtagactggagtgcaagactccagggatggggtgtggtggagaaaacgagtaccacaccctcttcttttcctcttcacctgctggtgaagtctccccattcagcattttgctgatttccttttccgagggattggctcagagaactgaggaaagctgctgaaatacttgg

SEQ ID NO: 201005 - DNA, 354 bp, Homo sapiens
tcttccccactacaatataagacccttgaaggtggagatcttgccagtcttgttcactgctgagtccctgttgctgaaaatggtgcttggcatatgggagtagctcattagacactttcagtctaaccaattttgatgtcctgccacaagcaaggagagttgacatgtccaggagaagccacttcacacagtccagggctgcacacagaaacacatcactattgtattctgagtgtgtacaagacagtgtctatactctatactgtgctctgggtgaggtaggggttggctgagagcctctgttcagtacccagcaccaatcccaggaaataggataacatggcttaaattgac

SEQ ID NO: 201006 - DNA, 519 bp, Homo sapiens
aggaagagaggaacagaacaagcggcaaccaagcccacgaggaagcacagcacaaaacaggcttcagaaacaggcttagcaagtgagcggcaagcggactgggagagcgaacatagacaaattcggccaaccacgttcttcagggcagatgagaattgattcccaaaatccccaatttctgggtaataacatttgtcagccatccacaagcgtctgcactgcttgggaggaggatgaagaggcactgcattgtttgaccagtgctgaagtgacagaatttgaagatattaaatcaggttacagaataggtttttattttgacgaaaatccttacttcaaaaataaagctctctcaaagaatttcatctgaatgagagtcatgatccatcttcaaagtccacggaaatcaaatggaaatctggaaaggaaactcttcaagtcaaatgcagaataaagccagtaggaagaggcatcctgaggaaccagacaggttcttcacctggtttactggccattctg

SEQ ID NO: 201007 - DNA, 255 bp, Homo sapiens
aaaaatgagtttgtgttacctgaggtggtggctgaccaccaaggacaggaagaaaacctctgagcttggcagcctcccacatcagggtaatggagtcaggtgtgcgtgtagttgtgtgtgcctagcaacctgtctgagacgattggcttctgaagtccagggcctaggaaagcccaagggagccccgcaagctgattgtgcatagctcatttgtttaactgggaatcatcatcatacctaccttctgggctcacg

SEQ ID NO: 201008 - DNA, 652 bp, Homo sapiens
ctcctttctttttgaagagctctcattctgttgacctgcactgctgctggattgttcctcgggctttgcatgttccctgcatttgttttgtaactgagcatggtgcatggcagacctctctatgcagtatgctggggcagtgagcaggtggcacagtagccacaccctggcaacagtgagtgagagctggtgggcaggcttggaaactagctcctttttgttctgctcatgtgtttttatgggggatttgtcttatgcctttattaatattgtttttcttttttccctttctctgataaattcctttaacttttcctcaccttccgttcgacaatagccatggagggtaagcacatcgtgtctttgtgtgtctgtccagctctctctatcacacccggctctctgcatgtaactttggactggaaagcaggaagcccaagtgggagggcacttcggcctgctttgtcacctctcatgactgacagatgccaaaagcagtgtttatatatgcaaaagaatgagacatgtacatctttgcagtaaatgaattattcttgtgcttttctatctcatacccagacttttggaacaaccaagaattaatctgttccagattacttaggcaaaagcacccaagggttcagaaatggga

SEQ ID NO: 201009 - DNA, 444 bp, Homo sapiens
ttttcccattatctgcagtgcttgggttttcaccctgccgtttgtctggcctgtggacactcacttatggtggaggattccttacacattttatgatttgaattgtgaatctatgctcagtggactctcgtgtgcctggatggtaggtgtcttccccacagcaattttgtacttgtttctgtcagatgtcctagggttgtggccagctgtaggctactttttatgttaaaactttgacttgaaagtttggggatatgagagttgaattttgaaccccaaatccacgtgagattcatgtcctgatgatgaattctcaggagagatcttttatgtttctttcccaagtgaggccaggcagcaacaaataagaagctgtggtgttgcgggttgatgtgcttttctgtgttactctgaactaagggtgtgactttggagggtcctagt

SEQ ID NO: 201010 - DNA, 791 bp, Homo sapiens
aagcacgagagggcagtggcactgttagttgcctcctaatatccatttccacccttcccccttctcatgagacccaattttgtttaccccatcccacccaggaggggccagtgacagttcccatgactgagtggatgcccaacctaagctggcacattcaagcacttctcattctacctggaggaggagcctgctctctgtcccttggctggatatgaatgatggagcagagccaccttgtgatggctgggaaacctgcctgaggaagaagctaacactcaggatggcagagcagaaagatgaaatgcaccagagtccctaacatcagcaagccaccgcaggcctgtctctcgcctgccccactgcacataggtgaggtaatcaatgtcttcactattcacgccagagtctaagtcaagtcttttgttgcttgcttccaaaagtagactgaccaatacaggagactgtcagatcaatcttcttaaatgaaaacagaggttatcacggagaatattttaaaagttagggtctacaatggttttatgacaaagcattttttttttagaagcttattcattagtcttcttacctccagtcttgttcatctcaaatccatcctcttctgggctgctaggagtctaccttacaggcaagtctgagcacatgattcctaccttaaaggctccctcagcaattacaaagtacgcagttggaagtatgctgaacttgaaaacacaaagtctgataattcatcaaagttcaacattttttttttttttttgagacggagt

SEQ ID NO: 201011 - DNA, 712 bp, Homo sapiens
tgaatgtgccagcttaggtgggctccactcagtcatgggaactgtcactggcccctcctgggtgggatggggtaaacaaaatggggtctcatgagaaaggagaggaggagcctgctctctgtcccttggctggatatgaatgatggagcagagccaccttgtgatggctgggaaacctgcctgaggaagaagctaacactcaggatggcagagcagaaagatgaaatgcaccagagtccctaacatcagcaagccaccgcaggcctgtctctcgcctgccccactgcacataggtgaggtaatcaatgtcttcactattcacgccagagtctaagtcaagtcttttgttgcttgcttccaaaagtagactgaccaatacaggagactgtcagatcaatcttcttaaatgaaaacagaggttatcacggagaatattttaaaagttagggtctacaatggttttatgacaaagcattttttttttagaagcttattcattagtcttcttacctccagtcttgttcatctcaaatccatcctcttctgggctgctaggagtctaccttacaggcaagtctgagcacatgattcctaccttaaaggctccctcagcaattacaaagtacgcagttggaagtatgctgaacttgaaaacacaaagtctgataattcatcaaagttcaacattttttttttttttttgagacggagt

SEQ ID NO: 201012 - DNA, 1044 bp, Homo sapiens
cctctctgttcttgctgggaggaacttgccaccataatcagatttcctggaaaacagacttccaattcacctgaaatgcttcaaagaagttagaagaaggaatgagctcataacacttttctttcaagtttcaggagactcgtggcatggattttgcagaaaggcgaatctgtattcaaatgctggctctgccacttaccagctgcatacttttggccagcttaacttctctgggcctcaccttcttcatctgcagtgtgggataattactatgccacagggttctccgaggattaactaaaagagtgagcgtgacttggcatctgttatattagcctatccagtatctggtaatttgaccctagtcttccttgagaaactgtcccctttatgtcgttggtcctggagggtcacatgggctgactcctaggctggctccagggctgaatgggtgacccagaactggcggatcagagaactgcattccctgggcaaagcaacaggcttaggactgggcatggagactcaattcccagatgtctactagaaatgttaaaaagtaaatctgggcttattgagatattaggatgtaatctgattttggcatcttgctaggtcctgagaatagaagtttccagaagaaagcagagatggaaagaataagacctaattctgatgagtcatttgagcccttatgtccaacttggcaacgccaaggcctccccggccttttggagacatgggccataaattaatcttcttgatttaaacccactgggtttccaatcactcgaaacttagagtcctcactaataaaatatgcaaaaggttcagtccactgtctggtaattagtgcacaaggagccgggtgggcacttaggagacggctcagcttcctgcagagactaaccagtttcgtttccccttggcacctgagaagagagggctgactgacaatgccaggagatcaggttcatggcacggtaaagaaagcagctgctgtgtgaataggaacaacaggaaccctgagcccaatttactcat

SEQ ID NO: 201013 - DNA, 550 bp, Homo sapiens
cacttcacacctagtagatgggttaaaaatgttaaaactgaccataccaagtgttggtaaggatgttgaacaactggaactcttacacactgttcacaggaatgtgaaatagaataaccactttggaaaacagtaagttaaacatttaccaactgtgatggtttatacagagtgtcaacttgattggattgaaggattcaaagtattgatcctgggtgtgtctgtgagggtgttgccaaaggagattaacatttgagtcagtgggctgggaaaggcagactcacccttaatctgagtgggcgcaatctattcggctgccagcacggctagaatgtaagcaggcagaaaaatgtgaaaagagagactggcctagcttcgcagcctacagctttctcctatgctggatgcttcctgccctcgaacatcagactccaagttcttcggttttgaatttggactggctctcctctctcctcagcctgcagatggcctattgtgggaccctgtgattgtgtgagttatacttaataaactcccctttatattccat

SEQ ID NO: 201014 - DNA, 357 bp, Homo sapiens
ctttaaaacatcattttttcactctaaggtcataagatattccccaatatttttctttagtttttttaaagttttatttttttacaatcttcaagtcttttatgtgccaggaattaacttgtgtgtagtgtgaggtcaggagctagttttatttttttctacatcgacaagcaattgtttagaaaccattaattgaatattacatttcttccccacagttgggtaatggcactttcatcatatatcctggactctctatcagtcaggttattattcctgtgccttattataccatattaactactatatctttatggtaagtctcaatatctggaaagcccctatttgtcaagtgga

SEQ ID NO: 201015 - DNA, 537 bp, Homo sapiens
acatttcctctatggagacaggagcacaagagtgggggcaaatggagtaaaatccataggtggtattatagttagtgaggggaatggatttgcagatgatgtcacagatagtcttgattgttttcagtgaagtaggaattgggttttaacagctgaaagtgaagtatgtcttagagcaggaggtctgaggaccaaagtgagagtacagaattgctgctgagttcagaagatcaagctaattcagtccacagaaagaaagattgctaggtaactaagtatccagcagaggttggggcctgaatttgtagtggctgtaattggttattctctgcagtcctattcaacagtctttcatgtagaactgataaagccaaatggtagggctaatcctagactgaggttttgttaagacagggggacctggggacagagagtcaagagacttgaggtaattgcaagagggtgattggagcaatgggccaaaggatatagactgtaagacaaaaagtcaagccagccccacaagagaatgtaggt

SEQ ID NO: 201016 - DNA, 601 bp, Homo sapiens
gataatttatgttagtgtaaaccatcagggaccacacttctattacttggagcattccaaggatttagaagaaccagggataaaacccagccaaattctttattatatgacttccttcccctccactccttactcttcatttctctggccctgtttactttgaccacccagccccttgtcaccatgcctgtagagctttgcagaagacaagtcaggggagctggtgtattagtccattttcacactgctgataaagacatacctgagactgggcagtgtacaaaagaaagaggtttaatggacagttccatgtggctggggaggcctcacaatcctggcagaagggaaagacacatctcacatggtggcagacaagagaacttgtgtagggaaactccactttataaaaccagcagatctcgtgagacctattcactatcatgggaatagcatgggaaagaactgcctccatgattcagttgcctcccaccgaggccctctcacaacacgggggaactgtgggagctacaattcaagatgagatttgctgggattacaggcgtgagccactgggcctgggaattctaggtaatttcagagt

SEQ ID NO: 201017 - DNA, 271 bp, Homo sapiens
tggcatgtcttggtcaatccaggagacacagactctaattctaattttgccactgtgtgacctggacagatcaccacttcttctgcatcttagtttcttatctgcaaattgtggggactggattagatgatcttgagaatctattccagctcaaaatgctgtgatataactgcttgggtaatttttatcatcaacaatcatatctcatgatcttttaaaactctctggcaattggccatggagtatatagccttatggggggaagtaaggg

SEQ ID NO: 201018 - DNA, 533 bp, Homo sapiens
agctctagggaacaagtttctcaaagataaggcaggagaagcaaagcacactggcctgggagttaggagaccgcgtgctaagtctgctctgtggccttaggtgagtcacttaaccttggggctgcttcttcagggttacaggtgataacctttgctctctctactctacagagctggagctgaggggagcagcagatcagataatgggttgcaagggttctgtaatgtgtatggtataataaaaatgcaagtaacagtaaaatcaccattatcgtcatcatcatcctgactctttaatgaaaccacacttctgtttcacctcctagggaacaaaaaacaagcttttcttcctcactgatgaaggaaaaatgaaattgtttataatagcctttgcttattagacttagaaattagtccctccccttgggcactgaaagactaaatggaaaatctatgagggaatggtatttcagaaaccacccacagggagttaaattagccagacaattttatttacaactgttttggcttta

SEQ ID NO: 201019 - DNA, 500 bp, Homo sapiens
cctgaccttcataataaggactcacatgtgtcggtcccaaggatccccaagggatactcatggttgaaggtgtctatgtgttctccttggtgtccagcgaatgcctcttgacaatctgtggtcatactcacaacctatgaccacatacgaggaagcgaggtgtcccttttgcagttgttcagaaggtcccgtgggcaggagcagccagaggaacatgaaaccagctcgtaggtggtacttgtggcaacagcagttatagccaaggagaagttaaattctaaagacttgggcagtctccagggaatatactaactgagaaataacatccataaaaataattcaatactagtatgtaaaactaaaaacaataaccaagtgtgactggctgtctaagaattaagcaaagtaagatgaagtgtcttttgctagcaggcgctctcagcaaaggagataaggctgcagtaattctcttcccaccttcgatgggcaggtgcaacctt

SEQ ID NO: 201020 - DNA, 681 bp, Homo sapiens
ctgaaattgaactttgatgcaaatgtgttcagataacccatctttcgaaataagacaaataagaatccataatctgaggtgggattgaaaactcaggagccaaggaacaaagactgaagtgggtgactccaggcttcactgatcttttgggcttggctgggcaaatcacttatcctaagcttcagtgtccttatctgcaaaatggacataatatctccctctagagacttgttgtaaggcccaaatgaaacataacaaagagcctgccacaaagcaggacctcaatacatggcaactatttagatcatcttccatggagaacttcctagcaggagtgaatgtgatgattagctgatctaagtattttaagagagggctggaagaaaaagaggtagttgacagttttctcactgtaaatttccaaaccaggcagagtgacaacaaccaggtttcagggccatcagagctacacctgggccgtgaatagtgcctacaccaaggtgactaccccactctatgatgacacccctaggacaggcctcagtcttctcactccctccaactgcaacaagctcctggggggacaaccacatggttttgttttgctttgttttgcttggatacagagtctcgctttgtcacccaggctggagtgcactggcacaatctaggctcactgca

SEQ ID NO: 201021 - DNA, 422 bp, Homo sapiens
  misc_feature (63)..(63): n is a, c, g, or t
  misc_feature (68)..(69): n is a, c, g, or t
  misc_feature (74)..(74): n is a, c, g, or t
catgcatgcgattcaccacagacagttgatcctgtgagaatctaatggtgttgctgatgcagntcagnntggtnatgctcactcaccctccactcactccctgctgtgcagcccacatggacacacgccaacacagggcacgctcacacagtaacactcggacgctggtgcaaggcgtgtgcacactcacagttccatccgcttcacacacacacactcatgcaatgagaacagacatcctcatacacacacacacctcacactcacacacatactacatgccaccgcacacatgcctaacactgaccatatgcacgcacagacacgcacacccgcacacacccattcccacacttggtgcacacaccctcacaggaacacacaaggctgcacaatccacactcgcacgcacccgagtatgg

SEQ ID NO: 201022 - DNA, 163 bp, Homo sapiens
cagctgtactccgtttcctttatttggttttcttttctcttgttttccatcacaatagcaacttttactttccaaagtcttctgtgaaaggtaagggacccaaaaatgccttttgcttccatcaagattctctcaaacagttgagatttttcatgtaaatttt

SEQ ID NO: 201023 - DNA, 397 bp, Homo sapiens
aggagaacagggacacctcccacacatacagacagccctacacagacttactacatgcccagttctctgggaggttctgtgagggacataaaataaggggcatgatccccaactttaaagagctcagaatctagttggaagaaagcagactgcacaacactggctacggaagcatttgataccaagagcttctgctgtgaggaggcaacgtgatgatgtcacatgaggaggcacccgcctgcagctcagatggcaagaaggacatgattttaccctcaagagagggtgaataactttgacagacatctagttcactgcactataaaagaaagaaatgaaataaatagtactgaaatgagataaaattatttttatttggagatgctatgactagaga

SEQ ID NO: 201024 - DNA, 493 bp, Homo sapiens
  misc_feature (482)..(482): n is a, c, g, or t
  misc_feature (486)..(486): n is a, c, g, or t
taaagggggggttctctgtttgtttgcttcttgtagcccccttgacctcaccagtaaggcagctaagggggaaacggagcagggcattgaagccacacggggctgagtctgaccctaggttttgtgccttgtctgagccccatttcccccacctgtaaaatgagtatgtatgtgcctcatgaaattattgcaaggattgagtgagaacatgcagcgcttcctagcaggtccttggtctatgcagctttacggtgaaggtgatgacttggacactcccagcctagaacttggcccacagaaaggtttacatcagccctcgttgtctgggagtggaaatgctctcaacgtttcaaccaaagatctgagagtagaatacattctgtctttaaggtgctagctgttcattttccagacaaacccacaaataagtaaaaagagaaacggagggagggagggagagtattctctgggaaaacaggganaaanaaaagat

SEQ ID NO: 201025 - DNA, 457 bp, Homo sapiens
tcaatgtctgtgaataaagacagtgttcctctttcctcttcagtctgactttcgtgctgcctggagtctgcaggacgatgctgactgcagtggagatggccagtgtttctttgtctgttctcaattttaggtggaaagaattcagtctttgacattaaatatgatgtcagttgcaggttttcacagatgctctctgtcaggttgaggaaattcctctctattcctagtttgcagaattttttttaaaataatgaatgtgtgttgacttttgtcaaatgtttttgctgcattagttggtatgatcacatggtgttttcagtcttataacaacttgaactgattgatattggaggttcaaccttgaattcttggaatcaaccctacttggttggtcatggtacattattcattttattttataagctgatgaattcaatttgctaaaattctttttaaa

SEQ ID NO: 201026 - DNA, 566 bp, Homo sapiens
agcaactgggaagatgaacttctgctgagatggagaagcctcaaaaatgaagataactaacctataaaaatttctgatatgctgtatatattgcaaggttataatgattatatgggtgccactgacatcttgtcatcacttctttgccttttttttcagccatttcatttgcttgtctctgtctttgcagaaattttatgtttagaattacagggacaggaagaataagaataatttttatgacttggggtcaaagaaccattgggatgtgcttttctgggaagaacacctttctcgtgtcttcatggttatcaaatcaatatttaagataagaaatacaattcttgtggtcccttgataagagggttgcctcaataacagtaaattagattaccttggggggatttattttttaataagccatattgatttttacccaaaattcattatctaggagtttacaaagaaattcttcagtatgtttcaggattttcccatttttgaagttgaagtaatatattttttcttttctagattttaagtttgttttaaagctgggctattct

SEQ ID NO: 201027 - DNA, 276 bp, Homo sapiens
gattacaggtgcacaccaccatgcctggctaattttttttttttttttgtatttttagtagagacagggtttcactgtgctggccaggctggtctcgaactcctgacctcgtgatccacctgcctcggcctcccaaagtgctgggattacaggcatgagccaccgtgcccgtcccttgacgatcttttaaaaaggccaatttgaccatgttggttccctccttcgaaccatctactggctccccattgctcttcagataaagacacaaacccttga

SEQ ID NO: 201028 - DNA, 510 bp, Homo sapiens
gaaaaggggaactagatgtgcagggtcgtagaattgtggccagtgggtggaggctacagggaggcagattttagcacagaatgagtaataaacagtgtgtgtctgtctcttctaaaattcactggttgacaactgacaccccacccccaccttccatcttaagaagggtggtatcccgttgtggagtagaatgtaactatgaccttctgggatttgggcaccagatttatcttactgcaacaggagccatggtgggagccacccccataactcttatagagctggtgggccaccaggactgccagatatatatatatattttttgaaacagggtcttgctatgttgcccagactggcctcaaactcctggactcaaaggatcctccctcagcctcctgagtagctgggattataggcacataccaccacgactagctgccagatcatcttatcttggaccaggcttctaccattaattcacatgctttaaaaaaattaaaaattaaaaaa

SEQ ID NO: 201029 - DNA, 696 bp, Homo sapiens
atttattgtaatatgtgtcccaatttcaaggatcttaaaatgtaaacaaagtacaacttagaattgatgaaatagaaaaaaagaaacgcatgcaaattatatgaataggtaatttgtagaaaaagaaatcccaatggctagtatgaagagacgctttactcctctagtaatcaaagaaggaaaagtttaaacaatcaaaaaataagaatttttactcaaaaaaagtacaaacaggcttggcgtggtggctcacacctgtaattccaacactttgggaggccgagacaggtggatcacttgaggtcaggagtttgccaccagcctgaccaacatggtgagaaaccctgtctctactaaaaatacaaaaatgagccaggcgtggtggcgtgcacctatagtcccagctacctgggaggctgaggcaggagaactgcttgaacccaggaggcagaggttgcagtgagccgagatcaccctattgcactccagcctgggcaacagagtgagattccatttcaaaaaacaaaaaaaaaaccccaaacaattagaaacctagatagtggtaaatattggcaagaacacaggggaaatgagacctccttgtatactactagagggagtatagatttgtgtagcattctggttgaatagtaaatttaagttagtatatatcattttattcaacaattcttatcc

SEQ ID NO: 201030 - DNA, 611 bp, Homo sapiens
ttccttgctttctgctgcttcttagtacttctcaccacctgagcatattatatatttattagttgtttggtttagtatctgtctctccccaggaaaataaagaaattttgttttgttcatagctgtaaccccagaactgacaacagtgcctggcatttagtaggcactcaatatagttgttgaaggaatgaagatatctccctacccgcttccctccacactgatcccccaagaaggaagcacataatgtcacttaatgatttaatgcagtctatggtgcagccccttagctcaagttctgggccaagatgttctgcagagttaaataatgccgcgccaaatataactaagagcagggaggaaaagaaatgacaagatatgcacaagggagaagagaatctgtttttagccaaagcctaaaatgagagcatggtgatgaggcgaagaggtgggaacaggtgggtctgtctccctgcagactaatcagctccctcctcagctgcagagcaaagaggaaaagacagagatgaccctcgggatacctgagaggatatggggacctaccagctggggacagatggatcattaacaactatagacaaatgcccact

SEQ ID NO: 201031 - DNA, 709 bp, Homo sapiens
cccctacctcaaaaaggaaaagggtaaaatttaccaccttcaccgccgtctcctcagacgacgagtaccccaccaggaactccatcgtgatgagtagcgaggatgacattaagtgggtctgccaggatctggaccctggggactgcaaagagctgcacaactacatggagaggttacatgaaaatgtgtaagccagacacacacagacattggttctcactcacctttcagcctttaattccaggatgtgtagcaacggtgcccccggaagagaaacaaagcagcaggacaaaataaggatgacactatccatacagcctcagccaatgaccccggctcggcggcgaggcctggagtccgcatcgacgcacacattccagagtacagtgtcttgcttaagaggtttatcatgcatggcaagatttttaagacttgaaacaaaaacgagttctgaatcactgagcgtctgagagcgtccaggaaagaacagcctctctctctcgaatcaaagcaatttggatattgtaaaatccacatggctccaatattcaatattgcagactatggaagaaaagtacaactcaggtggagcatccatggatcgcatccatggatcaatgggaggaagcgtgtcatcgaaactggagcagcacatcttgctgtgagcgcgatcacaggcagtccagtgccgccgtcagctgtgggaggc

SEQ ID NO: 201032 - DNA, 506 bp, Homo sapiens
cgaaacaatgacgattatagttgagcaaattgtatgaaataaaatttgacaaaattagatgggactggattgtaggaaaaagtgataggctgacaaaaagtgcactcctgcctgggtgacagagcaggagtcaccctctcaaaaaaaaagtgtattttttcccctttaggactgaaaaaattgggtgttacaagattacctcaaggactggtctgagaactggggatggtaaggaagaaactcaagtggccagcctctggtttgtgggggtaggtgggcaatttctgtttcaaccaaagcagttctacttcataaattaatatattggaattgtgcttgggatttcatttggaggggaaaaaagtcttctaaacaataacactgttaattgaagagacaaagcatgcatatggcagcacgtgattaaccaccaaagtggataacagatcaagaagacatgggaagttgttatgggctagtgaggtcttgatggaagttaaggttta

SEQ ID NO: 201033 - DNA, 629 bp, Homo sapiens
gtcagtgaagtgtagggattagggaaaataattgagaaaaatgaggagaaagaaagaaaaatagatgttttggtaatctttgtcaaatgttttctcaaagaccaggctcagatttaaaatattatgcagatgtagtctttggcctctggtagtttctgataggaattcagccttgagttgaactttgagatgggttgttttcttttcgtttttttcttttttaattactaagtgaccaatctgttgtagtttgttgatctattttttcctcttgccatccttctgttgctttctccatgagctgctgtttattctggaatgttgaacatccacatttagaattaggatttgtgtggctctatcttaaccaggaatggaaaaaatccaacccagtctttcaattcatgggtttaagtggattcagagaggttctcatccacagtgacaggttcagaattcccacttctaaagcccccgtttcattaggtaatgaatatacaagctgagcccttccaggttcacactgtggaggcttctccactcctctgtcttggttggctttcttccttggggtgtttgggaagagtctgattacagccaacttctttccttgtcagttgattttataa

SEQ ID NO: 201034 - DNA, 405 bp, Homo sapiens
taagcacagaagtgagggcatgaaaggagaggagctgcgaaaacactaggattaatggattgtaggtcttcatgaggtctaaggattgttggcatcaaggacctataaggagtatgctagaaaaaagataggagaaagtagtgagagaataggatgcttgaaactgagattaagggtttttgttatcagtaatgacaaaggagtgagtggctgaggctgatcttgctactccagatcattagcagagaggtcaaaggactgagaagtatcatttggagagtgacggtgaggtagagactaaaatctctgagaacaagagtgaaccaggaatggtaaatgacaatgggtggtatagtctgatgatcacgaaaaattttaagacggaagtttttagggaggagggag

SEQ ID NO: 201035 - DNA, 533 bp, Homo sapiens
ccctgtttcttttttccattccatttttttctcaacatctattctcaaaacagaaaccagagctatcctttttaaatgaaaggcaggtcatatcattcctctgtgaaaaaccccttggtcaattcctaatttcacttagagtaaaagccaaaatcctgacatgacctcaaggcccttcataatctaggagcttattaacctctctgatggcattccctagaattgccctgctcacttaccctgatgggccacaatgacctgtttccttttctccagcacgtcagggacactggtgccttagaggcttttcacttttgttccctctgcctggaatgctcttttccaggtatcatgtaactcactccttttcctccctcaagttcttgcagaagtaaggcctcctctgaccaccctatttaaaattgcaaactgacccattcccagccctcttgctttcgcattgttcattgtctatctccctaataaaatgtaagctcctttagaccagtgatccttgtctgttttgttcagta

SEQ ID NO: 201036 - DNA, 598 bp, Homo sapiens
cgtgtacttgacggcagtgtaaaacgacggcagtgttcagcgcagtgattaacaccgagggtcgagtgtaaagcgaggtcatgtgtaaaaggatgtttgttggtaaactgagagatggagtctcactctgtcgcccaggctggagtgtagtagcacgatctcggctcactgcaacctccacctcctgggttcaagcgattcccctgcctcagcctcctgggtagctgggattacaggcatgcgccaccattcccggctaatttttttttgtattgtagcggagatagggtttcaccatgttggccaggctggtctcgaactcctgacctcaggtgatctgcccgccttggcctcccaaagtgctgggattacaggcgtgagccaccacacctggccttcagtcccaggtatcttttatagcagcgtgaaaacaagtaatacaccaggaaaactgtttcttatgaatattttgtttcaaactagtcatgtgcactgacttgtcactgattgtatttgtctctttgcttttgctattctctaggtcctagccaaatttgtgggtcactttctaccactgtacacagattgtacactccat

SEQ ID NO: 201037 - DNA, 285 bp, Homo sapiens
gggaagtgcccagacatcagtgacacacgcccaggggagacaggcagagtctgagccggaaggtggaggaactccaggcctgtgttgagacagtcccgccaggaacagcatgaggcccaggcccaggttgcatgagctagagttgcagctgcgtgctctgagcagcaataaagctatttaaaggtggggagagggagcaaaggaagagggagcaggaaggagggacagtcccgggttcaaattctagaaatgtctctttctagctgggcagccttgtgctcatca

SEQ ID NO: 201038 - DNA, 608 bp, Homo sapiens
aaaaaacaaaaaaaagaaaaaaaaaagaaaaatctgctacagagatggaaagaactgtttagacaaagacaagctatttttctaaaattgtgcgatggagaccaagacagttcaaaaaagaagttgactcactggttcaccttccagtagtcgcatcgtcagcatctagctctgccatgcagtctgagaacacaattcatcttgttgatgctattcctgctcttaaacttgtgcttgtgctttgagatgagccttattggtgagatagcaattcagttaaatgaattcaatttgttactcactctgcaagctttacctaatttcattctccacagggagagacttctggtagggatacttttgcagcttctccaagatgtttggcaggagaaatttccatccatagactgaggaaaaaggtcaacaggacaaaggtcagttatgttcagaagagattaatggctatgtacttgctttcctggggaacaaattgcatcagagtgcatagcaagattagagggagagcagagcctgtctttttctctgtatacctggagtaagaatttagacatcatgtctcttcttcaataaagatagattttcaagta

SEQ ID NO: 201039 - DNA, 297 bp, Homo sapiens
cctgacaaagaattcaaaataatcactttaaagaatctcagcgagctacaagaaaactcatagagacaactaaatgaattcaggaaaatgatacacaaacaaaatgagaagtacaacaaagagatacaaacaattaaataaaagagaaaggaaaagaaattctagaggtgcagaatacaataaagagatagaaaaatatattccatgcaaattgcagcatcaaaaagtaacagaggtggctatacttaggcaagatatagttgaagtaaaaaataaggcccacaagagacaaaggag

SEQ ID NO: 201040 - DNA, 746 bp, Homo sapiens
tgagtcaggatcgcaccatcgcactccagcctgggcaacaagagcaaaactccgtctcaaaaaaaaaaaattctagtttgttgtatgtacagaaaatatccttgagaaacaacaacagcagaagtaggaacttctagctcacagtttccaggctgtgaattgcgtcaccagaagtccacagcctgctttttgcctttgaaggttttggtgaattgattcctgctgctcagactcaaaagagtaatatacaagccaaagtgccacatgtatttataattggggatatatcgttctagtgacttgttaaaatgttggtctctacccacaagttaattcagcagccctctatgggtcacagctgacagttctaaaacactggtaatggagcttagttctttctagtacctgggctgtgaatcccttcaaagtggggggatggggagcctggaatcttaatgaagagattaaatagttttgttgtgtatttgatgtagattgctataaaacccagagaactttctcagttcatctttctaaagattagtacaactgtcatattgcataagcactaacaaattcttttactccatgaagaccaccatctctacataaaaatgtcaactttcttcaaaattacaactgtttgttggggattgtgtgttcacaaagaaattgaggaggcacttttatctgggcaacacatctggaatcacaaaaggggcagcttctgcatctgtaggtgtatg

SEQ ID NO: 201041 - DNA, 142 bp, Homo sapiens
gacaaagcaggcttggaaaattggatttgataaaagaagcaggtacctaattggtttgatgactttttgatggggggagtcaattatacagtattgttaattaatcggtcttatttttgagacacaccaaccaacttgcagg

SEQ ID NO: 201042 - DNA, 405 bp, Homo sapiens
cgagctgccaaggacgctggcctggcccagggttggccctgcagtgggtgcagagaagcagagaagaccaaaacccttggagaaggagtagggctcgggagccagtgggagctgcagcgagtgagagcatgctagtgcttacagaataggaaaacaaactgtttctcccatacactctcaaccctcaacacagaacacttctgcaaccagatgtctagggtttttccctgcaccaagcaattctccaattgtctgtggacatcgactgggtgtctacagttcatttcaattctgacactacccagagctactgcagactccacccgttaagggcttagttctgcaatgctaccccccagttcagatgccaatcacaagtcccaggttttcacctgtacctctttt

SEQ ID NO: 201043 - DNA, 254 bp, Homo sapiens
tacagtcaacatttcactaataattctgggttaaaactctcctgagagccaggaggttgcagatgagcagtagctacctgtttctttggggtttctagctattaaggcttctctacagaggctttttctctaaggcaaacgtaaacctttggtagatttccttactaaggagtacctgtttcttgctggttgcaatggatggagaaggagatgggtcctaatggacctggcacactttaattcaggtgtagtac

SEQ ID NO: 201044 - DNA, 713 bp, Homo sapiens
tgatgagttatatatagtagacaataatggagagatgccactgtttgacatcactgggcaagactttgaaaataagcttcgagttcctcttcttgaaatactgaaatatccttacttgcttctacatgaacgtgttaacgagttatgtgttgaagcactttgtcggatggaacaagccaattgctcctttcaggtgtttgataaacatccagggatctatttgtttttagtccatcccaatgaaatggttcggcgttgggctatcttgactgcaagaaacttggggaaagtggacagagatgattattatgacttacaagaagttttactttgcctttttaaagtcattgagttggggcttttagagagtccagacatttatacttcttctgtcctagagaagggtaaactgattcttctgccctcacacatgtatgatactaccaactacaaaagctattggttaggtatttgcatgttgctgaccattcttgaggaacaagccatggattccctgttgttgggctcagacaaacaaaatgattttatgcaatcgatacttcacactatggagagggaagcagatgatgatagtgtggatcctttctggccagcgttacactgttttatggtgattctggatcgccttggatctaaggtctggggtcaacttatggatcctattgtggcatttcaaaccattatcaacaacg

SEQ ID NO: 201045 - DNA, 349 bp, Homo sapiens
cagacgtatcatagtattgcttgcaaaaaatcttgaaaatgtggctgcttttgaaaccctctgtgtgtctgaggactggtggcggcactgctttaaattatttgctccttggcttttagttgggttgctactcaccagataaagaatatgcttaattctcaatatattgtagtatgtttttctaactgtttagtaattcaacgattgtgccattgtatttcagatgatagtgtggatcctttctggccagcgttacactgttttatggtgattctggatcgccttggatctaaggtctggggtcaacttatggatcctattgtggcatttcaaaccattatcaacaacg

SEQ ID NO: 201046 - DNA, 204 bp, Homo sapiens
ttttatttatttacagaatagcccaaggagcctaatttagggaatcttgataaggtgataagatttatgtattttacttatttttttctttttagacgagttatgtgttgaagcactttgtcggatggaacaagccaattgctcctttcaggtgtttgataaacatccagggatctatttgtttttagtccatcccaatgaaat

SEQ ID NO: 201047 - DNA, 659 bp, Homo sapiens
tgatgagttatatatagtagacaataatggagagatgccactgtttgacatcactgggcaagactttgaaaataagcttcgagttcctcttcttgaaatactgaaatatccttacttgcttctacatgaacgtgttaacgagttatgtgttgaagcactttgtcggatggaacaagccaattgctcctttcaggtgtttgataaacatccagggatctatttgtttttagtccatcccaatgaaatggttcggcgttgggctatcttgactgcaagaaacttggggaaagtggacagagatgattattatgacttacaagaagttttactttgcctttttaaagtcattgagttggggcttttagagagtccagacatttatacttcttctgtcctagagaagggtaaactgattcttctgccctcacacatgtatgatactaccaactacaaaagctattggttaggtatttgcatgttgctgaccattcttgaggaacaagccatggattccctgttgttgggctcagacaaacaaaatgattttatgcaatcgatacttcacactatggagagggaagcagatggtaataaactttacttgctgaatgttgttgaatatagtgatgatgatgcactttaaaaatgatagtgtcact

SEQ ID NO: 201048 - DNA, 520 bp, Homo sapiens
gcagtatagcattgatacaaaactgtatttacaagaaaaccaattaaaaattaagggtagtgtgcaaaagtagacaggagagtcaagacatatcaatgcagggattgctatgcttctttctagtcatcttttgcttcaccattcaatttttccaaaacttaacagccttggtgccaggaaaactttgtttacagtcatcaccatcataaatggacattcacaatcttctgatacactgcaaccaatcatatagttttttctttttttgttattgttttgtttctgtttcctgttgttttgccttctgttaaaactgtgaagaaacttttggtttcattgttttcaaaagtttgaaggtaccacacacctgatttgaaggcaaagacactcctctagggtgtaaataacacagagtgaggaaatgtggattctactctcatttctgacattaactatctgtgagacttggagcaaaacactctcactatctctttgggatcacaaatttacctcagtagta

SEQ ID NO: 201049 - DNA, 215 bp, Homo sapiens
ctgctcccaaggacacataaagggagtattttcaccacccaggacagtagggacatggtcaaaacttaactaactattgaggctgccacattggctggaatatgccagctggattccacagaggccccagactgaggcactgcctatcaagtggctgcaactcctgcttggaattgtagaaatcccatgctgacatcagaggtgcacagagtatg

SEQ ID NO: 201050 - DNA, 313 bp, Homo sapiens
actcattgtatcttctccaaaaatattttatttccaagcctggaaacttgtactccatattctgttttataacttcctgtaccagtacatcagccagagtcttgaagtccactgcaaacttcttttcttttctttctctctcttttccttccttccttctttccttccctctctctctctctctttctttctttcactgggattacaggcacgtgccaccatgcctggctaatttttgtatttttagtagagacggggtttcaccatgttgcccaggctggtctcgaacacctgggctgaagggatctgccca

SEQ ID NO: 201051 - DNA, 2219 bp, Homo sapiens
  misc_feature (587)..(587): n is a, c, g, or t
  misc_feature (1427)..(1427): n is a, c, g, or t
  misc_feature (1479)..(1479): n is a, c, g, or t
  misc_feature (1529)..(1529): n is a, c, g, or t
gaaaaatatttataaaatattttggacaaactcaagtgattcacagatggccttttcacttctgtctagcccatgggttggaaaactttttctgtaaagggtcagatagtaaatgtttgaggttttctggtctctgagacaactactcaactctcccattatagtgtaaaacagccatggaaattatgtaaatgagaggccgtgctgtgttctgacctcactttataaaataggcggtaggtcctggccttagtttgctgtccccactctgccctgtttacatgttcagttgaattgagtcttctgtttcatggtagttaagagggctgtttatttggctgttatatgaggcatcccatcctgtccccattttcccaccacccatgaagttatattgtcctgcttgctggtaaatatttaacaactagtgctctgggggaaattatttatagatattgacatatcacataagttcattataaattttactgatataaaggatgttagccaacaatttacaaataataaaatatacattgcttgtattataaattccatttagccagttgattctcagagactgcttncattgatttttgccgaattctggttccataaccagccgatggctgccatgcatgaacagttgtctttccagcgtaaatattgggtaatatttttgccacagaaacaacaaagacatatgtcagaacttcattcactcaccagggatgggaacaacttccttgctaaattggaaaataattttcaaatactgaaagaatatctcttcagttttgtatgctgttcacagtgtaatacctacagacacgaaacacttttaagttatacctgcagtattaatgctttctccatcactttcttaagcccagaaaatcaacagtaaacccagcccttgtttgtagcatttgtcgatttccatatgggaatatcccgccatggccaatttcaagctgctcacgtgacgtcactgaagacgggttggtaaaagaggggtccagtagccaccatgagatagtgcttcccctgtgtagatagaacagatgtgagtaaccctgaagcacagataatgacaaaatatagtgagatcatgaggaaggggcaatttgtgaatattcattacctttgtttttagtataatttattcaattgtaagcttctataatttaatgtttaataaagactgtgtttaacaaccagctcacaaaggttctgaaaatgttcacaatcagttccgttaagccagtgctggtcggctgcagcgcaccactgcatattgggaattgaacgggtagagggttgtctttctcttgggacaagcacactttaaggggagcgtattcattgcaggaccaaggctcaacgtgcactgctccccacccgtcccagctcctctttatgcttgngggggccagccactctccagtcctccccaggaatatacgtcgcaaccaggcnttcttttttcattggcctcattcttcccagggccggctcagaggcccccnggtctaattgccattggtttaactgctgtttaataaatcaaactatttttctgactaaatcttgctaatcagtaaatagtgatcatctgaattctccatatgctaaaaagtcatttttccaaggggtaaaattaaagtaatatttggcataaaaaaattctaatacacaggcagacacctttatgtctaatatctcaactgtagaggttagataatcacagagtgctatactgtgttatagccttaatatgtagagtgcttacagatcactaagaaatatttaaataatatcactaaataggccaaaatcctgaaaagcaattcgtaaagaaaacatacaaataaccagtaaacacaagatattcaacatttgtagtatccaaataaaatataaactaaaggccaggtgcgttgtctcacgcctataatcccagcactttgagaggccaaggcaggtggatcacgaggtcaggagttggagaccagtctggccaacgtggtgaaaccctatctctataaaaatacaaaaattagccgggcatggtggcgtgcacctgtagtctcagctactcgggaggctgaggcaggagaattgcttgaaccagggaggcggaggttgcagtgagccgagattgtgccactgcactccagcctgggcaacagagactccgtctcagaaaaaataaaaat

SEQ ID NO: 201052 - DNA, 321 bp, Homo sapiens
tcttcaatttcttagaaatagtttgagtaagattggcaccagctcttcttcatacacctggtaaaattcagctgtgaatctatctggtcctgggcattttttgttgggagatttttctactactgattcaatgttcttcttcattattggtttgttcagggtttctattaatatttccacctggttcaattttgggagtttgtgtgtttccagaaatttatccattttccctaagttttctagtttgtgtgaatagagatgttcatagtagtctctgatgatgtttcatatttctttggtatcagttgtcatgtcacctta

SEQ ID NO: 201053 - DNA, 773 bp, Homo sapiens
agtaattttcctggggagttttgttttcagtgaaaatcagcaaataatcattgcacactttctcgtagaaaagcaacggtgagtgatgattgcagttccctggtgattggtgaaggctctcagggctgcctgaggatgccagggctcgggagggtgcattctgggaggtgtcactggagaaatggcatctgagctggactctgaaatagggggtgattcccagggccagggccaggggaccaggtgggaaggcgggctggagggtgggagtggcctcggtggatgcaggctcggccgggcctgtggggaggtgtgcctgtcggcgagtacagcaccgtggacgggagcctcccatgaatgaggaggagcaggaatgggggaggcccaaagagcagaagcaggaagggcctctgagccagggctggcaccttaaaagcgaccctgggggcaggggagaggggaagggtttgtctattcatgggttctgtctgtcccacctgttcccaagaggactaaaggcagccagcaaggtctgtgtcccttcccgctggaaggccagggtcctggtggagcatgcgggaagccttaactacactgtccaaagcaaaacacacccagcccgataacagagtagaaattcagactcccaccaccttcaccacctcctgcacgtcccctcaatagaaaatggaaaagtgaaagtcggggctggaatctccgcaagccggtctgtccatgacgtgagaagattctgcctttcgaagccacccccg

SEQ ID NO: 201054 - DNA, 330 bp, Homo sapiens
caagtggtagctgcaaataagcccacgtgagttgcactgaaaggatcagggcactggttctcgaggactgggaatgcaatgataaaacgaaatctcaccagcactcagtaaagccagatccaatggcagccttgggctggtcacccctaaaccgccatgtgtcagtcgggttccgcctcccagaagcgggttaccctgatttgtgagctgattattctagaagactccagggtctgaaagtatctcaacaggttggctatgtaaaaacacagtcaatcaagcagccagacactttgcagagagactccactccacgaagaattacaggag

SEQ ID NO: 201055 - DNA, 731 bp, Homo sapiens
ccttattcttttgttaggaaggtcaggagttgacactttgccatctccacattcaaagagaggtgccatgttgtattccatttcagctcttctgttctgtggttgtgtctctctctgcatactcccatcccaccccagtgttctatttactccagatgatttcttgagaatgtgctcatccttaggttttgtagtattttgcagagaatcttttcatgacaaaaggagaactctccatgtagcccactgagaaactgttagtgaagaaaaaacatctttatctcacaacacagaagatgcaggagagcagcagcctggtggtgaaagtgatgaatcagctcagatttacagattcttggccccaaaatagttcattttcaaaatatattattcagagcaaggcctgagcaagagaaagaattagagctgattttcagctggagattttgtgcccgagaagaaagcctgcactgatttgtaggcataactgaccttggtaggaatgtttgattttcaaatgcagagaaggccatctgttggttcttgagggtaggggaaagaggcataatgatcatctttacagcatgctgtactttatccttggtcagaaacttttgcaggccttgtgccaattcttcagacactatctttacatcggggagtcaaaacttggaggttaaagtaatggctcaaggttacccaaggaattcatggaagaagatagactaaaa

SEQ ID NO: 201056 - DNA, 479 bp, Homo sapiens
ggaacgggtagggtgaaatgggggataagatgcaggtctgctcagcttgggtaaattgcttttcctctttcctccaccctgctgacataaattacagccttttggtattctccagggcagaattttctgaccatttccctggcttgcaaacttcaaagtaaacttctacctaacttaggggaccaatgctctaaataaaactttaattttaatgtgcatccgaattaccaggaattctgtaaggagaataaaactttaacgtgtatacagacccccgggaatcatgttctattagagattctgtttcagtgagtctgggtggggcctgagatcctgcatttctaacaagctccgaggtgaagcccttacaggccaaaggaccacagattgagtaccaaggctataatgaatagcttcgccgtcactgcagaagttggaccaagtttaggcccctctctaagcagcagtacttaaaggaa

SEQ ID NO: 201057 - DNA, 475 bp, Homo sapiens
taggcttctgcatgtagctcttctcttcttggctcccaggagctacagggggaggactctagtctgtcactgggtggaggagaggaggtcaccacagtcagcaaagctcttggctgctccttaccctgagtcccagccgcagcctccttggggctgagcctgtgtccctgggcatactctgtcttgcacatacaaatgcacatatactgttcacagctcaagctcagagacacacagccacttgcacacatctcacagacccatccagtgactcgctggtgttggatgctttcagaagcacgcctccagacagattagagaggatactcactcagagaagtgcacaaacccatgcagccacacaactcccattctatcacacgcacacatcaccaaacagacacaacggaggctcagaccctgctgcaacccccacgtcagaaacacattctcatatacacatcttacccctaga

SEQ ID NO: 201058 - DNA, 393 bp, Homo sapiens
gggggtctggagttcaaaatatctggtttgatcacacatctacagcataattgctttggacctagggttgtttcttaccctttctgggcctcagtttctttatctgtaaaatcgagaggtaataatagcctctacctcatgggttgatcagataatataaaaataacaccgggtaagtgtctaacatagtaggtactcacacagcagtaactcctcctaacgcattgatccaatcctgtttttcttctcccagattctttctttgtagacccctgagcaccccatggatgtattttctcacgtcttggctgggaaagtgcacacactcatttcattactgcagctttttgcatttcattaaaaaacttgacaggccatttcataataatttat

SEQ ID NO: 201059 - DNA, 458 bp, Homo sapiens
gtcatctcggattagggctcaccctaatgacctcattttaacttaattaatccaataaagatccgatctccaagtaaggtcacattctgacatactggagtttaggacttcacatatttttttgtcgggagaggggaacacaattcagttcataatagatgggcagctgggcacggtggctcatgcctgtaatcccagcacttcgggaggtcatggcaggagaattgcttgagctcaggagttcaagcctgagcaacaaagtgagatcccatctctgtttaaaacaaaaattgaaaattatcttgttgtggtggcacatgcctgtggtcccagctacttgggaggctaaggcaggaggatcccctgagccaaggaggtcaaggctgcagggctgcagtgagctgtgtttgtgccactgcactctaacctcagtgatagaataagaccccatctccaaa

SEQ ID NO: 201060 - DNA, 594 bp, Homo sapiens
gaacactaagaatgacaagacaggcaaaactgattggatctgttaaatgattaggtgtgtgggaggggagttaaaatacaaactatgtttaaggtctcacagttagatgacaggtagaatgagtgctaataaaaaccaaacttatatgtgggccacacacagttctaaagactttctgtatattaaatcattaaaacctcacaacaaccctatgaggtaggtacttttattaactgtattttacagatgaggaacagaggcccaaggtcacacaaccagtaagtgctggaggcaggaattaaacataggcactatggctacaaagtccagactcttaactactatgctcatctgtccctataatgacaacaaacgaaacaaacaaggggaaaaagtctagcggagaagagattcaagagagagaggtaaggattcaggacacatctgagagggacacataaggtggatgggaacagacactttcactcaataacaccttggtctttggaggtttaatttctatcattaaaaaagtgattctaacatttgcctgagcaatgattgtcagggctgtggataagatgcatgtgttta

SEQ ID NO: 201061 - DNA, 161 bp, Homo sapiens
cacctgcatacaaatgatatccttattggaaaaactcagggaggccatgaacaaagaagcctagcatggagacagggccagtgtcaggggacacaaaaaatagaaactttgggagcaggtatctccttggtggtgagccagcggctctgccctcctccttc

SEQ ID NO: 201062 - DNA, 435 bp, Homo sapiens
gtttgtccctttgctcagactggactgcagcatagctcccaacacttggttggagcagttgaggagggtgaatcacaatttagtgatttaaaaaaaaaagtgaccattttttttggaggcggggccaagatggccgactggaagctgcgtgttcagaggctcccactggaaaaaaaatctaagcatgtgaatccttcatcagcaaccaaggtattcaggttctctcgccaaaattgacaagaaggctggcctgaccacagagagaaggaagagcagtgtagtgagaaggcccacctgagagccacacggggaaggggaagccccttccccaagccaaaggaggcggtggtgagtgagtgcgctagggaaactgctttttccacagaaccctgccacccatggattggaagatcccactcgtgaacccacgccacc

SEQ ID NO: 201063 - DNA, 424 bp, Homo sapiens
tgagatggagtcttgctctgtcacccaggctggagtgcagtggcacgatctcggctcactgcaacctccacctcccaggttcaagcgattctcctgcctcagccccctgagtagctgggattataggcgcatgccaccacgcccagctaatttttgtatttttagtagaaacagggtttcaccatgttggtcaggctggtctcgaactcctgacctcaggtgatccacctgcctcggactcccaaagtgctgggattacaggcatgagccaccacgcctggcccaaaaaaaaaaaagatatattattaattcctcttaggatcagctttggactcccaaggttaacccaacaatgtctataactgttgctcattattttaataattttaaagatttattatttttctggaatgcaacgagacag

SEQ ID NO: 201064 - DNA, 892 bp, Homo sapiens
  misc_feature (35)..(35): n is a, c, g, or t
ctatagctttcatcagattctccaagggaggtctntgcaccataaagagctccaccgagactcaccaccgacatacttggaggaagatattataattatagaggacacaacccatttactgaataatctctcagataagctgatcatcatctaacagagaagagcctactgagggagctgaacatagtgctgctatgggaaaatgacttgattctttcacccattcgattaataaatctttattgagcactgtttagattctaggatatggtactgcacaaaaaagagaaaaacaattcctgccaagtagattgaagctttcattccagtgaggggagtctagctaggaacaaaacaaatgagtgaaatatttagcatgttagaagaggttatgtgccaaggagcaaagcgaggcagaactgaggggtaaggaaggggtccaacgttaaacagaatcatagaggaaggcctactaaggtgatgtttgatcaaagacctgaagacggtaagggaccaagccatgcagctacctggggaaagaggattcccagcgaaggaaacagcaagtgcaagggcctggaggcaggaacacgggtaggatgtttgaggaggctggtgaagctagagtgaaatgagcacgggagaaggtcagaagggaaatgcgggaggggaggcggtgggcagactgtgcactgtaagatcattataaagccttgacttttactctgagtgagaaaggaagctatcagagaatgttgagctgagaagaatcttgataagacaggtttaacaggctcactctggccgctctgtcgaaaacagactgtaagaaggcaggggtgaacctgttaaacctgatccgttacaccggggatactcaggatcagctatg

SEQ ID NO: 201065 - DNA, 200 bp, Homo sapiens
tctaaaagataggaatgctaattcagtttttggaaaaggctatatgaaaaatgaaacctttcctgtattctttgttttatatttcatgctatctcacatgtatacaattctcacttcagtatactactttaggcataataaagatttaagaaagatttattaaataggtctcctgaagttgtttaaatcaaacacgaatt

SEQ ID NO: 201066 - DNA, 711 bp, Homo sapiens
aatttcagggaaattaatgaagtacatataagtgcttgatttaaatgtgtattttattcaatagtttgagtatcttgccatggaagatactagcccagcctagcagaaaagtgcaatatgtataatatactttcgcattttaaaagttatattccctatccattttgaaatgctagccaaactacatgaagttatttgcaattaattgtaagctaatcaggaattttgaaagcttgattggattaacaaactataatgttgaaatttggtaaaatcataatgttaatttttactgtgaaacgttttcttgtaagatagatatacacatcctagtttaattttgtgtcttagtgtggatttacaaatttactacagttattctgagcccaggaacccaatcagatttcaggccagtttgatactggctgttcttaattctaacaggagagtaggacatcatactaaatgttatgtcagtgggactgtgttgtctttggagcttagtaaattaatcattttcttcagactttaaggagagtgataaataaaatttggagtcataggatatagatgtacaatttaaagattaaactttttttttttttttgagatggagttttgctcttgttgcccaggctggaatgcagtggcatgacctggactcactgcaaactccacctcccgggttaaagcaattctcctgcctcagcc

SEQ ID NO: 201067 - DNA, 444 bp, Homo sapiens
agctgagggaggtcaaatacacagaggcatatttcttggcttgaactgcaaatcttaaaagttaataagactatcataattactgaactgacacgtactactgtccttgtctggtctgcaaatcttacctcaaaaagatccaaatggatattttgtcagaaggaagagaagttgcataattcacctaaacatacaaagaaagctggcattcaaactgagaggttctgtgtctaccttccttaaggtatattatattaggaatgttagggtaaaatgaaacaatcagaaatccctccttatggaaatattacagcaaatgctgtaagaacgcagaaagaacacaaacctacttttgcttaattttatattaaaaaaatcatttcattaatacacggtgtatgtcaattgtcattactacttttttgtcagtgggtgaggaaagca

SEQ ID NO: 201068 - DNA, 350 bp, Homo sapiens
caaaagcagttcctgcacggtcatccggagcttaaaattgggtggtggtataataaaaagttacctctatacctctagtttcacaccaagtgagataaagtttagaagaaatctgaactacatccagaaaataaatgttcttctgggtgaggaagaaaaaaattatttccagaaaaaagtttggaagtcttggtctcaaagactgctgttatcaatatcaaaatatcaattcatggaaatgaaaatataaacaaaaactatcaccatttcttgaacagccactgtgtgctcctggtgtacatcctcgcaccgtcttcacaatccattcaaacatctgatcagtgtctcaa

SEQ ID NO: 201069 - DNA, 499 bp, Homo sapiens
cacgcaccccccgcaggcactgaaacacccctctcctgggccctcattgggtatgcaacgtataggtttgtgggtagagtgtggttcccactgagctatccttcaaggcaggggattctcggcctgggctcttgggaaaactcgaagtaggagggccaagttgtttgggaaaagtaacccgagtttcaaagggctgacaggacttccgtcctcttttttttttttttttttttttgggacggagtctcgctctgtctcccaggctgcagtgcagtggcgcgatctcggctgactgcaacctccgcctcccgggttcaggcgattctcctgcctcagcctcccaagtggttgggactgcaggggcccgccgccacgccgggctagttttggtacttttagcggagtacgggatttcaccgtgttggccaggctggtctcgaactcctgactttgtgatttgcctgcttcggcctcccaaagtgctgggattacaggagtg

SEQ ID NO: 201070 - DNA, 573 bp, Homo sapiens
agtgaaaacagtacttgaatttaatcagacacaggaagaatgtgtggtcaagcttgtgagaacacactatgagtgtaaacagaaaactagtaccttgagcagggaagtacatggcttttagtaacagcatgggaacttttctggttacatggaataattcagacacattaagaaaagccaagtgtacagaatcaagttatactggaggaaaacattgcttttgtaggccatcaagacaaacattttagagttagactttaacagcagagttataatcagaggaaaaaagtgacaggagctgatgaaaaagttaaaagagagagttatcacctcaatcaagattaaaggtgtactttctcaaggggagaaagagttgaaagcagtgatgtatgacatgcagtaagatgcagcaaacattaaacttctgagatataagtctgagaagctttaagaggaaaactctacctcaagaaatgaaattaccatcctaagtgaagaagacagctttactaacgtgaaactagaaaattaaatgaagactgtgaaacagaaaaaaaaaacaacaaaaaaaac

SEQ ID NO: 201071 - DNA, 741 bp, Homo sapiens
gtgaaagatatttttaacaggatgaaaagacaagctatagcctgggagaaaatatttgcaaatcacatatgtgacaaaggacttgtatccataatgtgtaaaattaaaaaaaaaaaaagccaaacaactcaatagttaaaaaaactgaacaaagcaatttaaaaatgggcaaaagacctgaacagaagatatacagatggcaaataagcatatgaaaagaagccaaagaagatatacagatgacaaataagcacatgaaaagatagtcatctgggcgtggtggctcaagcctgtaatcccagcactttgggaggccaaggcaggaggatcacttgaggtcaggagtttgagaccagcctggccaacatggcaaaaccctgtctctactaaaaatacaaaaattagctgggcgtggtagcacacctgtagtcccagttactcgggaagctgagacaggacaattgcttgcacctgggaggtggaggttgcggtgagccaacatcataccactgtactccaacctggatgacagagtgagactctatctgaaaaacaaaaccaacctacccacagaagaaagaaataggatcgtgaaagtgtgattaccaaggatgaggcatgtcttaggtaagacctgtttgcgaagtgatgacagattagctctattaaataaagaaggcaagaacctatggagaactctttacagagcatgtattctaagcgtaacactaggatttccat

SEQ ID NO: 201072 - DNA, 698 bp, Homo sapiens
tctaccgatctcacatctgctccatcagcaccccttttaagtgtacagactgatgagtttggagcaaatgtatatgcctatgtaaccatcgcttcaatcaacacctcaaagaacattccctcacccaaagagctccctcatgcccttttgcagtcaactctaaccctgatgcctctgatttctatcactaccatctggttttacctgttctaggactttgtattaatggaatcatacagaatatgctcttttcttttatggctccattcacctcaatatgatgtttctgagtttcagccatgttgttgctaatatcagtggtcccttcttttttgctgctgagtagcattttgttgtataaatgcaccacaatttatctgttcaccagctgatgaacatttgagttgtttccagtttttacttgttacaatcaagctgctattaacatttgtattacaggcctttctcttgggtaaatacaaagaagcagtacgacgggccagagggtaagcgtgtttagctttagaaattgcgcaaactgctctccaaagtagctgcacctctttatactcccaccagccatgtctgacagctctagttgctccacatcctagccaacatttgctattgtcagtcttttacattttagtcatgctgatgggtgtgcaggtgtgcctcactgtagtttaatttagaag

SEQ ID NO: 201073 - DNA, 322 bp, Homo sapiens
tttaatataatcagtttacacaaatgtgaaataaaactaagtagagctggtattcatttacacataattatcttataccatttggaataagaatttggggcacgttagcaaaccaaaaggctcagaaagaagttgtgatatttagttcttgtctccctctacaaatgtgaagcactcttctatccagcattcctagtggagttcctattttcaaatttgcaaatcattctggtcctaagcaatctcaaaaaaacatttctaaaaaccaaagaggaaaaaaatccttttttttgtgtaaactgattgggatccttagagtcga

SEQ ID NO: 201074 - DNA, 232 bp, Homo sapiens
agatcacaatcaaaatcttcatgatctgttctgtaacagcttccaatcacctcctttttaaattttttttttttagatttttaattttcatgggtatatagtaagggtaggtgttattattgtccctcctatcttacagatgttaaggtccctaaagtgacacaggcagtaggtggcagacctaggactgaaactcaagcagattggttccagagtccatgaaaattaaaaa

SEQ ID NO: 201075 - DNA, 468 bp, Homo sapiens
agtgaccacagccccaccccaagtacagatgacagtattcactgatgtggatggttgtcatcttttgtgtgatgtgtgaacagaagtattgtagacagctctgcctttcaaatccccccgcggagctgaaccagcttctgttgggccagaaacttagacaatttagggggccctctttaagaaaatacaaactttgccagatgtggtggctgaagcctgtaatcccagcactttgggaggctgaggcttgtggatcacctgaggtcgggaatttgagaccaatatagtgaaaccccatctctataaaaaatacaaaaaattagccgggcgtggtggcgggcgcctgtagtcccagctactcaggaggctgaggcaggagaatggcgtgaacccgggaggcggagtttgcagtgagtagagatcgtgccactgcactccagcctgagcgacagagcaagactccgtctc

SEQ ID NO: 201076 - DNA, 261 bp, Homo sapiens
atgacgtcacccaatcaacacttacagggtggatttttagaaaagagctgatctccgttaccattatgacctagaaagcatcaaaacaactttactgaaatgtccaggcatatgatagaaaataccaaaacccacctgaagctttcagaatgagggaacatctctagcccatattttaggtctgacaacaggtatctaagagcattttgttttttcttttagagataaggtctcactatgttgattgggttgacgtcagac

SEQ ID NO: 201077 - DNA, 477 bp, Homo sapiens
tgtatttcaattggaaataaacaatgaattattttttagtatacatatgtcccacatgttgcatggcacctatatatactagaaaattatttgttgttgatctgaaattcgaatttaactgggcctcctgtgttttatttgatagtcctaaaacctagaggacctgtgtttaaaaatctgtctgccctatcgcaaggacagaaaaccaaacaccgcatgttctcactcataggtgggaattgaacaatgagagaacacttggacacagggtagggaacaccacacaccggggcctgtcgtggggttgggggaggagggagggatagcattaggagatatacctaatgtaaatgacgagttaacgggtgcagcacaccaacatggcacatgtatacatatgcaacaaacctgcacgttgtgcacatgtaccctagaacttaaagtataataataaaaagaaaataaaaataaataaat

SEQ ID NO: 201078 - DNA, 534 bp, Homo sapiens
aggttctgctttaatagatctggggtggggcccaggcattgctattgtttcaaaggtcccaaaggtgattccaatatgaagtcagggctgagaaccactgatataaatgtttaagacctgaacacctggaccacattctttgcgctccagtaaaataaggaacaccagggcaaatgtggcaactttatttactataaaaatgttgctcattgtattccacaatgaaagaaatttctttctagtatcagagacatgaagagttatacaactcctgaaaaaaaaaatgggtttttgttgcacagacactctgccttgctcctaaaatctttacaggcaaattcatggctaatgtttagcaaatgtggcatttattttgtggacaaacctcatgccattttttatcttttattgcctagctttgttttaccctgtcaccaaaatcctcattttttttcatgaatcacaagctgtctttttttttttactagtcttcttaaattattttggcagctatttgaaatgcaaaaaaaaaaa

SEQ ID NO: 201079 - DNA, 436 bp, Homo sapiens
gggacaacagaaaacttcccaacactccacctcctcctcgggcgggaccaaggcctccgtctcgcgcaccgcctgcatgaacacccggtccaccatccgctggctcttggccatgacctccgggaacggggagcgcccctcgcggccccgcgccgtcagcacctggcgcccgtcgtccgggtcggcctgggtgcccaccagcacccgcgggacggccccgggttcccacggccggcgcaggcgcttgctcggcggcctcacggcccggaacgaggcctcgctgcacacgcccgggagcaccgcggagccgtcgccgtggcggatgtccaggtcctggagcgtgaccaggtgctcggcgcccgccgcgtccacgacctccagcaacgcgggcgccgcgttcgcctcgatctcctcgcggagccgctcctccgcccac

SEQ ID NO: 201080 - DNA, 824 bp, Homo sapiens
tcagcctcccgagtagctgggattacaggcatgcaccaccaggcctggctaattttgtatttttagtagagacagggtttctccatgttggtcaggcaggtgtcaaactcccgacctcaggtgatctgctcgccccagcctcccaaagtgctgcgattacaggcatgagccaccgtgcccagcctacaggtgaattttttaattagcttcaaattgaccgacattaaatgttagacacaagaacgggctacactccatgccacatgaaatgcaattgagttgacgtgcaggtctgtcagaggcaggaaacaaactatatatgaccttgaaggaagagttgcatttgagcagcgagagcagagggggaggatggagcagtaagttggaagtacgcaagtgagcaaaggaattgagaatcaggggaaatggagaggagtctttctggaatgtgatgaattgaaaggcaatagcttctgataggatctaaaatgtgggttaggaccagatcacagagtttacctggaggactgtgagtttggcagaggcaagggaagccattggagatttagcaggggaatggcagagtctaaattcatttgagaaggagtcccctggcagcagtaaatagggcaagtggttaggaatggggagaatcttgctggcactcatgggaaacatggtggcctcagcatgctggctgcggggcaggaagggcagatccggaggaagctttatagaggaactcagctgcactgtgccatgccgaaggctactggctgcagagggctgcaagcactcgaaatgtgactgggtcaaattctgaa

SEQ ID NO: 201081 - DNA, 197 bp, Homo sapiens
gtagtctagagtatccccaagcttcgacgtgtaagacaactcgagtatagatcgtttaagaattttacgaggccaggcgtggtgacacgcacctatagtcctagctagagtgagatagagtgagaccctgacttaaaaaaataaacaaataaataaaatatactggaatttaatttataggtatgaatgacacagag

SEQ ID NO: 201082 - DNA, 510 bp, Homo sapiens
ttgtcggaggggattggtgaagggattggtctaggtgacctgcagagtcctttgcaattctcagatgccttcattctccgattgcttgttcacatgtaaaaactcataatagtcattttgagccattctgtgtgtgtgtatatctatatatagtgttatatcatgattgttattggatcacattgacgtatgttacaggaagtaccaaggttggaggttacagaaagttagaactaaatttgagctttttaatgattagaacatatctttgcttcttaatcgttatactaattttccaaattcaactggttttattatatgtgataagaaacggttacctattcttagttggctctgccttttcagtcactttttatcaaatatctctggctcaccaggagacgagtagtctagccatatgtaaataagtagaagtttcaggcctccctgagcaggaaggtaaagtccagtgatactgacatatccttcctactcctccccttccccacc

SEQ ID NO: 201083 - DNA, 590 bp, Homo sapiens
agacttgcggaaattatgtttgagaagagcagctggaactggagatagttttgagttccctggaggacacaataagttctgaaggggggttagagtcatgtggtccccatgaactctcaaaaccagtttaagctccattcccagtcaaagccctacaccaaggagacactgctggggatagaatccacattaaacaagatggagataatgagggcaaaggaaaaaatgtcagatgaaagtgggagaagataaaagcacaggagatcttattcatgagtctatattttgggatccttcatgaaaagggaagagaactcttattgaagtcagaaaagctactccagtttccccaaagttttttattttacataaaaacgagcagtggacagggatcatagtcaaaatccccacagagtttttataagagaaaagcataaggagccgaatattattactgcagacaatgaaagcatgccagaaagaaatgtccacaaaataaatgaaactataacttgtttcagaataatcccagagaaatttagaaaatgatacaaacactaaagcacaatgtaaatctgaataaggaaaaa

SEQ ID NO: 201084 - DNA, 614 bp, Homo sapiens
agttgttggcagtgtgatagtaacgggaagtgaagccactcaaaaatgcttttgtcagacttcaactcacaacccagacctttagagcagggggaaggtctgccccttcccctcatcggctccctggcttggctgctgtgcccttggaagggagggccttggtgtgggggagcagaggtggaatatcccccagttcccttatttggccccaaagggtcttattgatgggaggattttctaggcatgtaaaagtgagttcgaacattcagacttcactgtttgatttgatttgtttatgcctgggaatcctttgtggctttttgtcaataggctgggagagggaacctagttggactccagctgtccggggtgggggcttcttagaacagccccgcagccctctcggtgcatctgtgtgatgttgtgtaggactttccccttcagagtcctggggagcattatttccaccctgtgttggatgcaggacaattcatacacattttgattctcagtgattacactcttgagagagagaagacagacttacgatttagatacagctaatttacttaggggccctacctgaatcggttttcatcctgtaaaattctccc

SEQ ID NO: 201085 - DNA, 546 bp, Homo sapiens
agtaagttacagggtatgtctgccttaccagttattcacaaaaacttatatgaaacgcagtcctcctcagagtcattcaggaatacaaactgaactgtgtccgtattatatctttcattaaaagacactgtaaaaacagatacatggggttcaggaaatgtgagggtcacacaggggcacggaggccaaaatccaatggagaagtgaaacagccttttttccaaaatcaaagtagcactcaaaaaaaccgtagtgcataaagaattgacgctgcagtttcattttttatttcctcctgctgtggacagactgtttcgctggcggaatgtcggttacctaggtgacagctccacagccatggcgactgctccaggccccacagacgctcagggccgagccccggcctgtggatgccgatccctggccactctacccaccagagaagttccagggagaaaggaacgctgccaaccaaagaggtcattctaaacctcggcaaactggggctctgctgcaaaatttaaaaaaaataaaaatgaccataaa

SEQ ID NO: 201086 - DNA, 324 bp, Homo sapiens
atcatagtgattaacagtaagtcttgtttgtttgtcaaggatctctacttcttgacacaaatgaaccctgtctttaataagataagatatttatttttgtagatgagaagtgtaactaccaccttggacctcagggccctaactaattacagctgttactggacgactcagactttgtgcctaaagccatcttagagataacagtttatagaagccatgacattagtgtttattgcattgaattaagcccagtgatataactatacaagaaaacaagtaggggtaccttttacaaagagcaatccaataaatcttaaaaataac

SEQ ID NO: 201087 - DNA, 221 bp, Homo sapiens
gatgtgaggtcactccagaggatccgatgagtgtggctggagcctaacaggataagaggagactggaaccagatcatgcagggtctttgtggctcttgataagaaattgggttttattccaagtttaatagaaactctccaaaaggtcctgaataggtgagtgccatgatctgatttgcttccatgcggagaaaggactagatggaataagaaggttgttg

SEQ ID NO: 201088 - DNA, 1991 bp, Homo sapiens
ttcccaggacaagatggatttattctaataaagggagcagagatgggtgcattggtgaagagacgtgggtgtccggtgagactgcacagtgggagggtggacacacaggacagctggcagcaccgggtgcacggtttcctcagaaaaatctactaggttatggtcttgaccactctcctaacctttctcaatgatccatttttagaaaaaacctcatttgatggcggaagatgaaccttcaggggccctcttgaagccgctggtttttcgcgttgacgagaccaccccggctgtggtgcaaagcgtcctcctggagagggggtggaataagtttgataagcaggagcagaacgcggaggactggaacctgtactggaggacatcctctttccgaatgaccgaacacaacagtgttaaaccgtggcagcagctaaaccaccaccctggaaccaccaagcttaccaggaaagactgtttggccaaacacctgaagcacatgaggaggatgtatggcacttccctgtaccagttcatccccctgacgttcgtcatgcccaatgactataccaagttcgtggctgaatactttcaggagaggcagatgctgggcaccaagcatagctattggatttgcaagcctgctgagttatctcgtgggagggggatactaattttcagtgactttaaagacttcatctttgatgatatgtacatagtgcagaaatatatctccaatcctttacttattggcagatataaatgtgatctccgcatctatgtttgtgttactggctttaagcctttgaccatttatgtttatcaggaagggttggttcggtttgccacggaaaagtttgacctcagtaatttgcaaaacaattatgcccatttgaccaacagcagcatcaataaatccggggcctcttatgagaagatcaaagaagtgattggtcatggttgtaaatggacgctcagcagatttttttcctaccttcgtagctgggatgtggacgatctgcttttgtggaagaaaatccaccgcatggttattctcaccattctcgccattgcaccatctgtcccctttgctgccaattgctttgagctctttgggtttgatattttgattaatgacaacttgaaaccatggcttttagaggtcaactacagcccagccttgaccttggattgttcaacagatgtgttggtgaagagaaaacttgtccatgatattatcgacctgatttacttaaatggtctaagaaatgaggggggagaagccagtaatgccacacatggaaattccaacatcgacgctgcaaaaagtgacagaggtgggcttgatgctcctgactgtcttccttatgattctctttcgttcacaagcagaatgtacaacgaggatgactctgtggtggagaaagctgtgagtgtgcgtcctgaagctgcacctgcctcccagctggaaggagagatgagtgggcaggattttcatctgtcaacaagggagatgccacaaagcaagcccaagttacggagcaggcacacgcctcacaagacactcatgccctacgcgtccctcttccagtcgcactcctgcaagaccaagacctccccgtgtgtcctgtcagaccgtggcaaagctccagatccccaagcaggcaactttgttcttgtttttcctttcaatgaagcaactctcggagcttccaggaatggattaaatgtcaaaagaataatccaagagctccagaaactaatgaataagcaacattcctaagtggtaaaaaatcaaatcaagaaaaagtgacatggatttttaaaaaccaaggatcctgtcctagagaaagcaatagttcaagtccctacctgtgccaccagcatgttaactatgacattgggactgaagatgtggccatatgtataaatataacagctctgacaaagcacaatatgttcaagtggtgattaaactacattacatcccatgt

SEQ ID NO: 201089 - DNA, 2066 bp, Homo sapiens
agcctccgcgcatttcagctggcgctgcagctgctgcacagagacccacagaggccaccctcggaaccagcgcccaatgagagggcgggacctgtgttcctccacacaaagccaggcgctgggatctttgagaaccaccaccccagcctttacccttaacattccatccgaggcaaaccacactgagcagccgcctgcaggcctgggagcaaggctacaggaagcaggtgtttccatccctcccaggcgaggccgcccaacaccaacactggagaagaagaaaaaacctcatttgatggcggaagatgaaccttcaggggccctcttgaagccgctggtttttcgcgttgacgagaccaccccggctgtggtgcaaagcgtcctcctggagagggggtggaataagtttgataagcaggagcagaacgcggaggactggaacctgtactggaggacatcctctttccgaatgaccgaacacaacagtgttaaaccgtggcagcagctaaaccaccaccctggaaccaccaagcttaccaggaaagactgtttggccaaacacctgaagcacatgaggaggatgtatggcacttccctgtaccagttcatccccctgacgttcgtcatgcccaatgactataccaagttcgtggctgaatactttcaggagaggcagatgctgggcaccaagcatagctattggatttgcaagcctgctgagttatctcgtgggagggggatactaattttcagtgactttaaagacttcatctttgatgatatgtacatagtgcagaaatatatctccaatcctttacttattggcagatataaatgtgatctccgcatctatgtttgtgttactggctttaagcctttgaccatttatgtttatcaggaagggttggttcggtttgccacggaaaagtttgacctcagtaatttgcaaaacaattatgcccatttgaccaacagcagcatcaataaatccggggcctcttatgagaagatcaaagaagtgattggtcatggttgtaaatggacgctcagcagatttttttcctaccttcgtagctgggatgtggacgatctgcttttgtggaagaaaatccaccgcatggttattctcaccattctcgccattgcaccatctgtcccctttgctgccaattgctttgagctctttgggtttgatattttgattaatgacaacttgaaaccatggcttttagaggtcaactacagcccagccttgaccttggattgttcaacagatgtgttggtgaagagaaaacttgtccatgatattatcgacctgatttacttaaatggtctaagaaatgaggggggagaagccagtaatgccacacatggaaattccaacatcgacgctgcaaaaagtgacagaggtgggcttgatgctcctgactgtcttccttatgattctctttcgttcacaagcagaatgtacaacgaggatgactctgtggtggagaaagctgtgagtgtgcgtcctgaagctgcacctgcctcccagctggaaggagagatgagtgggcaggattttcatctgtcaacaagggagatgccacaaagcaagcccaagttacggagcaggcacacgcctcacaagacactcatgccctacgcgtccctcttccagtcgcactcctgcaagaccaagacctccccgtgtgtcctgtcagaccgtggcaaagctccagatccccaagcaggcaactttgttcttgtttttcctttcaatgaagcaactctcggagcttccaggaatggattaaatgtcaaaagaataatccaagagctccagaaactaatgaataagcaacattcctaagtggtaaaaaatcaaatcaagaaaaagtgacatggatttttaaaaaccaaggatcctgtcctagagaaagcaatagttcaagtccctacctgtgccaccagcatgttaactatgacattgggactgaagatgtggccatatgtataaatataacagctctgacaaagcacaatatgttcaagtggtgattaaactacattacatcccatgt

SEQ ID NO: 201090 - DNA, 282 bp, Homo sapiens
ttatgtgtcaaattacccctcaaacactagggatagtactggaaactatctagtaaacatgcagaaaaacatttaaatacattgtagtcagtgctttcttagataaatagggtatttgggtagcacagaagatcacttagtgtaccctgtgttgaaggttgggactaggtgatcagggaaggctttccagaagaaatactaagttgaatcttgacaaactagctgggattaacaggcaaaagtggtttgggcagggaggcatttgagggaatgataacacag

SEQ ID NO: 201091 - DNA, 218 bp, Homo sapiens
catctgtatagttgagaatcagcccaaaactgtacatgaataaactacataaacaagaatattgagataaatactctttggcattagtgaaacttaaacagaacaattagaggattgaatcgttttgtgttaatgcagatgtactcaggaaggaaaaatatctttttctcttttttttttttgagatggagttttgctcttgttgcccaagctggagt

SEQ ID NO: 201092 - DNA, 105 bp, Homo sapiens
taagatgtcaatattactcaaagtgatctacagattcaacataattcctagcaaaattccaatagcttttttatgcagaaataaaaaagctaatgcttacattca

SEQ ID NO: 201093 - DNA, 193 bp, Homo sapiens
aggtattatcatcctcatttacaaatgaggaagttgaggcatggagaggacaggtaactcatccaggatcacacagtaataagtgaaaaggctaggatttactttcaatctggctccagagtctgtgcctttaactactgctctgttattagactcaacaataggtccattacaaagaaggtccagaaaaatc

SEQ ID NO: 201094 - DNA, 959 bp, Homo sapiens
acctgatgtcactcaaagtaagtcacaaaagggcaccaagggcaggtatctctggagatctactctaataactgtctcttggacccctcctggagggccatgcatggtctcaccccctacccagaaaatgacattatttagaggcaggtgatctggatgcagggtcatgggaggggctgtcgatagaactggggggaactttgacctggcagccgatatctgggcacagatatctgaatgaccgtcacaagactgtcacaggagaaagcaaacaagcagcatgtgtgtggcccagggctaagccaggaccaacacagaaacagtgaaaggaatatttgggcttaatatggtaagaagttaattacgagagttacaagagctatataataattgtagaaaacagatctcatacacacagacattaaaactactccaaaatcctacatcccagagagtaaatggtattaaaagccaggggctaccttatgaagtagtgagggtcccagggcaaagatgtgagagggctgcagctccgggcgggagcccctctttagagtgataaaagcgactaagttaggcagttgttacataaatcccaacggtggggcctggtaggacctgtggtggcagtggcgggctccagtgagggcccagactccttttcctctagaggaaggcctaagcttttgtgtttgaactttggctgcccggaggccctttctgctttgttttccagccctgactccagaggacttaggctggggaggtggggcttatgccctattaccttctgaatatttcttataacttgtacatttcttcttttcttttctgccctattttggtgggaagaaatctagaaaaaatgctctccctatacctagtttggcccctcgtctgccttttctgcccctaagcagtgaccactgtcagcagatctcaggggaaccggcagaggc

SEQ ID NO: 201095 - DNA, 477 bp, Homo sapiens
tgaggaaggaacagagaccaaaacatggatgactcatgttagttcttgactggttacagtttttcaccatttattaatctgcattttataatctgttttattcttacaatcaatttaaacaagaatttctaggattccaataaaactggacctaattccttgcctgttttttccttcctacatctctcttcaaaacaattctcagtaacctattttcatgcccagccataactcaacagaagccacccagaataatgaggtggacccctaaatacctaagaactcccctatatctgaaacataaccactgctgcacccattctgaaagagacattacctcttggtagtgctgaccactacttcatttcccatttgctaatcaagaagcaatacttcagatgagcccatgtcaccaatccatagaagcatttctaaaggtggtccaatttcgcccaaaggtttgaaagcacactaccc

SEQ ID NO: 201096 - DNA, 363 bp, Homo sapiens
tttaaacttcttaattcctcagtttccttgtctataatggaaatgtgatgtcataccacctcttagagttcttaaggatttagtaagttttagatgtaaagtacctataacagtgcctggctcatattaagcactgtagctgtagtacagccatctcttattatcaccgtcattacttgaggcagagctttgaagccacacttgctgaccctctggttgttccttccttcagcatccccagctgatatttgcccagcacttcacagcttaaaaattcaaggagcctatgcctcattcaaacttttcagctcacctaaaacgatggtcacctcattttttaaaaaaacttactggggtgaaatg

SEQ ID NO: 201097 - DNA, 432 bp, Homo sapiens
cagccaactagatggtgatggagttggaaaggcatttccagcagtggagagagggctaagggaactggggacgtcatgggaagaaaagagaagacaaatatttcagtgaagcaaaataatatgtattgagcagtctatccccaaatctaccattatatccttgccaaagaaggcagtgcggatcaagtaaagagtaagttgctacataaagaatacacaggccagcctgagcaacatggtgacaccctatctctatagaaaaatacaaaaattggtcgggcatggtggtgcatgcctgtggtcccagctacttggaggctgaggtgggaggattgcttgagcccagaagtttgagcctgcagtgagctgtgatcatgccacagcactccagcctggatgacagtgagaccctgtctcaaaaaaaaaaaggag

SEQ ID NO: 201098 - DNA, 425 bp, Homo sapiens
tcgggaggctgaggcaggagaatcccttgaacctggaaggtagaggttgcagtgagccgaaattgtgccactgcactccagcctggatgacagtgtgagagtctgtctcaaaaaaaatatatgtatatatattgttaagactaaatgtcttaataaataaagaggctgggaatggtggctaatgcctgtaatctcaacactttgagaggtgaggttgaagtatcacttgagcctaggagttgaagaccagcctgggcaacataggagcctcccatctctacagaaaaatgttttttaaattagctgggcatgatggcatacgcctgtagtcctggctactcaggaggctgtggcaagttgatcacttgagcccgggagttcaaggctgctactgtaagctgtgatcgtgccacttcactccagcc

SEQ ID NO: 201099 - DNA, 448 bp, Homo sapiens
ccagggcttaacagacccatttcccaatagtttgttcaaggacaagccctcacaccgtgtgactagcctcccacacactgggtttgtatgcttcctttcctgttctccttgagccaggcctcaccagcaaaaatgcatctagccactcaaaacgccctcattacaactcacccagcaggattcccacatgcctgttggcatgtgcacacatatactaaaaatgcatgcaatgtgatgcagcccgataaagcgcgtggctcccttccacatacgttcaacgaacggtatagcagagtggaaagagcaggatttgtgggactggatgggtgtgggttcaaagctatttccttcttttaacagtggtgtgatcttgagcaaatctgtaaatcttggtccccttcctccaaaagatggtaattataatacttagcttttagtgttgttctga

SEQ ID NO: 201100 - DNA, 288 bp, Homo sapiens
aacagtaataataacaatggcagcgaccattgctgcagaggttactgtgtgccaggcaccattcccagcgccacccgtcattctcagtcacgggagatggctgctgttttcctctccattttgccctgaggaaactgagacccagagtggttaagtcactggcccaagccacacagccgggaagcagcccctgaggctggttcctgactccactgcctctcggccctgtggggtcaaccctctgtccccctctccgctattgccatcttcacccccagagctccacac

SEQ ID NO: 201101 - DNA, 438 bp, Homo sapiens
cagataggacccaagcaaggggttcatggagagaaatccttcatcaggaagttaagggtcctccatcggaggggtgagagcaacaccaaaccttcatgttcctgaaactatggcctcggcgtctgacagacccacaccctcctcagtgaagggtatagctgacactccttcccggggggtagggagaggccggcgggctggaagggctgagcctccactgcgggtgagaagtgctcaacaagttcaacgtcctgatatccagtggacctccgtgctggaggctggtgatccagggaagggatccaccaggaaggggtctggcttcacaggagtagggacctgggggttaagcagagcctttccattatctccaaccccccaccccgagacggagtctcgctctgtcacctaggctggagtacagtggcacgatctcgg

SEQ ID NO: 201102 - DNA, 1116 bp, Homo sapiens
gggaaacggacaggtagcagagcagtaagagagactttcaccatcttttgatttgaaaactgcattaatgtaaaaccattccaaaagagaacttgcaaagtataaaatgcagattcccaagtgcctgaactcctagtgggtagatatgaattatggcacatagaaatagatatttattccccggatgatcctaaaagtaggtattctgtgggccaaatattgaaaaacttccctgtgtttcattatcatttataaaatggaacctgaatttataccttaattcaaagtccacgtgagatcttaagagactgagtgcctgtcagtattagctactattaccaagcccaagtgattatgggaaccagatttatcccaaccagaacagctctttgccccacagacacacaggaaggacctggagaaagttaagggatgaaatgtgccaggaaggaagggccgctggaacagtggttcaccactacaagtggctttgccccccaggggacatctggaaattcctggagacctttttattgcccccattctgatggagagagttgctagcatctagcagggccaggccaggaatacagctaaacattctacagtgcacaagtcaatcccaacacacacacaccccacaccaaaaccttacctggccccaaatgtcaatattgcctaggctgagaaaacctggcctcgaaacaccaaggctgggaggagatgtgaccaacaagagtcctgaaaggaggacatggttaacgaccgtgttcaccagaccacagcacattagaaccagggagcctatcaggagacttgagatggtagtttcaggataaacaagaggcagagctaccgtctagagtggacggtcaacttgcagaactcattactcatatgagaactggtagaggctgaaacgctaaatagtttccaaaaatttagataacttttttttctttttttttttttgagttggaatcttgctctgtcacccaggctggagtgcagtggcacgatctcggctcactgcagcctccgcctcctgggttcaagcgattctcctgcctcagcctcctgagtagctgggattacaggcataagccactgcaccca

SEQ ID NO: 201103 - DNA, 668 bp, Homo sapiens
gcatgagccactgcgcctggttgcctgcccctcttttctgtactccacgtgctgtcctggtccacctcactcctccatgggcttcttgagacacctgctgacctctagccggacctgagcttcagaccctctctccagcaggaagggctgcagactcggcctgttcccagactcggccttcacctcccttctcctcctgtgtttaagtggatggcccctctatccatccaggtcccatgccaagaaccagtgattctagtggcccaccacctccctctcctgccacccttatacctgttcagcctcctaaagagggacaaactctgtctctgcgtgcactggcttgcctgccctgcctttgtcactccaagggagatcttgagacccatgccctgaattggtgctggaatggtctttgggagtcaaactctgatcatgccctccagtggctcctctcacactaaaatcaaaactctttaaaacaagctgagtgcagtggcttacacctgtaatcccagcactttgggagactgaggcgggaggatcacctgaggtcaggagtttgagaccaacctgaccaacatggtaaaaccctgtctctactaaaaatacaaaaaattaggccaggcgcagtggttcatgcctgtaatcccagcactttgggaggc

SEQ ID NO: 201104 - DNA, 249 bp, Homo sapiens
gcatgagccactgcgcctggttgcctgcccctcttttctgtactccacgtgctgtcctggtccacctcactcctccatgggcttcttgagacacctgctgacctctagccggacctgagcttcagaccctctctccagcaggaagggctgcagactcggcctgttcccagactcggccttcacctcccgagttcaagtgattctcctgcttcagcctcccaagtagctaggcctgcaggaacccactcg

SEQ ID NO: 201105 - DNA, 469 bp, Homo sapiens
tatcttgcatgtaatagtttctctagtgcctgtgacttagggcaagtcacttaaacgttttttgaattgccttatctgtaaaatggggcagtattacttggagagtaatattcagaatctcaaataagaaaattaatatggaatacttttaaaaaatgaagaattatgtgaataagggattattaggattactataataacagtgacaattactaaattactgtttgcacccacagcacctaacattgaacttgtgagaagagcctggacatatcttttgactagctgagaaacgtatttattatttaataattttaaaccaatagaagcaagttacattacctttagaaactggtgtgggaggagttttatcccatgataggagttggccaagagaattctgtctataatctctactatgttagcagagctaaaagtggcatcagttattgaaacccattgacaagct

SEQ ID NO: 201106 - DNA, 256 bp, Homo sapiens
catcattcccacttctctgccaagttgtgcaatgcaagaagctggcttgatctggaatttaggataactcaggtttacaatgtcgctgtgatagttgatagttgatctgttagcagcactgacagtatggcagctcttgggagggtcaactctggcatagcctgtagacacctgagtgcctgtcaagttgattttgcagcaagtaaaaggtgtttatctaacacatcccccttggcagtgcaggctgacttcctca

SEQ ID NO: 201107 - DNA, 315 bp, Homo sapiens
gcaagaatcttctattttatttaaatgaatgccatcttttttagtgcaaagataacattcatcctcagagctacaattttcaagattggtgatgattggtatgctaaccaaatttccagaagctcattgatttttttaccagtgatatgagacagcacctttattttcacccatgtcgtgcaagcgatgttcatagtttcacatgtatgtgaggatagatactagagaggtactttatatgctactttatttaataagctaactctttatacattaaaaagtatcttagagttccacagtggagttagaacagga

SEQ ID NO: 201108 - DNA, 418 bp, Homo sapiens
ctgtgggaaacaagcatgtatagcagtctgcctattgagtattgtactgaaattaagacacattaaaatctgtatgaaactttttcaaaagagactattgaaaaattgcaacttataggtcacataatgcctgcagacgccctctatgtcatttgtctaaaatgtctgccaacttgcagctgaccattattgctgtcttgaaagcagtgatgaagtaacatgaagtaactttagatagggaattatgagcactctctgtctaaagtagtagccccagtagaaagaacccctttgctcaccctcctggagggtgggcaggttagatctgcccaagtaaagagctgaaaaatctcattgtggaaaagacataaatgtttaattatttgcaataaattttttaaaaatgtagcagtttaaa

SEQ ID NO: 201109 - DNA, 293 bp, Homo sapiens
tgtccatcgtaaagtgcgcatctggaggccattgcgaacgtatggttgttggccgtcgcgatagacacgtagcgattggaaatgcctcctggaaacacagccagatgccaagagctggcattcttgattctagcccgggtgtgtaagtctggcttgctcgctaactttgctcaatggtctgacaagtcatttagcctctctgagcttctgttttcccatctgaaaatggggataagaaggcgtaatctacagatattaagaggagctcactgatggaacctaccgcttgtttc

SEQ ID NO: 201110 - DNA, 711 bp, Homo sapiens
cttgtggttagaagagaggttattttattaagtggtcatctctctggggcacagggtctggtgccttccgtagagtgtgacagccccactgtccaaggaggagaaaagctgcaggaatgtggatatcgagatgtttaggaaggggttgattgccactagagacagctgagattctaagaccttagaacataaaaagggtatagttctaagtaagcatccaggtaagcatccaggccgggcacggtggctccaccagtaatcccggcactttgggaggccaaggcaggtggattgcttgagctcaggagttggagaccagcctgggcagcatggcaaagccctgtcactgcaaaaatacaaaaaaaggctgggcgcagtggctcatgcctgtaatcccagcactttgggaggccgaggcaggcagatcacgaggtcaggagttcgagaccagcctgaccaacatggtgaaaccccgactctactaaagatacaaaaaaaaaaaagaaaaaaaaaaaaaaaaaaaaaaaaaaaaaaaaaggcgggcgggcgtatttcttgtgtggggggggcgaaaaaagaagggtatagggacagggggccagggaccatgggtggtcccccgaaccccgtttttttaaagagagggggtaaaaacggggccgcccccacaagaggggagcagtttaattcagaagggggcggggcgcccga

SEQ ID NO: 201111 - DNA, 735 bp, Homo sapiens
gtttcaaggagaaaacaagactttaaattatctttagttattgctaacgtgtcttaaaatagtcgtgacgaatggttataagtagtaaccatataagcaagcagtcctgtcagactgttccagcacagtatttcagctcactgcttatatacaggtggtagggttcagtacagtgcaaaatcacatcaaacttgctcaaaagttacattcaagcagaatctcatcaaggtttaggtgtaagagtacatctggttatggattacagaagcataatcactaatcccatcagacatctcatgtgtaagaaaaggcaaggactggggtcatttaaggaatgtagtgactcaggcaagcgatgtgggggtgccctgtgccctgttttgtcttcaaggcatctttccagagagttgcatgtcgtcacagggtcaggggctttgtgaaatgatgctggcaggcagaaatgagcagacctgggttctttttgctgctttgtctcactccaccacctggctcagctctctgcatgtagtcaacactgactgcactgggaggccatacagatactacatgagagtgtgatctttggaaccacattgattgggttgggatcctggtgccaacacctatgagctgtgaccttggcaagttacttcatctccaatgacctcattttctttattggtaaaataggaataattcataggactgtggtggttttacaatgaaaggtaaagc

SEQ ID NO: 201112 - DNA, 191 bp, Homo sapiens
cttttagaagggacactctgatgtacagctatgagagggcatatggttggctggccagaactgtgcataatgtaaagcctgtcctatctatgttacaatttaaaatctggggatgctcacaaaattgtcacatagaaaagcatgcaaaaaaaaaaaaaacttttcttgtgtttccttgttataatcactga

SEQ ID NO: 201113 - DNA, 329 bp, Homo sapiens
agcataaactattagggaggggcatttcaaatattagggcagtggttctcaaacttgagcatgctccagagggcttattaaacacagatgctgggcccctctcccagagtttctgagttgagagtgaggtagggtgggtttccctgctgataatttgcatttctaacaagctcccaggtgatgctgctggtccagagacaacactttgagaaacactctcttatgagatatatactcactatatatagccaatataaatcctgaattttcaaggatagttcctatatcttttcattttattatttatagtaaagcttattttttaaaat

SEQ ID NO: 201114 - DNA, 411 bp, Homo sapiens
cagtcttcgtcccatcaggaagaataaaggagattgtgaagaaacattctcagtttattggatatcccattactctttttgtggagaaggaacgtgataaagaagtaagcgatgatgaggctgaagaaaaggaagacaaagaagaagaaaaagataaagaagagaaagagtcggaagacaaacctgaaattgaagatgttggttctgatgggagcaagatggcgtatctcccatcagatagtggcccagcttgggacttgaccttcaaggccaactcagcatccctcctgtctctctccatccctgatcatcaggtataattgactgctttctcctccacttctcccgctagcaatactcacagtgaatgtcatggtaaggtgtttatttgccactgatgggaggaagtag

SEQ ID NO: 201115 - DNA, 331 bp, Homo sapiens
cgagccagaactcttccgccgtccataggatgcatgctcaaacacgctggaaaagctcttttacctcatggatagagactcaaaacacatttcaatattgtacctctttctttgctttggctgatgggacgaagacgatcttcgtatctcccatcagatagtggcccagcttgggacttgaccttcaaggccaactcagcatccctcctgtctctctccatccctgatcatcaggtataattgactgctttctcctccacttctcccgctagcaatactcacagtgaatgtcatggtaaggtgtttatttgccactgatgggaggaagtag

SEQ ID NO: 201116 - DNA, 510 bp, Homo sapiens
tttataattcaacctgaaaactatatatatatatgcatacatacgtagtttatagacacacatagtttatatatgtatatatacacgtagtctatatagtctattcatctttgtatagtctgtatacatatagactatatgtatgtgtaaatacatatatgaaccatacatatgtctatattatatataaagcttatatatacacacatctataaactacatgtatatagacatagactgtatatatgtatggtttatatatatacacatacatatacgtgtgtgtgtatatatatagttttgttttggttttgggggtttttatgagacagggtcttgctctgttgcccagactggagtacagtggcacaatcatggctcactgcagcctcagcctccccaggagctgggactacaggcatgcgtcaccacacctggccaatatttttggtgttttttttgttttgttttgtttttggtagagatgaggttttatcatgttgccaaggc

SEQ ID NO: 201117 - DNA, 218 bp, Homo sapiens
tatccttgttcttttatttttcaatatcatcaagttgttagttctaagttaacttacaaacttaatgcaacctcaataaaaatacaaagaaacctttccccactgcccctgccctgccctgccccccaaagtgctgggattacaggagtgaaccagtgcgcccggtccaaatgtcactttggtatcaccttatcaagatgtctaataggagggacctc

SEQ ID NO: 201118 - DNA, 430 bp, Homo sapiens
gttgcctctgcccaccacaggtaatggtatattgtactcgacacctaggcaacattccgtagatgacctaacactacggatgcgagaatcccaagttagtgcggtagtatccatcctagaagtcgatcttggtgtcctgcaagtatgcgtaaatgtccaacgtttaccgatcgacgtatgacattcataaaaacatgggacctatgggaccatcactgtctgtagtccatggttaaccgaaatgctgttgggtggcacatgactgcatgttcaaaactgaccttcggatcttcgactgtcctacttcaaacctgcttctctcaaagtcttactcatctcagaaaatggcaattctattcttccagttgtccgggccaaaaacttacaagaaagcttcaacccctctttcttttccataatttatatccaa

SEQ ID NO: 201119 - DNA, 640 bp, Homo sapiens
cattaattcatctttttaacactacttctggtgactttaatccacacacacattgtacgtgagtcatactgatgctgtgttattcaattcattatattttgaaaagtactctatggtcaaattaactttgagaaacacggtttaagcaattttattgtttgcccaatttgaattttcgcaggcttctaacaggatacttaaattaatagatgcttttttacaaatttcacatatactcataggaagaaaacaagctatccaggggtgtcagagataggtagctgacaggcagacagatgccaagaatttgctccacaatttaaagggctacaatcaggataacagaagtgtgagaaacagactcagacagcttaagggtttttgttgcccagaaggaataccaatggaagggataccattgtccatttctatacctttctgttctgaatagccatatccaagcagctttactgtgtgagattcctggagaattagaagtactcccacttccctagatgattcatttgtaatgccaacttatgtgtctgaatgcatgcaaaggaggttgagggtcttctgaactagcggaaaaaaactgaaataacattattttctgagaaggtaatctattttaatccat

SEQ ID NO: 201120 - DNA, 432 bp, Homo sapiens
ataataacattcagttagttatttggcaatttatttaacaatatttaatctctggataggcttatcaagttaacaaaacattttcacattcatcatcttctttaaccttagtgacaactaagtgagataggattattattctcaaatcaggttgctctacttacttttttcctccttaaatccctatttaatctcataaacctggatttcctaaaactttgcagtggctttcatgaaagaattaggctttgtgttaaaaaaaaataataataataagggctgtcaatgacaggcacagatttcagatttcatcacctatccttccttctttcctttagtccatcagcaaaggttaggaagacagatgggttttcggtcaaagggagtcgagaacagcgtgggcagcatgacataggtttatcttccttttct

SEQ ID NO: 201121 - DNA, 189 bp, Homo sapiens
gaaaaatcagcagattatattacttcctgcttaaagtatatcagtggcacctccaaaggtcaagttcaagctccttaaaatagcaaacaatgctccctcacaattatagccctagccagtgtttcctgtcattccgtacaccaaattacacattttggccaactcactgattttggcacttgaggattc

SEQ ID NO: 201122 - DNA, 153 bp, Homo sapiens
aaagcacttagtactgtcaccaacaccttgagtgccaccctgagtgtaacatcggaaccccattcagagagttgggtctgcattcctaaatcagcatgtacaattaggatggttaaagacttgctgtattttacatctgtgaaagggtatgat

SEQ ID NO: 201123 - DNA, 298 bp, Homo sapiens
catttgtgtgttgagagaggtgggagaaggtggtacggtatgaagtggagtctttattcagggtctaagctctcgtttcctgggacagtgagaactttgtcttttcggaaagcttgcctgaagtgtttgcctgttttatagcttgaggtcagggaagaagaacaagatatatctgagccgcttcctccctgagcctttcatccctccctgctacctaagtctgcagcctctgcaccctttggctagattcctgctcaggagaaccaggtcaactcgcacacatgtgcacatacacaca

SEQ ID NO: 201124 - DNA, 1322 bp, Homo sapiens
cccaggcattctaaaaaaaaagaatcccaactgacatgaagcagtctaatgatagacaactgggcaccacaggcattctaatgggagagactcccagtcgattccagacattctaatttgagagaatttgggagatgccaggcattctcattggagatatcagcgaccgacctgcaccagactaatgatgaaaatgcatccacgaacccaggcattctaatgggaggggctctgggagacctcatgcagtctaatgaaaaagacacctggatgaccttagacgttctaatgggagagactctggtccaaccctagactgcctaaggttagagacacctggtcaaccccagacattccaatgaaagagactcctggcccaattcaggcagtctaatgatagagacaccaatgtcacactaagcattttaatgtgagagactcctggctgagaccaggaagtctaattatagagacacctgggcaaccccaggcattctaacgggagagacttcaggctgaccccaggcagtctaatgatagagaaacctgggcgactccaggcataataatgggagagactgctggctgacccaaggcagtataatgatagagacccctgggcatgctatctgtgaaaatgctttaggatgtgtggattagtctcaccaaatggaacctgtgtattgattcaccaggttgaaaacactcttgctgtagaatctataaagggatatttctaagacaatgtaggcctatagtgacagaccgtatattttgcaataaaaaatagaaacaagctatctgtgaaaatgcttcatgaaatgtggatttatttcaatgagttaaaactttgttttgattcaataggctggaaagcctcgttttgtagtatctacgaaaagaaatttctgagctcattgagactggtagtgaaaaatctaatatcctgtgataaaaagtataaaaacgctatgtgtgaaaatgctttgccatatgtgagttcatctccaacagttaaaactttgttttgattcaacaggttggaaacacttttactgtattatctatgaagaaacgtttttgaggccattaagtcctacactgaaaaactgaatatactgcattaaacattctaaagaagctaactgtgaaaatgctttgcaatgtgtgtatttatctcacagagttaaaccattgttttgattcatcagtttggaaacagtttctttgtagaatctatgaagggacctttcagaggccattgaggcctataataaagaaacaaatatcccacaataaaacaagaaacatatagaaacaag

SEQ ID NO: 201125 - DNA, 1029 bp, Homo sapiens
  misc_feature (926)..(926): n is a, c, g, or t
  misc_feature (942)..(942): n is a, c, g, or t
  misc_feature (946)..(946): n is a, c, g, or t
  misc_feature (948)..(948): n is a, c, g, or t
  misc_feature (955)..(955): n is a, c, g, or t
ctggacgacgtaactacacctcatctcttcaaggaagaggtgggaggatcgcttcagcctggaaggttgaggctgcaggtgcttgccactatgcccaactaatatttggaattttcgtatacgtggattccagaggggtgacagcaaaacgtgggaacatccagttgcaggaaaacaagcttaacacgcccactgattctacattatgctcctacctcccggcagcctctccaggccgagaactttctccagtcagcctctacagaccaagctcatgactcacaatggcctatttaggcccataccctacgtcacggcagcctccgcagatgagcctactgcctcacaacagcctccacaggcacagctccatcgttacaatggcctctttagaccccgctcctgcctcccagccttctctccaggccctgaacattctcaggtctccctctgttgtccaaggctggagtgtagtagtgctatcgcagctgactgcagcctcaaccttccaggctgaagcgatcctcccacctcaacctcccacgtggctgagactacaggtgcttgccactatgcccaactaacatttggaattttcgtatacgtggattccagaggggtgacagcgaaacgtgggaccatccagttgcaggaaaacaagcttaacacgcccactaattctacattatgctcctacctcccggcagcctctccaggcccagaactttctccagtcagcctctacagaccaagctcatgactcacaatggcctatttaggcccataccctacgtcacggcagcctccgcagatgaggctactgcctcacaacagcctccacaggcacagctccatcgttacaatggcctctttagacccagctcctgcctcccagccttctctccaggccctgaactttctcaagncgacctcagccaggcncagntntgcatcntggtggaccctccaggcccagcctcagcgctcccgtcaggagtaatcgggagactcaagagtcacctgaggagg

SEQ ID NO: 201126 - DNA, 1043 bp, Homo sapiens
  misc_feature (940)..(940): n is a, c, g, or t
  misc_feature (956)..(956): n is a, c, g, or t
  misc_feature (960)..(960): n is a, c, g, or t
  misc_feature (962)..(962): n is a, c, g, or t
  misc_feature (969)..(969): n is a, c, g, or t
gcacatgccttgggagctaagtggttgctgcccttgaccactgtgaagactggtgtgggaagggtcgctttggatgcacttgagcaggggtccccaacccctgagccatggagccgcaaggagccacacagcaggaggtgagcggtgtcgagtgagggagtgagggaagcttcgtctgtatttacagccactcccctttgctcacattcccgcctgagctccaccttctcagatgagcagcagcgttagattctcataggagaacgcaccctgttgtgaaccgtgcatgtgagggatcgaggttgcgctgtccttatgagaatctaatacctattgatctgttactttctcccatcacgctcaggtgggaacatccagttgcaggaaaacaagcttaacacgcccactgattctacattatgggtctccctctgttgtccaaggctggagtgtagtagtgctatcgcagctgactgcagcctcaaccttccaggctgaagcgatcctcccacctcaacctcccacgtggctgagactacaggtgcttgccactatgcccaactaacatttggaattttcgtatacgtggattccagaggggtgacagcgaaacgtgggaccatccagttgcaggaaaacaagcttaacacgcccactaattctacattatgctcctacctcccggcagcctctccaggcccagaactttctccagtcagcctctacagaccaagctcatgactcacaatggcctatttaggcccataccctacgtcacggcagcctccgcagatgaggctactgcctcacaacagcctccacaggcacagctccatcgttacaatggcctctttagacccagctcctgcctcccagccttctctccaggccctgaactttctcaagttgacctcaccaggcccagctcatgcttcttagncgacctcagccaggcncagntntgcatcntggtggaccctccaggcccagcctcagcgctcccgtcaggagtaatcgggagactcaagagtcacctgaggagg

SEQ ID NO: 201127 - DNA, 567 bp, Homo sapiens
  misc_feature (464)..(464): n is a, c, g, or t
  misc_feature (480)..(480): n is a, c, g, or t
  misc_feature (484)..(484): n is a, c, g, or t
  misc_feature (486)..(486): n is a, c, g, or t
  misc_feature (493)..(493): n is a, c, g, or t
gcacatgccttgggagctaagtggttgctgcccttgaccactgtgaagactggtgtgggaagggtcgctttggatgcacttgagcaggggtccccaacccctgagccatggagccgcaaggagccacacagcaggaggtgggaccatccagttgcaggaaaacaagcttaacacgcccactaattctacattatgctcctacctcccggcagcctctccaggcccagaactttctccagtcagcctctacagaccaagctcatgactcacaatggcctatttaggcccataccctacgtcacggcagcctccgcagatgaggctactgcctcacaacagcctccacaggcacagctccatcgttacaatggcctctttagacccagctcctgcctcccagccttctctccaggccctgaactttctcaagttgacctcaccaggcccagctcatgcttcttagncgacctcagccaggcncagntntgcatcntggtggaccctccaggcccagcctcagcgctcccgtcaggagtaatcgggagactcaagagtcacctgaggagg

SEQ ID NO: 201128 - DNA, 1010 bp, Homo sapiens
  misc_feature (907)..(907): n is a, c, g, or t
  misc_feature (923)..(923): n is a, c, g, or t
  misc_feature (927)..(927): n is a, c, g, or t
  misc_feature (929)..(929): n is a, c, g, or t
  misc_feature (936)..(936): n is a, c, g, or t
gcacatgccttgggagctaagtggttgctgcccttgaccactgtgaagactggtgtgggaagggtcgctttggatgcacttgagcaggggtccccaacccctgagccatggagccgcaaggagccacacagcaggaggtgagcggtgtcgagtgagggagtgagggaagcttcgtctgtatttacagccactcccctttgctcacattcccgcctgagctccaccttctcagatgagcagcagcgttagattctcataggagaacgcaccctgttgtgaaccgtgcatgtgagggatcgaggttgcgctgtccttatgagaatctaatacctattgatctgttactttctcccatcacgctcaggtgggaacatccagttgcaggaaaacaagcttaacacgcccactgattctacattatgggtctccctctgttgtccaaggctggagtgtagtagtgctatcgcagctgactgcagcctcaaccttccaggctgaagcgatcctcccacctcaacctcccacgtggctgagactacaggtgcttgccactatgcccaactaacatttggaattttcgtatacgtggattccagaggggtgacagcgaaacgtgggaccatccagttgcaggaaaacaagcttaacacgcccactaattctacattatgctcctacctcccggcagcctctccaggcccagaactttctccagtcagcctctacagaccaagctcatgactcacaatggcctatttaggcccataccctacgtcacggcagcctccgcagatgaggctactgcctcacaacagcctccacaggcacagctccatcgttacaatggcctctttagacccagctcctgcctcccagccttctctccaggccctgaactttctcaagncgacctcagccaggcncagntntgcatcntggtggaccctccaggcccagcctcagcgctcccgtcaggagtaatcgggagactcaagagtcacctgaggagg

SEQ ID NO: 201129 - DNA, 747 bp, Homo sapiens
  misc_feature (644)..(644): n is a, c, g, or t
  misc_feature (660)..(660): n is a, c, g, or t
  misc_feature (664)..(664): n is a, c, g, or t
  misc_feature (666)..(666): n is a, c, g, or t
  misc_feature (673)..(673): n is a, c, g, or t
ctcaacctcccacgtggctgagactacaggtgcttgccactatgcccaactaatatttggaattttcgtatacgtggattccagaggggtgacagcaaaacgtgggaacatccagttgcaggaaaacaagcttaacacgcccactgattctacattatgggtctccctctgttgtccaaggctggagtgtagtagtgctatcgcagctgactgcagcctcaaccttccaggctgaagcgatcctcccacctcaacctcccacgtggctgagactacaggtgcttgccactatgcccaactaacatttggaattttcgtatacgtggattccagaggggtgacagcgaaacgtgggaccatccagttgcaggaaaacaagcttaacacgcccactaattctacattatgctcctacctcccggcagcctctccaggcccagaactttctccagtcagcctctacagaccaagctcatgactcacaatggcctatttaggcccataccctacgtcacggcagcctccgcagatgaggctactgcctcacaacagcctccacaggcacagctccatcgttacaatggcctctttagacccagctcctgcctcccagccttctctccaggccctgaactttctcaagncgacctcagccaggcncagntntgcatcntggtggaccctccaggcccagcctcagcgctcccgtcaggagtaatcgggagactcaagagtcacctgaggagg

SEQ ID NO: 201130 - DNA, 223 bp, Homo sapiens
tgcactttaggacacagaactgtggggtcaagcaaagtccttctgaatgtggccagagagcctgggcagcctaagtcttaatgatctaccaagctgcacagaagcaaatcctcattctttgactccctcgggcccaactagacatgaagctgctgaagtcctagagatggacttttccagcttgctgatagttgagtaattttccagaaacaggacttggcca

SEQ ID NO: 201131 - DNA, 2779 bp, Homo sapiens
  misc_feature (2)..(2): n is a, c, g, or t
  misc_feature (4)..(4): n is a, c, g, or t
  misc_feature (6)..(9): n is a, c, g, or t
gncncnnnncccaaacagccttctgaggttggtaagggtattcagccatcttcgctttgcatatgagaagacaatctcaaagatttgaagtgtcccagtggtaactggcagaaggagaactcttagatctcctgacttgcacatcctgtcatctgctgtgttacattctcatctagagtctgctctccacacttgatccttgctacccctctacctgctgctgttcctctgagagttcatcttgcctttattttgagggagggaggggcaagcccagtgttagtgttgattttgccctcaaggaccctggcggggaagcagtagtgttcccattgtagaggccagaaaagctgcccagtgacacagccaggatcagtcatggagccatgataggccagagcctgagctcccagccactgaggaggggtggcagaggattgtttggccaggtctgtgtgggctgaaggcttggtgaccagggacgacatgatcatctgcaagaccaatgctatcactgccctgaggatgttcttcccccgaaagtttgcctccaatagcacaggcacctgcgtctcagatggtggtgacatctgagtacttggacttcatcagctgcctgtaggaggtgaggtagcaggaggtgagggcaatactcccttcagcttcagcaggtgaaaagtgtggttctcaatgaagttgagctagtgtgtgccaggtctccttctacagtgggtacgcgtcatacaggatcccatcaaagcgaccacctggcaggggagcgccacctccttccacaggactttcaaggggatgaccttgtgtggctgctgctgggtccagtcctggagcagctggaagatgctgtcattgcactccatgatccagtgttcctggatggcgacctcctgcaccttccatattcttgtggccatgccgaagcccacctctaagactcggccccctttggaggtggtgaaggcagcgaagggggttgcagtaggggcgctcttgctgcagatggagccccaacttggaacccgacgtgccagggcccagtccctgcagccatctcacttttcacatacctcatttctgcttgccaaacccacccagccacttaataaggaagcagagagtatgggatagagaaattgtgggaatagtggcccagccagatgttcattgctccactgggactctgataggaggcttggccttcaagctctgcagtttcctgtctggcaccctggcagctgggctcaagtctaaaatgtgcagaagtgttttatagataaatagaacattccaaagagatggcctcatcagcagtgagacatcttagggaaggagacaccacagtattaaagagaattacctcaatggcagtgcctgtgagctggcttgagccaccttctttacctctgagctttctgccttctgaagccctttttgctctttctgttcagatgagaggcattatggttcctatttgggtaacattagggaggtggtcaaagcccccagtatagcccattcctgtagtcctaatccaagatggtcatcactgatagtaggattctcctctccccatttcagtcacaggaaatggggtggtgaccaaacaagctcaagtgataaactgctggtgatatgtatatatgtttgttgttttctccacctctgaggtgctgggttgcctgataccaaagtgttccagtttgtgtactaaagttgtttttctggcagcctgagacttcgctttttaaaaaatgcagcaattggttgatttttgttgttcctgaaggacccatcacactacccacggtatctgagtttcaagtctagcatggcttgggtaatctgtgattgtacctgtttcttcctgggattctgcacatagccaggagcatctcattgcttcattccgtgttttcttgcagttatgcctgggatatgcagatggaaatgcatattttattgtaaatttcattttatatctagcttatattacccttagggcattaagtgggtcttttaaacttatgtctgttaagtaggttgtctgtgacttgacgtcgggcagtaaaggtagatgctaagcaagtatttattatcaaaaggaaatgttgagtcaacattaagggtgagaactgctcttcgtggttaaggataaaaccaagaaggaaagaagtgatgggaatgcagagacaggaggcagcccagctcttcttggggttgtttacgcccatccttgcgttggtctgcggcgtttccccagcagacaccactgtgggctactctaatgacttctctttcctcctcgaacaacttctggagaagtcgcaccgttgcagagtggtgccgctacacattgatcatctaaccttacctgggtcctcagctatagggccgtctgtctcgagtcagctgtcacttaaaagtttcaccattttctctggtttgacttgctgaaaaaaaaaaaagaaacattaaaaaatttcactattttcttaaaatagtttaccttatcacaccctctcatgttcactggatgactatcctttcttcctggtgaaagcagaaaccctcagtttctcatcttgcacctacagactcatctgcaatccttacctccttgggaaaaaaagacgtctctctttccatgtgagtatcagtcatccccctgtgccatttcattttctggttttcagtccaccctgccttttctccgcaaagttttcacttctgtgtctttagcctttcctctaatggatgtagg

SEQ ID NO: 201132 - DNA, 2512 bp, Homo sapiens
  misc_feature (2)..(2): n is a, c, g, or t
  misc_feature (4)..(4): n is a, c, g, or t
  misc_feature (6)..(9): n is a, c, g, or t
gncncnnnncccaaacagccttctgaggttggtaagggtattcagccatcttcgctttgcatatgagaagacaatctcaaagatttgaagtgtcccagtggtaactggcagaaggagaactcttagatctcctgacttgcacatcctgtcatctgctgtgttacattctcatctagagtctgctctccacacttgatccttgctacccctctacctgctgctgttcctctgagagttcatcttgcctttattttgagggagggaggggcaagcccagtgttagtgttgattttgccctcaaggaccctggcggggaagcagtagtgttcccattgtagaggccagaaaagctgcccagtgacacagccaggatcagtcatggagccatgataggccagagcctgagctcccagccactgaggaggggtggcagaggattgtttggccaggtctgtgtgggctgaaggcttggtgaccagggacgacatgatcatctgcaagaccaatgctatcactgccctgaggatgttcttcccccgaaagtttgcctccaatagcacaggcacctgcgtctcagatggtggtgacatctgagtacttggacttcatcagctgcctgtaggaggtgaggtagcaggaggtgagggcaatactcccttcagcttcagcaggtgaaaagtgtggttctcaatgaagttgagctagtgtgtgccaggtctccttctacagtgggtacgcgtcatacaggatcccatcaaagcgaccacctggcaggggagcgccacctccttccacaggactttcaaggggatgaccttgtgtggctgctgctgggtccagtcctggagcagctggaagatgctgtcattgcactccatgatccagtgttcctggatggcgacctcctgcaccttccatattcttgtggccatgccgaagcccacctctaagactcggccccctttggaggtggtgaaggcagcgaagggggttgcagtaggggcgctcttgctgcagatggagccccaacttggaacccgacgtgccagggcccagtccctgcagccatctcacttttcacatacctcatttctgcttgccaaacccacccagccacttaataaggaagcagagagtatgggatagagaaattgtgggaatagtggcccagccagatgttcattgctccactgggactctgataggaggcttggccttcaagctctgcagtttcctgtctggcaccctggcagctgggctcaagtctaaaatgtgcagaagtgttttatagataaatagaacattccaaagagatggcctcatcagcagtgagacatcttagggaaggagacaccacagtattaaagagaattacctcaatggcagtgcctgtgagctggcttgagccaccttctttacctctgagctttctgccttctgaagccctttttgctctttctgttcagatgagaggcattatggttcctatttgggtaacattagggaggtggtcaaagcccccagtatagcccattcctgtagtcctaatccaagatggtcatcactgatagtaggattctcctctccccatttcagtcacaggaaatggggtggtgaccaaacaagctcaagtgataaactgctggtgatatgtatatatgtttgttgttttctccacctctgaggtgctgggttgcctgataccaaagtgttccagtttgtgtactaaagttgtttttctggcagcctgagacttcgctttttaaaaaatgcagcaattggttgatttttgttgttcctgaaggacccatcacactacccacggtatctgagtttcaagtctagcatggcttgggtaatctgtgattgtacctgtttcttcctgggattctgcacatagccaggagcatctcattgcttcattccgtgttttcttgcagttatgcctgggatatgcagatggaaatgcatattttattgtaaatttcattttatatctagcttatattacccttagggcattaagtgggtcttttaaacttatgtctgttaagtaggttgtctgtgacttgacgtcgggcagtaaaggtagatgctaagcaagtatttattatcaaaaggaaatgttgagtcaacattaagggtgagaactgctcttcgtggttaaggataaaaccaagaaggaaagaagtgatgggaatgcagagacaggaggcagcccagctcttcttggggttgtttacgcccatccttgcgttggtctgcggcgtttccccagcagacaccactgtgggctactctaatgacttctctttcctcctcgaacaacttctggagaagtcgcaccgttgcagagtggtgccgctacacattgatcatctaaccttacctgggtcctcagctatagggccgtctgtctcgagtcagctgtcacttaaaagtttcaccattttctctggtttgacttgctgaaaaaaaaaaaagaaacattaaaaaatttcactattttctt

SEQ ID NO: 201133 - DNA, 926 bp, Homo sapiens
attcagatgccagacgaattgaggactagctgatacaggcatggggcagaagcagcgtctgcaaggccgcccaccagtgtgccttgttagtttactgtcgccatggccacacccggagttactgcctctttccatggccgtgacctgacaacccaaaagccaccacccttttcctagaagtgtctgcctaagcctacctttactctacaggaaattaaaagtaggtataaggtaaggctgggcgcagtggctcatgcctgtaatcccagcactttgggaggccaaggcgggtggatcacctgtggtcatgagttggagaccagtgtggccaatatagtgaaaccccgtctctactaaaaatacaaaagttagcctggtgtggtggtgcgcgcctgtgatcccaggtgctcgggaggctgaggcagaagaatcgcttgaacccaggaggtgatgaaggtgccagttgggacaaatgtaaacaaacgtaaagatccagtattaaatcgtaactgcataaaattaacggtagtagccatctcctattgttattgtgctgagctcaagtgctgggattacaggtgttccagtaagtggtcagagccctgcctgtcccaagtgggtgaggtcccaaagggattatcatagcagtgttggaaggccagctagtgattcatgccaaggtgacctgtaggataaacctgctacagcatggtgctgctgcacggccattctgaatttgcatgtctttggccaaattatagagcagaatttccagggctggggatggtagtccttcctccctcatttgtctctgcctgtactctgggatatttctgccttcagacagtcatgatgttttctgtgggttaaggcaaggacaaatctccccccagggaacccaagaaggtggagaagctggttgaaca

SEQ ID NO: 201134 - DNA, 602 bp, Homo sapiens
ggtataactaaggctcttcgtgtaagtgcaagtaacaggaaccaccttgggttcctttaaaaacaaaaggaatttattggaaaaacaatgggtaacctcacagatctaacgcaaaggctagaaaaatctaggctctgaaattaggctggtatcaaggtagagcaggcagccagaactgcggctgaaccactcacgggaacagtctggtgaagacaccactgcctgtataacatgagagcaccctcactattaccactgctaccactgcccctgtccatgatcttctgcgtcactcactgcagattcaaagttctactggctgagcctgggtcacattcctgtgctctagctgccaaggaacagggaaaaatgagtacctgaactttccagattttgaggtgtgagacaggtcctgttccccaccaagactctgtagaatttcccaaatgtaagaaaaaagttcagatgctagacagacagacagacagacacacacacacacacataaaaggcaaatttccattacttgggacacagtgaaagacaagccagtgaggtaggtgaagactgatcattaggagatttatcattcatgttaagga

SEQ ID NO: 201135 - DNA, 460 bp, Homo sapiens
cacctccaggagggagtggggctcccaatgcccatctggggacattgcattaaagggttcctttccacaggctcaatcttcagatgcctcagccctccccgagccctgaccacaagccaaatggcgctggaccacagtatcagggttctccagcgactccatcctccagggaggaagaggtggtgaatttccgagctgggacagaacccagagtggctggagcaggccagcacctcgcctcatatacttggagcctggagacatcaggcagcaaatgagaagcattttaaggttctctgactattttcttttttaattaattaattagttcattaattttttaatttaaaaatttttcttacctctggttcaagttctcatgaccgattccttaaggttgcaacacatgaacatgcctttcctccaagaaaatttagagaattcagattagtaaaaagaa

SEQ ID NO: 201136 - DNA, 503 bp, Homo sapiens
actgagcggccaaggacaagttggcctactcccagtgctaggcagctttaacacacttggcagtaggcactttatccttctcccttaatgctacttctaagccattacagctccttccctggtcctccaatgctcatatattgacatcctttcaatctttcatctgagatatggttctcgccccatatcaattttcagccttttctattgtgcctcattatccaggtgctattgtcttcaggcccgtaagactcaaatactcccacctccaatttctccagacaaacatccttataactaggaaaataaaacagtaagactagaacatgggtgcactagcctgctccaggctcattctctgggacccatcaccaatgtttttgtctgtttgctttaggccggaagcatgcgttaatttgtaagacagccttgcttaatttgttttttggatcattttacaaatattgatcaggctttctaagcacaaaaagctttattttagg

SEQ ID NO: 201137 - DNA, 131 bp, Homo sapiens
ttttgtaacattcatcactcttgtagctattgatttagtgcctgtttctccaccagatcacaggctctactagagctgggaccatgtctatcgttaccaccgtgctatcccttgcatctagcacactttga

SEQ ID NO: 201138 - DNA, 231 bp, Homo sapiens
gtaacgcttcagatacttacatagttattggggaagccaagatcgaagatttatcccagcaagcacaactagcagctgctgagaaattcaaagttcaaggtgaagctgtctcaaacattcaagaaaactacaatgacctctaactgttcaaataaaagaaagagctgcatgtttctcacttcatatcaaaagctacttggtaggctgaggcaggagaattgcttgaacctg

SEQ ID NO: 201139 - DNA, 122 bp, Homo sapiens
cctagcctcccaggtcttaactcaatggtacctacatgaagcgacaaattctgaggctaaatctggattcaagaagaaaagtgcaccttgattaatttacagtgtcagctactggccaagaa

SEQ ID NO: 201140 - DNA, 350 bp, Homo sapiens
ctatttcttttcctttggatattacccagtagtgggattgctggatcacatggtagttctacttttagttcaaaatctacttttattggacaaaccaaattttcactaaatccgtgtgccaatataaattagtgaaaatttctaatttatcatctgtatatctaattatcatatgtatgatatacaatatacaagttattaatagctttacctaaagtgttactaataagaaaatattcacattcagtcttgttcatgccaacaacatattcctaagtcaagtttgttaatatgtctgtgtcaaaaaaaatacaggccgagggcggtggttcacgcctataatcccagca

SEQ ID NO: 201141 - DNA, 344 bp, Homo sapiens
tgcataaattatattgagagaaatagttaattagattacaggaagtcaccttcccaatattctaaaatcacagtaaaatgaagtcaatagaaaccatgccatcagcatgtaggtcttccgtctgattttctctcaagatctatgctaagaagcatgcaaccgtcttcttgacaactttactgaacaatttaggtaaaattcctctgaagttttaagtcaaaacaatatgttgaagggtatatatgaataaaaaagtgttataatcagtttaaaattaataacagattttaatgtgtttgtattattttctctattttaactttatttttataacagcagataca

SEQ ID NO: 201142 - DNA, 312 bp, Homo sapiens
caaactggccgttgttcccagctgataagccaccctatgtcacgtaatccaccatggggaccctggattagcagaagtcaatggctgccccacctcctaaagttgaagaggagagagacaaagaagcaggaagccccgaggcccatcagaggctgcctcccggatgtgccccttccccttcatgacctctgcggttgggttcattgtttgggttcagagaatcattcgaggcaccaaactcaagggccacacccaccaatgggtggcacaaatttcatctcaaagatgattcaatttccctcaaatgtccaa

SEQ ID NO: 201143 - DNA, 644 bp, Homo sapiens
agacacctatgatactgtgtgtgggggagtctagatcgtaaaatagcttccaaatagagttggtgccctctctcttccttgaagtgatggtaattaatttgggggtaagaaaaatagagcttgttcatcaaactatttttctgttccaattaaacaacaacaactctaatatatagttcactgggtgaaagagaattaggtagctatttttcttcataaaaggcatggaacatcagtaaatagaggatcaacaataaccataatctaaactagttaaatgccacactgaatggtctgaaggccagggcactcaaaggaaatctgaaaatgcacacgtctttattcctgtttcttccaattgaatagaacctgctttatttatccgttaagtgggaatatacaacagctttttgacaaagtcataaacttccttcttcaagtattctagacaaatcataaagccagtggttgctttataaaggcccacatgaagtgtgtagagctttggactggaaagcagttaaatttagggtaaaggggtaaatatttcataggaagcaaatgctgtttgttttttgagttttcttttttctttattaaatttattattttttccctaaccctcagaacctgtgactttgttt

SEQ ID NO: 201144 - DNA, 139 bp, Homo sapiens
cagccacttccagttatacagcctgtgaccttgagcaacttaaagtgacatccactggcagtgcctggagcttctgcctctgtgacaggtagaacacccccctcctggggctgaggtgaggctcagaggggcactgcag

SEQ ID NO: 201145 - DNA, 930 bp, Homo sapiens
agggctacgttggtgaggactgcggccagcggcagtgtctgaatgcctgcagtgggcgaggacaatgtgaggaggggctctgcgtctgtgaagagggctaccagggccctgactgctcagcagttgcccctccagaggacttgcgagtggctggtatcagcgacaggtccattgagctggaatgggacgggccgatggcagtgacggaatatgtgatctcttaccagccgacggccctggggggcctccagctccagcagcgggtgcctggagattggagtggtgtcaccatcacggagctggagccaggtctcacctacaacatcagcgtctacgctgtcattagcaacatcctcagccttcccatcactgccaaggtggccacccatctctccactcctcaagggctacaatttaagacgatcacagagaccaccgtggaggtgcagtgggagcccttctcattttccttcgatgggtgggaaatcagcttcattccaaagaacaatgaagggggagtgattgctcaggtccccagcgatgttacgtcctttaaccagacaggactaaagcctggggaggaatacattgtcaatgtggtggctctgaaagaacaggcccgcagccctcctacctcggccagcgcctccacagtcattgacggccccacgcagatcctggttcgcgatgtctcggacactgtggcttttgtggagtggattccccctcgagccaaagtcgatttcattcttttgaaatatggcctggtgggcggggaaggtgggaggaccaccttccggctgcagcctcccctgagccaatactcagtgcaggccctgcggcctggctcccgatacgaggtgtcagtcagtgccaaaccgagggaccaacgagagcgattccgtcacgcactccattcccaacaggtaa

SEQ ID NO: 201146 - DNA, 340 bp, Homo sapiens
ttattgatgtctcccgggaggtcacttctaaaagacggttttatgtacaaaagcagcggtgtcgggcagcccagtagagttgaaagagcgctgaagaggtgaagcccaccctttgagtctctgagacccatttccaactcaggggaaaccctgctgtgcgggaccccctccctgtgttactccatccctggtgcaggcatcaaatatttattgagcacctactgtatgcctggagaaagggcactgaggttatacaagtggaagaaatggggaggcctcggcctttggggacctcacattcctaccaagggagtacataataagccagtgaagaacaaga

SEQ ID NO: 201147 - DNA, 439 bp, Homo sapiens
ataatttagaaatagaaaaggtttttcggcttatggttctgatgtctggaaaagttcaagactgagcatctgcatctgatggtagcctaagactgcttctactcatgccagaaggcaaaggagagctggtgtgtgcagagattacatggccagagaggacgcaaaagaagaaagggtgtttttagataaacagaactagaagttgaaaggctcttctttgacagatgaatttggtatgtgtatttttttttttagatggagttggtgaaattggcttacagaaaaattaaccagatgatatttatgtacaacaatgccgggaatatgaacggagactctaaagactttaaagcaagtctagtatacatgatggccggaaaacaatctgtgtcaagaatactatcaggtgggccaggcgcagaagctcacgcctgtaatc

SEQ ID NO: 201148 - DNA, 2828 bp, Homo sapiens
atttgcaataacttcaataaatgcgaatccaataatccatctacaatacaaagggcatgcgtccggaccaagaacacgtctccagactctggaaagaacctctacgaacgaagaagacaacccaattttcaaatggaccccggggaacacccaggcggctggggctggctctaggtccccactgctctgtccttgcgggggccgctccggcctggtcgccttctccgggcgcatccagggaactcgctcggtcctccttaagcggggaagctcggaaagcgtctccccgactccgcccccagggttgcctttcccttagaaggccaagccccaagcccagcctctcgccagctgggagtcgcgcgctgcccacctcgctgcccaggcccccgacgccgcggcaggagccccccaagagcgcgggaagccccgtggacctggcgctcccggctcgggcgtggacggggcgggcgccggggcggggcgcgcgtcctcgcgggtctgaatggaagggtcgaggtcgtcgtcggcggcgagcagatcctgaagccagaactccaccccggcgcccgcgccatgcggcgggagaggtgcggcgccccccacccgcgtcgccgccatggaggtgctgcggcgctcctcggtcttcgccgccgagatcatggacgcctttgaccgctcgcccacagacaaggagctggtggcccaggccaaggcgctgggccgggagtacgtgcacgcgcggctgctgcgcgccggcctctcctggagcgcgcccgagcgtgccgcgccggtcccgggacgcctggctgaggtgtgcgcggtgctgctgcgcctgggcgatgagctggagatgatccggcccagcgtctaccgcaacgtggcgcgtcagctgcacatctccctgcagtctgagcctgtggtgaccgatgcgttcctggccgtggctggccacatcttctctgcaggcatcacgtggggcaaggtggtgtccctgtatgcggtggccgcggggctggccgtggactgtgtgaggcaggcccagcctgccatggtccacgccctcgtggactgcctgggggagttcgtgcgcaagaccctggcaacctggctgcggagacgcggcggatggactgatgtcctcaagtgtgtggtcagcacagaccctggcctccgctcccactggctggtggctgcactctgcagcttcggccgcttcctgaaggctgccttcttcgtgctgctgccagagagatgagctgcccacctggcagtggccgcagcctggccctctgggcccaacgcaggaggccctcagcacccgaacacatcttcctccgcagacccaggccctccggaaggggtgagtggggaggggctttcctgagcctggagctgggctttggggcagcctgcgaccctccccgcttgtgtcccttctcctgtgatctctgtgttttcccttttctttctggggccaggaagtcagggtcaactcccaggcctcagatgcaggggcccagaacacctgctctcacctgagccccaggtgaaggggcccgggaacacctgctctcacctgagccccaggtgaaggggcccgggaacacctgctctcacctgaaccccaggtgaaggggcccggaacacctgctctcacctgagccccaggtgaaggggcccggaacacctgctctcacctgagccccaggtgaaggggcccgggaacacctgctctcacctgagccccaggtgaaggggcccgggaacacctgctctcacctgaaccccaggtgaaggggcccggaacacctgctctcacctgagccccaggtgaaggggcccggaacacctgctctcacctgagccccaggtgaaggggcccgggaacacctgctctcacctgagcccctggtgaaggggcccggaacacttgctctcacctgagccccaggtgaaggggcccggaacacctgctctcacctgagccccaggtgaaggggcccggaacacctgctctcacctgagccccaggtgaaggggcccgggaacacctctcacctgaacccgggggtcccatcccaggaagaagggccatctcaggacatgagtcctcaggggccctgcacattcaatctgaaggtgaccctggcctggctgaagctggaagagctgtggggactcagcctgtaaacagagcgtaaggttcacatgctggttgcttaatccgtttctggaggaagagtatgacacccacttgtgatggggtccttgtgcggtggggaccggggccggcgggctccaggccagcacacctaacccatggatgtggaacctacggccgagaaggaatgttgcatgagtcggatcccagtccattgtcagtggagggtgagggtgaccccatctgctatttttgtgctcatcctcaaacaaccatttggggatgtgcctattagggctccgtaagaactcagatgcctgggaagcccagcccctcaggtgcccccacacacagccttcccttgacgcctacatttctaggcacatgtgaggcatctttcctggagccccgagccagccctgtccctccccagtgcagcatggcactcaggagatacaggctggacatggggcagtcgttctggggaggcctggcctagcagccacccacctgagccctcccggccaggcttcgtgctggggtgggccatgtgccaggacaggagggtcccggcggaaagccagccccggactcatcgtgacattgagatcccactggagggtaggggtggtaataaacttctccaaacgatcgttgtcatttt

SEQ ID NO: 201149 - DNA, 1631 bp, Homo sapiens
atttgcaataacttcaataaatgcgaatccaataatccatctacaatacaaagggcatgcgtccggaccaagaacacgtctccagactctggaaagaacctctacgaacgaagaagacaacccaattttcaaatggaccccggggaacacccaggcggctggggctggctctaggtccccactgctctgtccttgcgggggccgctccggcctggtcgccttctccgggcgcatccagggaactcgctcggtcctccttaagcggggaagctcggaaagcgtctccccgactccgcccccagggttgcctttcccttagaaggccaagccccaagcccagcctctcgccagctgggagtcgcgcgctgcccacctcgctgcccaggcccccgacgccgcggcaggagccccccaagagcgcgggaagccccgtggacctggcgctcccggctcgggcgtggacggggcgggcgccggggcggggcgcgcgtcctcgcgggtctgaatggaagggtcgaggtcgtcgtcggcggcgagcagatcctgaagccagaactccaccccggcgcccgcgccatgcggcgggagaggtgcggcgccccccacccgcgtcgccgccatggaggtgctgcggcgctcctcggtcttcgccgccgagatcatggacgcctttgaccgctcgcccacagacaaggagctggtggcccaggccaaggcgctgggccgggagtacgtgcacgcgcggctgctgcgcgccggcctctcctggagcgcgcccgagcgtgccgcgccggtcccgggacgcctggctgaggtgtgcgcggtgctgctgcgcctgggcgatgagctggagatgatccggcccagcgtctaccgcaacgtggcgcgtcagctgcacatctccctgcagtctgagcctgtggtgaccgatgcgttcctggccgtggctggccacatcttctctgcaggcatcacgtggggcaaggtggtgtccctgtatgcggtggccgcggggctggccgtggactgtgtgaggcaggcccagcctgccatggtccacgccctcgtggactgcctgggggagttcgtgcgcaagaccctggcaacctggctgcggagacgcggcggatggactgatgtcctcaagtgtgtggtcagcacagaccctggcctccgctcccactggctggtggctgcactctgcagcttcggccgcttcctgaaggctgccttcttcgtgctgctgccagagagatgagctgcccacctggcagtggccgcagcctggccctctgggcccaacgcaggaggccctcagcacccgaacacatcttcctcctccccacccgagcctggagcactctaacctcggagaccccctaagcccgttctccgcagacccaggccctccggagggtgagtggggaggggcttcctgaagcctggatgtggtttgggggggctgcgacctcccgttgttgccttcctggtgtctctgtggttccttccttcttggggcaggagtccgtcactccagctattgagagcaaactgctcctgggccttatgccggaccttccccttccgggagccgactctgccaactgaggggaatccgcgggggactccgg

SEQ ID NO: 201150 - DNA, 705 bp, Homo sapiens
gggcggggagggccgggtcctggcagtcgccgtgggggacgcgctgggctgtgccctccgcccccgccgcccacgcactcgtcttcgagggcgggcccggcggccccggagcaaaccgccgtctccccgcggccccaccggtccctggcagcctcggggaatgtctgtagctgaattcgggctctgaaagaaggtggcgctgggtttttaaagatttggggcacaaaaaacgagagcggacccggcgccggctacggcccttcccgagggccacgcccagcccggcgccccgcgcgccccgttccccgcgccgcctccctccacccggctgagcgcttgtgcccgcaggtgcggcgccccccacccgcgtcgccgccatggaggtgctgcggcgctcctcggtcttcgccgccgagatcatggacgcctttgaccgctcgcccacagacaaggagctggtggcccaggccaaggcgctgggccgggagtacgtgcacgcgcggctgctgcgcgccggcctctcctggagcgcgcccgagcgtgccgcgccggtcccgggacgcctggctgaggtgtgcgcggtgctgctgcgcctgggtgagtgcgccctggtgggatccccagctgcgcctcctcccctgctgggccgcagcctccctccgaggccgagatgggggtccggcccaggggcgcccaccccctgcc

SEQ ID NO: 201151 - DNA, 1253 bp, Homo sapiens
atttgcaataacttcaataaatgcgaatccaataatccatctacaatacaaagggcatgcgtccggaccaagaacacgtctccagactctggaaagaacctctacgaacgaagaagacaacccaattttcaaatggaccccggggaacacccaggcggctggggctggctctaggtccccactgctctgtccttgcgggggccgctccggcctggtcgccttctccgggcgcatccagggaactcgctcggtcctccttaagcggggaagctcggaaagcgtctccccgactccgcccccagggttgcctttcccttagaaggccaagccccaagcccagcctctcgccagctgggagtcgcgcgctgcccacctcgctgcccaggcccccgacgccgcggcaggagccccccaagagcgcgggaagccccgtggacctggcgctcccggctcgggcgtggacggggcgggcgccggggcggggcgcgcgtcctcgcgggtctgaatggaagggtcgaggtcgtcgtcggcggcgagcagatcctgaagccagaactccaccccggcgcccgcgccatgcggcgggagaggcatcacgtggggcaaggtggtgtccctgtatgcggtggccgcggggctggccgtggactgtgtgaggcaggcccagcctgccatggtccacgccctcgtggactgcctgggggagttcgtgcgcaagaccctggcaacctggctgcggagacgcggcggatggactgatgtcctcaagtgtgtggtcagcacagaccctggcctccgctcccactggctggtggctgcactctgcagcttcggccgcttcctgaaggctgccttcttcgtgctgctgccagagagatgagctgcccacctggcagtggccgcagcctggccctctgggcccaacgcaggaggccctcagcacccgaacacatcttcctcctccccacccgagcctggagcactctaacctcggagaccccctaagcccgttctccgcagacccaggccctccggagggtgagtggggaggggcttcctgaagcctggatgtggtttgggggggctgcgacctcccgttgttgccttcctggtgtctctgtggttccttccttcttggggcaggagtccgtcactccagctattgagagcaaactgctcctgggccttatgccggaccttccccttccgggagccgactctgccaactgaggggaatccgcgggggactccgg

SEQ ID NO: 201152 - DNA, 2092 bp, Homo sapiens
atttgcaataacttcaataaatgcgaatccaataatccatctacaatacaaagggcatgcgtccggaccaagaacacgtctccagactctggaaagaacctctacgaacgaagaagacaacccaattttcaaatggaccccggggaacacccaggcggctggggctggctctaggtccccactgctctgtccttgcgggggccgctccggcctggtcgccttctccgggcgcatccagggaactcgctcggtcctccttaagcggggaagctcggaaagcgtctccccgactccgcccccagggttgcctttcccttagaaggccaagccccaagcccagcctctcgccagctgggagtcgcgcgctgcccacctcgctgcccaggcccccgacgccgcggcaggagccccccaagagcgcgggaagccccgtggacctggcgctcccggctcgggcgtggacggggcgggcgccggggcggggcgcgcgtcctcgcgggtctgaatggaagggtcgaggtcgtcgtcggcggcgagcagatcctgaagccagaactccaccccggcgcccgcgccatgcggcgggagaggtgagcgcggcgggcgtggcgtccgtgccggggtgcccggggtgccacgggaacggcgaggccggggacacgcgcgcaggacgccagcggcggaggtgggcggccccgggccggggcggggagggccgggtcctggcagtcgccgtgggggacgcgctgggctgtgccctccgcccccgccgcccacgcactcgtcttcgagggcgggcccggcggccccggagcaaaccgccgtctccccgcggccccaccggtccctggcagcctcggggaatgtctgtagctgaattcgggctctgaaagaaggtggcgctgggtttttaaagatttggggcacaaaaaacgagagcggacccggcgccggctacggcccttcccgagggccacgcccagcccggcgccccgcgcgccccgttccccgcgccgcctccctccacccggctgagcgcttgtgcccgcaggtgcggcgccccccacccgcgtcgccgccatggaggtgctgcggcgctcctcggtcttcgccgccgagatcatggacgcctttgaccgctcgcccacagacaaggagctggtggcccaggccaaggcgctgggccgggagtacgtgcacgcgcggctgctgcgcgccggcctctcctggagcgcgcccgagcgtgccgcgccggtcccgggacgcctggctgaggtgtgcgcggtgctgctgcgcctgggcgatgagctggagatgatccggcccagcgtctaccgcaacgtggcgcgtcagctgcacatctccctgcagtctgagcctgtggtgaccgatgcgttcctggccgtggctggccacatcttctctgcaggcatcacgtggggcaaggtggtgtccctgtatgcggtggccgcggggctggccgtggactgtgtgaggcaggcccagcctgccatggtccacgccctcgtggactgcctgggggagttcgtgcgcaagaccctggcaacctggctgcggagacgcggcggatggactgatgtcctcaagtgtgtggtcagcacagaccctggcctccgctcccactggctggtggctgcactctgcagcttcggccgcttcctgaaggctgccttcttcgtgctgctgccagagagatgagctgcccacctggcagtggccgcagcctggccctctgggcccaacgcaggaggccctcagcacccgaacacatcttcctcctccccacccgagcctggagcactctaacctcggagaccccctaagcccgttctccgcagacccaggccctccggagggtgagtggggaggggcttcctgaagcctggatgtggtttgggggggctgcgacctcccgttgttgccttcctggtgtctctgtggttccttccttcttggggcaggagtccgtcactccagctattgagagcaaactgctcctgggccttatgccggaccttccccttccgggagccgactctgccaactgaggggaatccgcgggggactccgg

SEQ ID NO: 201153 - DNA, 274 bp, Homo sapiens
tgcgcgtactgccaccgggatggtgcattgactgctgacccacatgctcctcagcaggggacagctgcatccatggtgctccatgcacacaatcgaatgctttgcagtcaagagaaggcaatgaggaggatctacatactgctatggcgtgaaaaaaatagggtgcagaataatgaggataacatgcaagcttttttttttggtttgagacagagtctccctctgtcacccaggctggattgcagtggcttgatcatggctcactgcagcttca

SEQ ID NO: 201154 - DNA, 331 bp, Homo sapiens
atcaaaggtgtcaaagaatataagagcaaaaactccatccaaaggacagtgatatggtttggctctgtgtcctcacccaaatgtcaccttgaataaatccccatgcgtcaagggcaggaccagatggagataacttaatcatggggtgcttcccccatgagtgagctctcatgagatctgatgattttataaatgggaattccgctgcacaagctctcttgtttgacaccacgtaagaggtaattttgctcctcttttgccatgattgttaggcctccccagcctaacaatgtggaattgtgagcaaattaaacctctttccttataaatt

SEQ ID NO: 201155 - DNA, 533 bp, Homo sapiens
ttaacatgatacgaatcgagctggtacccaggctgcagcttggaatctcatactatttgattatattgatcactctcccaatgtttagtcactttccctcattctttgcagtctttacaacctgacttaactgccattattttgatgtctcatttaaattacttatcttctttgacatttgacctcatcatttccaatgtacttgctatcttcagtatctagctattcaatctcatgatctcagctcaaaccacgttattactcctaattgcaaatttttacaatctaacttttaagtctcctgccttctgaacattaacttctatctttctagttcattccatttactacaacttcaaaaatactgtgactcatcctggatctacaatctcatacaatatacaatacagtccttacacaattctcaatccagttttctccacacatcctttacttctcagcaaacccaccttcaaaacatttaaataatttttactactgctgttatccacccaggccaagccaaaatcatg

SEQ ID NO: 201156 - DNA, 573 bp, Homo sapiens
caaaagaagagcagatggtcttatggattatattcacagaagagctgtaacataatctatctgagacttggggtagtcatggaggaaaaaagttagatgggcttagagagaaaaggaagaggactattcttgctgagtgccttatgttttctcagtttcattcaatcacactgtaactttgagaggtaaattttatacccacctttacataaagaaagttcttggacttttaaaaactttgacaagcattgcttagctagaaagttctagaaccctctctctcccattccaacctgaacagtaaaaacacattctttaactttattcaataacgagtcaaggtaggtctcttgtcagggagacaaatgaaaggctcatattttatatgtctccagtgcacttggcataatcaagagtgtagtataattaaaattgtagacaaaggaatgaagaggattaatgtgttacaagtttgttgactaggctggagaaaagaaaaagagacagctgactagtgtggagtgtaatatcacagaataatgatatggtaaactgggccttgtaagggcaaag

SEQ ID NO: 201157 - DNA, 426 bp, Homo sapiens
tgggctgtagccacagaagcactgtaggaggagtccaggtcttggatcctagacctgcctctgacacccatttgcagtgaagtatcccttcagctccttcagcctcacttccctcatttgtccctttcccacctcctagaaaagggtacatggtttaacaataaatccaaaaggttaccattctgacccaggttagccagtagaaatggaaatatctactctacttccaggtcatctttgagggctatagacccatgccacttagttcttatagcatcctcataaggtacataagaaaaacactcacaacagctctgcaatatacccaaggtcattcactcttgagcagcgaggctgagagctgaactcccgcctgtcctgtacagcgccttcacgtggctgggctatgtcaacagggcccgagag

SEQ ID NO: 201158 - DNA, 226 bp, Homo sapiens
aagaaacatcaaatcatgtccaagcttccgggaaaaaaataaactttgatgtaaggctgacaaagacaatgtcgcttgggtggtttcttgattagtataaccttagaaacctcaggagacagaagtatagagaaactagcttctgcctttttcttctaattctagccttgtggacagcccagcataaactagagaactgaatcaggaagcacagcagcctcctgtt

SEQ ID NO: 201159 - DNA, 791 bp, Homo sapiens
tcggagaaggtgtggccccactgttagcgggctcgcggggccatacccgggccacactcttccagccccagaaagccagattatcttctctggaccctccgcgtgcttcaggcacccttgggccgactcatccctgcttgggagggagggaggaagccgcccccctctgtgaggtgttcctgactcttctaccccacctagtttctaggaaaggaggcaacatgacgtgctgggagctttctggtcctgagctttgaacatgagaaatgccgtgaggaactgttttctccgcgatcgaagtgtcacacttcgatcgcggagaagcattccaaagtctatccaagtccaaaacatgtgctctaaatattgtactgtgctataaactgtgagtactgtaaaagtgaccttctaaccaggctctctgccttcaatctcccatttgttttccatcctacggctagatctaactttggaaatgcaccctgtttgtctgacctagaggttgtgtggcttctaggatcaactctagaccccttagcttagcattgcaatcagtttcatctggtcttagtctccctgactcttcttgcctttggctggaaccttggcattgttcgaactgtcaatttactctgaacccagtgtagctaatatttttcacagccctttgctttcccttttccttttctctggaatgcttctccccacttctcttcctagccaaacccagcgtcctccagtgtggaccttcgtcctcttgtgttctccgcgatcgaagtgtgcatcctctc

SEQ ID NO: 201160 - DNA, 808 bp, Homo sapiens
gctgctagactaaaacataaaaggcacccgaggaaaatccaagagccgtcaccgttgaaacaggaggcgaatacctttctcgacgacattgccaagcaggagcgaacagcccggaaacgccccggagtttacgagctagtctctgtcattgagccatcaagaaggaaaaaccactcagaccgcgttctctccctctcactccccaatacggagagaagaacgatcatcaatggctgacggcagttgcgacgaagcaacgccaaaaagcagcttcacgctcaggagaaaacgctacctctccttctccgcgatcgaagtgtcacacttcgatcgcggagaagcattccaaagtctatccaagtccaaaacatgtgctctaaatattgtactgtgctataaactgtgagtactgtaaaagtgaccttctaaccaggctctctgccttcaatctcccatttgttttccatcctacggctagatctaactttggaaatgcaccctgtttgtctgacctagaggttgtgtggcttctaggatcaactctagaccccttagcttagcattgcaatcagtttcatctggtcttagtctccctgactcttcttgcctttggctggaaccttggcattgttcgaactgtcaatttactctgaacccagtgtagctaatatttttcacagccctttgctttcccttttccttttctctggaatgcttctccccacttctcttcctagccaaacccagcgtcctccagtgtggaccttcgtcctcttgtgttctccgcgatcgaagtgtgcatcctctc

SEQ ID NO: 201161 - DNA, 355 bp, Homo sapiens
ggatggcagttccctgcactgaaaggacactcatctgccttgaccttcctcccacccaggttggagacaaaggcttgtgccaacttggatgaggcctaaccttcaatactgtgccaccatggaaagcttcccaaggtaggcggatctcaacaccttcagcctgctttgctaaaggaagacagacattaccaaattgaaggttaaatcacaggacacttgggctgtaaaagttctcacaacagaagttggaaaattatgggataagtgcagcagaagtagcgataaagatgacgtgacttctttaagaacccttctgagaactcagggtggctcagggaagccttcacgccttgat

SEQ ID NO: 201162 - DNA, 383 bp, Homo sapiens
tggttttgtgtgtcagtaggtaagcagggaagtagcattttggttgttttggttttatggtgatctcccattccctttacctgattgtctgattaggacttttggtaacagaacattctgtcaccattaacttttgcttgacattggattatttctaaatacagtttggctgtcttctgatcggacattttcagaggaaatgaagttaggttaaacaaatactacgtgaaaggctacatttgattttgacagccaagaatgtttcctgggtatggagttttatgaagaatctcctatttgctctggttaatttgatattgcattgcccatagttacagagtacagtccccatctgtacatcacccacagctatttcacattgg

SEQ ID NO: 201163 - DNA, 376 bp, Homo sapiens
taaatctccagacagcagccttaataaaatgaagctatataatttatctgacagacaaataaaaataactatcataaagatgctcagaaagctcaagagaatcatgcatgaacaaaatgagaattccaacaaacagatagaaaatataagaaagtaccaaacagaaatcatgcggctgaagaacacaataactaaagtgaaaaataactagcgaggtccagcagcagactagatcaagctaataaaaggaccagcaactcaaggacacatcattaaaaataattcagtcaaaagagcaaaaagaacaaaataatgaaaaaagtgaagaaaccttaaggctcacaatttagggaccaatatttacattatgagagtg

SEQ ID NO: 201164 - DNA, 507 bp, Homo sapiens
ttgggcacctctatctcctagattgcattgtttctagggtttgatttatatctaggtttcaggatgttctagatctttatcttagttctgggaatggtgggaattctccccaaatcaaagtttccaggtgccagcccagggccggccctgcaggtgggcctttctagagacagcagcctcagccttgccacggccactctcttctgcacacccaccttgccctgcctccatgtcacaggcatagggcatgtgcccaccagcccagcctcgggctccggggaaattacacattgctctgcctcactgcatggctgaaggctcggctttaggatatgaagagaccctgagcatcatgatcagggtaaagctgctgctccctccagagcctttaatgttaatttcagatggactctgctggctctttatgttttattaacaagcagacttaatcttgctgaagcatgtgggaaaaatgcagtggccaagttttcaaacccgagttcattc

SEQ ID NO: 201165 - DNA, 374 bp, Homo sapiens
gacaatgctgtttagcgaatgcttgctcctgtcatttaaaggaccgggatgatggctctcaattctggaaagccagccaccatgagcacttggggaaattttcctttaagtgtgaaagagcaacagtgggtggcactcaggctccattcctggctggcagggagctcttccttcaatacagacagtgtcacccacttgaatctcacaatggcacacagctgtcctcgcactgttttggtccatcctggactgagagctgagtcagcccatgagtcacctgcctggccaccatgcagcaggacgatgctgtggcatcgtatccgcatcccatgacatgatgaagttactgccaaaacaagaatcttttctcctag

SEQ ID NO: 201166 - DNA, 315 bp, Homo sapiens
actaaggtgctggctataatggatataattagttactaaaataattgagtggtatcatgtatttttaatgtatttacattttagtacaaagtctttaaaagttcatatgttctgtcttgtaaacaccttcagaagattgacaggatacaaaaattctaatgtgtcacaaggataagccaaattacttgttgcagcatttcctttcaacagtttccatcagaaaattagaatcccattaacaacaaacaaaaagaggtggcaaaacagaggcaaagaaaagcaaaaattttttgaagtccattaattgattttcag

SEQ ID NO: 201167 - DNA, 1116 bp, Homo sapiens
  misc_feature (978)..(978): n is a, c, g, or t
  misc_feature (981)..(981): n is a, c, g, or t
  misc_feature (1042)..(1042): n is a, c, g, or t
  misc_feature (1086)..(1086): n is a, c, g, or t
ggtcgcctccatgcgtctggcctaccaggagctccagattgatcgtaagaaagaggaaaagaagctacagaatctggaagggaagaagcgagagcaggcagaaaggttgggcatgggcttggtatcccgaagctctgtctcccactccgtgctgtctgagatgcaggtgattgagcaggaaaccccagtgagtgcaaaatcctctcgctcgcagctggacttgtttgacgatgttggtactttcgcctctggacccccaaagtacaaggacaatcccttttccttaggggaaagctttggctcccgctgggatacagatgctgcctggggtatggacagggtagaggagaaggagccagaagtgaccatctcaagcatccggcctatttcagaaagagccacaaaccggagggaagtggagagccggagctcaggcctcgagtctagtgaggcgcgtcagaaattcgcaggagccaaagccatctcatctgacatgttctttgggcgggaggtggatgcggagtatgaggccaggtctcggctgcagcagctctcaggcagcagtgccatcagctcttcagacctctttggggacatggatggagctcacggagcaggaagtgtatctctggggaacgtgctgcctacagcggacattgcccagtttaagcagggtgtcaagtctgtggctgggaaaatggctgtgctggccaatggtgtgatgaattccttgcaggatcgctacggttcctactgatccgagctctgtgactcaggcttacgatggtgacggcaacaagaactccacagttcccaggctggggatgctttgccttgtggaagctggggaggatttgttacttcgtatgtgtggtgtgtgtgtggggtggcctttgaggcgctcactcctgtgaggggaatggtcagtaccagcccttgtcctctgcctgtggactgagccctttattccctctcaancancctccgtgtgttagactcttgtccttctgtcctgccccaagctgctgctcacttatcctgncatactgggaaagggggttccccacgatggcttattctgggtcnaactttcccaggtagggaaacggaggtaga

SEQ ID NO: 201168 - DNA, 771 bp, Homo sapiens
agcttgcagtgagccgagatcgcgccgctgcactccagcctgggcgacagagcgagactcagtctcaaataataataataataattacttgatatacttgaaaaattaataaaaatgggggctaatcaggattaggcaccttgagaaaccaaaacccctggtttgccttcttttaggtcaaatttatctacttagtttatattataacttacaggtataaatgtggttgttgttattaataataatcttttattcagtgtctacttgctgccagtttcatgaggctttctttaaacattaatactgactttaggctagcttaaatatattataaattctgatacagatttctctagtcatgtgcttcttagttatgatgtcaattcagaattttttatcagaattttgttctagaaaaaaaaaaagtcaacacacgtcactgctataaattatatcccagaatgggggctaaaataaacttgcaatatctttaaaaaatctaacttccatgccctattctagaaagctactggatgtttctacgaaaaggaagatgtgatagaggaaagatgaaattcaataaacaagaaaggttaaaggaatcctcaaaatagtggatggagccaggcgtggtggctcaagcctgtaatcccagcactttgggagactgaagcgaatggatcactcgaggtcaggagttcgagaccagcctgggaggtggaggttgcagtgagctgagatcatgctactgcactccagcctgggagacag

SEQ ID NO: 201169 - DNA, 873 bp, Homo sapiens
cctgcttcaactgtgcttggacggaacccggcgctcgtcccccaccccggccggccacccatagccagccctccgtcaccttttcaccgcgccctcggactgccccaaggtccccgccgccgctccagggccgcgcagccaccgccgccgcctctccttagtcgccgccttgacgaccgcgtccacctcgcaggtgcgccagaactaccaccaggactcagaggcggccatcaaccgccagatcaacctggagctctacgcctcctacgtttacctgtccatgtcttactactttgaccacgatgatgtggctttgaagaactttgccaaatactttcttcaccaatctcatgaggagagggaacatgctgaggaactgatgaagctgcagaaccaatgaggtggccgaatcttccttcaggatatcaagaaaccagactgtgatgactgggagagcgggctgaatgcaatggagtgtgcattacatttggaaaaaaatgtgaatcagtcactactggaactgcacaaactggccactgacaaaaatgacccccatttgtgtgacttcattgagacacattacctgaatgagcaggtgaaagccatcaaagaattgggtgaccacgtgaccaacttgcgcaagatgggagcgcccgaatctggcttggcggaatatctcttcgacaagcacaccctgggagacagtgataatgaaagctaagcctcaggctaatttccccatagccgtggggtgacttccctggtcaccaaggcagtgcatgcatgttggggtttcctttaccttttctataagttgtaccaaaacatccacttaagttctttgatttgtaccattcctgcaaataaagaaat

SEQ ID NO: 201170 - DNA, 653 bp, Homo sapiens
ctggaagtgtggatgggccaggtcagtggaggtaaggggctaagaccaggaggcctgggttctggtttctgctctgaaacatacacattttcaacctcgggtcagcaatgcaacctccctgtgcctcagtttctacatctgagggctgcccatcagcctgctgcagactcacatgagagagcctggaggggccgtgctggctaccaggtacaggaagttttggtatcccaaaacgactcctctctactcccctagactggggcgtgcagcctcccaggaccgcctgatccctgaaccaccgcccctaccaccaaggcacaggtgtccctctagttggacgtgcataggtatggggcttcagtccaggaaaggaggacttggagcagggccaccccactctgtgggtgcatccctagagggcttcttgttggccactcagctgcatgatctggcctctggaaggccagatccaggtcctgcctgacctgtcgacgagtcccccatctgcctctgccgcccacagcgtcctggatcccagcctcccgctgaccccaaggtgattacagtaattaatagcactcataatcacagtcatacagctgagtgtactttacagtctaccagcactttcactgacattatctcactagtca

SEQ ID NO: 201171 - DNA, 1228 bp, Homo sapiens
  misc_feature (1170)..(1170): n is a, c, g, or t
atcactgacaggcttggaatttgagctctgtcattaatgggacaagttacattatatttcattgactcaaagatgtacatttcccctctgcctggaatgttctccttgcccctttgcagggctgcctccttctcagccttgagaaatgttaccacctcagagaggccttccccgatgacctaggctaaatcagaaggtaagctctgtcttagtcagcagggttttgcaccgagtaggtacccaacacgtatctgccgcatgggtgaattactattttctatcaaatagaacgtgctattaccttgacagcctttctccaatatgtatgagtctgtgtattgcctctctccccacaaaagacagggagttccatgaagacagggattgtgtctgcatcatcccctctacacatcctctgcctgacctgcactagtcctcaataagcatttagcacatgaatgagtgtatgtgtcttatttcatgctgttttatatttataatcaacaaccctgtgaggtaggtaccatcatcttcattttactgatgaagatgctaaggctcaacatgatgaattaacttactcaaggtcacatggctaataagaggcagaaacaggatttggactgactcagatatgtaggtctgactccaacactgatgttcttaataattatggtatgtatacagctgctacaaatcctctacaaaaaggaaggtcttgaaggatatacagcagtatgttgaatgtatcagccaggcacctacattaaagccgtgcaggtaaaaaggtaagtgcttgctgaatggaacaacagatgaatgctaagagctgtcttgggaagactaaacaaactccacacaacacaggcgctgagatttgagataatctgtggatcagggtttcctagcccatcacccctgagcaaggcaatgtacactcattactaacagtgagtcactaaggcagttgtgtttctctctctttttttttttgagataaagtttcactcttgtaatttcacgggctgtttgacactgaggtaaatcaagcaggcatcagccactttattcaggtcaccctcacctaggtccagtctctcacagagggggcccaggccctgtaagacagccagctgcaacttgaaggtcagcgtgtgcgagtaaactggnccagccctggcactgatgggggcctgggtgactagggagccagccagctttggcagga

SEQ ID NO: 201172 - DNA, 381 bp, Homo sapiens
cactgttggcaggtatggccatggtactaccccaagactaaccttggaaccccacaaagcctgacctatttgcagcaacacctctcagcctgcaaagtccattagaattggtgggatcttgtgtggccaagaggagctgaggctgatggcagaggccagtgcaaacgcaggttctccccaccagggtccagattctttcaaagacatgcaggctattacctacagtccacatcttttgaatgacagttcctgatccacatcaccttatgccaccattacctctgctgctggacaaggagggagagcctgctcatttgtccatccatcagcctgtttagtccatcctcctctccatctgccttccttctcccttctgccctc

SEQ ID NO: 201173 - DNA, 563 bp, Homo sapiens
ttcctttgctctcctggctagatgcgatcttttcctctaacgctttaccactataccactctgctttgtagtaacttatgtacatgcatcattctccctgtgttggctccacatacaataaaatgagaactaatgtttatataatatgagtttacagtgccacgttttgagcatctcatttattctcataataggctcatctatcagaaatagttggttttaattttttaatgatggatgaagagattttcctggttagtatgttattttgtctaagattacataggaaatagatgatgttggctcgttaatttaagctcagttcatcagacccctgagcctttgctgtttctgccttttgttcttgtgatcacccaagtcctgagggcataagctccttgacttgtgtgggtgtcccctgcagtatccagcagagcgccatccaacatctgtggactgtagtgaatactggtgtgcaattaaatgccaaaagctcatactcaagatagatgtgaactcagttgtaagaatgatgtctgtcatttgctgaatgccttctgttt

SEQ ID NO: 201174 - DNA, 477 bp, Homo sapiens
atcgtttattactttagttgctgaaggatacaaaggcatactacttgctttcagttctgagagaaggagcacaaataaatactgccccattccccattctaaaagggttagcccacatatatgtgtaggtctaaaatttttaattagagcatcttacctagaagggagaatacttatcactaattatatcagctatagtgaaacatatatagtcatatgctgcttatggagggggatacaatctgagaactgtctttaggagattttgtcattgtgtgactatcctagtgtgtacttccataaacctagatgacacagcctactacacacctaggctgtatggtagagcctattgctccttggctgcaagcctgtacagcatgctactgtactgaatactacaggcaattgtaacacaatagtaaggatttgtgtatctaaacacagaaaatgtgcaataaaaatatggtacaaaag

SEQ ID NO: 201175 - DNA, 324 bp, Homo sapiens
ggagtcgtcacaagtgtgtgcctctcccggtctctcttggctcttggcatgtaaaacacctgcttctctttgccttccaccatgagtggaagcttcctgaggccctcagcagaagctgatgctggtgtcctgtttcttgtacagcttgtagaactgtgagccaaataaacttctttttttataaattacccagcctcgggtgttccttcatagcaaggcagacagtctaggacaccccccaaatgtgagctgcaccataaggcaaactgggaaacctcctttagttttgcatatgtgagaattttgattgactgaaccaaggaa

SEQ ID NO: 201176 - DNA, 731 bp, Homo sapiens
attaagttgaagaaattttctgcccagcttaataaacaaggtcaaaaatgtaaagttataacaaggaaggaagtgtagcattggctctatcattaaatcacagatctgagtatttatgactaagattaatccttggccattcaaagctacttatacacacacacacacacacacacacacacacacacacagcccataaagtatggtaaaaactggaattctaaaaagtaagacagcaatgacaagcaaagaccaaaatagctaaatttgccacaaacgcatctaataaaagacattctactgaatagaaagatgaatgaatagggaagtgtttttagctagagaagtgtcaacttgtgattaaataactgaaaggatatagggctgcatatcccttcatccactgggtacccacccatttgctctcagcagaactaaccagtgacaaactgcgtccacagatcaacacagaatggagtgcttcatacggatgcatacctaagccagtatgttctcaggccatcttgctcactagcagctagttttgatgaaggtgtttgtaggtgtgacaccaaggatattaagtctggtgcaagaaattctatcaccgggaagcagaaaggactaaattgagttcaaccatgtgtatatggttagaagttgaaaggaaataatctaaagtcctgtttgctttgttactgtactgcccattactaggtagagttgctaga

SEQ ID NO: 201177 - DNA, 244 bp, Homo sapiens
aaatctgatggaaatagtctttgctaatctaaagctaaccttcacagcttcttcccatgtaatggtttgtgcatgggaaacctcagtgaacacagcaactaagctaaaccttaatttaatagaactcaaataaagggcactttaaaaagccacaaattaggcaaaattaagattatttgacttggcactaatgtagaaattttccatgttgtatcctaaaaggtctagagcagtggtccttaca

SEQ ID NO: 201178 - DNA, 225 bp, Homo sapiens
tacgtgggcaacctgggtgtagaagggaaaagaaagaatgaactccctctgaccttctggtgcccagtgattccagccactagaaacaaaaccggcaatgtatcctggagcctggcttttgagaccagtattcctcctacttgctgggtgggcatggggaagagttaaggcgacaactttacctcgcatggctgcgcatgctattggtcaggaaaagactacttc

SEQ ID NO: 201179 - DNA, 572 bp, Homo sapiens
atttcccatggaattacacatacagataatattctagacagccagaaggtaaggcaggtgaaaagcagaaggagctataacagcagggatatcttaagtgactctgagatcagactcactgtcagatcacgcacagctttgcaattactgcctatgttttcatttcccattgttacttaagcgattaggggaaaaatgattcaaaagttatctgacaccaatttttaaaaataagctattctcaagaccacatactcacataaaaagaaaacaatttaaacatgcactggtgtctaatcacctaattactaccttagttgaattagtttcactggtaacatcacatgtcattgaattttatgttaagattatacaaaaataaactattgtgcaagaataaaacaaaaaactctcaagtatttctaaatttttctgtcacagggtaagcaatgcaattaaagacaacagcacaaactctcttacaatgacccacagagttcttaaaattaaaggttggtttgaacagtttctaatgctaacataagtcaagtgtattacttaggcactaacgc

SEQ ID NO: 201180 - DNA, 456 bp, Homo sapiens
acatttaagaaagaatttataccaactttggacaatctttttcagaagataatagcagaggcaatacttccaaactctttctatgaggccaggtttgccctaaaccaaaaccagacatagatattacaaaaacaaaaaactacagatcgatatctctcatgaaaatagatgcaaaatcctcaacaaaatagtaaatttaatccaacaatgtataaaaaaattatgtatcctgaccaagtgggatttatcccaggcacataattctggatcaactttcaaaaatcaattaatataatccaaaatatcaacaggcaaaaattacatgattatatcaatagatgcaaaagaagcatctgacaaacttcaacacccattcataacaaaaatattcaataaactaggaatagaggaggacttcctcaacttgatacagacaatctgtaaaaaaccttatta

SEQ ID NO: 201181 - DNA, 486 bp, Homo sapiens
tttagaggatcccgtgctcacttcatcgcgttatttttgtattttttggtgagacgggttttcaccgtgttacccaggctggtctcgaactcctgacttcaagtgatcctcccgcctcggcctcccatagtgctgggattacaggcgtgagccaccatgcccagcctagacccttaagaatgtttgttgaatgggtgggtgaatgtgctgaggcatggagtccagtccagagtcattccttccttatgaagcttacatacaaattagagagagagagacaaaaagtaaaaactacaggtgataaatgccagatagtgataaatgctattcagaaaaataaagcaaagtaacaggatagtttatggaggatgttactttatatggatggtcagggaggacactgtgaggtactccctgtgcctactctagggcgccctgggagctgagacctgaaggaagtaagacatgtggctatctggaggaagg

SEQ ID NO: 201182 - DNA, 547 bp, Homo sapiens
ttttttacaggcagggtctaactctgtcacccaggctggagtgtagtggcatgaccatggctcactgcagccttgaactcctgggcacaagagatcttcccagctcagcctcccgagtagctgggactataggctcacgccactgtgcctggatacttttttaaattgtattttttagaggcagggtcttgtttccttgcccaggctggtctcgaactcctgacttcaagtgatcctcccgcctcggcctcccatagtgctgggattacaggcgtgagccaccatgcccagcctagacccttaagaatgtttgttgaatgggtgggtgaatgtgctgaggcatggagtccagtccagagtcattccttccttatgaagcttacatacaaattagagagagagagacaaaaagtaaaaactacaggtgataaatgccagatagtgataaatgctattcagaaaaataaagcaaagtaacaggatagtttatggaggatgttactttatatggatggtcagggaggacactgtgaggtactccctgtgc

SEQ ID NO: 201183 - DNA, 633 bp, Homo sapiens
  misc_feature (137)..(137): n is a, c, g, or t
tcggtacccgttcttgtttttgtttttttgagaccgagtttcactctgtcgcccaggctggagtgcagtgctgtgatctcggctcactgcaacctccgcctcccgggttcaagcgatttttctgcctcagcctcccnagtgactgggattacaggcatgcaccaccaggcccaggtaatttttttgcatttttagtagaaacagggcttcaccatgttggccaggctggtctcgaactcctgacttcaagtgatcctcccgcctcggcctcccatagtgctgggattacaggcgtgagccaccatgcccagcctagacccttaagaatgtttgttgaatgggtgggtgaatgtgctgaggcatggagtccagtccagagtcattccttccttatgaagcttacatacaaattagagagagagagacaaaaagtaaaaactacaggtgataaatgccagatagtgataaatgctattcagaaaaataaagcaaagtaacaggatagtttatggaggatgttactttatatggatggtcagggaggacactgtgaggtactccctgtgcctactctagggcgccctgggagctgagacctgaaggaagtaagacatgtggctatctggaggaagg

SEQ ID NO: 201184 - DNA, 611 bp, Homo sapiens
ccactccaactttcagcaaccaccaccacccccatccgtcagtggccatccacatcaaagcaacatctttcaccagcaaaaagattatgacttgctgaaggctcaagtgatcattaacattttttagcaataaagtattcttaaattaatgtacttaacattttaaaaatacataatgttattatgcatttaatagactacagatagtataaacctaacttgaaaatacatggagaaactaaaaaattctcgtgatttgttttattgtgatactttattgaagtggtctggagctgaacttgggttatctctgatgtatgcttgtaaatttaacagaggttatttgagcattaacagatgtatttattgggcagcacttagaactagaaaaggctcagagatgcccacttcaatagtgtgagcagtgggcttctattggctgaatgtggaaccaaagtaaggaaattacttaattgactacagctgtgttgtttttctgtatgggtatgatttagtagaaagtgtccagttacgttatctgatgtctagttggctgttgtggttagttgaagcttgttttttttttttttttaaatttaatttattacaag

SEQ ID NO: 201185 - DNA, 325 bp, Homo sapiens
ttccctcacccaagggcctccagcaccacctcctcccacgcagcagtctcctgcctcttccctcacccaagggcctccagcaccacctcctcccacgcagcagtctcctgtctccagagctgcgccttttgtggatgtcttgcaggcaagcctcacttcactgtgcttcagacactgcttttcacaaacgggaggtctttggcaaccctgcaccaagcacgtctgtgggcaccacgtttccaacagcaggtgcccacttcatatctctgtgtcacgtttcaataatgctcatgatgttccaagctttctcattgctatcatatct

SEQ ID NO: 201186 - DNA, 488 bp, Homo sapiens
ctttatcaagtgccacaaggcatgatccaggtaagatctctgaggattcagagagttgggagatctctgggagaagcctggtgaaggggcaggatctgctagatctagaaggcagggttgtgtttggatgagtagcagggagaatgcagggtatatttggcagtgggaggagcacaaaggcatgaagctggaatgagctgagactgtttaggggaccatgaggagacctgtcagggtagaaaattctttttttttttaattaattaattcattcatttttttgagatggagtcttgctttgtcacccaggttagagtgcagtggcacgatcttggctcactgcaacctctgcctcccaggttcaagcgattcccctgcctcagcctcctgagtagctgggattacaggcatgtgccacaatgcctggctaaatttttgtattttagtagagatggggtttcattatgttggccaggatggtctctatc

SEQ ID NO: 201187 - DNA, 277 bp, Homo sapiens
cgacggttggaagacaagttgtaaagttttaagaataaaacctcacgaaagtgaagtattcaaataaatgttcattttaatccttatgtgtggacacataaaaacaataacagaaggtagagaaagatgagatttttcactgtcaaatgtagtagaacaaaactagaacaagaaaatcaggtgcttttaggggtctggcattgttttaagtattggatattgggaaatgtgaaactcttcagacacacgttttactgaagttaaataagagattttg

SEQ ID NO: 201188 - DNA, 521 bp, Homo sapiens
ctaactgaaggtgaaaatacacaaaacaaagctgctgctttgtgaaacttccccacttactggtagatgttctaaaactcgcacaacactgggcacttcttcttacctgcccctcacatatgagagaaaaccaggtagcagcaaagaagcactgagcactggataaggtgacccctgtgccagtgccaggatgggttccccttccttggcatagtgctccccttcagcaattcattcaaatagatgcccaggacctcacccacaggccccagtggtggggtctgagcacatacatcttgaacaggcttcagaggcaaatctgatctctcagctctatcacctcactccttttctttcaaattctgggaagcagaaaggaactcaactctaaatactctgactagcctatgggtcccagtggatttaggccaaggaaaagggcatcttgcatgattatagacctcttttcttgtctttaattttaaaagcacggttcagtgttaggtggggagagggtgccc

SEQ ID NO: 201189 - DNA, 140 bp, Homo sapiens
ttgtgaggatatcagcactggagaagaaaccccaactaaggccaaataataagaaaaaggaacaagcaggtcaaggggagtgggtggtactgggagagcctgccagttttagaagaggaagaaacagcagtagaatcaac

SEQ ID NO: 201190 - DNA, 422 bp, Homo sapiens
  misc_feature (3)..(3): n is a, c, g, or t
  misc_feature (5)..(7): n is a, c, g, or t
  misc_feature (9)..(11): n is a, c, g, or t
  misc_feature (13)..(14): n is a, c, g, or t
  misc_feature (16)..(16): n is a, c, g, or t
gcncnnncnnnannancttacattttaagtcatctttttgtgtgtagcaaacccctcatttcttgtttctgaatgtgtgatctttgctctaattatgttgagagtgcctgttatttcacctgactctggttgtttgtgagctgctaagtagccatgaggttaaaacagactaggatcagagagcatctcagcctctcaggaccttagtttcctcctttaaaaaggaaggagattggactaaggtcatttggtcatgcaacaagagtatgtgatagataaagtaatgaacttctgttcggtgaaagcaatgaatagggctctccaaggtccctttcagctttctggttccagcagagcccaggcctcaaaatagaagtcaagattttattcagaagatagggattaccagtaccaacaataaa

SEQ ID NO: 201191 - DNA, 351 bp, Homo sapiens
actatcctatttgcaccacagaaaatgtgaaatatttataaaagcaaatagaagaaacttaaaatgaaaatcacagctgggcgcggtggctcacgcctgtaatcccagcactttgggagaccgaggcgggcggatcacgaggtcaagagattgagaccatcctggccaacatgatgaaaccctgtctctattaaaaatataaaaattagctgggcgtcgtggtgggcgcctgtaatcccagctactcaggaggctgaggcaggagaatcacttgaacccgggaggcggaggttgcagagagctgagatcgcgccagtgcactccagcctgggcgacagagcaagatgccat

SEQ ID NO: 201192 - DNA, 320 bp, Homo sapiens
gatatggtttggctctgtgtccccacccagatctcatgttgaattgtaatccccaatgttgggggagggacctggtaggaggtgattggatcctgggagcagatttcccccttgcttttctcatgacagtgagtgagttctcgtgagacctggttttgtagcactccccccctcactctctctctcctgccaccatgtgaagatgtgcttgtttccccttcattttccgccatgattgcaagtttcctgtggcctcctcagccatgccttccgcacagcctgtggagccgtgagtcaattaaacctcttttctttataaa

SEQ ID NO: 201193 - DNA, 154 bp, Homo sapiens
actgtgaaattgtctatcaattctagacatgtagtctagaatcactttttatactacattttataattgagcatcactggtatatagtatataggacagtttttggtttctataattaaaggttgactttattaaagtattaagtagatacacc

SEQ ID NO: 201194 - DNA, 410 bp, Homo sapiens
aatgcagattcctaagatatatggggtgaggataatttgtatacagatcataactggtctcgttcttccaatcctcttccaatcctctctctgaggaaataccacaaacaagatggccctctctaggtatgtccagatggtgcatttgaaaaccctggttctcctcaggcctcccagggaaagagtaggttcaagatttcattctcttcggaaattttctgaaggactctgcttttcaaggtcactgaacactctaagagacattgcatagtctgctagctgggtgtggttctgggaagacctgacaactcagtggaaatggaagtgcttctcaactttagaaagagagagcatgtggatttaactattcctagtactttcagctgggagagggctgctcttgtatcctg

SEQ ID NO: 201195 - DNA, 192 bp, Homo sapiens
gcttcagtgccttctgctgttatctggagctgtcagaaattagcctgttagactttctcttggacattttgtgtatgtaagattattaataaagtatgtgtctgtagctcaggacatcttgcagacacagactgtgtccgccttaaagtaacacccttgccccctttgggtcggtgaatgaagaactgtgtc

SEQ ID NO: 201196 - DNA, 323 bp, Homo sapiens
cattttagttgcctcctagaccttgtcagaactcattctttgagtttactaagaaacaactttttggggaggccaagatgggaagatcggttgagtccaggagttcaagaccagcctgggaaacatagtgagaccccatctcttaaaaaaaaaaaaaattgaaaaattagctgggcatggtggcatacacctatagtctctgctactcaggaggctgatgtgggaggattgcttgagcctgggagattgaggctgcagttagctattactgtgccactgcattctagcctgaatgacagagcaagaccctgtctctttaaaaa

SEQ ID NO: 201197 - DNA, 210 bp, Homo sapiens
aaaggatgccagtaagatatttaatcagtgttttccctgcaatttcaaactgcctttgaaattgcagaaagcctgtgttttcctaattagcaaggggtgtcatgataggaatcatgaacttttctatcaaataacgtttctgttctcgacagtctgtcaggtcattagagataggctgtacatttatcactccagcagcagcagaacaat

SEQ ID NO: 201198 - DNA, 508 bp, Homo sapiens
cttgaacacaggaggtggagattgcagtgagccaatattgcaccactgcattccagcctgggtgacagagcaaggcttcatctcaaaaaaaaaattatatatataaatacttctgcactataaaaagatgagtctagagcaggaacacaaaagcaagtatataatcataaaaatgaagtaaggcagatctacttagaccgcctttctcaaagtaattgacacagatgccctgtgctctaacacagtataattaatgtgtatcactcttaaagggccacattgcctgcctgtaccatgaagcatctttagagttggcactgtacagtcattaattacatgagcccctgagttaggtatcattatccctgctttgcaaacaaggaaaatcaagggtgttggtgcctagactctaagcagtgtgtggctgggctcaataaagaatcctggaatttctgactcttagcctgaacttgggttttttgcactgtggagtcaatacatcattgaa

SEQ ID NO: 201199 - DNA, 349 bp, Homo sapiens
gagaatcgcttcaacccaggaggatgaggttgcagtgagccaagatcgtgccactacactccagcctgggcaacgagtgaaactctgtcacacacacacacacacacacacacacacacacacagacacacaccaaaactatttaacctatttagatcgccaaatacccagggttataaagtttttgctgttcttgatggcttcatgccaatttcttcaacctctcaaatacaaatacgtgtcttcctccttacaaatcagcacaggactgcagtcctaaagcctcaattcaccccctgtaagtttatatcaacttattcaacacctgtggctaaacctatacacccac

SEQ ID NO: 201200 - DNA, 419 bp, Homo sapiens
cattttcaaataatatttatcttttgtaaaagtattgaagaaatgttggactaaatactgactatgagtaactggtccccttagttatggatagcatggtattaagggggtttaggtcacaggattgagtccacaagtggcttgttactcgagtgttccatggtcaggaagttagttcaactttgttcccagttttgtgctattgatcacaaaagagtcaaatgacaatatgtagatacaccagtgcaaataaattaacactattaattagtattttgtaccttgtttttctgtgtacgtggtgaatcattagtctcatttttattactgagcattttcattagtttggttgaggctggaaatgtttatgtaatttgtactatttatttgaatatttttgaaagttttgagaaaattat

SEQ ID NO: 201201 - DNA, 365 bp, Homo sapiens
ggtggtcagtaagcatgcacaggtgataccacatgcacacttcactatagattcagatggaggatggaggaagaagtggatattgggaggatgggagagatttccttcaggaaagactgggagaaatgtggcttttgagctgctctctaaaagatgaacagtgggttgagacctgcagtgagactcaacaagtcaaaactgaggtgggatctacttaacccaaaaaggttgtttatatatctgtgcactcagcaagcaggtggcaagggctgttgttttcctgtgggatgggactgtggtagaagtgctgtgtcatttagtaccttctgtgcttgtggtacatgggtgcgtcatacagtcattta

SEQ ID NO: 201202 - DNA, 634 bp, Homo sapiens
gcaatcctgagcaaaaagaacaaagctggaggcatcacactacctgacttcaaaatatgttacaaggctatggtaatcaaaacagcatgatattggtataaaaatagacacatagactaatggaaccacatagagaacccagaaataaattcacatatttatagccaactgaattttgacaaaggcaccaagaacatacaatagggaaggacaccttcaataaatggtgctgagaaaattaaatatctatatgcagaggaatgaaacaaggcccctatctcaccatatacaaaaatcaactcacaatggattatagacttaaatataagacatgaaacaataaaactactagaagaaaatataggggaaacactttaggactggtctaggcaaagattttgtggctgagaccttaaatgcatagactactaaaaaatagacaaatgggactgtatataaagtgcttctgcacagcaaaggaaacagtcaacagaatgaagagacaacctgttgaatgggagaaaatattggcaaactcttcatcagataagagactaatatccaggatatgcactaaactcaacaacaacaaaaaataaatcttttaaaaagccaaaaatgagtagacaattct

SEQ ID NO: 201203 - DNA, 506 bp, Homo sapiens
tgaaaagcctaaggctgggtgcgatggcccatgccctgtaatcccagcactttgggaggccaaggcaggtggattgcttgagctcagttcatgaccggcctgggcaacatggtgaaagcctgtctctactaaaaatacaaaacttagctgggcgtggtggtgggtgcctgtaattccagctacttgagagcctgaggcaggagaatctcttgaaccccagaggcggaggttgctgtgagctgagatcacaccattgtactccagcctgggtgacagaccgagaccctgtcttcacttaccgcccccccccgccccccgaaaaaaaaaaggcaagcctgagtggcatcaaacctttgtttcccatgaatatactagtccctgcttgatggactgttacctgggaacaggggcaaacagggagttacagtcaagccacaaatgggagatttgcaagcctgacccaagcctgaaagtgctcatctagtctcatactcttgtaaccatct

SEQ ID NO: 201204 - DNA, 304 bp, Homo sapiens
cccgcgggttgccacgttttcccagaaattaccaagtatcctatcccttgggtgagaaccactggagtagagtatagaaagtggacttggagtgaagagactacaacttaaccactggcaaaatccatcctcagactactctgcatgtctacacacccttctacacacatgtccatgtgagcattcccttacctagagactacattgtaacattacaatgaaatttgtattaaataatgaagaagcagaagtaaaaagaaaatagttaacatatacagagacacacaccaaacccatgagaatg

SEQ ID NO: 201205 - DNA, 463 bp, Homo sapiens
aatcagaaaatgcaggctctagcccagctctgccaaggattaactttgcactcttgggaaaatcacctcaatggtatcagcttcatcatatttaaaataagaggctagaaccagattagctgcttgtcaaagatgcccctccacccaccgagccctaaggctgcctagagatgaagcctttgggatcttcccccacttcagtcagagctatgcctcttctacctgctttatattgatgttgttgtttgaaggcattatagaaggagtttagttactttcaatagtttgagaccgccgaagccaaattcttcatatatataatcttttcctctgttttttaactgtcatgaagagaaattcttcctagggtcatttgcagtgctaaaaaagtttgtacatctgattaaatcttattaaagttgtacatctgattaaatctgattaaagagcttctccctgttct

SEQ ID NO: 201206 - DNA, 279 bp, Homo sapiens
aggtaggtaattagagaaatgaggcaggtcttttcctgtttggaagcagctgagtttcataaagttgggaggctgctgcactcgtttctgctcttccctctggtctctttgtgacccatcacccctgtcagtccagggcctaccttctccatcctctgtgctcacttccgacctgagacggtagcaccactttgatgccagcaatatcctcatttgatttctagtccaaacttctcacatactaaagactcagatatccacctgcccatgtaacatctc

SEQ ID NO: 201207 - DNA, 294 bp, Homo sapiens
ggcttgagaagtagcctgattgggagcccccagccccagcaaagccacaccgttgcttccacaaacacccacagtctaagccactgaggcatttgcagatactgctgacattgataacagtcaagaaatcacagggagactatgctactgcacccacccagaaccaaagccaaagtgccttacccaatcaacagtgtaggacacatctataggaaaaagtctttccctatgaaaactactccataaaattggaagaggcaacttccaccagatgtgcagatattgagagatata

SEQ ID NO: 201208 - DNA, 525 bp, Homo sapiens
aagtatgctgacggtggaggagtgtgcatgagaataggatgcctgaaatcgcaaacatatccacccacagaaacacataatctcacaaacacctattcactcaacactcaccctttgtgtcttcctgccgctttctctggaccacatttgagtcacaaaatcccaggctcagcttgagtgcaatcacaaatgtatccacctacagaaacgcataatctcacagatacctattcactcacatactcaccctttgtgtcttcccgtcgctttctctggactgcatttgagtcacaaaatgccaggctcagcttgagtgcaaggctagccagaccacacatagggcatgaaggagaggccgttatggttctcggtaacatccacgtatgtttctatgctttggccacccagatcacctcagctgcaggtccattcatcaatattacgtatctgccaaagagtttttgtttatgtacatctaagaaatttcaacagaaaggagataagcccaacaccattatccattta

SEQ ID NO: 201209 - DNA, 340 bp, Homo sapiens
aaccctcccagtacatcagaatcaccttagtggatttttaaaatacagatgccagggctctatcccaagagaagcagttagttgaaggtcataggaaataattattttttgaaagttttcccagatgatactaatccagtacaaaacaggattaaatgaagtcatcatagtccttttctgtcagaataaaggaatagagcttccattcaaagaatggaagttttataaattctatatctaggctaaggggacataatcataggttaagtggagaaaactgtgactcaaatactttgtgtgacttgattgaaggatgatatttttctgacagtgtgtcaac

SEQ ID NO: 201210 - DNA, 294 bp, Homo sapiens
acaagctttagaatgacaaaggcatgacaacaatttgttttgcagtaaatgataatacattattttcctgtaaaggagacaaaatgtgtataggatatattgtctgcaccaaaaaataagctcctttttgggcagggaccttttcttgcaaaactttctatctcctaggatgctttgcatataccaggtaagcattaacattcactggccggatagggggctcatgccagtaattccaacactttgggaggccaaggaaggaggatcacttgaggtgtggacaatgtggcaaga

SEQ ID NO: 201211 - DNA, 395 bp, Homo sapiens
atgatctctcagtggagggtttttgcagggtcttcttggttaaaggggccttttgaattaaaacggaagaaaatgaaggcccttgcctcatgaacatcagagcttggagccagactggcctgtctttattccctttcttctgtgtagagctggtggtcccttctgtttttcaaaaatgaagatgcttggatactcaatgcctggacttgctcattctaataatataatggtgaaatattaacttatctaagtactggaagcttcaataaccattctgcctgactctttgagcagaaaagactgtggaaaaaccactgtgctctcattttcaccctcacaccccacaaccctccattaatttccaggcatcacccttcattagccaccccagggct

SEQ ID NO: 201212 - DNA, 236 bp, Homo sapiens
tccaaaccatatcaataggtctattcacctgttgtctagagactgtgacactggtgtcctgactggcctcttgccacctgtctcatcccagaccaactcattcttcacactattgccaacattaaattaaaaatactttcggctccgccctgtctcttgattgtggaatcagagggatctcacaatccagttctcagtgacattgactgtgtttctttacctgttcctgtatgtga

SEQ ID NO: 201213 - DNA, 459 bp, Homo sapiens
ccaaatttcaaggatgctcaaggtccttgatataaaatggtatagtattgcacgtcctcccttatactttaaattatatctagattaacatatactagcaaatacaatgcctgtacatcacttcattcacatggattcaacttagtacttggtgcatggcaaatgcaagttttgctttttggaactttggaatttttttccccaaatattttctatcctagattgctgaatccatgaatgcagaacccacaaatatggagggctgactgtatttatcaaacatcaggttgtataccacaatttttttttattatactttaagttctagggtacatgtgcacaacgtgcaggtttgttacatatgtatacatgtgccgtgttagtgtgctgcacccattaactcgtcatttacattaggtatatctcctagtgctgtccctcccccatccccccacccca

SEQ ID NO: 201214 - DNA, 339 bp, Homo sapiens
gtagcccaagaactcaaggggctagcctgtgagctctagggaccagcgaaacttagacaaaatgcagtagactaacaaaatcagatcaaacaattactgagcttttagccaaatgccagatagtgagagagggcctggagatatggtggggagtaagaaagtttctgtcccaggggaatctcaagttctgaaatgatagtgtgccagaattgagaccaggagcacttattcattcactcaatatgtatttattaaagttctatgtaccaggcactgctctaggcaaccagaagcagaataaaacaaaatatgggtccctgcccttatgaagtttgcttt

SEQ ID NO: 201215 - DNA, 197 bp, Homo sapiens
actgggcaggattattaattggagaaaggaggaaaggggaaacatgtaactgttccaccaaatcatgcctctctcttctttctctttctgaatttcaatcgggaaatgacatgcatcccctgccagctgtattacttaactgccacctcagacaccatctcctaatgataggctgtttcgggagatggctatcacct

SEQ ID NO: 201216 - DNA, 191 bp, Homo sapiens
tctttctctcccatcggaattctctcattctcctacccatagtgggagctaaggatgtttcttgcctcctaagacttggaagtcttgcgttctcccacatcagaaacctacctgacccaggcgctcctccctcaggaactggatgttgacaatcaacatgggctgatgggagaaggtgaacctcccacacc

SEQ ID NO: 201217 - DNA, 472 bp, Homo sapiens
caagccttgaatgttgaaagagtacgctgaagaaggtctaagcattttgtacaaaatgggtgttacatttagttttagtattcagcgatttcatgaaaggaaggagatttgcagaggttccctgttcagataggcgactcgttgagggaagttttctagtagctgctgcaatttcagaagtgtgttccatgactgaagagatagaaaggagactatggtacatggggaaggaaattctctctgctgggctctcggtactctcccctgactgccttgctcccctgcaaggcatacacacactgctttaaaatataggggatttatttttcttgtgaatgtgaaacactgaatcagcaggtgctaattggaaatagagttttgtggactactcaaggacagcagtgtttccctttggggccacaaactggactttataatttcctattgaatcactgcaacaggcttcagccag

SEQ ID NO: 201218 - DNA, 448 bp, Homo sapiens
tatttataaagaacatatcaacaaggggttcaaacccagtgatacagctaggaccatgtagatcccaagagatagcagaggcagagctgctaggctggtgggctgagaaactaaagcagaacatccaagcttatccacaggcaggccaaaggagctgataaaatcaccgagagagagtaataactttctgggttaagttagtccagaaggcaaggaggtggtgggggttagaagactgatcgaccaataaataacataaaattacatgtcaataccacttacatcaatacaaatacccaaaatgaaacataaccaaacaaaatccagtaccagattaaaaacataatatacaacagacaaataggacttattccaacaatatagactagtttaatatttggaaatctattaatatgataagccactataacacagcaaagaagaaaaa

SEQ ID NO: 201219 - DNA, 409 bp, Homo sapiens
gtttggattgacaccagaattatttccctcacttagatgcatacagttttgaaaataagaatgggaaatatctctaacaactgaccaaataactcactcagaaatgaagtacaaactcattcttaaaaatcaaagagaaaggccgggcgtggtggctcacgcctgtaattccagcactttgggaggccgaggcgggcagatcacgaggtcaggagatcagaccacggtgaaaccctgtctctactaaaaatacaaaaaattagccgggcttggtggtgggtgcctgtagtcccagctactcgggaggctgaggaaagagaatggtgtgaacccgggaagtggggcttgcagttagccgagatggcaccactgcactccagcctgggcaatagagcaagactctgtctca

SEQ ID NO: 201220 - DNA, 336 bp, Homo sapiens
accagcctccccgctgcacttaaactctgacaagtcctttcccacctcccagcccatgcgcttgcaaactgaagtgtacctgtcaatcagctgggggccttgtcaaaagcagattctgctgcggtggatgtgaggtgagcccaagctcccacggtgatactgccaagtccctggagcacacgtggaggagctttggcatgcagtaggtgctcaacaaaattcatctcctggtgttatattcacctgactaaatttagaaggaactgtgtatctgaccctcctgctgggattaaattggaatcgcttcagatctatgcaagaccctgacttaaatct

SEQ ID NO: 201221 - DNA, 546 bp, Homo sapiens
ggttcatgaggatcaaactagatctcatttggttttccacaaagattgggactatgcttcctgggagtcacagcagaggtcagctgcacctgatctaaagccttatccctagttttccactttgccattttcttgttttaggtgagccccatgcccaatgcccagactctagtatttttttctagagatgcactgtactccagcctgggcagagtgagactctatctcaaaaaaaaaaaaaaaaattgggacttcccgtgcctcttatgtgtcagtttccgaaaacggacatagaggcgggggttgaaaaaggtttacaaactagacttctcttttctccaatcttaatacagccatccatttcataccatggtctcagtcaacagcggccgtgttaagatggtaggggagatgaaaatttcttatggcctagggacatggtagccatgtgattgtagtataacacatttactcacttgttgtgtggtgttgtggttgtaacaaagcttatggagcggccaggtggccaaataagtgtatagcaaa

SEQ ID NO: 201222 - DNA, 485 bp, Homo sapiens
gcgtcgacgggtggaggagtggcagaggatcccctggggagagcaaagtcccagaagacagaggaactccagtggcccaactcctcaatcttggagcgccagagctcagccgagctcaccggctccctagggagctggggcaactgttagctccccctgacctgtgtgatcctacgtccagtggctgccccgacctctgtgatcccacgtccaggggctcccccgacctctgtgatcccacgtccagtggctcccccgacctctgtgctcccacgtccagtggctcccccgacctctgtgctcccacgtccagtggctcccccgacctctgtgctcccacgtccagtgggtccccctgacctctgtgatcccacgtccagtggctccccctgacctctgtgctctatgtccagtggctccccctgacctctgtgatcctatgtgcagcggctgctggcctctcaaacttaatgtgttcattgcgg

SEQ ID NO: 201223 - DNA, 357 bp, Homo sapiens
aattagccgggcgtggtggcacgcgcctgtagtcccagctattcgggaggctgaggcaggagaatcgcttcaacccgggaggcggaggttgcagtaagccgagatcgcgccactgcactccagcctgggcgacagagcgagattcggtccccaaagagaagaagaagacccgcagtaggaggaagagagaggaagtggagtcggccagctgggatgctggaagccactggatagctcaggctgagagagggcgctgtgctccgcaagcctccctgcaaccgcaggcctcgggccgccttcctccaggaagacgctccagacttctggtatccgttgagatctagtttcccttgagac

SEQ ID NO: 201224 - DNA, 350 bp, Homo sapiens
tcccctcctcacaccatttcctgatagttctagaaaaaaaaaaaaagcagtgtggggacacatttatgatttccctctccacccaacctcccaccaatagcttcttaacgctaaaagaagtctcttgatcagggtagtggggacatagtgaatacctatgtaaaaattcactgagatgtatgcttaggatttgtgactttatgtttgtcattccccaataagaaaagatcctttaaaaagtcacttaaaaaaaaaaagaacctagcaaatctgaaacagagaaaaatatgcatctgctaaagaaactggggaaaggccataaaaatgccagcaactgtgaagaattcttt

SEQ ID NO: 201225 - DNA, 199 bp, Homo sapiens
gccttctactgcaagggtttggtaatcatagcaatcactgaagccattcagccagagctgagagtaatgtcattcatagatgctgtttgttacgttttataaatcaatcttatccgtgcaacctggaaagttcatctcttgtttaccttcagtacaaagaaagtccattgtacatacacaaaacagcccccaaacagcc

SEQ ID NO: 201226 - DNA, 491 bp, Homo sapiens
tgcacaggggtgactcaagagctaattctttatactaaaatttcattcttcaatttactgtatggattctgcctcgtaaatggaccttgcttagcacatgtaccataaagctacagtaaccaaacagtggcataaaaatatagacagatcaatgaaatgaaagacctaagaatatataaataggtctcaacatatatagatcatggcaattcaaagaattgataggtttttcaaaaagtgatgctaaaaaatttatatccatgtgaaaaatattacccttgacccttacctctatcataaagaaaaattaaattgaattgcaatacagacttacatgtaaaactgtaactggaaacatctagaagaaaactgtcatggccttggtagtcaatgctaccttaagaaacaaaagcaaaaatcataaaagaaaaaaattttttcattaaaagggcttcttaaaaattcaaaacttccgctgagaaatagcttta

SEQ ID NO: 201227 - DNA, 529 bp, Homo sapiens
agttgggtattcatatgggggaaaagttgagttcataccacattctatatacaaaaataaaatccagatgatataaaaaaccttatttaaaaaaatacagctataaaataagcaaaaggacagtgttttataatgatagggtggtgagggaattcccaagtaagccacaaaacccaaaaaccataaaggaaaggagttagacatcttcctgtgtcaaaactctgagtgtgtctagtgaaagctgccataaacaaagttaaaagacatgtcatagataggttccacaacctctataacagacaacagattaaaatctagacaactgaaatctttcaaatcagtacaggaaagaccaacaacctattagaaaaatagacaaaagattaaaacatgcggctcacacaagaaatgtaagtagtcagatcacttgagctcaggagttggaggctgcagtgaactgtgatcacttttgtgaatagccactgtacttcagtctgggcaacacagtgagaccctcatctctttaaaa

SEQ ID NO: 201228 - DNA, 466 bp, Homo sapiens
ttgttaaacgtttctcaggagagaatccaaaattgatgtttgcacttcagtagtaaatcattgaagatggagaaattatgccaagtgactctctcaagcctttttaactcagacgcactgcctcctcaatcagctcagcagataaacctcaactaccttaagcaaagacttccttacttttacactttcagtctctgtctccccacttttccttccaacttctgacttttggtgactcttacttccataccttccctctcttttccactgccctccttctcctcaagaacaatataagacttaaggatgcattctctaatcaagcacagagagcttggtgatgaattacccaaaggacaaaaggtagggagctgaaggagaacagatcataacttgaagcactcaactttatattgccaactttcattcttaataaagaagtggttaaaatggttataaatagttc

SEQ ID NO: 201229 - DNA, 486 bp, Homo sapiens
acatagaaatggtattgaaacctgcaggactaataaaataatctagcaagagagtagagataaagaaaagaaggccagaatcgagctatagcaccgtcacacagttagtctgatagagtagaggagccaagaatggagatgggaaaagatcagtaatgaggtagaaggaaaattaagagtgatgtcacagatgtcaaaaaggggagtggctcaagaaggcagttgttttggggagtaccatgaccacctactagtgatttgctggaaggactcactcacgactcaatatagaatcatattcaaggctaagatttattacagcaaagggtatggtgcaggaacagcaggatacagatatatggtggcaaaactagagaagtcgtagtaggctttcttgtcctctctctgtagggattccacatgtttctcaggaatgcatgtttctctccagctgtaaactgcagagacatatgcaaaacgcctcca

SEQ ID NO: 201230 - DNA, 270 bp, Homo sapiens
tattgttgtgctgacaccaacagacgttcatcctgagccagagtttcacatattccctgggcatgactaggaacaggtgcacccagtctatctcaatttacttgcatggatcaaaaatgtttccctaatatattccacaatgattatattgcatactccttaatttatgaatttcctattaataaagagatatcataattgaaaaaagtcatcaaccattgaactcttaaattactttcaattcgactgcttggattacaaggaggggtg

SEQ ID NO: 201231 - DNA, 345 bp, Homo sapiens
tgtgacggcttcagaatcaggtggagggcaactgagaagaatggaaaccacctcacattctctcctacctggtctaactttacagacgaaatgcatctttcagctgcatcacaagagaggaagccaaggtcgtagggtcttcatttctgaaaactgattgttcaagtaaatccttcagtcgtccccctgatgcgacctgctagggaagctgggagtgccttcacagtggctccaagggggtgtccttataggggattacatctcaagacacattttacccagcaagaggctgcatgactcagcagtctgatgaagaaagctctgttaagttaccaccaattgcaa

SEQ ID NO: 201232 - DNA, 280 bp, Homo sapiens
tccattcctccctccctccatccatccactcattccttcattaaagtatctctggcctgccaggtgctgtgctgggttctgagacaaaggtgtgaacagagacccacagtccccgtcctcaaggagctctagtttgagtggcaggaaggagggtggacagtaaacaaatcactcatttggcacagctgaggccagcactccagactccagcctctctcacaccttaaaggaggccgagttccactagaaaccgtgcctatggacatgaatagacgttctt

SEQ ID NO: 201233 - DNA, 921 bp, Homo sapiens
tttgtgaggtaggtggtatgatctttcagcctgtggaaacagctgccattgctgtgactcctgacgatctgtttttgatcagttagtgcagatgcttagatcatactgtcccagttttgcattaatttgatcaattctattgattacagagaagtgaggcccaagactaagccttgaaatctctaagtagctatttgctaccttgtaacactgttctgtttcatttattgaaacactaactcacaacatgttggaaatattaaggaaacctgatagtgtactgagggattctgtttcttttggtaagagttgttggcagctatctggtagggtgtctttatacttctgaaatcatttattgaccacttgaatgtcttagtattatacacagcaaaaagaccctgatgagatatattcacttcctgtgtatccagtcatatgtttagtaaggttgctaatgatttattttgggtcagaacaaagtaatgtgcatttcatatgcattatattttatttcttgtgtaaataggccattagggagatagactattaaatttaccaacctacactactgcttctgtcttatgaacacaaatttaaaaattaatctttatcacttatagcactttaaaaattctgtttttagaaataattttcaatttttttttttttttttgagacggagtctcactctgtcgcccaggctggagttcagtggcgtgatctcggctcacagcaacctcgacaacctccacatcccaggttcaacgattcttctgcctcagcctcctaagtagctgggattacaggcatgagccaccgtgcccagcctttatgcctggctaattttatatttttagtagagacagggtttcaccatgttggccgggctggtcttgaactcctgacctcaggtgatcc

SEQ ID NO: 201234 - DNA, 503 bp, Homo sapiens
cttgtgtttgccagttgcaaagtttccttgatcttaccaacaccagtgtccgcagtaaggacagtactgatgcaaatcagtaactgcattagtaaaaaagaatgtgaagactcaaactttgtaaaggctaaaagttgcacccacgcctggggcctgaggacagctacatgctgctgtgtggttggagggtgctggatggtggctgcggatctgtggtactgagaatggccatggtcacagcccggatgagcattgcctccttcctagggagacacatggcctggaacacacagcggctgcagccgggcagccttggagcataggttggtagcgctttcttcttgacgaagctcccactctgagtgcctcctccccagctctgctttcttaggctttgtggtggaaggggcaagggcagcccaggcttgcaggaggctctggagaaggttctgacctcagactgcaaagcggaccttggcactcagcctcacagacacttcaat

SEQ ID NO: 201235 - DNA, 603 bp, Homo sapiens
ggcaccttgatcaatgctttgtgttgtctcatttaaaactcctaaaccacacatcacagactcagagctgttaaatggcttgccgttaaaatggcggaaccaaaagcagaaatcagcccatgctcttcctcccagaccaggattactttaccctgccatcttatctcatctggaaaatgagagtacagatatctttctggcaggaatgggcattaatgcatgtaagactcccaacacagtatctggcatataactagccctaaggaaaaagtaggtgtcttagggtggcaaaattttaagatggagagttgaaatcaaaaatgtaagagggaatcctgatgctcagagatctaccttgctcagggttacacaatcagaagtggtgtggccaaaatttgagcccaaatgacttcaatgtctgtggtctttccagaataccacctttctcaaggacatcatcaggcttaaacatacaaattttccaaaatacaaggctacaggagccctgctcagatgggtcaaattttattatgttttgttttaaaagaaatccaattaggtttggatgtgtgtatgtacatatgtacacagcaaggtaaactg

SEQ ID NO: 201236 - DNA, 239 bp, Homo sapiens
caaattcaacaattggttaggtgtacttacgtagcttcttaatttgtataatcaaggtggaaatttcctggttatgtaatcagagcttatttggcagtttatagttgtttaagcctgaaatttgtttccccaaatgtagtaatttattaacaaatcaacttgagtttacatttttttacaagtaggaatctgaggactagagccttctcagtctaattgcctgccgcttaattattttc

SEQ ID NO: 201237 - DNA, 443 bp, Homo sapiens
cacccatgtttcagaaggcactaattgtcgctttgggcgcctcagtgtcataactgtagacatcattcttgggagttgttggggggaaaaatcctagctacttaaggtttctgattgattcttgataaagtgaagattattgtgtgtggtgaatgagttcagtgagtccccatgatgcagtagtttttttaaaaaattagagagtaattatatcttttatggaaaaaagttgttttagtttgtcaggttttccctctttgaactgtttttaatgtttacaaacctcactttagctctaacattttgtgtttagccctcaccaaaaagcacttactgtggcaggaagattttgcagtaacatggagaaatccccaagatcaagtgctgacaaatgttgacagctttagcagcgtactgtgtaataaataactccgagggggcgg

SEQ ID NO: 201238 - DNA, 497 bp, Homo sapiens
aatgtctcctacctgaacaaccatcctttcagttggttccatctcaactaggtgttccattgtgccaggaatcaactcaggatgttttgtctgccacaatttcatgttttctgtcctcttgaaacaaacacctccagctgtaatccacaggcttgttagacttataaggagttcatcagatacctttaagatagagaactttgtggcttttttcagttgaatgtggaagatacacggcttaattttgctgaggtaaaacagcaagctgggttaggggcacaggtgtccttgttgctggaaggtttagtgtcttgtctttgcagaatgtgcaggagtttagtgaaattgattaaatatttctattagcctctcaagtacattatgttattattcatcatttcttatattatattgtgtttctacaccataaacttgaagagtaaaccccaagtgtgtgacgactatacagatattgacctttaaaaaaaaacttttaa

SEQ ID NO: 201239 - DNA, 632 bp, Homo sapiens
ttcctcctttgtctcaggctggggcaagtgaacttttggaagcccctttgttccttactaaagttacatattaccactctctctttcctatctgtgcacaattaacagtcagccagatcggctttcccaccctcccagcttccttcataggatacaccagccacctgggcctttcctggaagaaatgaacagctacacactatttatggtaacggtcagaattcaagggatggagaccctttgtgggctccgactgcttctcccaaggattcatggcctcctggatctctgcctgagtccttagtctacccacagttcaagttcactggggctgattctactgaagaatacacagaggttaattttcagagggtcaagtcttcttttcctgccttgctagaggagtcattctctacaaaaacaaaaaaagatttttaaatcaatcttctgataaaacttgcacaaaaggagacttttcaatgccttttgttattgagataaattagcccaactcaaggttggggtaggtcatggtatggttcttcagtttctcccattacagtcttcttggcttatgaggcagtttgtgctcctgtaaactccttagcacataccagcacacccaactgagc

SEQ ID NO: 201240 - DNA, 555 bp, Homo sapiens
ttagccatatgcagaagaatgaaaccggacccctacctttcacagtatatgaaaattaacttgagatggattaaagatttaaatgtaagacctcaagctatacaaattctggaagaaaacctaggaaataccattctggacattggccttggtaaagaatttatgggtaggtccccaaaagcaattgcaacaagaaaaatgattgacaagtggaacaaattaaaccaatgattcttttacctccttgcatttgtgcatgccatttattctccctgaaatgatagcctaccgttagcaaaccacccttggccttgcctcatccttatgttggataagaccattcaagtcgtagcttaaaagtaatttctgtgagaaaccttttctgatacctcaagactgcgttgagtgtccctcctctgatcttttctaaaactgtgtactagctttctatcagcacttgcaacttattcatttctttttacttgaagaaattacaatttccattgtaaacccactgtctatcgtaagaccttgtaaatggatgagtgggaaaag

SEQ ID NO: 201241 - DNA, 390 bp, Homo sapiens
atctaacaccgcaatctaaaaaattagaaaaattttaaattaaaaaatctaacaatgtattccaaagagctagaaaagaacaaaccaaaccccaaattagtcaaaggaaataaatatcagagaaggaataaacaaaattgagactaaaacaatactacaaaaaatcactgaaacaaaagttgcttagctagactaagaaagaccaaaataaataaatgagaaaagaaaaaggagacatcaaactgaatatcacagaaataaaaaggatcattagggactactatgaagaactatacatcaataaattacaaaacctaaaggaaatggttaagttcctggacacatacaacctttcaatattgaagcaagaagacacagaaaacctggaga

SEQ ID NO: 201242 - DNA, 1105 bp, Homo sapiens
gggaaatttaagcattttctgcttttccgaagtaaattttctaatgtttttcttaaagctgaactaaattgcaaaacttgctttaataaagtgtgtatttttgcatcagttaagcccctgacctctttatgttctttaaatttgattcattagtgaaattaacaaggttctgtgtttttctcacctcattcagttttataattaaccaataaaagcttattagcttttaaggaagttttaggaacttaaattgatttatgggcaccatatggttacatcaaaggacttgtttttgttttaactggaagtggattcttaagtcctttaagatggaaatttatgttctttctattataccaagcaatactttctgataatagttagtgatttttttttattccatgctaccagttggtcatgcaattcaaatattaaatactagattacagatattagaatcttgtaatgcatctggtttaatacctgtcattttgtagaacggttaaatgtcttcccaaggtcatacacctaatcagtggtatattcaaaacccaaatcctaggcttcctatctgaagtccattgcttatgaagtggtttgctatgtgttctgactttgttgattcaaataagtaagctaaatcaatttaagccattaataggtttataaagttatttgctatgtgttgttcttacatcattgattcatgtaagtagacttgtgtgacagctaattcttaaaaaattatgaagatgttagacttcttttgatatatatatgttgattgtatgaacagattgacatcaatatacttattcattataaaagatttgagtgggaactcaccaaatcccacaccaaaaaatttaaaattttaccatagtaaaaaaaactaaaaagcaagatgaaattatacatagttcttggtgtagtatttttaatttttattatttatttttatagaaatggggtctcaccattttgccaggctgttctcaaactcctggcctcaggcagatcacttgaacctgggaggcagaggttgcactgagctgagatctcgccactgcgctccagccagaatgacacagcgagaccctgtctc

SEQ ID NO: 201243 - DNA, 202 bp, Homo sapiens
catgtctatgaaatctatatgtgattcagtttttgacctttagaaatacacatgaattatttattgaaattaaaaaccaccaaaaagaacttaaattgatgagtttttacaaggtgaacagacaccaagaaactcagtatgatctgaaccccagaacctcactgaagtcccatttagtcactacctgcttcccaaacataac

SEQ ID NO: 201244 - DNA, 641 bp, Homo sapiens
aattccccaaatcacagtaaatagccagtttgggaagaattttaagattggataattgctggctttaaaggggtttttaaatttccttcgtttgtcttcttcacaagaaatgtgaagcctcttaaaggcttctttgccattacacaatggaggcagtgtacaatagtggagagatcatgggctttaaagccagatagaacctgggcttgaattgaatcacagctctgaagcttaccagctgtctggactttagtcaagcttctgaaccttacttttcttgtctataaaacttggatattaaaatagctatttcacaatgttgttaatgattaaacaagatgacacatgtaaaaagcttacaacctgacacatggtaaaggttcaattaatttgtaaacctttctttccccaaacttaatggagtagagacttttaataattgaaatgagaagtgtcttgcatgagaaaatcaagaaagtctgtttatattttctaaattcagaaaataatttttgagcaaactctagccactggggaatttttttctaagtgactaaggcccagtcctccagctactcaagagagaaaggcacattaataatacaattactgaacaagataagaggtggaaataatgtgtt

SEQ ID NO: 201245 - DNA, 401 bp, Homo sapiens
aagttgatgaggaaggaaggggtgggatattttggtccctcctgagtgtactgctgcttccattttactctcagagctcagcatgaccatcattattatatctcaccaggcaaccaaaagggcaagccactcaacagcatactcaatggtgagaaactgaaagcttttcctctaagtttagaaacaaggcaagaatgcctacgttgtgcacatgtaccctaaaacttaaagtataataataaaaaaaagaatgcctactttcaccatttctattcaacatagtactggaaatcctagtcagagcaattaggcaagaaaaaaaatatattcaattcagaatatgtgtattgtccgtttgcagatgacatgattttatatatagaaaatgctaaagactccta

SEQ ID NO: 201246 - DNA, 588 bp, Homo sapiens
agtacacaacataatgagatataaaagaacataaattgaactagaatgatataccccaagttcacaatagtggttgcttctggagagtgagaaagtggggattaatgtataattatatgccaggtgcagtagctcacacctgtaatcccagcactttgggaggccaagacaggaggatcgctttgagaccagcctggtcaacatactgagactgccatctctacagaaaatgtaaaaaattagccgggtgtggtggcatgcacttgtagtcccagctactcgagaagttgaggtaaaaggatcacttgagcctgggaggtcaaggatacagtgaactgagatcacatcaccgtgctctagcctgggcgacagagacagaccttgtctcaaataaataaataaattaaatattttttaaaaggccaggcctggtggctcacgcctgtaattcccagcactttgggagaccgaggtgggcagatcacgaggtcaatagatcgagaccatcctggccaaaatggtgaaaccccatctctactaaagatacaaaaattagctgggcatggtggcttacacctgtagtcccag

SEQ ID NO: 201247 - DNA, 338 bp, Homo sapiens
ctgcaggtaccagcacatctgggcactttctccatggtccgctgtcctaatcctgactatttcagcacccagggagcaagccaagaacaaaaacacctatcatccatgcccggcattagaaaatctcattgttggtgagaatgatggtttccagcttcatccgtgtccctacaaaggacatgaactcatcgttttctatggctgcgtagtattccatggtgtatatgtgccacattttcttaatccagtctatcattgatggacatttgggttggtttcaagtctttgctattgtgaatagtgctgcaataaacatacgtgagcatgtgtctttatgg

SEQ ID NO: 201248 - DNA, 493 bp, Homo sapiens
ttccttgatgcatactattataggctccgggatggtaactgattcaaaaacagtatgtttttaatgtatcagtcagtagctgaagccaatctgaaaatgtgtttgactcaagtttttcccccttctatgccgatctcttgtaggttggaggaaagatggtaggcccaaaggctgtattccttattttcactgctaattgttttgtcctgttcttcacttctgttctttgtagcatgtatggggttttatggatggcccaggggaggtagaaaaaaacaataatgttctgaacttcaaagatatgtgagatatcacgtcagaagcaagcagcagagagatttctgaagaaaactgtaaataagccatacaaactataaataacttttctgtcttatgttgttgtttttttttttcctgtgcttagtacaaatctaggaattaagtcttatttttggctcaaaaaaaaaaaatcattgtcgtatacatcctgcag

SEQ ID NO: 201249 - DNA, 217 bp, Homo sapiens
ccaccgaggcaggcgctatagatgagtggtcccaccaggccatctccgtctccagcgactgccgtccaccctatgtccagcctccaaggccgaggttaggtggtagccgcagtgaatcactcgcgattcgcacgttacacacgatggcgacatgtggggccgcacctgggttataatatgaatatatccttgtatataaatatgtgtttgtaaaaac

SEQ ID NO: 201250 - DNA, 1967 bp, Homo sapiens
tccaggcgcaggccgaggccttcgcgcgccagatctacgggcccgagtgcaccttcaaggccagccacggctggttctggcgctggcagaagcgccacggcatctccagccagcgcttctacggcgaggccgggcccccagccccgagccccgcgcccggcccgcccgtcaaggaggagcccgcgctgccctccggcgccggccccctgcccgaccgcgccccggccccgccgcccccggccgagggcggctacggggacgagcagatttacagcgccagcgtcaccggcctctactggaagctgcttccggagcaggctgcgcccccgggcgcaggggaccccggggcggggggctgtggccggcgctggcggggcgaccgcgtaacggtgctgctggccgcaaacctgaccggcagccacaagctgaagccgctggtcatcgggcggctgccggacccgcccagcctgcgccaccacaaccaggacaagttcccggcctcctaccgctacagccccgacgcctggctcagccgcccgctgctgcggggctggttctttgaggaatttgtcccaggcgtcaaacgctacctgcgccgaagctgcctgcagcagaaggccgtgctgctggtggcccacccgccctgcccaagcccagctgccagtatgcccgccctggacagcgaggatgcccccgtgcggtgcaggccggagcccctcggtcccccggaggagctgcagacaccggatggcgctgtgcgggtgctgttcctgtccaaaggcagcagccgggcacatatccccgcaccgctggagcagggcgtggtggccgccttcaaacagctgtacaagcgcgagctgctgcgactggctgtgtcctgcgccagcggctccccgctggacttcatgcgcagcttcatgctcaaggacatgctctacctggctggcctctcctgggacctggtgcaggcgggcagcattgagcgctgctggctgctgggcctgcgggctgccttcgagccccggcccggcgaggacagtgctgggcagccggcccaggccgaggaagccgccgagcacagcagggtgctcagcgacctcacccacctggcggctctggcctacaagtgcctggctccggaggaggttgcggagtggctgcacctggacgatgatgggggtccgcccgagggctgcagggaggaggtgggcccagccctgccccctgcagcgcctccggccccagccagtctgccctctgccattgggggcggagaggacgaggaggaggccaccgactatggagggacctcagtgccgactgccggggaggccgtgcgggggctagaaacagctctgcggtggctggagaaccaggaccccagagaggtggggccactgaggctggtgcagttgcgctcactcatcagcatggcccggaggctggggggcatcgggcataccccagcaggcccctatgacggtgtgtgaccaggccagcccagtgacctttctcctgctgcacttggagggaggggacatacacacagtctcccatctctcctcccctccccctggggtggcccaccgcatgggtacagggggttccaggaatccaaatccagcatggcttggaggagctctgttggtgagaggtcgccctgcctcactggcaccctgggggcacagctggaagagaggcctggcccatgctcctctcagggcaggcacatgtacggggcatacaaggcacagcgcctgttggaacaggtggctgtgttcctgctctggcccccgtgcggctgggcctccgcccctgcaccagtcacatgcactggacgagggccgaaactcctgtctgctatcgagccctggtgctatgtggccccggagccacagcacaatcatctcagtggcgaagcacaccacttgattctatttttttttaacacattaaatctgttttta

SEQ ID NO: 201251 - DNA, 1738 bp, Homo sapiens
  misc_feature (1718)..(1718): n is a, c, g, or t
tccaggcgcaggccgaggccttcgcgcgccagatctacgggcccgagtgcaccttcaaggccagccacggctggttctggcgctggcagaagcgccacggcatctccagccagcgcttctacggcgaggccgggcccccagccccgagccccgcgcccggcccgcccgtcaaggaggagcccgcgctgccctccggcgccggccccctgcccgaccgcgccccggccccgccgcccccggccgagggcggctacggggacgagcagatttacagcgccagcgtcaccggcctctactggaagctgcttccggagcaggctgcgcccccgggcgcaggggaccccggggcggggggctgtggccggcgctggcggggcgaccgcgtaacggtgctgctggccgcaaacctgaccggcagccacaagctgaagccgctggtcatcgggcggctgccggacccgcccagcctgcgccaccacaaccaggacaagttcccggcctcctaccgctacagccccgacgcctggctcagccgcccgctgctgcggggctggttctttgaggaatttgtcccaggcgtcaaacgctacctgcgccgaagctgcctgcagcagaaggccgtgctgctggtggcccacccgccctgcccaagcccagctgccagtatgcccgccctggacagcgaggatgcccccgtgcggtgcaggccggagcccctcggtcccccggaggagctgcagacaccggatggcgctgtgcgggtgctgttcctgtccaaaggcagcagccgggcacatatccccgcaccgctggagcagggcgtggtggccgccttcaaacagctgtacaagcgcgagctgctgcgactggctgtgtcctgcgccagcggctccccgctggacttcatgcgcagcttcatgctcaaggacatgctctacctggctggcctctcctgggacctggtgcaggcgggcagcattgagcgctgctggctgctgggcctgcgggctgccttcgagccccggcccggcgaggacagtgctgggcagccggcccaggccgaggaagccgccgagcacagcagggtgctcagcgacctcacccacctggcggctctggcctacaagtgcctggctccggaggaggttgcggagtggctgcacctggacgatgatgggggtccgcccgagggctgcagggaggaggtgggcccagccctgccccctgcagcgcctccggccccagccagtctgccctctgccattgggggcggagaggacgaggaggaggccaccgactatggagggacctcagtgccgactgccggggaggccgtgcgggggctagaaacagctctgcggtggctggagaaccaggaccccagagaggtggggccactgaggctggtgcagttgcgctcactcatcagcatggcccggaggctggggggcatcgggcataccccagcaggcccctatgacggtgtgtgaccaggccagcccagtgacctttctcctgctgcacttggagggaggggacatacacacagtctcccatctctcctcccctccccctggggtggcccaccgcatgggtacagggggttccaggaatccaaatccagcatggcttggaggagctctgttggtgagaggtcgccctgcctcactggcaccctgggggcacagctggagagaggcctgcccctcggccgattnaaccaccgcctgtacctagc

SEQ ID NO: 201252 - DNA, 446 bp, Homo sapiens
ggcccaggctggagtgcagtggcgtgatctcggctcactgcaagctccgcctcctgggttcacgccattctcctgcctcagcctcccgagtagctgggactacaggcacgtgccaccacgcctggctaattttttgtatttttagtagagacggggtttcattatgttggttaggatggtctcagtctcctgaccttgtgacctacccgcctcagcctcccaaagtgctgggattacaggtgtgagccaccgtgcccagcctaaaaactggttttaaaaaaataaactggttgtagttaggcagggtgacatgcacatgcggtctcagggactcaggaggctgagacaggaggatcgcttgagcccaggaattcaaggcctgcttgggctatagtgagaccccatctctaaaaaaaaacctggtttgactttgataataatacctt

SEQ ID NO: 201253 - DNA, 874 bp, Homo sapiens
cctatttagcaccccatccctaagaaagccccatttatagcagtttttgacaccatggcttcgtgtatatcaaagcagggccttggagtatttgttaccagctgggctagcccagtgcaggccgttagcctagtgcaggccgtgagacagatgggatgtgggggcccaagtcactgcaggagcctccccagctgagctggcaccacatgtggctttggggggtggtttctccactcatgttctctttgttcatgatgtccaaacccgatctgtccctggtatccaaatctcctctcatcactgtccatgggtcaggggtcctgcaggtccccccaagagttcctgattcctctgcccaagccacacactgcctggtgcccttacctccaacctgagccactcccctctcctgtgagccccatgccagagtctatatactcctccttcctgctcctccctggtgccaagggagcacagctcctggagcacctctctgaggacagggctccaggaggactgctggccacatcttcatgcccagacgatggtcctgctgagccggcggttgatcacatctagacttgtagagtccaagatgctttccctccacgttgaaggtcagaggcttcccaccccaaccctgtgctggtccacagagccaggggctggccaggtacctactctgggatggtgggcaccacggcccccgcaggctgaaaacttgccttatccgtctatccgtccttctgtcctgtgtgtggtagtggaaaggcctatcctactaaaaatacacacacaaaaaaattagccgggcgtggtggcgggtgcctgtagtcccagctactccagaggctgaggctggagaatgggtgaa

SEQ ID NO: 201254 - DNA, 181 bp, Homo sapiens
tataaaagcgtaaaccgttagcacatgagaagagtaatagagcctgactgaaatttatagaacaggagtacatcaaactcaaccagcaaaaaacagcagatactctcacatggtttacttgaatcatattttaaaatatattagaattatggttgggcatgatggcacatgcctgtaatcc

SEQ ID NO: 201255 - DNA, 561 bp, Homo sapiens
tgtaaaatcaaggttgctgatcagggatgctgtatgcctccctgggattgagcgaaacagaacagatcactgtgtctgaaacgcgtggagaaatcgtcagctagagatgctgtggaatcacagagtagaagtgttatcattattcttgatcatcatcatcagggtaataaaaacatcattaaagacaccctgagacaaatagactgaggagcacagatcaagtgtctgagcatttctaaggaaacaaaaagccttgttccacctgttggcttctgtcctttttctcttgtgtcttttcgttagatttattggccgatttgtacagagaatggggtgggaggggttgggttttcccctttcctcctccttgtacgtatttttgttttaaagaaggtcaatgtaagatgcttgagcgagaaaatgtgcctcctggtatagtagtttattcaagaccttgtgttttctggggctggcagggcatgcagacgcatctgtaaactctaccttggaggttaaagatttttattgtggcttttagagattaaatgagatttatttaca

SEQ ID NO: 201256 - DNA, 638 bp, Homo sapiens
gttgaatgaatgaactcattttcacagggagcagaaaatagacagccaggacgatctttcccagaacactggagctaaacaagaactctggactcatcaacaacacattcaacgagaaaacagccagaaaagctaccccagaaaccccctcattttatacactgaagaacccaggcaggggaggcagtagtccccggacttaatctgcccaaaaggtggtgcatggaaagttccctggtcagcgccctggatcttacaaaaggcttccagaatgatgaacactggcaggaagaaggtgctcctgcctgacaagatcaggatgagaggtgacgagtccagagtcacccctcaccctccccttggcctctcaccctttggcttgccttccccagttagcaaagaacactcccacctgtgtattccacacacacagcaccagcctggcaccttgccagcttcacagagtccgggagtgagcaacgccaccgtgtccaggccctctaagagcctgcgcttcaccagcgtgagaagagcaatcaatgatagacagataaatccatagtgaaagctgagagtttgttgcagaggatgcagggagggtgtgagggatgctgtttgagagaagactgatggcggag

SEQ ID NO: 201257 - DNA, 380 bp, Homo sapiens
tctctgcaagaaaaggtgaatacataaggcaataggcatttctagaacaaggcatgtacatttagtaagaatttcacaagcagagtaggtgaatgaaaaggtcctacctggaaggttttgtatttttttgttttgtttattattattacatcaacagctgtatttaatcacacaaatcctgtgtgcttttccttttttcctgcagtagaggaaatggaatagttgaagaggtatttttaggatggtttaagatccagcggctgctcctgtttgaaggcagctctggcatctagagttaaagctgctgcattgctcgtaacatacagtgatgttctgggcgcctggaagaacattaacacattcttgtctgctgatggact

SEQ ID NO: 201258 - DNA, 546 bp, Homo sapiens
tctctcacctagaactaaatagctatttttatttttattttacatacctccaaacacaacctcagagagattgagtaacttgccaaaagtaacagtagcagattcaggagtggaattccatccattttctactgcccgacacttttaagggtatgctcggccagagaaacaaatccaagcaccctatgcacacagcctcagctccctatcactcctttaccttaaagaaactgggtattacctaataaaacactcctagacattctcaagaatagtgtgtgtaattgtgtagtggcccaatgttaacaccactgactactgagaaaattttaaggttataaacaaagttcttatctccataatttggtggaggaagagaatgtcctagtgaaaagaaccaagactttgggaggccaagacaggaagattggttgagcccaggagttcaaaaccaccctgggcaacacagcaagactctgtctctgcaaaaattaaaaaattagccatgcgtggtgatgcatgcctgtagtcctagctactcagaag

SEQ ID NO: 201259 - DNA, 191 bp, Homo sapiens
agttttgtagcttcagcttttcaggccaccctttggaacgctgtactctagtcagagccacacacaggccgtctggaacttaaaaactataaactcctcaagagcaggaccaagtattattttttatttttatttatttatttatttatttatttatttatttatttatttatttttgagacagggtctca

SEQ ID NO: 201260 - DNA, 366 bp, Homo sapiens
gcagttctcttaccttccttaaatgcatcctcaatacacaggctgagtatcccttatccaaaatgcttggaaccagaagtgtttgagattttggacatttctgggattttgaaatatatgcattatacttaccagctgagcatccctaatccccaaaatccaaaatgctccagtgagtatttcctttggacagtaagttggtgctcaaaaatttttggatcttggaagattttggatttgagattttccagttagggataactcagtctgcaatacagcaagaaccacttatagtgaaaatctgttcaaattacttgtctgcttaaaatccttcaaaggctccccgtgtgaatcagtttaaagccg

SEQ ID NO: 201261 - DNA, 290 bp, Homo sapiens
cctagaggatcccggtgttcctttgtctggcagttcctgccctcaaagagcctcaagaatatagacttcatgaaaacagggacgttggttagttcactgctgtttccccaccaccccagatagttcctggcacatataggtgctcaacaaatagttgaatgagtgaatgaaagcatgtcttggaggaaacagatgctcacaataccaggtgataagagctgtacgtgataggaaattgcaaagcaagtgaccaatagtgaggctcaccaaatgcaagcttagtcggtgaa

SEQ ID NO: 201262 - DNA, 426 bp, Homo sapiens
tggcctcataaagcaagtcagatctttatttttatcggagcatgcagctttcctaaacattcggtgggatgaaggcataaaaggaagagccagactgattgattcaagtgtggcatcaatggagggcgaggtgacagttatgaccatccttcacttctatgcctattctttcgtaggttcttgggctactgatattcagggtgcacatggatttagcaaataaatacttatggagattgactgtcctctctcttttgagataggaaggggacaagacacattttctcttaggttaagatagcaagctgttttttgttttttctttctaagtggacagatacaatacatattaatatgtaaatttagaacagtgggatggttggtaaatactgcctatacaaaaacttacttttgcactgactccca

SEQ ID NO: 201263 - DNA, 457 bp, Homo sapiens
gtgttgataaggaagaggtgagccccttggggaggtagtttgaggaagaaacctgaagctagggggcaggtctcactggcaatactgattcaaaagccatcagcacaaagaaagaaaaacaactacaagcaagcacaaaaccacccaaagtgcgtgtaaacactggaaaatcagtgggctgaggccagagccccggagaacctctacatttaagaacaggagctagtgaaggaatgtgttgcacatggcttggaagctaggcagctggaaaaggccagcaggaatacaaccaaagactcttggcatggcagagcccaggatttaattcaagtgagacgtgtcagcaagagaaaaaggaggagacaggcacggggaagtgctgccaatgtatgttttccctcaagagcactgggttgccggtggactcgttaaacgggttggtgtgcgtgccactccg

SEQ ID NO: 201264 - DNA, 386 bp, Homo sapiens
acgttgcttcagggtgtagggacctttataggtcatgtttcaacttacagaaaattttatagttcaaatataaattacgttcaatgtggactttgtaatagaatttaaggttaagtaaagtttctgctttccttaggctgtttgcagtgcccagcaggccccatgatattgagatggaagttatgttaaaggaggagatcggtcagggatgggcagaataaggactatgggcagctcaggctaatgatacaatgattgaggtgtagaaagagggccaggcacgggataacgcctataatctcagtgctttgggaggccaaagcaagaggatcacttgaggtcaggagagcagcctggtcaacagagtgagacctaatctgtacaaa

SEQ ID NO: 201265 - DNA, 453 bp, Homo sapiens
ctacccacctccatgctcccttttctgtatttcacaatctccacagatgtttgccaacattcattcagacattcaaaccagaaacctcaagtctgagactcctccctctctctcaaacccttcatttaatcattcaaatatttattcaagaaatatttactcaggatgcattctgtgccaggtacagagctcagtcttgggtctaaaactaaacaaaaatgggcctctgttctgacagacagagctgacactctggtcttctgtgagtctctacaactgtatagtccacacatctcgcacatctgctccctgctcctcacacccaatgtggctgactcaggctagactgccatagccactgccagcctctcactatgcctcccaactgaatcctcttgctacagtcaaccttattccagtgcgactagagaaaactccagtctttctgaaaca

SEQ ID NO: 201266 - DNA, 613 bp, Homo sapiens
attctaaaatgtggatgaaactagaagacattatattaagtgaaatatactagacacagatagataaatactgtatgatttcacttatatatggaatctaaaaaaaatgttcagttcataaaagcagagagtaaaacagtggttgacagtgggtgggagacctggagagatgttggtcaaagtgtatgaacttacagttgtaagatgaataagttctggataccggacatacagcatggcaactatagttaataataatgtattgaatatttgaaatatgctataagaatagatcttaagcattctcaccacatacccaaaaaagtaactatgtgaggtgatggatattttacttagcttgattgtggtaataatttcacaatgtgtacatttatcagaatatcacattgtataccttgaatatataccatttttatttgccaattatacttcaaggcagaaaaaaataaaattagagtagaaacaaaagcttggaggtctgaaatgttactaaaagtgtaacattttccttttttcaatattcttgccacatggtgggtaggtccttttagtctgaagattcaagtctgtcttatttgggggatattttctt

SEQ ID NO: 201267 - DNA, 629 bp, Homo sapiens
ctctagtccaccttccgattctgatcaagagtgagaagtttgaaatgtggatgaagcactcaagggaaatgtttgctcagtaaatatgaagaagaacacatggcagcaagacagccccagttggaaacttacaagcactaagacctgatgctgtgggtcttgatttcagtttattaaaatcccaaacctgtagactgctgcttctgcccatgaagggataactgctttgggattttccccctctctgtaaacaaactgcaagacaggataaaatacatgaaacaactgtcttcagatattagccaacaggactctgaagaaggaaacaagagttctatgagagtcttaaattctgcctggaggcaatttctggatcccatagcaggaaagggaacgtaaaacagaacttggtaattacgctgagttgaagggacagagattggagttagggaaggctccagcggctatatttggcaacgcagactaccagcagaggaaaatctccagaaatctgcatggggttcccaagtctttagctgaataccagtctctgtgcatgcatagggtgaaaatccagaaggtgacgtaaagtccggggaccggctcaattcgtatccatgcatactaaa

SEQ ID NO: 201268 - DNA, 721 bp, Homo sapiens
ctctagtccaccttccgattctgatcaagagtgagaagtttgaaatgtggatgaagcactcaagggaaatgtttgctcagtaaatatgaagaagaacacatggcagcaagacagccccagttggaaacttacaagcactaagacctgatgctgtgggtcttgatttcagtttattaaaatcccaaacctgtagactgctgcttctgcccatgaagggataactgctttgggattttccccctctctgtaaacaaactgcaagacaggataaaatacatgaaacaactgtcttcagatattagccaacaggactctgaagaaggaaacaagagttctatgagagtcttaaattctgcctggaggcaatttctggatcccatagcaggaaagggaacgtaaaacagaacttggtaattacgctgagttgaagggacagagattggagttagggaaggctccagcggctatatttggcaacgcagactaccagcagaggaaaatctccagaaatctgcatggggttcccaagtctttagctgaataccagtctctgtgcatgcatagggtgaaaatccagaaggctaagcaaagagaaattgttaggaaaaagagtagttaactggagctataaggtaaacaatccccagagtttacacaaaactaaaactgcttcaagtttcttccaactacacattgtagagacacctcagtgaatacacag

SEQ ID NO: 201269 - DNA, 285 bp, Homo sapiens
caagtctatcttagagctcttgccatatttgtgcatgtaaatctaccttattcttttcagcttctacatagctgaaacatatacaacagcagggaaaggagacagtatctgtgacaccgaaactcatgtcttttttttctttttttttctttttttttgaggcagagcctcaccctgtggcccaggctggagtgcagtggcataatctgggctcacggcaacctctgcctcccaggttcaaacgattctcctgcctcagcctcctgagtaggggtaccgagctcg

SEQ ID NO: 201270 - DNA, 700 bp, Homo sapiens
tacttctcccctgacagttagtactattacaattaaaataagctatattcttctagtattttttctgtgaaagtcatctcataaatttacaatgctattattagtttttataaagcaaacactacgtgtcacaagatatacttgttagctactttcaggcacctctgatttgagtggtttaacactgctatcaagaaaaccactcatttcactgagcagtgtcatcacaggaatggtctgtctctgaaagtctgaaagctgatggaaattggagtggtagggtgtgacttttgcctgctcagtctgaggctacctgtcaggcgtagatcagacccagctgcctttcttcctctatccacaggcgagagacacagtcactacccaacttcggtgcaattgctccacccactctactcctgggagagctcctcccctctatgcttacagtcagttgggatacccaggctttaacgtcccttcctggctgccccaaagacaatggtcagggccttttatggtctacagggcttgacaaccaaccatcacaaagaaatacctggtgtaaaaccctggggagattacagagcttctacagaattcttacagttgtggtccttgatctgcagattctactccttaccagccatcaactggtttaacaaacctcctccttccttaaatgtaatccatgtcagtgagt

SEQ ID NO: 201271 - DNA, 365 bp, Homo sapiens
caaatgtaccccagaaaaaaatctattagtgagtcaatatctacatttacaggctggctttttactcacactgctgccctaaatgtcactgaaagatggggagtaaaaaaaataaaaaaagacattgctgctagcttctagaatgttaagaattccatggtgaaggccgagcaattacagaagaaagactccaacaaacatgagatgatggttttcatcatgcaatttgagacctcctttacttcgtgaaagcatagttgtattccattgcaattgaaatagtacaacattctgttgtttctaaacataagctttaggtttatttttggtctcatgtccaactttcttactctatttcttaagaa

SEQ ID NO: 201272 - DNA, 161 bp, Homo sapiens
gaaaagaaactctggaaggcatgaagaaactttgttcactttctagtctctagtctatgtcaaatgttagtaattgatcaacccataccaggcgcacaaggattgtgactttattgttgctggggtccacccagttcagaaattaatccttaacaataccc

SEQ ID NO: 201273 - DNA, 406 bp, Homo sapiens
tgagatagaatccactcctggtgaagatgctgtgaacatttttgaaatgacaacacacaaaaatagaatattttctaaacttagttgatgagacagcatcagaatttgaaaggttcgactctagttttgaaaggttctgctgtgggtaagatgctatcaaacagcatcacatgctacagagaaatggttggtaaaaggaagagtcaatggatgcaccaaactttcctgttttattttaagaaataaccacaactaactcaaccttcagtaaccaccacctgatcattcagcagcagccatcaaccttgagggaagaccttctagcaacaaaaagattaagactctgaagggtcagatgagcagtagctttttttttttagtaataaagtaaagtatttttaaatta

SEQ ID NO: 201274 - DNA, 429 bp, Homo sapiens
cccttatttttaaatgagatcttaaatagaacaccagggtgtaagtcagattaacctggaactagcctatttgaagtgtattgacttcacctatttgaagctatttgaagtgaagtcgttagatcccaggctgccacttaatatccatttggtaccttaggtacctccaagaagtggtgattagaataagaagcaagagtcactggaataaaggtggtaacagctgtgggagggatgacatttctgaaggacttagacatacaagtaatgcctggcatccaccagtattccaatgacagcagatctttccttacttcatgaaatgagtattatttttctgtccagaaccaccatttgctctattgaactgtcttaaggatttgtttcaaacagctaagttatttgattaaaatagtgataaaattgaaa

SEQ ID NO: 201275 - DNA, 300 bp, Homo sapiens
aaactgattttctgctggattcaaattgagtaagacacaatatcaagaacagttccgcaaatgcctgttacatgaattcaataaacaaagtcactgctctatttctttgaagggcctatttttgtattttcaataaagacacgaaaaaaattagccaggtgtgatcgtgtgcccctgtaatctcagctactcaggaggctgaggtgggagaattgcttgaacccgggagccggaggctgcagtgagctgagatcacgccactgcactccagcctgggtgacagagtgagactcagtctca

SEQ ID NO: 201276 - DNA, 847 bp, Homo sapiens
gccacctgccaacaattccgcagaaaggtccaagcctgacagtagcgagtaggagtaaaggacatggagcggccagagtcctcagccacgctactcacagccatgggcaggagtctaatcagatgagagggaatgtgtgcgtgcccggggcccaccccacacctctcccgagtgtgcccatgtgcaccaggagacattgtcagtgggcctgcagccgcagtacttgggacaaaaaaagtccatcctcagtgggctagagagccagatcaaggagcatccagctcacgggctgtgattccatagtggaaactgatgagctacagccgtgtgcatcagggttactctcaggggcacagatttttttacaaaacaaatcacagaagagtcatacagtgtgactcaggttatagaataattaatacacaacaaaataactgttcaggggcaggtccttatgtgctaaagccatgaagacaagccggtgagtcatgaccatggatggggaggggacactcaagtctgggcagggcattagtgatgctgccccagctactcaggaggctgaggcaggagaatcacttgaacccaagaggtggaggttgcagtgagccaagatcgtgccacttcactccagcctggccaacagtgagactctgtctcaaaaaaaaaaaaaaaaaaaaaaacatatcagccgggtgtggtggttcacacctatagtcccaaagtgaatgcatttctttttaactctaaataacattccattattcagaagtaccacagttatccacttacctactgaaagacatcttgtttccaagttttggataaattatgaataaagctgcta

SEQ ID NO: 201277 - DNA, 436 bp, Homo sapiens
caggagaagagttcagggatgcagaggaccctgaggaggggtagccagtgaggttacaggagaaccaggagaacatggcatcccaaactctttcaagacattttgctgcaaaggggagcatagaaacagggtggtgggccggcggggacggtggttggcacacacctgtaatcccagcactttgggaggccgaggtgggcatatcacgaggttaggagatcaagaccatcctggctaacatggtgaaaccctgtctctactaaaaatacaaaagattagccaggtgtggtggcacgcacctgtagtcccagctactcaggaggctgaggcaggagaatggcatgaacccaggaggcggaggttgcagtgagccaagatcataccactgcactccagcctgggtgacagagcaagactccgtctcaaaaaaaaaaaa

SEQ ID NO: 201278 - DNA, 538 bp, Homo sapiens
  misc_feature (524)..(524): n is a, c, g, or t
aagctgctgtcagggaacagatgggagagcctgcaaggggaggtgagaggaaggtgctgagccccagtcatgagcgaggtgacagttattgtagtggctaaacaggtggcccctgagatcaggctgcctgggctggaatcctggtctaccactccttagcactgtgcgttcaggcaaaccattggtccgctctgagccttgacttccttatctgtaaaatgggcgtggtaataatatgccaccctcattaggttcctggaagggttaaatgagtgtgtagcccatggtacatgcaatggaagtgctgcctcttatttgtgtggcattctgcagtgactgtctcgtgtactctcaatagtgcttataactcttacgggttctggagctagccacctggcctctgctaccacttcctagcagggcggcagagcttagagggagatttaaggtgaggatggtgaggtttaagtcctgggtccctcattggcatggccttgtacttcattatttaaaaagacaccccncacagtttatgtaa

SEQ ID NO: 201279 - DNA, 705 bp, Homo sapiens
atgatggatatttaggtcatttcagatttttagttcttcagatatttaactctttcttccctctttcagttccttattttattgagaaaacagaagcagtcagaaaagaattacctccctcttttcccacaatttattcactcaaggatatgatagtgaacaaatgaaacaaaaatctgtgccctcaaagtgcttatatactaaaggagggagatagacaataaacaaggtgtttcaaaagtaaagtatgttgtatattagatggcaataaatactgaggagaaaaagtagggaaggagcatagtatagtaagtgttggggtggagtttgcggttttaaaggcaaggagagagactcactgaagttgacagttgagtaaataactgaaggaggtaagggaaaaaatcacgtaaatatttgtaaacagaggcaacagcaaatgcgagtgccgtgaagctgagtgaggcctgctctttctgagttctgtcaccctacatccacttgcatcatatactctacctttccctctgatcataacaagtgagttgtccctgcccaggccaaccccatccacttgcacgtgaaatctgcttccctctgtcatataggactatgatcctgctgtcatgccctctcttacgtatttcacattttctctctagttggttcccctgagcttgcaaacatgcagtaatatcacccatc

SEQ ID NO: 201280 - DNA, 450 bp, Homo sapiens
ttgatacaggagagggggcatttttggtagggaatgagccctctacccccacctcactacttaagaaaccaattctcttttttttgagacagtttcgctcttgttgcccaggctggagtgcaatggtgcaatcttggctcacggcaacatcaacctcccaggtttaagcaattctcctgcctcagcatcccaagtagctgggactacaggcatgcaccaccacatccagttgattttgtatttttagtagagacagggtttctccatgttggtcaggctggtctcgaactcctgacctcaggtgatccgtctgcctcggcctcccaaagtgctgggattacaggtgtgagccactgcgcctggcctaatttttgtgtttttagtagagacggggtttcagcatgttggccaggctggtctcgaactcttgacctcaggcaatccgcctgc

SEQ ID NO: 201281 - DNA, 554 bp, Homo sapiens
aagtgctcctgatggctgctttcaatcactggaagaaccatgaaagtgcgagagattcctcccggtgaatgaagccagctcaccaccgtcaagggcaagggatcagcgtgtgttcacatggaggcctctcaccgagggaacccaagggggacagcacaggaattgcagagccagcacccatggaatgggcagggatttgggtttcatccaaccagccagttgatcaataatcactgaatgtctgtcacccattgcatcctctcctgagtagtgaggctaggccagtgccagtcacctggaaatccttactgttctgcagttgacattttgagaggcaagtcaaacaatatatataaacaactagaatgtctagtgtgtttcaggaggtaaatgccgtgccgggatgagcagaaggaggatggagccgttgctgggcagatagactgattttagataaagccgtctgggtgcaggaaagaagaccttaaagagggaatgacatttgagcaaagtcttcaacaaactgaacccaggaagaaaacattccgaaagtc

SEQ ID NO: 201282 - DNA, 562 bp, Homo sapiens
tgcgctcttaacatagcccaggtattttataatacggaacaattaacaccctaaaatggtgatttataattgcacatttcttggtaaaagtttgtcatcttaggtctttatttgatagtgcagcacgaatgggagcttgggtaacttgttcggtattcgcattttctcaaacatagaatacctctgttaaagaaacagctttcttagtgttctttcattcttgttggaatattctgggtaaactgataggagcttcatgcctttagaaagtttctccagtccttttctccagtcctgtaactccttatgctggttgagcaaggccacgttggtggtggtattgtttagctctctatgcctgcagggagggtgccaaaaagacattccctgttcaactctcgcccccgtccaggactctgatgtttgttgttttactctagtgacagtgttatcatttgttattctcaatccatgtaagcctttgtaaatttacattgtcagtgtcaagtcacttacctttttctaggagtagtaagacactttgaaatttttgtggtttaaa

SEQ ID NO: 201283 - DNA, 2454 bp, Homo sapiens
catcttccctgagaagcaagccatacacccaacaggtctagaacacctaggtcacaagaaagggtttcagtccagatgcactgtcagtaagtgaacacaaggacaagaatgcatgaactgttattttcttcccatcactggtttagcagcccctagggagaccctgtgttgctctttaatattctgacatggagcactaatatgctcaacactgcctccaacaggcaaatgttggaaatacactttcagagctggatgggactcaagatcatctaatataatcctctcattttatttcctctcaaggaaaccaagggcaagaaagtttaggcaatttgctcacattcacacaggcaattagtaacagagctgagttcgggtctggtataggctttttaatttgattctccacaaatgaacactaagataaatagcatttattgcatacccactatttaccagatactgtgcaaagggctttacatatattactttactaaatcctcaccataaactttaagtcaggtttaaccattttatagaagagggaagggagggccaggaaggttaagtaacatgctcaaagtcacacagctactaaatagagccataatctgaacctttgtctaattttgaagcccttgatttttccacttcatgaggctgctctttatatttatttagctgagtgaccaccatcttggattttactaatattcttacaagggggctttgatgccacttcttctgacttttaagaaaaggaaattcttgcattatttttgccatgtactccaggggaccctcaatctcatcatcatggggaataagaaacattctgacatctctttccttttctttctttttaaatttggtagacgagggagagggtccccaacagaatgagagggggaagataagaaccagaacataaacccaataccccccaccccactcttttgggaacatcccaacattagaagagtgggatatccagtcattttttccaagctggagcaggcagtgtagccaggattgaggaaggagaagccacagaataaacatggcacatgttctcagagcatcaattttactccagaatttgggaagaaaggattatattattagtgtattcaaaccagtatggatagcacaaatgcagatatcctataaattttgaggctaactccagcaggttgtagactgatttaggctacctccttccagactcccaggggtacaaacaccttcacagtcccctgcgggagtacatcagtggaaatatttggggaatgaggctagaaggcaggagatacattcagtttacttatccccctggtttcttttccccactccttacctgccccacatccctagtgggtgggaaggcatcagaagacagttggctacaatatcagctttctctgctactttggggaatttagaaggaaatcagtacttggcaacctggtatttttagctgccaggccaaaactccagacataaaccccttccctttaattgaatgatgtttatatataaaggaatagatctccccaagaaagaaccccagaacactggttccattccagtgtgggggctgcttgggcagcagtgacacctgtgcattagatgcaatagacacttcaattcctgcaaaaatgtcggccaactaagtgctcctttaccaactgcggaggcccagactcacaccatggtcccacagactcaaggtttagaatctattgtgagtctattttgggttaacacacaggctccttccttccaatcattcacacacacacacacacacacacacacacacatgcacacacacacatgcatgcacacatacacaggtgcacatgcacaaacacacacatctaatgattccaacctcgaatactccccaggcccatggggatgcccaagtaccctaagcaaatcactgtgacactgagggggtcattaactggggctccgagcagctgaaacccaccctggtggtctctagattgttgttctgagaaatcataaacaccaaatcctccaatccctttgaatttgagtttgtcattttaacctttaacagccttttcaggtaaaaataacaaagaccaatttattgactttgtagctacaatgagcttgaaaaagcgcttacttaaaagaaagactggaaggaagaaaaaaaaaagaaaatggagtacatactcctcagacgatgcacactttaattagctaaaataaaaataaaaatgtacagaggaagggagaggaaaaaccaacttctctgatcctttcatggcactgtagctcaaagactggaatctctgcttgttaaccattgttaactagtatttttagtcctggttgcttttagcctctgtatagttccttttttaaacacattttctatacgttaataaaagatcctgaaagaaaaatgcgtgt

SEQ ID NO: 201284 - DNA, 2125 bp, Homo sapiens
cccacgcgtccgcatacccactatttaccagatactgtgtatgcaataaatgctatttatcttagtgtcatttgtggagaatcaaatgaacactaagataaatagcatttattgcatacccactatttaccagatactgtgcaaagggctttacatatattactttactaaatcctcaccataaactttaagtcaggtttaaccattttatagaagagggaagggagggccaggaaggttaagtaacatgctcaaagtcacacagctactaaatagagccataatctgaacctttgtctaattttgaagcccttgatttttccacttcatgaggctgctctttatatttatttagctgagtgaccaccatcttggattttactaatattcttacaagggggctttgatgccacttcttctgacttttaagaaaaggaaattcttgcattatttttgccatgtactccaggggaccctcaatctcatcatcatggggaataagaaacattctgacatctctttccttttctttctttttaaatttggtagacgagggagagggtccccaacagaatgagagggggaagataagaaccagaacataaacccaataccccccaccccactcttttgggaacatcccaacattagaagagtgggatatccagtcattttttccaagctggagcaggcagtgtagccaggattgaggaaggagaagccacagaataaacatggcacatgttctcagagcatcaattttactccagaatttgggaagaaaggattatattattagtgtattcaaaccagtatggatagcacaaatgcagatatcctataaattttgaggctaactccagcaggttgtagactgatttaggctacctccttccagactcccaggggtacaaacaccttcacagtcccctgcgggagtacatcagtggaaatatttggggaatgaggctagaaggcaggagatacattcagtttacttatccccctggtttcttttccccactccttacctgccccacatccctagtgggtgggaaggcatcagaagacagttggctacaatatcagctttctctgctactttggggaatttagaaggaaatcagtacttggcaacctggtatttttagctgccaggccaaaactccagacataaaccccttccctttaattgaatgatgtttatatataaaggaatagatctccccaagaaagaaccccagaacactggttccattccagtgtgggggctgcttgggcagcagtgacacctgtgcattagatgcaatagacacttcaattcctgcaaaaatgtcggccaactaagtgctcctttaccaactgcggaggcccagactcacaccatggtcccacagactcaaggtttagaatctattgtgagtctattttgggttaacacacaggctccttccttccaatcattcacacacacacacacacacacacacacacacatgcacacacacacatgcatgcacacatacacaggtgcacatgcacaaacacacacatctaatgattccaacctcgaatactccccaggcccatggggatgcccaagtaccctaagcaaatcactgtgacactgagggggtcattaactggggctccgagcagctgaaacccaccctggtggtctctagattgttgttctgagaaatcataaacaccaaatcctccaatccctttgaatttgagtttgtcattttaacctttaacagccttttcaggtaaaaataacaaagaccaatttattgactttgtagctacaatgagcttgaaaaagcgcttacttaaaagaaagactggaaggaagaaaaaaaaaagaaaatggagtacatactcctcagacgatgcacactttaattagctaaaataaaaataaaaatgtacagaggaagggagaggaaaaaccaacttctctgatcctttcatggcactgtagctcaaagactggaatctctgcttgttaaccattgttaactagtatttttagtcctggttgcttttagcctctgtatagttccttttttaaacacattttctatacgttaataaaagatcctgaaagaaaaatgcgtgt

SEQ ID NO: 201285 - DNA, 2411 bp, Homo sapiens
catcttccctgagaagcaagccatacacccaacaggtctagaacacctaggtcacaagaaagggtttcagtccagatgcactgtcagtaagtgaacacaaggacaagaatgcatgaactgttattttcttcccatcactggtttagcagcccctagggagaccctgtgttgctctttaatattctgacatggagcactaatatgctcaacactgcctccaacaggcaaatgttggaaatacactttcagagctggatgggactcaagatcatctaatataatcctctcattttatttcctctcaaggaaaccaagggcaagaaagtttaggcaatttgctcacattcacacaggcaattagtaacagagctgagttcgggtctggtataggctttttaatttgattctccacaaatgaacactaagataaatagcatttattgcatacccactatttaccagatactgtgcaaagggctttacatatattactttactaaatcctcaccataaactttaagtcaggtttaaccattttatagaagagggaagggagggccaggaaggttaagtaacatgctcaaagtcacacagctactaaatagagccataatctgaacctttgtctaattttgaagcccttgatttttccacttcatgaggctgctctttatatttatttagctgagtgaccaccatcttggattttactaatattcttacaagggggctttgatgccacttcttctgacttttaagaaaaggaaattcttgcattatttttgccatgtactccaggggaccctcaatctcatcatcatggggaataagaaacattctgacatctctttccttttctttctttttaaatttggtagacgagggagagggtccccaacagaatgagagggggaagataagaaccagaacataaacccaataccccccaccccactcttttgggaacatcccaacattagaagagtgggatatccagtcattttttccaagctggagcaggcagtgtagccaggattgaggaaggagaagccacagaataaacatggcacatgttctcagagcatcaattttactccagaatttgggaagaaaggattatattattagtgtattcaaaccagtatggatagcacaaatgcagatatcctataaattttgaggctaactccagcaggttgtagactgatttaggctacctccttccagactcccaggggtacaaacaccttcacagtcccctgcgggagtacatcagtggaaatatttggggaatgaggctagaaggcaggagatacattcagtttacttatccccctggtttcttttccccactccttacctgccccacatccctagtgggtgggaaggcatcagaagacagttggctacaatatcagctttctctgctactttggggaatttagaaggaaatcagtacttggcaacctggtatttttagctgccaggccaaaactccagacataaaccccttccctttaattgaatgatgtttatatataaaggaatagatctccccaagaaagaaccccagaacactggttccattccagtgtgggggctgcttgggcagcagtgacacctgtgcattagatgcaatagacacttcaattcctgcaaaaatgtcggccaactaagtgctcctttaccaactgcggaggcccagactcacaccatggtcccacagactcaaggtttagaatctattgtgagtctattttgggttaacacacacacacacacatgcacacacacacatgcatgcacacatacacaggtgcacatgcacaaacacacacatctaatgattccaacctcgaatactccccaggcccatggggatgcccaagtaccctaagcaaatcactgtgacactgagggggtcattaactggggctccgagcagctgaaacccaccctggtggtctctagattgttgttctgagaaatcataaacaccaaatcctccaatccctttgaatttgagtttgtcattttaacctttaacagccttttcaggtaaaaataacaaagaccaatttattgactttgtagctacaatgagcttgaaaaagcgcttacttaaaagaaagactggaaggaagaaaaaaaaaagaaaatggagtacatactcctcagacgatgcacactttaattagctaaaataaaaataaaaatgtacagaggaagggagaggaaaaaccaacttctctgatcctttcatggcactgtagctcaaagactggaatctctgcttgttaaccattgttaactagtatttttagtcctggttgcttttagcctctgtatagttccttttttaaacacattttctatacgttaataaaagatcctgaaagaaaaatgcgtgt

SEQ ID NO: 201286 - DNA, 597 bp, Homo sapiens
gtagagtacatagttttcatctttattcagtcttctaagtgaattttctcatgtccatattctctctaatttttcccaattttcttgccatctctggtcagctgttatcttctcttttttttcttttacagtttgtatttttttaatctatgcattatcattttagagaaataaggagaagcaaagataagcatatacatttaatccactgcacttaactaggagtttgtatttaataatccactttaatcagatgtctacctaacattttattgaatcttttctgcctccttgcttttcaggttttttttttttctattcttgtatctaccatgtaggcttgcctattatcttcatttagcatcctcaggcaaagctattttttatcattgcccttccattgcactgtgtacaatgctgctcttgctgccttgagtacatattgatgtagtacaaatatgtggatggatggctgtcttctgtttctctgggtggggaatttttctacacccagggtccaacatggggcccgctactgactcatgttccttaaactttattgaatgaaaaaaaaatgcctcagaaaatttaatggga

SEQ ID NO: 201287 - DNA, 125 bp, Homo sapiens
atccccgtatccatctctgtgctgggtcctgcctgctctcacttcccactcatcttggcccctctccctgcccacctgagcagcagcgtcccatccagccctctttcaccaagtccctctgccgt

SEQ ID NO: 201288 - DNA, 277 bp, Homo sapiens
attttatcttaatatagatgcatgttattcataaatttgagtaaaaacttgttaaaaagatggacaggagagaaaaaagaaagaatattaattgtgccagacaaaaagaagggttcatttattggcctgaatgaactgcttccatttttttttctgcgatgactgtagttgtagatcagcaaaccagtttctgagcaagtttggaagagcttcttatttacctaacattgttaaatatattctgattattagcattctaaaatgttgatctaaagga

SEQ ID NO: 201289 - DNA, 102 bp, Homo sapiens
gtgtttctcaggtgctttattctttcactaggatctctgctaccttggccattagaaaatttgtatggtttgccaagatgctggtttcagagaggacaagaa

SEQ ID NO: 201290 - DNA, 330 bp, Homo sapiens
ctttcagtgctaatttgataataaaatcttgatgtatttctgttacttgataatagtaaaaaaatgtgtgagcatgaaattctaaacaaaattcattatatgaacttgtgacattctcatgcactgggttttttttcttccatttccaaacactaattgacagcacttgaaaacagtgattcagcttccgcatgtcatatgattcctagggactgtagctatattcctcaggccagtagactgacaaatcaaaagataagaagtacctctcagcttcaatcaactgaaatgtgtcagaaaatacatttggcataatcttcagaaatgtca

SEQ ID NO: 201291 - DNA, 749 bp, Homo sapiens
aaatgaaaacaagtctgtgaatattcagatgactacttcgaagtaattcagtttttttattagtatttttccagcttatgttttcccatgagctattttactttgctgaattttgtgggtaatttggtggatatatcctgccttatttaggattatagctggataagaaaattgccttttcattgtaagtgcccagttttggtctctagtttgaaggtactacatactgccgataaaggaaaacactcccctacaccccagtttttgtgttaccaagaaaaaaaaaacagtattggtttcatagtaggactcaaccagaattggtcctacatatatgtgagtgttcagtttttgcaaataaggtttttgagtgtgataaaacactacagaagtgctaagtgtattgagaatttgctgctgattgtatttataacaattacttgacgtttgcagaaatttagcactttccctccaaatttataggtgtaagagaagcgggggcaaggtgcaccacattttaaaactgcaaatgtgtgaaaatttatttagagattcagattcctaaaaggaaatttcaccacccaagtcatgcacttcttagccttttacaagccaacagactgacatgaagattgttcacagttcctaagatttagcacatatacaaaaataaaactttataaattcaaagccgcgtttacacttgtgactggccctgcgtacccacttatcgcctgagactccctttt

SEQ ID NO: 201292 - DNA, 139 bp, Homo sapiens
tctctcagagatctagagagaaattgacctctttcatttaatatatgaaattcttcatatattgaaaatgattgaaatccaaaccactattataataattttagtatattttaaatatttgccttaacaaattaatttt

SEQ ID NO: 201293 - DNA, 220 bp, Homo sapiens
tcccttgtgacttcccacattcactgattttgatccttggcccacagttttctctacttcaagcacttatcaccttcacttgccctcatctgaaagatgttatgctctgcagcctctgaacactgtctcttgtactccaacccctgcccctacgtctgctactgtacctcattagagacttctcttcctttgactgctccctttttcaatctgtcatttg

SEQ ID NO: 201294 - DNA, 147 bp, Homo sapiens
caaaaatttttctaactttctaaaattgaattcattgccaacatttaaaaattataagagttccccttaaaactcagatttccagtttctctggaaagatttagcagtcctgggtccccactcctgtcaggtgacaactgacaggag

SEQ ID NO: 201295 - DNA, 451 bp, Homo sapiens
aaaatgggaatgttttttctctactttcaaataactggaagatctgaattaatgctagtaaaaatcctatgagtagcgctaaatgcaattcagccacagtacagtgctttgaaaggacaaaattttaaatgtggtttttattaatgtgactcataggaaaaatgaagtattaaaaatgttattctctaaagactgacctgatgcaacaaaatgcaaaatatgtgatcaactatgcctaaaccaaaaattcagcaataattcaacttgtttttccaaattaagacctacaagagctagatctagtaattattccccatcaagaaaacagtaacaaaagattacttaacttgaatatctgaattttcagaaagcacaatctaaaaatcaaagaaaaatgataaaaagatcagtgcccgctcataaagggcactcagtaaaagtgttgtatttt

SEQ ID NO: 201296 - DNA, 176 bp, Homo sapiens
gggcaacccagtctaagatggctctagtcatcacatctgcattctaagcaacagcaaagagtgggggctgggagggaacagcagggaaattcagaaatggagtttctgtatatgcccaactgaaaaactggcaaatctattatgaaagaaagaaaaaaaaagaaaaagaactagaa

SEQ ID NO: 201297 - DNA, 542 bp, Homo sapiens
cccttacagagcccaaggctccaactcaggatccgtctccctgcacgagcccctcagccttggcttgaatgagtggctgttagccaacgccacacggcctctggggtcctactcctgactccctgcacaggttccttggcgctgcttctcctgcacctgataccctgggcagctagccctgctccttgctcccagcaccatactctgagtatgtttcctttttgttttttgagacagggtctcattctgatgccaggctggagcgcaatggcacaatcattgttcactgcagcctcaacctctggggctcaagtaatcctcccgcctccgcctccagagtagctgggagtacaggtgcatgccaccacatccggctaattttttttttttggtattttgtagagacagggtcccgctatgctgcccaggctagcctcaagagatccttctgccttggcttcccaaagtgctgggattacaggcacccggctagtacttttccttttgatcctgggagctgatggtgcaattatactatccca

SEQ ID NO: 201298 - DNA, 450 bp, Homo sapiens
tatctagggatttctcatgatacagggatgctaggtcacaggacaggggtaccgaaattcaagctctatctattgacattgtttcttaaagagtttttatagagctatctagaatatctgctattagctattctgacaaccattccaaggctatctaggaaatcctgtccgttgggaggcaaagactaattttttaaatgacttatcttattgaaaaaatacaaatcttaccttgaaacaactagaacaaattctataaatccagtcaaataatcatttaaaacattcattttttccacatttttttcctttctttgtaagcctttttgtcctctctacaataactactttatagcttctctgctattatgagattacccttcacctcttttgaaatagatggatctgtggccaaatggtaagtatatccttcccactaccattcttttc

SEQ ID NO: 201299 - DNA, 111 bp, Homo sapiens
ttagtttgaactgatgttgccatttccatctgttctccaaaccttcccatctttcagaacccagcttacattccttcccttccaccaagtttgctcaggttatcccacccc

SEQ ID NO: 201300 - DNA, 511 bp, Homo sapiens
attctggtggcctgtatttatttaattttagagatgaggtctcacatatgttgcccagcctagtctcaaattcctaagctcaagggatccacccgcctctatctcccaaagtgctgggattacaggcatgagccaccacgcccggcctccatgatcttatttaccagatttatagctagttcccctaatctgcctttatgctcagtgaccagtaaatgcaggtccccccgtaagtatttattgtaagtgagtgtttagagaggataatagttttacagtaaaatttaaatttaatataattctaggtgcaccttgctgatttctaaattgtttcatatatcacatcctcaagctggcctgggattagttgatttactgatgacacttttcaaaccaataaatggagtgataataaaacaccaccagtaaaattggaacatttctcattctgttccaatctttagtccccaaaacaaaccctggtccaattatgagtatagataaactccag

SEQ ID NO: 201301 - DNA, 184 bp, Homo sapiens
cactactcatcagggaaatgtacattgaaaccaaaatgagatatagttagagtagctattataaaatttttttttaaaaaaaacagatgctggcaaggatacagagaaaaggcaactcttgtacactgttggtgggaatgtagattagcattgccactatgcaaaacaatatggagttctctga

SEQ ID NO: 201302 - DNA, 399 bp, Homo sapiens
agcttctaaaagaagacacaaaggatgagtaggagttagttctgtgaagattcatgcaactggaaaccgtgatgaggaagactcagaggtggaacagagctttcataagaagtgaaagaagggcagcgtggagcattacagagaagaggtaaaacggggcccaactacaaaggggtttgttaggaattttttttattttgtactaagtgcagtggggagccgtcaaagtgttttaagcaggaaagtgacatgatacaattcatgttttagaaaggtcattctggctgctgagtggagaagagacttgaagggtgacagagaaacaaagaggccctttaggatccacatgagaggagcaaagtgatgtggccgcgtgatggcggcagaggagagaagtga

SEQ ID NO: 201303 - DNA, 369 bp, Homo sapiens
tccagtggcccagtgacacatccaaagctgtgctggggatatttcaaaaagtgacttgggaacccaaaagcaaatgcaataagaacaaagataaataggtgggacttaattaaactaaagagcttttgcacagcaaaagtaacagtcagcagagtaaacagacaactcagactgggagaaaatcttcacaatctacacaaccgacaaaggattaatatccagaatctacaatgaactcaaacaaattatcaagaaaaaagcaaacaatcccatcaaaaagtgggctaaggacatgaataggcaattctcaaaagaagatatacaaatggccaacagacatatgaaaaaatgctcagcatcactaatgat

SEQ ID NO: 201304 - DNA, 500 bp, Homo sapiens
tgcacttgcaccctgccatcattctgacctgtgttaaccaagaccccttgaacttccacctcagtttacccgcgtgctgccatcaccgcctccactgtacaacagtgtcccagttaggatgaagttcagctgcgtgtgtccaaagagaacagaagaagaaaacagtgacctaaaataagagagggctttatttctctcttacataaaagaagtccaaagggaggccacccaggctaggtggggtggctttatgatgtcaggatcctgagctaaatctggcttgctactagggtctcttcaatatccttctcccatctcctcatagaccaagagagctattcaagctccacccatcacctctgcgttcctgcagatggaagggaaaggaaggagagagggagggcttgcctctgcctgttaaggacccttccccaaagctgccgtagccacttctaatgtacatcccattggctacgcctgagtcacatagccaaccaagc

SEQ ID NO: 201305 - DNA, 474 bp, Homo sapiens
gactctagaggacccccacgccgcaccgccggtcaaaatatatagaaaagtcttctacgaactttcagagtctgtccaacttatgaaacatgaaacctaagataattctaaaataaatcctctgtcatctccatgtctctatctggacttggtgcttctatctccagccttccacctcgctaaggtcccacttcacctgaagttcagttcaaatcaatccagcttgtcttcatttaatcatctagtgcccagctagtactcggggaaaaaaggatttaaaatcattccatatactttttttttgctaatacttagaaagtacacaggaacgttgtccgatgctgagaatttatagagggcattctcttttaaaatcagtccctgaaatcagctgggggtggtggcgggtgcctgtaatcccagctactcgggaggctgaggcaggagaattgtttgaaccggcggtgcggcaga

SEQ ID NO: 201306 - DNA, 324 bp, Homo sapiens
tgtagttcctgaagtttggataaattttaaaagccagaaggtaaagatataatgagaaaccccacctggaatgcctagggtgatggttagactggttaatcaaggtagcacttggaaaaaaggccaaagtctcctggcctgaaccctgggtggaaacctgaagacatctgcacaagaaagggtaaaatggtctggagagaagagtcctgggactacaacataaagtaaaagttgacaggactatgaaagttggaatgttaaacatgcttttttttttttaagttgtactaccaataaactgagttctttccctactttgtattg

SEQ ID NO: 201307 - DNA, 471 bp, Homo sapiens
gtaaggaggtctgcagggttttgtaaaagcttcaacatattcactagactcaataattaggtcatttccacgtgcagaactaaacacatgttcaagaaagaattgagaaggtcctaataatgactcacctctagcttaccttgaggttcactacaagcaagaagttaaagtaaggcagagttgtaaactctgcaacagagcactaaaaacataccccactatgcacacagagcccctcagcaaaagctgggagacttagtggttcaaggcacttaagataatgtttgatcactagctgaccacaaagctaactaatcagaaacttcaagggtaacacaaggatacagacttaacagaattagttcagggaagccattacataaacaaacaacagatgcaacaacaagtcttggggaagggggtggcatcagatttccagagttgctacattatattattataatatgacca

SEQ ID NO: 201308 - DNA, 398 bp, Homo sapiens
gaggacactgcatattagagtcaggcgtcgtcattactccttggatgctcatattgtccctttcagattggctcctgtgtctttttgccaagaccccattagttcttgagtgcttcattgctttctggcacagaaatttgtcccaggcctactttgtacttttcctgcctcagatctgaaatcattcctctcaggagccctggtttcctttagtgggaagtggcatttagaaatcagcatttggggctgggtgtggccactgtcacgggggtagcatctggttgttttttttttttttggggggcagggagtttggctctggtcccccgggcgggagtcacgggggcacgacctcgactcagggcaccctcggcccccggggttcaagcgaatctcgg

SEQ ID NO: 201309 - DNA, 567 bp, Homo sapiens
ctgatacttgctgttgttgaatttctgaaggaaattgattagtcaactctgtcatctatgagtagcatgaatatgacacagaggtaactgatattttctatgcttcatcaaatgatagtgtacatggtttcatttaataattttggggaaatatgatgtcttgcattatctgtttggcaaaactctgttgtcttcctttggttgaagacttcaaatggttgcttgagatgattgaataataaaatatattatgaaaatgaatttatttctctcttacatgctgtaaagtaatagattctttatgaatggttctcaactagggcacccccaggggatatgtcacaacttcagaagacactgtttattttaatgacttggggtggtgaggtaggaaagtgctattggcatctagtggttagagaccagggataatgataaacatgccacggtgcactggatagcctcccacaacaaaaactcatacagcctcaatgtcaacagcactggggttgaaaaactctattttatatgaataatcagaataaataaattacctcatatgtatgt

SEQ ID NO: 201310 - DNA, 462 bp, Homo sapiens
gaagtcaaggctgcattgagctgtgatcaggcccctgtactccagcctgggtgacagtgagaccctgtctcaaaaacaaaacaaagcaaaaaaaggaaggaaaagtacctaaaaatatcatggagacttgtcataaggacacaggagccagctggaaggaactcccactggctaaatctgggtcaatttgagtgctaaacaagtacattaatgaactgtgaaccactggaaggaaaatgaatcatgagtagaatgtcaagtgccaactggtaaatgtaggattgctggagttggcagcttatcattctgcaaccattgtgttaaggattggatcaggcaagaatcatcaaaggatcctaaatctaggggcagtttcaatgaggagccaggatatttgcatgccttccacatatctcaagggaaaagttagtaattataaaatgggaaaaatggacaccttga

SEQ ID NO: 201311 - DNA, 776 bp, Homo sapiens
tccagtatccagaagcatatcggatgaggaggagaatgcaatagaaattagtcgcagaaatcaatcatggagaaaggaaatgttctcagtgaggtgtttcaaatatgcagcgtacaagacttaagtggaagactcacttataaagtagctgactcgcccagcagaggcacccatttttatactttcccctttcacctttcttgtggataaagccagtgtgatggctggagcttcaggagccacgttggactatgaggcaccttgaagacagaaaggtgtgcactgaaaatgctaaagctgaatgacggtgggaaggtgggtcctgggaagtgatggaaaccccgtgccagccttggaatgcccacatctgtctagtttcatctgagagaataaaacattatatatgttccaaaaaaaaaaaaaaaaaaaaaaaaaaaggggggggggttaaaaattttccttgggggggccaaagtttagggttccccaggttttttggtaaaagggggccccttaaaggggggagtcggattattaattcaagtgggcccgcgggccgcgtggttttaaacacaggtggggaagtgggaaaagggttcacggggggaactctgggggaaaggaacacctaatttgctgggggtgcatctaatgtggacaaattcactcaggaaattaaaggtctgaggtaaatttaacttctaagggtctcggggtcaactagtgtatatgtagcgttggaaaattgggtaacgaatatatttggaactttttcc

SEQ ID NO: 201312 - DNA, 176 bp, Homo sapiens
cagatgttagacaacaagccatgcagaactataatcactgagaatggaagaaaatgaggtgagccacacaaaggtctcagggatctgaatggaggcatgttccagaatctgtagcagggaaagggagctgaagcacagcgctgtatctgtctctgaactaaggaaacactgtcgag

SEQ ID NO: 201313 - DNA, 670 bp, Homo sapiens
tggaaatgttactaaaccaaatgaataggccaggtgcagtggctgaagcctgtaataccagaactttgggaggctgagggaggaggaccacttgaggccaggagtttgagaccagcctgggcaacatagtgagattctgtctctatttaaaaaaaagaaaaagaaatgaataatttcagccttcaagcaagaataccaaacaattaaggggcaaaaatctgatttccagagttacccagttataacattcaaatgtctccttttcaatacccccacccccaaaaaaccccagagaaataaataaaacagagaaacatgaaaatacgactcattaatggaaacaatttgagataaatctgagaaacctcagacactggatttactgaataaaaacagtaaagcaactgtcttaaatatatttaacttagtaaagacaataataaacaaagaactaagagaaaaccagaaaattgatgtagggataaaataataccaaatatgttaaaaattgagccatatagaatttctgcagctgcaagatacaacaacttaaatgaaaacatcactaaaggtattcaacagatgtgagcaaccagtggaaaaaaaaaactaaaatgaaggtaaaacaattgaaattacctggtctgagttaaaaaaaaaaagaagttca

SEQ ID NO: 201314 - DNA, 713 bp, Homo sapiens
tgaataacagagctaaccttaatgttccttctgataaaaatactgtcctatagacccaaattagcatatttgcttttgattaccttgcaaaactctatttgctctcttttcttaaaagcttaataattcatataaggcttcagaggaataaaatcactatgtgcgggtgaaaaatcctaacttccctgctgaggttaaatggcagccttcaaagaattttttaaataaataatggaaagagatactccatcttgcctctgaactgctgcataagcaattccttatcgccggaatttgcagagacataagaaatcagtagtcatacaggcaggtactagaaaccaggaagcaccaatatcctaactgaagggcagagactggaactgctctgcttcagggctttgtgagactctgggaatcaattcctcaattttcaatgcagtagcttgcttttgcactcctaaggcatgaaattggatgagcggaaaaaatgcattcttttcaggcagaacacaggtttaaggaaacaagaggggaaaatgtacaggtgccctggagaagggacttcttctcttggaacagtctactgggcagactaggaaaggaatcagaggaagtttgagggtgagcttgttgctggggtatggcatgacatttttgctttgtagatcatagaggaagatgggcaccactgccccaactcatttcctccc

SEQ ID NO: 201315 - DNA, 335 bp, Homo sapiens
ctgaatttgcaggcattaaatacaaaatgaaacactgatgaggctgcctctgcagtcaacaaaacaaaccctgcaaagtttccttcttgttctgtgtggcagtcagcgtgggggctcctcacttccatgccatccctgagtacccacgctcaagtctgggaaactgacctcggctccagaggaggcatggctaaatggtttgggggtgatcctatttctcttgccagtgattggtttaggagcaggcacagtatatcaaatctgaacaggaagtttgctggaagattctaggaaagtttttcttctgctcctaaaaagaaagcaaaaagggccgg

SEQ ID NO: 201316 - DNA, 640 bp, Homo sapiens
gatctttagtgacatctcttaaagatatcaacatgtaattaaagaattgtgtgaattactatttttcactctctcaaatccacaggatcatcaaaataaatataagcaagggataacagaaaaccgcaaatctaggagattcaatattaaaatcagaagtctacacagtgctaatagtgaacactgaactcagatcttttgttttttcaataaacaactcctaatgcccatttacatgtaaacaattatactaacatttcataattgatttatatgtatctatacacacagccacatacaaagtagagttacatggtatatgtgtttaacttaagtgaattagtcactcagtcaaaaaaataagtaaacacagggaagcattttaaatactatgagaaattatgcccaccatttaactcaataaatgtatgtcccacagtgagcacaacacggaaaagacataaatctgcgattggtcttgcatgatttgtgttgagaatgcctgacagcactgagtgtcattagtatgtcagtcagtacacatttactgagtgcctattatgtacaaggtactattccaggcactggaaaaacaggaattaacaaaaatagacaagaattcctacccttatgaaacata

SEQ ID NO: 201317 - DNA, 694 bp, Homo sapiens
cactggtccaaggaatctgcttctgctgaccagagtggttccttagagagcctctttatgctagttttctttgaaggatttcctgaaagatagacttttgtcctagcctattctacaagacctctgtcattcccttccttacaacttgccaccaacctgattcttctttacagtctttggcgaacaaggactctggagccacacagtcatttcagtaagttccttaatacctctgtatctcatcagtaaaatggggatagtaacctcacacggttgttataagaaatacgtgttaatacaagtaaaatgcttagaacttaactgagactggcacatggtaagcattttcgttactacagtagtagtaaaaataattagtatgactaagtagagacgatggtgcatatctcttctccctccccattcaggggcataacctaggtagcttgaaatcaacaaagtgggagtatttacacctgggaaattagcaaatactacaaatatgggcctttgcttccacagatccttctgataaatgtttaccagtgtatcactgaatgcaactcttggataagaagtggtaaccactagcagccagtagaggctcaataggaaattaaccacctttctttagcaaataaaataaatgctgaggacatgtcttattatcagcaaaaatttaacatcttatgaa

SEQ ID NO: 201318 - DNA, 201 bp, Homo sapiens
agcatgggcaacacagcaagattccaactccaaaaaataaaaataaataaataaatagaaagcatggctctggatatggagaagctaacctaatatattatgacacattcaggaggtggttgagtggatggaattaactggcactggtggctttttagatgtggtggatgaagtggggaatgggggcgttcaagaatagtg

SEQ ID NO: 201319 - DNA, 442 bp, Homo sapiens
tggttgataaaaacagctttccaatttagaagaccattctctgaagattacagtacatcttaataaggttgctatgaaatacaaataagaacacaaagtacattgcattgtgcctacacacagtgggctgttaatgttaacctttcatctttataatgttaataactataataatgatagtaagaggtaatggaaaaatctgagaaatagtcaaaatatgatgaggctagtggtcagattggactcatgggatcagggcattggtcagatcaccatagtctggagtttgtcttcagcatgttggttcagaagacacagttgatcactactagggaatgattcacaacgaccaaactcacaaacagatgtaatcatttaggagaaaagtcattctcacacgcaaagatcccgatattttcaattcaactcaccagaaatatca

SEQ ID NO: 201320 - DNA, 345 bp, Homo sapiens
tctttcccccttccaagctcttcaccatactgccaccagtgaagtttgaaaacaatagttggccggacgcggtggctcacgcctgtaatcccagcattttgggaggccgaggcaagcagatcatgaggtcaggagatcgagaccatcctggctaacacggtgaaaccccatctctactaaaaatacaaaaacaaaattagccagtcgtggtggtgggcacctgtagtcccagctactcgggaggctgaggcggaagaatggcgtgaacccaggaggtggagctttcagtgagccgagagcgcgccactgcaccccagcctgggcgacagagtgagactccatctc

SEQ ID NO: 201321 - DNA, 171 bp, Homo sapiens
tataaaaccatggacacttttttatccagagcctaggactgaaacatttatagcatatgatccgcacctgtacgaaacttggtaagattttagagacactctggcttaaatctattggaaagagaactggagatagccggtgttgtctgttaaaataaggtggtcagcatc

SEQ ID NO: 201322 - DNA, 386 bp, Homo sapiens
gagtatgactgtattcaatgaaatcttatttacaaatacagaagaatggctggatttgccccatgagctgtaacttgccaacccctgttctaaattgtcactgagatgtttgtatctggcaaagcactcctaaatgacgtttattttttaaaacagatgtttcagtttccacggcaagcatctctaagggttccatgaaagaaaatgcagtctcatttaatttatgttcgctgcatcacattctgcccctattccatcgccatacccagggtccaaatgtttggacatgacaatcagtgcttcaaacctacctgaaaccacctttatacacttgaaaaccatttacttaaagagtaatggcacacattgcagcaacttttctttct

SEQ ID NO: 201323 - DNA, 630 bp, Homo sapiens
gctaagaaatttgcaccttagctccttaggtgaaccaaggcaggtggtctagggtaccccaaccacaattgtgaacacttgaaaatgtgtcttctgcttgtcccataataagtgagtcactactgggtcgtctgccttgttacaagccaacctgagtcaatctgtttgagcacaattgttgggtactttttagtggttaatgatagagccaaggaagcttgagttgggtgaggttagctgttccttctcatccctgccagcatcttctaatgaaaataagtctcagaccagattcatacctacgatgattaaataagcattcatgatcaaacaggcacctgctttgatagcttaaataagtccctgatctctgtccttgtagatcctcttaccttccaccagtttattcaaggcagaaacaacacaattccaaaggcaggagctggttaccctgattattggcattaggcaattaaagattctcttgaccaatgactggacacaggactgctggtgggtcgagttccagaagccatcctaggtgcagcctaggtctccatgggttcacatccagagtgtttctaaactgttttggccaatgtacatattgtgaatatcattaatttcaca

SEQ ID NO: 201324 - DNA, 428 bp, Homo sapiens
gacaggagggcagcaagctaacaagccaccttctccaccctgtgtagatgacacagctaatgctcaggggatttaagggacacgtctcaagccagccagcaaatgaatgggagagcagagcccaggcctgggattccggagcttgtgccacttgtcaacatgacaagaggacccactgggggatggcacttcttgtgaatgccacccttagcgcctacttggtgcagctttaacttggagaaagaaagatcccattccccttccttgctgttgagaacatagtcatggggcaagactgggcagcccccttatttcagtctgagctatccttggggttcccagcaagatcccaaatacctccaagtccctaatgcgtctttcttggttgtcaaatgccaccgtgagtctgattcctttctgtgtttttc

SEQ ID NO: 201325 - DNA, 506 bp, Homo sapiens
aaagtaaaaactggaccatatcaggaaaggctaagagcagggaaacttaaaaaaatgggactgcatgacagcagatccaccaatagcaccaataacaataggataaaagcattcctagggaagagcaaatataacattcatcttttttaaaggaggggaaaagaatttgccttgtgactttagggtaatatattaaaagcttagaaagataatttaattgcctcaataattgctcaatcaccaagaaatgtgcaaggcactgggaaacagtgtacttatctgcttagctttctaaagagaaaattgggtaggactaactttttctataataataatgggatgattagagaaagggaacatctaaatatccattttagggtatttgaatttttccattttcaacagatatcataccctgctagccagctggataaagggtcttaaagatatcatctgggataatgaaccaaatattcatggatgtttcaataagaaagaggtcatag

SEQ ID NO: 201326 - DNA, 548 bp, Homo sapiens
tgagcgtgcatgtgggtacatgtgagtgtatattcctgagtgtgtgtgtgactgtgtgtacaaagtgttggcaactacagcaagatgatggctgaaccctgtgtgggttgtacacatttgccacagtccatgccctttgtcacgtgaaaatactactactcgtaagtgagaagagtgaatgccagcaactcttggggactgttgtggctgggttgtgtctttaatcatttcatctgccaaggtttttgcaccactgtgttgagagctgtggggatcacagagacatacaaggcacagcctgacccccaagggttccccgacttgttggagaggcagatatgcaaggcccaaatgcagtgtgcacagtgagtgaggcagctgagaggtaggttcctccggggattttgaggaaggttgatggttgatggagagggtttttaagctggatctttaagggtgagtaggagttttccactgcaggagaagagtgtcatgaacagaagctcagagatgtgcaagaacatggtgtgggtggagcccaggctgtg

SEQ ID NO: 201327 - DNA, 497 bp, Homo sapiens
gatctgcaatgagtagcagacacatgtgctgtgaggggaagcacttcatggctgtgatgtgcccataatggtgaaggtttatatgagaattggctaatgttgaatttgattattctcaaccagagaagcagacaggatatcagaatcagaaggaatttaagaaagtaattgctactccccgccgcccccacatttgaacctctgattcagactctgcagaggagattgaatgaattgatttaaaggtgaggtcacaaactggccacttttcagtggaatctaagccaacatgttttactttggccaatgcagtatgtgtgtgttttaaaaaccacatttacacacttctagtgaggctgaaaactccaatttgttactcttccattccctaatttcttaaaaccagcaacttcacacttaagttaatgggcctctgaaggcaattgagacatcagttttagacacccccccgccaaacacacacccaacccgatcta

SEQ ID NO: 201328 - DNA, 220 bp, Homo sapiens
cctctccaaattctcatcctgggcctctactttcctgtttctaaattttagcagtgccttgcacatagcgggcctgcaagaaatgcctgctgattaattgaactggctgcccccgaagccataggactggcattaattgctatggctctttggtaagagacggggttttaccatgttggctaggctggtctcaaacttctgacctcaagtgatccgcctg

SEQ ID NO: 201329 - DNA, 608 bp, Homo sapiens
ctgctggttggttgacaagggatactcactagcaaactaatcacagacaagcaagttgaatttttattcagcagttttttggatatggatttagtagcaccgttattagaatgctgttaatgaaaggtagagtgatcatatgaaataatctttagagaccttttaaaatgactatttttcaggagtagaggtaagcaagaatgagttttcaggctcctaattgaaattgtggtttggagaacattttaatcctctagggttgtctttgtaaaggaagttgctgcagagtagctccctttgtattaacaggcagtagagttagttgtttcaagtgagttagaattttagaattggaacgacagcatgtaattagttggagagttcctatgccattacgctttataaaaagttatctagatgtgatatgaccagttgatcccctgtaataaaaacaattaattttctagagaatttttatctgctgtattcaattttcatagcataatgctgaagaaaatgtaatgagtttttcactgagtttcgttgttcccattcaaaaagaactatttaaaaatccatgttgctactatttgggatgttatagatcc

SEQ ID NO: 201330 - DNA, 357 bp, Homo sapiens
tgatagtgccactattctccagcctgggcaacagagtgagaccttgtctcaaaaaaaaaaaaaaaaaaaaaaaatatactacacacacaaaaaattgattgagtgattgatagagatgggatcttgctgtgttggccaggttggtcttggcctcccaaagtgtgcaaaaaatatatatatatatatgtattttaactcagttctgttcttgatcactgtgacctttcatctttttgtttaaaactgtaatctttttcctgctcacacgtcttctaccactcttcaaagcaattaaaaaatattctttgtttagttgctttcttttgtctgtcttcatcattaacaggctttttcctt

SEQ ID NO: 201331 - DNA, 136 bp, Homo sapiens
ttatcaaaacctgtagtttcgggaaagcagctataaaaaagtcctacaaggaaagaagaaatgctaaaattaataaactaagcatcctaattacaactttatcaaaataacagcagaatcaacccaaagtaaagaa

SEQ ID NO: 201332 - DNA, 502 bp, Homo sapiens
ttcaacctgctcttctcctatttttccaatcccaataataattgttcaggctaaaaatcaaacaatcatccataattcttctcttctcggcaaatgctcaacatgcataataagtatggattgtctccccacatttctccactttacattgcttacactaataacaccccaggcctacctactaccatctcttggttggattgttttgatgctctctgaatgatatccttgcatttacatgtgacccctgaagtttattctctacagagcagccaaggcaatctttaaaaaaaagtatctaattttgccagtccttcgttcacatctttctgataacataccattatatctaaaataacaatcaaagctcttagtatgtcttaaaaaacagccacatgtcctaaaaaatgttttaagtatgtcttaatccccatggcccccccttctcatatttttctctttactgttctcttacccctttcactttcactgcacccccgac

SEQ ID NO: 201333 - DNA, 402 bp, Homo sapiens
aagtatttcttccttgctctgattttttttccttttctactttactagtttttctagttctccttcctggggctttctccaaggtattttagattctttttttttaaaaaaagaaaaaaaaagtactcttataaaatgagtattttgaaaactgtagctgtccctccagaactgaaagaaacacacatggactatttcagttatctcttgcagtatagcaaaccaccccaaaacccaatgacactcctgtggacagaagcgggaccgtggagtggaggggaggcaggaagtgatgcctgggctgctcttttatttattgttcatgattctgtgggtcagggcttggtggggatggctcatctctgctccatgtggtgtcagctgggcctgcgtgactggggc

SEQ ID NO: 201334 - DNA, 998 bp, Homo sapiens
aaggttttttcctagtgtccaaagagctgttcctctttggactaacccctataccttctgcgataatgaattaactagaaataactttgcaaggagagccgaaagctaagagccccgaaaccagacgagctaccgtaagaacagctataaagagcacacccgtctatgtagcaaaatagtgggaagatttataggtagaggcgaccaacctaccgagcctggtgatagctggttgtccaagatagaatcttagttcaactttaaatttgcccacagaaccctctaaatccccttgtaaatttaactgttagtccaaagaggaacagctctttggacactaggaaaaaacctagtagagagagtaaaaaatttaaggacccatagtgaggcctaaaagcaggcaccaatgaagaagagcgtacaagcgcaacagccactacctaagaacaatcccaaacatataacggaactcctcagacccaatgggaccaagtcatatcaccctatagaagaactaatgtgagtataagtaacatgaaaaccattctcctccgcataagcctgcgtccgatgaaaacacttgaactgacaattaacagcccaatatctacaatcaaccaacaaagtcattattacctcaatgtcaaccaagaaagggcatgctcaataaaggaacggttaacaaaagtacaaggacatcgggaaatcttagccgacggtgaaccagaaaaaatcacctctagcatcaacaagaataaagggaccagatgcccagtagaaacctggtaaaaggccggcggaaccctaacacgaagcaaagggaacataaaaagatgatccgtaaaaaaggaagccggacgacagagccacacacgcgataaacagagcaataaattaaccacacggaaaattagaaaccgcaagagggcaaacacacagagcagcaaagcacaacgagcacacaccgcacgaccaccaccaaacacagagacatacaa

SEQ ID NO: 201335 - DNA, 458 bp, Homo sapiens
tcagctcggtccctccttaatgtgtgcccaggctgggcggatggtggtggtgaggatagggaggtcatggctaaaaggtacaagggcttctttttgaggtgataaaattattctgaaattgactgtggtgacagttgtacaactgcatgaagatactaaaaaccagtggagagtacacactacacaggcgtattgtatggtatgtgaattatatctcgataaagctgttacaatacggttcaaaagaagataatgactctgtccatcctcaacattaaaccttccttgcaaacgtcagtgtacaaatcaagattgcacaaacgtgaagtaatcttgctgtctagacagagtgaaaaattcctctacacaataactttttttttctttttcagacagtcttgctctgttgccgtggcgtgactgacaacctgtgtggtctccaaaatgggagccccagc

SEQ ID NO: 201336 - DNA, 611 bp, Homo sapiens
tcagctcggtccctccttaatgtgtgcccaggctgggcggatggtggtggtgaggatagggaggtcatggctaaaaggtacaagggcttctttttgaggtgataaaattattctgaaattgactgtggtgacagttgtacaactgcatgaagatactaaaaaccagtggagagtacacactacacaggcgtattgtatggtatgtgaattatatctcgataaagctgttacaatacggttcaaaagaagataatgactctgtccatcctcaacattaaaccttccttgcaaacgtcagtgtacaaatcaagattgcacaaacgtgaagtaatcttgctgtctagacagagtgaaaaattcctctacacaataactttttttttctttttcagacagtcttgctctgttgcctaggttggagtgcaacagcgcgatctcggctcactgcaacctctgtctcccaggttcaagtgattttcctgcctcagcttcccgagtagctgggattacaggcatacacgaccatgcctggctaaatttttaggcagagtggtatagatgcttgcccgataacactaataaccgcagttgaaagacgcaggggatcctct

SEQ ID NO: 201337 - DNA, 581 bp, Homo sapiens
gaggatcccgcgacgatggttggcaaggccaaaggagacagagtgaagcaatgacaagccaagcagccagtggggagctgctcctctctcaataaaagcctgacggtgatccaggaaaggccaggaggctcatgtttcattctgggcccttaattcccaaaaggcccattttttaaacccatgtatcttagtttttatctggtggaaaaaatgagaatcgtctccttccttctaagtaaatgccatcatccatcaagtgcctgctcggtgtggggcattagttggtccttctggcaacacttgaggggagatactatcacccttatctttgtagggaccagccccacagggtcggtgggtttttctccctgtgtgtggagacgagactgcagaaataaagacacaagacaaagacataaaagaaaagacagctgggcccgggggaccactaccaccaaaatgcggggaccggtagtggccccaaatgtctggctgcactgttatttactggatacaaagcaaaaggggcagggtaaagagtgtgagtcatctccaatgataggtaaggtcacgtgggttat

SEQ ID NO: 201338 - DNA, 352 bp, Homo sapiens
gtaacagacctttaaagaaaaaaacataggaggaaagaagtacacgactcaatggcatcaggaatctttgagtaagatcaatttctcttctgcttacaaaatgccaagggtcagagacattttatgaagttactatttcaataaggaagcttcattttaaagtttcatgttgtttggaaaaggagggttgcaggtgaataaggataaaggaaattaatgtttactgaatacctagcatgtactgggtatacagctggccctctctatctgtgggttccatattcatggattcaaccaaccatgcattgaaaatacttaggaaaaaatactgcatctataccaaacatctaag

SEQ ID NO: 201339 - DNA, 488 bp, Homo sapiens
actctgtattttaaaatatgcagttaagtttttattgactatagtcaccctattgtgctatcatatagtaagttttactcattctttctactttttttgtacccattaacctatccccacctctgccccaccattatctcagctgtctactacttttttcagcctttactaaccatccttctactctatatccatgaattccgttgttttgatttttagatcccacaaataaatgagaacatggcaatgtttgtctttctatgcctggcctatttcacttaacataatgacctccagttccatccatgctgtcgcaagtgacaggatctcattctcttttatggctgaagagtactccattttgtatgtgaaccacattttcttcattcatctgttgatgaacacttagggtgtttccaaatcttagctgttataaacagtattgcaacaaataaaagagtgcagatggaaaattgattttgatggct

SEQ ID NO: 201340 - DNA, 505 bp, Homo sapiens
gtgataggaggtgcttttgagaattttggggacagattcaaggctgtacttctaggaatgatgccagcacagcagcatccacccagcctgaggctcaagctgcccttaccaccccatcccccacgcaggaccaactacctccgtcagcaagaacccaagcccacatccaaacctgcctgtcccaaaccacttacttccctgttcacctctgccccaccccagcccagaggagtttgagccaccaacttcagtgcctttctgtaccccaagccagcacaagattggaccaatcctttttgcaccaaagtgccggacaacctttgtggtgggggggggtcttcacattatcataacctctcctctaaaggggaggcattaaaattcactgtgcccagcacatgggtggtacactaattatgacttcccccagctctgaggtagaaatgacgcctttatgcaagttgtaaggagttgaacagtaaagaggaagttttgcacacccaaa

SEQ ID NO: 201341 - DNA, 235 bp, Homo sapiens
aagtctctgtcagatgtataagagtgctctggtacaataaggactgaaggaagcaaccaaacaaattaagagactttctctagaggcagagtaatgctaagggcagtggcagtgacaaaagcggaggaaaaagtctgtgatcatttgggagacagatgaggcttgtgctgtgtcccaggtgaaagtgatgggcccatttcttgccctattctgaagcagtgttgtgactgactag

SEQ ID NO: 201342 - DNA, 1047 bp, Homo sapiens
ggctgtgcaggcctctggcagtcccgactctcggtgcctcaggaagatgataacacctgccaggttttgagactccggtgaattgaaccacaaagatagctaagctcagttcctggaatttgtgaagccgccaataagtaactattgcccttgcctgaagcgtggggtctgtcttgcttttctaatgctgctgaaacaaatcgccacaaacttaagggcttaaaaccacacaaatttattctcttatacagaaatctaaaaaggatctcggcccggctccatggctcacacctgtaatcccagcactttgggaggccgaggcgggcgcatcacctgaggtcaggagtttgagacgagcctggccaacatggtgaaaccccatctctactaaaaatacaaaaattagtgggtgtgatggtggacgcctgtaatcccaggtactcgggaggctgaggcaggagaatcgcttgaacctgggaggcagaggttgcagtgagctgagatcatgccattgcactccagccctgggcgacagagggagactttgtctcaataagtaaatacataaataaatagattaattaaaataaaaaggatctccagggctgcattgcttctggaagctctagggcaagcttttccagcctgcggccatacggcccaggactgctttgaatgtggcccgacacaaatttgtaaactcttaaaacattatatatttttcttttagttcatctgctgtcgttagtgttattgtattttatgtgtggcccaagacagtcgtcttcttccagtgtggctcaggggagccaaaagatcggaagcccctgctctaggggagtgagttcattttattgccatttccagcttccaaaggctctctgcattccttagctcgtggccccatcctctgtcttcaaacctaccagtgtagcatcttccaagcagtccctcaccactaccctgtctccccggccctctcactccccttctgtggccacgatgcctcagggaaagatggcattttaggcagcaggtaaagaacga

SEQ ID NO: 201343 - DNA, 375 bp, Homo sapiens
ttgccactctgtacattttgcttataataaagggttggttaaaggaaaatagatgtaatttttggcacttgtctgctctaatatcgtgactgacactcataatgtacatccagttctcttaaatcccataaaaagccattgggaagaaaatttttgagataatataaatataatcttacgtaagacctgtgtagccacttcttatagacagcttaggaaagaaagaagccttcaaataattaccaaagtaggaagaaaactaaaaacctctcgtattaagggtaataattgcaaaatgacacccacatagaaaaagtcccttcctttcattttcttgaaatatattgaaacaaaaagttaactaacatcatttgg

SEQ ID NO: 201344 - DNA, 809 bp, Homo sapiens
gcactctctgtcccttctcccacttgtttacttgtatatgtgttcccactagaatgtcaactccaggagagcagagactcttgtcttattcactgctgtgtccctggtgcctagaacagtgcctggcacctgctaagtgcatattaaggagtcgttgctcactgggtagaagcattaaaaaaaaaaaaaaaaaggtcggaggtgatccacggcgccggggccaaaaggagggattggggtggggcactgggcctacctgtttgccatgcagcgcagattaggtccgtctcaaagttggtagagctgccggcccccctgataaccccaggccgtgaaagatgcacggaatagacgcaaaggatagactctggctgtcagtcgagccaactcccctgctcaagcaatcctcccgcctcagtctcctgaatagctgggaccacaggtgtgcgccgtcatgctcagatactggcatcagctctttggcgtgcatgttgtggtagtttttctacaggcgacctaggccatttgtcctggagttttgcagtctggggccagctgatacatccttgtggtgtcattgcacgtgttctctgtctctgtgcttcctgtaagttaggacttaggtctagaagctcgatctgatgcaggttcagtttcttctggcaagcacgctttcttaggtggttgcttggatgagcatcagaattacttacatgtctgtatgactgtcaagttcagttttcaagtaaaaattaagttttttttaaaaaagcgagtgggttgagaagaacactctgaagtcactccta

SEQ ID NO: 201345 - DNA, 659 bp, Homo sapiens
agtttcctaggctggtctcgaactcctgacctcaagtgatccacccgcctcggcctcccaaaatgttgggattataggcgtgagccacggcgcccggcccatttgtttgatttgggtctggacaaggtctacactttgcatccggttgataggcctcttttttttgttttgttttgttccctttgttacccaggctgaagtgcagtggagcgatcagagctcacgtgcagccttgacctcccctgctcaagcaatcctcccgcctcagtctcctgaatagctgggaccacaggtgtgcgccgtcatgctcagatactggcatcagctctttggcgtgcatgttgtggtagtttttctacaggcgacctaggccatttgtcctggagttttgcagtctggggccagctgatacatccttgtggtgtcattgcacgtgttctctgtctctgtgcttcctgtaagttaggacttaggtctagaagctcgatctgatgcaggttcagtttcttctggcaagcacgctttcttaggtggttgcttggatgagcatcagaattacttacatgtctgtatgactgtcaagttcagttttcaagtaaaaattaagttttttttaaaaaagcgagtgggttgagaagaacactctgaagtcactccta

SEQ ID NO: 201346 - DNA, 672 bp, Homo sapiens
atctcaacaccagaaggaatgaaaatgtaaatctgaacaacttactttatttctccaatgtaacagttcttaaatggatgatttctgacccttggtacaagacaagagtttgaaataagtacgggaaacaaatcaatctcattttgcctgggttcctggaaacatcttttgatgtgctcagtgcccttaatgagggtagagatttttcattttaatccgtgatggattgagtttgaaatttgtgactgcagagaggacttagatctcctctgtcttcacttctgtagactgtcagcatgtcaagttcaagccctgctgtgtaacacgctgctaggatcgcattagtcccaggtacacactgatggacaaatggtgtaactccaactcttgcccttaaaacaaaagccagccgggtgcggtggctcacatctgtgatcccagcactttgggaggccgaggcaggcggatcacgaggtcaggagatggagaccatcctggctaacacagtgaaatcctgtctctactaaaaatacaaaaaattagccaggcatggtagcgggcacctgtagtcccagccactcgggaggccgaggcaggagaatggtgtgaacccgggaggggagcttgcagtgagccgagatcgcctgggcaatagagtgagactccgtctca

SEQ ID NO: 201347 - DNA, 459 bp, Homo sapiens
tatattgtaggatgtttagcagcgtccctggtccctacctgctagatcccaaaaacaccccctatccaggatgttaaaactaaaaaatgccttcagaccttgccagaggtcccctggggggtgcaaaatgctttctaccctcctgcctgagccccattgagaatctctgagtgtgatgaaaaacacatggaaaagtagatggattttccacactgggaaaagatgcttgtttccacataaggggctaggcttctggctgtccagccagctactcaaatttgacctatttcccaatttttctataaacagattatttttattctcagagtagtatgagtctttgcctgggggaaaaaatgaacagaagtaaacaatatactcctgtatgccctctctgctaacctcatctgtcactgctggcctgagatttagagaatgaggcactcagacatgatcttc

SEQ ID NO: 201348 - DNA, 285 bp, Homo sapiens
gccagttagctgagcgttcaggtgactaggaagtcaggccatcttccccttacgtaacagacataattgtcagctttttctaaatcgagctcagggagcttgctatcggtgccacctcccttcagcatctcagacttcagagacattgcgaatgacttctcctagaataattagatccaagacagaatttgatgactggaggtatcttataggttatcttcaaatttaaaacatttgtgctttcagggactttctctcctagtacaggtggccattataatgaaa

SEQ ID NO: 201349 - DNA, 124 bp, Homo sapiens
catgccacaatgtagataaacatgaaaacattgtgctaagtgaaacaagtcagtcactaaagaccaaatactgtatgactctacttatatgaaagtccggggtaggcaaacttagagtctagag

SEQ ID NO: 201350 - DNA, 272 bp, Homo sapiens
tcattagatatctgataattttctagtattagtagacttcagaattgtacttgtagacttcataattgcatttaccttttcaaatacttagggtcagaagtagagttatttgaaatgataaatcatcttgtgggtacaatattttgagagcagaaacacaatgaagagagccagccttgaatttttattttggtttaagctgatatttttatgaatgcttgttatgtatggcacaatcagcacataatataatttggtcacacttataattg

SEQ ID NO: 201351 - DNA, 711 bp, Homo sapiens
cccatggagctgagtgggccagccacagcctctcccctccctgtccgtgatgcggtcaacccaggcgtggcaagccctgctgggccaggccaggtaagcacgctggaggggccacagacaaaagggacatccgtcctacagactttaaaaggtaactccgaaccatcaggcctgccaaggcttcccacagccacctggcctcagctgcttcccacagatatgaggtgtggccctttcagggagaagcttttggaagaggtagcaccgtcacagtcaaggggggcccaactgggtggaagaatgggaagtcccggaggctggaccatctgccagccgaggcagtgactctgcttctcctaaaggtggtgaccagtagggaggacggccaccttcttcctgcagtgggcactgtctgtgctctggaggcagccgtgatgacaagtatagacagtcaaagccacaccaccaagggtgaaggccattccaagaggcgagcagctcagagaggagactgagtctaggggaggacggctaggaaagggggccaaacttgtatataatgatgtcttccatgtctggctccctggacagataaaggcccaatagagcagggaccctatctgtctggcaccgtccttagggcctataagattgccacatagtagcagctccacagctctttgttgaataaatgaatgaactctaacaaga

SEQ ID NO: 201352 - DNA, 1084 bp, Homo sapiens
ctggggtttcaggtatgtgtcaccacacccagctaatttttgtatttttagtagagacagggtttcaccatgttggtcaggttggtcttgaactcctgacctcgtgatccacctgccttggcctcccagagttctgggattataggtgtgagccaccgcgcctggccatgaagaaacacttgttcaagaaaatctacaaaagtcagtaagaacattgggtctgtggtatttgaactaaaagctcctccatccctccttttttgcagctagtgagatagaaactttactctagagggtgtagccaagaacacagggctccagctccatgtattccacctcatagcctcagtcagaaggttttcatcctaggaggaggagtagcgtaccaacatttctcattttgcctcagatgcctgtcactgaggcaaaattctaggtaattgtggctgagtggtggtggttcctttctttcacccagtccctactcctaggatggagacttgaccttgggcaaggcactgctgaaaatactggggctctgatctcctttacccttgcttttcaagccgagaagccctaagtctacagcctcccttcccgtgggtactccacttcgtaaagcagggatgccattcagataaacacaccattgtccccactctagctgtagagagtggctcagatgttttatctggaagcagaagtaggctgtaaaacaggtagctcctgatcttttcctaaaggaacaaagtatggagaagctcaggagtgtggagaaagtcaaaaaaactgcggaggttgttgtgcaaagcaatagggaagagactggttagattcactggagatgcaggataaactagtaggccagctagtttgctggagagaaccaggaaaagaagaagctaggaggagccctttggtatcagaacaactctcaaacactgaccttgggaactaactgtccctttagagggacccaaatttgatctactcagtctgtggagcaaggtaatagcataggtgagtttattatactcgccaagagcaatgctcatgaatagttagtgactcattactgacaaga

SEQ ID NO: 201353 - DNA, 494 bp, Homo sapiens
ttcatgtcgaggcttcatgccaacttctcctcatgccctctttctgccggcaccactagcactgattgctgcagactttattttctctctggtctccaagatgactttatttttgaccaaggaacttatcctacacttcgctacgagtcctttcatgcccagtcaggaattaaacttataccaatgagagcctcacacattcaaggatgtactaagcactacaggcctcacagaaacagagatcccatctgggagttttcagtaccacatggcatgaaggccctggacatgaaactactagtctttgtatttcatttttatgtacttaaagggcagttctaaagtgagggagaaccccaaattactctctgcaataaaaaacaactggtaaactagaatatgattcagatagaggaaagccacagggttttagaattacaggcacaaagcactttactgtattttttttaaggcatgaagttagatgattttgt

SEQ ID NO: 201354 - DNA, 478 bp, Homo sapiens
aggggtgtgaccctaccatgaagaaggacatgaaaacattttgggattctaccaactccaaaaaggttttaacagactgtgatggttaatattgagtgtcaacttgattggattgaaggatgcaaagtattcttcctgggtgtgtctgtgagggtgttgccaaaggagattaacatttgagtcagtggactgggagaggcagaccaacccttaatcagctgccagcactatctaatcagctgccagggtggctaggataaaagcaggaggaggaaagtggaaggactagactggcttagtcttctggcctccatctttctcctgtactggatgtttcctgcccttgaacatcagattccagggtcttcagcttttggactcttggacttacaccagtggtttgccaggggcttttgggcctttggccacagactgaaggctgcactgtcagcttccctacttttgaggttttgggact

SEQ ID NO: 201355 - DNA, 154 bp, Homo sapiens
tctgccagcctccgcctcccaaagtgctgggattacaggtgtgagccacagcgcctggcctgtatcacttatttctaggggaaatggaaggaccagtatacaggatttatatactgattcaacacaatttcccagtctttatcttttttcttct

SEQ ID NO: 201356 - DNA, 837 bp, Homo sapiens
ctcttctttcacctggagtatgtttctgatatgctatctagtcatcatccttttttcccaaggcctagcttaaggattctttttttttttcccccgagacagagtcttgctctgtcacccaggctggagtacagtggcgcaatctctgctcactgcaacctccgcctcctgggttcaagtaattctcctgtcttagcctcctgagtagctgggattacaggcacctgtcagcacacccgctaatttttgtatttttagtagagacggtgtttcaccatgttggccaggctggtctcgaactcctgacctcatgatccgccctctgcggcctcccaaagtgctgggattacaggcgtgggccactgcgcctggccaggattattattcttaaagccttttctcacaaatgtagtctccattgttgtcacaattctaaaattccatatatgtcttttaactataaatttcatgcagagaatagtgttctgtttatctgatatcccattgcaatagtacaagggccatttaaaacatgtccacctattaatttcaggaaatgattaataggaagttaccttgcatccaacaaacatgaagacttactatgtccatgcactgatggtcacaggtagacataactcctgtcttttctaacatttagactagtgaaaatgacaaatcaaagccaggcatggtgactcactcctgttgtcactcaggaggctgatgcaggagtatcagttgattccaagagttcgaggctgtagtgtgctgtaatggcattgcactctagctctagcctgggtaacatagccagactccgtctcttttttattt

SEQ ID NO: 201357 - DNA, 593 bp, Homo sapiens
gaatgtattcaccattgaggagatattaaaaaaaacctgaccatcttcacactgaatactaggcaagaaagattagtaccatggaaaaaaaatgctagttttgtattcagatctgagctcaaaccttagctctgctatcatagctctgtaactgtaacatattctttaagcttgttttgtcatgttacatggtgataaagaaaaatacttgttacagggttgtaataaggataaaacaaagtgaaaacctctagcacagttcctgactgcattttttctcaatgtttgttgaaaatgaaaacattttaaacatttaaaatgaaaattttaaacactgtaattttcaggtaattaattacatgtatgttgagcaaaagtgaatacttttcttataaaagtaactttccggccgggcgcggtagttcacgcctgtaatcccagcactttgggaggctgaagtgggtggatcgcctgaggtcaagagttcgagaccagcctggccaacatggtgaaaccctgtccctactaaaaatacaaaagttagctgggtgtggtagtgggcacctgtaattccagctactctgaggctgagg

SEQ ID NO: 201358 - DNA, 487 bp, Homo sapiens
tctggcacacagtgggcctgataagtggtattgatgcctgagatattgtattaacttaaatgaccaggttgaagagaaggtgtcagaaatttacgttcctccatgtgtatttgattatataaaatactgttggtcacactttccctacgtcatattaggtaaagttagaaagtgaaggcttttccactgggcacggtggctctcgcctgtaatcccagcactttgggaagccaaagcaggtggatcacttgggaactcaggagttcaagaccagcctggccaacacggtgaacccctgtttccactaaaaatacaaaaattagtcgggtgtggtggtgggcgcctgtaatcccagctactctggaggctgaagcaggagaatcgcttgaacccggaggcagacgttagttacagtgagctgagatcaagccactgcactccagcctgggtgagtgagactccgtctcaaaacaaacaaaaacagaag

SEQ ID NO: 201359 - DNA, 471 bp, Homo sapiens
gctctgtgtctcacaagtcatcaaagagaggacttgacattgatgatcgcttccctctgtgacatttccagactctatacttacttcgaaactcataaaaataagcattgacaaggatatgagggtgtggtaagcgcattgcttccccagacttgaaacacttaacagcagcgtttcctgcgagtaacatcaaagacacctttgaattgcacaggcagaaattgagtcccttttccagttctctttcaaatcttctggttacttcaagggatcactttggtttggtgccagtgtgtctttaaacaattctatttatttatggacggtgtgtgtgtgcatataattatctatttatttacacatatatgtataaaattatatgtacgtaattttagtttttaaaggatcatgcagtaaaattgaaatttttagagttcagttcaataaaaattttaacataggtaaccacta

SEQ ID NO: 201360 - DNA, 305 bp, Homo sapiens
agaccatctctgtagtgtctagtctcataaggacactaatccctttcatgggagccactcttatgacccaattatctcccgaaggctctatctcctaataccatctcaatggggatagggcttccacatcaccatttttggggaacacagcattcagacaatagcatccacaaaactccttcgttactttagtgatttcctcctcattattcaaggctcagggaagacttcattgactgtgcaccaccccctcagccctagaccaggttaggttcattcttgcagactctcacaaagccttgtgc

SEQ ID NO: 201361 - DNA, 235 bp, Homo sapiens
aaaaatgttttttgaggtcaaaagctaaattttcaaattggcattacaaagtcctgatttgtgaacttctcactgactttaggcttccaactttaagcaactctaacaagaatcttaaaatcagtcacacacacacacacacacacacgcacacacacaaacctgttttctaaatttcttagctaaaaacaaaaacaaaaacaaaaaacaacccctcacttctttatcagactct

SEQ ID NO: 201362 - DNA, 527 bp, Homo sapiens
gatgactcgggccacaggagcatggccctcccctgtcaaagctgacttctcgtttctcaggacaaaatccatacgctttaccgtgcccttcaaggccctggctgaccggccgtggcccatctccctggcctcacctcactgcccatggggctcctatggccgcctcagcttctttctgctcctcagactcccagactggagccgttgctgcctcagggtgttgctttatgtgttttcacagatgcctttaggggagatagacctaaaagagtctgggcaacatgcacagcctccaagcagttcactcatcactcagctactatggccagactgcctgctagtgcccggtaggtgccaggccctggggaaggaagcaatgccctgtggcccttgttcccaaggaccgagcacttttccacgcagttaaggtgcacaaacacaaaacaccgaataacgctgaaagagcccaagagaggaccagaggtcactgggctgaatatgatgaaaagtcaactaaaaaccagaaa

SEQ ID NO: 201363 - DNA, 279 bp, Homo sapiens
caataagtgggtccctctgtaacctctgtaactctgtgattccagaattctaaaaaggcaggctatgtggtttttcctcacaaccccacatgtggatttattacttgaactcaaatgccagcctgtttcactagtagggagagaagaaggctcttctttataaacgttcagtgttttaatggcatcgggaaaagctaagacttctgtctttcagtcaaagcaagtagagaaggcaatgagactatgttgactatgtagagactgtcatcataataaaaa

SEQ ID NO: 201364 - DNA, 589 bp, Homo sapiens
gggtgctggcaaacaaatcagatggttccaggcagtcaggatggacgtgctgccttctgcctcggaaggtggtggggtggcccaggtgcccgccgtgccctcggggatcagtctgcataacccgtctggaattatgtcagcagacctcacaggtcttctcttgagatacaacctcctcgcagggcaggtcaccttggcgatggtggtctgggaatggctgtagtggctcggcttgcaggtcatccgctcctggaggcctcgcagaagtcaccttgtgccatccatgctgagccacgctggagtttctccaggcccaaggtgtgtgccacccttctcctgccccaccctgaagagctgcaggccagacctacctccttccggggtggtgaactccttggtctcactgcgaggcccatcacctctcccattgaccacaaccatctccagcttgtagttactgtaggggaagaggcgggacaccacgccacggaggcggtcaccagggaagctggcttgctgtctcttctgagacacccacaggttcttcagcaagctgctctccctccagtagtaggccttcgggacagag

SEQ ID NO: 201365 - DNA, 366 bp, Homo sapiens
tgcccaccagcgaggctgggatttgaactcaaactaatcaggagctccagcgtccacccccatgaccacagtgccgtacagcacgaacacacggctgtgtcacccacagccacctttggcacacactgtcactatgggggagatgagtcaaaatcagtgaaagcaatgtggttacagcgtggctgctgagggtggagctctgtgtggtctaacagcccagaaggcttgaagcaaaggatcaggaagcagccctgccagaggaaggctgccaagaactgaccgcctgccccacacacccccgggacacatggccacggctgccaggagctcctcttggccatcaaagggcagcagcaccagctttca

SEQ ID NO: 201366 - DNA, 370 bp, Homo sapiens
taaattccctttgtctagtatctgcggggtgaagttacccctactgaaatggtccttgaatcatagatttacagatggaattaacaagtgtggcttttttctctgaaccactttttgtgcacattcaacatctcggaaagaaaaatgatctatttttatacggtacatacatagattggtattagctttactgaagaacacaaggataagacaaaggtcagttttaaaaaaaatcaatctcaggccgggcgcagtggctcatgcctgtaatcccagcactttggggaggctgaggtggaggatcacttgaggccaggagtttgagaccagcctgggcaacacaccattgcactgtagcctgggcaacaag

SEQ ID NO: 201367 - DNA, 694 bp, Homo sapiens
ggcgtcttcctttgcccagagcaaattgagacatccccgtgagagcccgagggtcgcttccttttgggtttaaagtcgtcctgaggctggtctcgtccccggtctttctgctataggtcaatgtatacactttctgttgcgtagttttcctgctgaaaaccttgttctgactcctcgcgccccgcgctttttaaagtcttcacccgcgatgtggattcttgcccagggcgcctcccagcctccccctcctcagccccgggagcgccgcgccgcagccccagtcccggggaggccgagtcctctgccaggtcctgggatcctgcagaccccatcctggtcctaaggcgccgtcgcgccccccgccccgcaccttcctcctcatgccggggcctgctgctccccaggtctcccctccgcagtcaccgctttcattgaacctgcactggggaggtcccaggggcctgtcctgcggcacggggtcttcttgcctgcggagctccagggcgtggaaaatgcgctcctccgggatgcaggcgtcttactccaaaccgtgttgcgattgtgtgggccaaaggaatcaggagacagagagcagtagaaaacctgaggcagagaaaagaagaataagaaaggcccataacagatggcaaaatagaggattggtgagggatatgccaagagatggcagaagtga

SEQ ID NO: 201368 - DNA, 773 bp, Homo sapiens
atagccctatttgtctttctctttagctgtacttctctatctttctgcatttttgtctccatctctctttttctctccatgtatctctgtgtctctgtctctctctgtacctctccccatccctcctcctccaccccacctggtgcttttggatatctctatccagttcccttggactccctagggttttgcacctgcctctctgccagcccctccccctgggagcaggtgtctgggtcctttgcagaaatgagctcattagattgagatggaggtggtgaggggcggtggatgttattaagagagtcctcaaaaggggactgaggagctgtggctcaggcctgtaatcccagcactttgaggcaggaggattgcctgagtccaggagttcaagaccagcctaggcaacaaagcaaggtcccatctctacataaaataaaaagggtggagggtgacccttagggtcatgtattttaaccttcaccccaatttacagatggggaaactgaggttcagagggttgtaacagcttccccaaggtcccactgatagaggcagtggcctggccatggtggagggaaggaagaaatgaggggtgagaaagcagaggggtgaagtggggtaggatggaccccgtctcttcccatctgccagggtcactgtgttcccacctcggcttctgggtgcggtgctttggcgtgggagcggcgggcaggccccggccatgcttcctgttggcatggacttcggcggccccaccccctcagtgcccg

SEQ ID NO: 201369 - DNA, 342 bp, Homo sapiens
atggatatataatatgttttgtttattcatcagtcgatgggcattttggttgtttgcaccttttggctattgtcaatagtgctgctgtgaacattgaacacaaaaagtagaaaatggttcacaaatttgtgtgttatccttgtgcaggagccatgctaatctgtgcatggttcccatttgaggatatctgctgctgaagcaagcaccataattaaggctttaaaacctttttttaaattttttttagacaaagtctcactctgttgcccaggtggaagttgcagtgagctgagatcgcaccatttcactccagcctgggaggcagatcaagactctgtctca

SEQ ID NO: 201370 - DNA, 742 bp, Homo sapiens
gtttgcttgtttggatacagggtctcactctgttgcccaggctggagtcttggctcactgcagcttcagcctctggagctcaagtgatcctcctgcctcaccccgcaagcagctgggagtacacacatgtgccaccacgcctggctatttttattttttgtagagatggggtttcaccatgctgcccaggctggtctcgaactcctcaccttaggcaactcacccatcttggcctcccaaagtgctgggattacaggcatgggccactgcacccagctaacatgtttgtaacatctgatttaaagtctttatccagtaaggtcagtgtcagcttcctcgggcgcagtttgcattgattgctttttttcctcccgtgtctgggccatgcttctttgcatgtttcagaattttgttaaaagctggacattttaagtaacataatgtggcaactgtggaaatcatattctcctccctccccatggtggttcctttttcttgtttaatgtcttttctgaactaattatgtaaagttgtgttctttgtcatgtgtggccactatagtctctgcttgattagcttagtggtcctctaaccattagatctccttaattgcctggaacccgtaagtcactcagccaagagtttataactgccttagactttacttcctcattctgcagaggctcaaggtagccagtggtgagagcttagggctttctagatcttacctgagcatgcacac

SEQ ID NO: 201371 - DNA, 1980 bp, Homo sapiens
ttttttttttttctcctagtgctttctgggtccaggcaatcttcatttgagaaccactagtttacagcactctctgagccaaggaatttggagtcaaccagtgctcatctaggtatcaaaatggtggcaagccccaagtgcaactaacaacctacagaagacggaagtctaactttagtcaacactcagggagtggggatgaagaatgtagtcttcaaagctcctggccactatggaacactgttctcctgctgcaccctacatgctcacccctccatcgtcaaagcctcctcctcctggttctggaacaggtggtaaagcttttggaggccctgtgccaaccagtgctctccgcaccgttaatctgggaaccccaaatcaagatgcttgaccctcctgggattctgagaggtcagccctgtggcaccagaggctttctggaatgattcatcatattgtcagctgaaattctactgaagtggatgcccaagactagtttctcagtactgcagtatctcactcaatcccagtgatccgaaaatccatccatcctcccaggacagtctgactgtgtagctggttcaggaaaccaaaggcaagcgggggtcactcatccctccagagcctccagactgagaataaggaaaaaaatcgctaggtgcagtggctcacgcctataatcccagcactttgggaggctgaggtgggtgaattatgaggtcaggagattgagaccatcctggccaacatggtgaaaccccatctctactaaaaatacaaaaattagctgggcgcggtggcgtgcgcctgcagtccctgctactcgggaggctcaggcaggagaatcacttgaacctgggaggcggaggttgcagtgagccgagatcgcaccacaacactctagcctggtgacagagcgagactccgtctcaaaaaaacacccaaaaaaccaacaaaaaaaaccccaaaaatcagctgggataggtcatgaggtcatgacaggccatcaactatttaagagatttttcaactaagaatataagaacatattgccataaaattttaaaatccctatattctagaggttctatctattttcagttgtatgctccttaaacttatctgtatttaggcttcccccaaaatgaattctaacagaaaaaaaaaacttcggtaaaaaaagaatccataaacactaaatattttaatacctttatttacctcctctctaacagaactaatcagcagcagataatatatttgttacgaagagaattaattttctagttaaacatgcacataaaaacataaaggtgacaatatttggcaatatatgacactaataaaggtaacatttattgggctatccactgggctaagcgcttgactcagatcacctcagttaatccttacagcaaacctataaagtaggtgctattcttatttccattttatagatgagcttataaatgaggaacctcattactgtaatttaatcttcaccaacccagaatttgagttcagtgtttactctggctattaaaaggttgaataagcaaattagaaattaaacgggatttcagaagatatatttaacctactagaaggtcgtacgttttaagacatactgaaaaacagatgctaactgcttccaacaggatgtgtttgggaagatcctgcctgacactataccacattaaaacacttgaagattcaaacttttactagttaaggttgagtgtcctctcactattatccccaatgactggtccaagttagtaaggtattattctacttctatgggtggtacagtatggtggatgtcagctgcggctcccaagttctatttccctcctaccctgacaaagtgtccagaactctacacacccccagcctccccacagcctggtgcaggagccagtctggtgcagaagccagcctgaggatgaactgacccagggaggaaggagtggagagatt

SEQ ID NO: 201372 - DNA, 138 bp, Homo sapiens
tgctgggattacaggtgtgagccaccgcgcccagctcttaataactcttataacaagaattataatttcctccacatccatcactgttgtagaagcctccatagctacctccaccacatctgctgctgctgccatgac

SEQ ID NO: 201373 - DNA, 761 bp, Homo sapiens
agtccttgttaattgcgtttattcaatggagagtttcctatcagttaacagacacagcttcctgtatgacagaagtgtcgtggctcatggccatccccgctcctattgtttacatacctgtgtgaagtcagaatcctttatagaaagaagaaaatattgtgttaaagtagaaattactcatttttcttaaaatctgtatcagagtaatatttattttgattagaagaaaaaactatgttatctttttctttttgccttgtatgtatttgcttatattttgaaaagtgcttttagttacaaataaaccttaaacctctgtgtagaaaaatgtgaaaggtataggcatggtctcttcacttcctcagttacatcctctcatgcagaggttctaatcacagttaaatttcaatgtcttcaaacacggataagtgggtttttttaaaaaggcacagtcttatacttatttctgtaaccccaatcatactttggttggctggttttaaaaaatcatgttacacaaaactgagatgacccagtttagagaatcccaattaaaataagtgctcaggtgaagacagggtagacttaatgcaaaattatgaaatgtacttttctgctcccattgtgtccggaattggtgggttcttggtctcactgacttcaagaatgaagccgcggaccctcacggtgagtgttaacagttcttaaagatggtgtatccggagtttgttccttctgatgttcggacgtgttcagagttt

SEQ ID NO: 201374 - DNA, 362 bp, Homo sapiens
gcctccttcattttcccatatgcactgtgggaaagccccatgacgtcagctgcaataagccaaggaatgattagcaggccagttctgtggcttgacaagctccccagtaattagccccctgacaccactgccatttcacgcaccatattgtctccctgtaatgggcctgcttaaaatcagagcttattcgctacttggagaaaataacactatgggtccctattagctcttaataactgaggttaaataattccatgaggtgttctgtaaggagtgccttgtgggagttaacaggtacaggtgagaagcatgagccccaggtgagactttccagtgggaaaccctgggtatctaggcctcgg

SEQ ID NO: 201375 - DNA, 248 bp, Homo sapiens
aagggccagtggatgtcaggcttctctgctaattgatagcaatactctgtcttcttgataatgatagctaacgtttattgaatacttactgtatcttggcactgtgtattttttgttcaacaattttttttttttttgtagagacggggacttaccatgttgcccaggctggttgtaaactcctggcttcaagtgatctcccatcttggcctcccaaagccctgggcttataggcatgagcctttgca

SEQ ID NO: 201376 - DNA, 514 bp, Homo sapiens
accaacctgtattggtcaaatatatggaaaagaactgtacacaagtggttttaagtaacatgcaaaaatgtactaaacacaccatgtattttcaaaaccataggtatacttccttataagtaaagataacttgactgtcattcctggctgtcaccaaaaagatgcaacggataaaaggtaacaataaagaaataaccatggagccaagtaaagtatttcagagtcaagcaactgcaaatatcagtacctttattttttggaggggggagcggggaggggtgagagggcgtggctgcagggaataacagagtctcaccgtcacccaggctggagtgcagtggtatgatctcggctcactgcaacctgtgcttctcaggctcaagcaattctcgttcctcagcctcctgagtagttgggacttcaggcatgcactacaccaccacgcccagctaatttttgtatttttggtagagatgatgtttcgtcatattgcccaggctgctcttgaactcct

SEQ ID NO: 201377 - DNA, 473 bp, Homo sapiens
gcctcaaagtggtccaaatatccacttgcagattccacaaaaagagtgtttcaaacctcctctatcaaaagcaaggttcaattctgtgagttgaaagcacacatcaccaagaagtttctgagaatgcttctctgtagcttttatgtgaagatatttcctttttgaccataggcctcaaagctctccaaatatccaattgcagattttacaaaaagagtttgtcaaaactgctccatcaaaagcaacgttcaactctgtgagttgaatgcacacatcacaaagaactttctgagaatgcttctgtctagtgtttatgtgaagatattcccgtttccaatgttggtctcaaaacactccaaatatcctcttgcaaattctagtaaaagagtctttcaaaactgttctattataaggtatgttcaactctgtgagttgaatgcaaagatcacgaacaagtctctgagaatgcttct

SEQ ID NO: 201378 - DNA, 520 bp, Homo sapiens
attttttctttgtccaacttgatcttatcatttccttattgtatatgtcttcattaagttttaacatctattctgaaaatactaatgtgatttcatgctactgctattcatctgtttcccatcttttaaataggatttgttgttcaccttcgagtgggcataagttaatcttctcttcattcagttgtgctgtagctatgtgttaaaatctccagggtccccttttgttttatttcctttacaaaaaaagcttcagcatttatacagttggtaaattctcaagtacaaagaaggaagtgaaaatcctcccaaatctgatcacctcaaataactactgttaatattttattcagcaccagtctatacctgttaggcatttaaaaaggcacgtatatacaagtgtattttgtatgtataaataagcctgcatgctcatataatctttataatgtttattttctgttgttacttgattttcgttcaatcttttcaataaaattgtactgtttatattaatatg

SEQ ID NO: 201379 - DNA, 327 bp, Homo sapiens
gggacctggcacagcctggcaaggagcagcctgggtagaaggggagaggtcagatgagtccgcagaaaaggattcaaaggactcagagcttggtgtggagactgaaggaacagacaggagagaaagaagaaggatttgggatgagtcgcattaactttgactatgcctttaactccagccacctcttcaagaggaaattgttgggcaggtggggaagggctagtcgcggaaggaaactgtaagccagaccgggtgtgaggaggggaggtgatagaaagattatagggtgggggagcagaggctgaggaagaattgggacctggcaca

SEQ ID NO: 201380 - DNA, 357 bp, Homo sapiens
aaattaattattttttgtagagagcactgttaggccaacaaagggaatgtggtaaaatgttaatatttagggaatctgagtgaagggaattttttgtactattcttgcaacttttctgttagtctaaaattagataaaaagtttaaaatataaaatgaatctccagtcccctaccctgccccctcacacaaaaggtagaactaaagtattggataacagaggataaattggaatgggatgtttggagttagtgttacttaattacattatgttaattataaaacaaaatagtaacaaagtaaacctttcaaactagtagagaggaaaatggattgaaaaaaatcaaaatatagcaag

SEQ ID NO: 201381 - DNA, 432 bp, Homo sapiens
ttatgaagctgtcaagtcttcctccataaaactcctcacagacgttttctctacagttgtgaccactgctttagttcaggcactttttttttctcacctgaactattacaacagcttcttaatcagcttcttagttggtctcctcttccagtccattctctgcaccccatccagaggttttttgtttatttgcttgtttgtttttaaatacaagtcaggtcacgttactagcctgtttcaaatccttcattaaacctgaccctgtaggcagtgggggaccagtcacttttgcaaagcatgagatgttgtccttcataatctgacacaactgtccctaaggattcattattcaagccccatggctcctcactgccctctgaacagagtacaaacatttcttccctgtaggccaaggctaccctcccttcagaa

SEQ ID NO: 201382 - DNA, 393 bp, Homo sapiens
aactcctctgctctacagcagactgactactctgttttgtgttaaagagcatttaatgtttgctaaatgtttaaagccagtcaattccaaccccaacagctttctaaaagcaaaaaaaagtccacatggactcatggccatactatctaaatcacactttttagagcaagaaagctccttgaaacagtactccaattacctaattctgcagaggttaatgtacatagtccaatgtcatgcagaactaggatcataatccaggttcttatatgaatccactcatctatttcacaactctgccttttactcaactgcttcaaaagcagtttatacctgctactaaatctcagtactgcatgttaactgtctgaagtaaaagtttccttcctttaa

SEQ ID NO: 201383 - DNA, 261 bp, Homo sapiens
atagtgaaacctcgtctctactaaaaatacaaaaactagccaggcatagtggcacacgcctgtagtactagctactcaggaggctgaggcaggagaattacttgaacctgggaggcaaaggttgcagtgagccaagatcacgccactgcactccaacctgagggtcttctaaggagtgagactctatctccatcaatcaatcaatcaatcaataattttggaataaaagagagtggaacaagaactagttagagaaaacag

SEQ ID NO: 201384 - DNA, 414 bp, Homo sapiens
ctttagtgatacattttaattaaaaaacaaatacttatttgtttatattggtagtagtcactgcatattactcattctgaccctgccttatgttactttaagagtggcataacaagtcaattaaatattactgatcacctattatgtgtgagctgttgggttaggtctgcagtagacacagttatacaatagcaataaatgtgttgagaacgctatgggaccatcttgctttgctttgttgcacagcgatgtaaagaacttttcagtgttagcaaaatgtgcacaactggacaaaaggaaaccagacagaggtacatctgtgtaaatctgccaccactattataaatcagtttttttattttgctgtttgtaggtcataggtgaattctcatttatatcttggaaaaaaaagtt

SEQ ID NO: 201385 - DNA, 304 bp, Homo sapiens
tcggtatgagcagagttgccaccccagcggggcgcgcagcccgggaacccggcagagagggagtgccggggtgcccagtgccgagccggagcccgacttggcaggtgctgctccgcctggttttagaggggtgatctcagccctgagatagtccccgcttctcccctgctgccctggccctctccgccagtcctggccccacgctgatggcgcccgggcagaggaaaagcttgcggttttatttttcctgagctagacctgaacacaacaaaagagcgcaaaggagacctgcggctcataaaca

SEQ ID NO: 201386 - DNA, 346 bp, Homo sapiens
tcatcctctccatccgggtctgcagggacatgatcacccacggctccttgggctacgcgtatgtgaacttccagtagcccgcggacgcggagcatgctgtgaacactatgaattttgatgttataaagggcaagccagtacgcatcgtgtagtctcagcgtgatccatcacttcgcaaaagtggagtgggctacatattcattaaaaatctggacaaatccattgataataaagcactgtatgatacatttttctgcttttggtaacatcctttcatgtaaggtgggctgtgatgaaaatgattccaagggctatggatctgtacactttgagacacaggaagcag

SEQ ID NO: 201387 - DNA, 473 bp, Homo sapiens
gcataccactataagagagtgcagagtccagtcttaactccagtattagtgcctcgtcataatgaatccaatcccacaacacagacttctggttcagtctaggaacctgagccacaatgaaccacacatgccacaaaatgccacgttcccagattcttcccaccagcccaacaacactccctttcccttatctccaaacagcccttatcccccttctcctgctagcaccaccaatacatgtgtggctggtgctggctggaaggagaggtggcaagaaggaggtgggcatgcttagggctggggcagcgtctggggtgacccccgaccaggaggcaggagatgggagacgtccccagaagacccacgccccatcttgagagggctgcagatttcagttgaggcaaaagttggagaaaatagttctagaaaagctgaagaactgagaaatggccaggcctaccactctagtttta

SEQ ID NO: 201388 - DNA, 784 bp, Homo sapiens
ataggttaaagggctcagtcccacaagactgccagatatatatttcttatatcacattatcacctgagacattacttaaccagagccgagccttctcccggagtgaagagagtttgcagatgcgtcagtttctttcctcttttaaaaaaattatgtacatatatggggaatgggaggccaagggagggagagcattaggacaaatacctaatgcatgcggggttcaaaacctaggtaacaggttgataggtgcagcaaaccaccatggcacatgtataactatgtaacaaacctgcatgttctgcacatgtatcccagaacttaaagccaaaacaaaatgtacatatatctgagcatgtataaacacatatgcatatacatttatatatttatgtaaatatatatacatgtattatacatttctgtgtgttttaaactgtacgttgaaaactgcttggtggtgacctttgtgtacaaggatagagggaagaatgcttgcttttcattttgtgtgtttctattctgtttgaatttccctacagtgtgcttgtattccttttatttgttaaataaaatttattttttagagtggttatagatttacagcaaaattaagtggaaaccacagagtttccctgtccccctgcccccacacttgcaccccccgccattagcactcccaccacagtggtatattgttacaatcagggaagcaacatcgatccacctattcattctttcctcccctgacctctggcaactactcatctttttgctgtcacca

SEQ ID NO: 201389 - DNA, 607 bp, Homo sapiens
caggtttattgaggcgtaatttacacaaagtaaaatcttactttttcatgtataatatgatgggttttgacaaatgcacacggctgtgtaagcactgccacactaaagatacagagcagctctatcactccttcaaaactccctcatgccctataaagtcagcctttgagaaaggaagccacaggagggttgccagcagagaagtgatgtgatcttactttacttaaaaaggatcacgctggttgctagttggagaataaactggaaggagcaagggtagaattaggaagttggaatacaagaaaatgatacagtggcttggaataaagttagtagaggtagcggcggtgaaaagttcataataaaaactttataaacttggctgagtgtggtggctcatgcctgtaatttggaaggctcagaaaggggaagtgatctcgcctacaatcccattataaactaatgggaactccagaactcctaacttgttctttttgagatagagtttcactctgtagctcaggctgcagtgaactaagacatgtgccactgtatctccagcctgggtgacacagctagaccctctcagaaaatttggaattaaata

SEQ ID NO: 201390 - DNA, 379 bp, Homo sapiens
cttggttttatgtctgtcagctacgctaagaaaaatagtagctcgggtgaaatgaaggacattagaagtccatagtcatgacatacacaacttctgctttgtaggctcagtaaaaccacttgaacaaaaaatctccggagaggagaagcgcctctctgtttattgtgatctcccctatttttggaacacaggcacacagtaggcactcaataaccacgcactgtgtgaacgaatgtgtcatagtcagtatgctggtgctctcaatgggtatgagttagtagtggtactcagaagccaggattctcacagaatgaagaactttctgctcaactgaggtgttcacatttgggctattttagtctcttctcgaaccaagcaa

SEQ ID NO: 201391 - DNA, 676 bp, Homo sapiens
cacacacacacacacacacacacacacacacacgccagtcttatcataagcctggcagagcagctcaggatggaaaaatttcataattgagatggatggaggaggtgccactaaaactggtggaaaacaagccccacctgcccccactctacgtgatgacacctttccaggagccctcagatccctccctgcttttgtccccccttgatctgcccttcttgtccccaagtactgtcaaggacctaggagatccccttgggagcactggagtttggtgacatacagaaagcccattccaccaagagtcgagatggtgccccaccagccctcaaccctggccagctacaaacatctggaggcaggaaattcacccagtgaccagaatcttggaggaggtacatgagtcttaaatggagctcccaatactactccaacttctacccagccccagcaggtcctcggggaccctccatgctccccaaaccaaacgattcctccatctctccatctctgggtgcaggaggcgtggcttgaagagacgttaagaaaaaaaatcctggaataggtacaggttaatgggcatctccagttagccctgcacagtgggatcagaaagaccactaagacccaagcaagggaggcaaacatgtacaaactgagctgcaactcatgttag

SEQ ID NO: 201392 - DNA, 551 bp, Homo sapiens
aatatacctaaacaaggatacacatctcagcgttgtttataagagtagaaaactgcacccagcataaatcagaaagatgggtaaaccatggtgtgttcatacaacagaacactgtacggcacttaaaatgaggtgaagtagacgtctaagaatcagatggagaggtctcaagaaatgaaaggggataaacaggatatacagagtatgacacctataatgtaattttaaaaaacacagaaatcaatacaatagtttatgaatacaagatgagtataaaaacataaatagaaggattcacagaaaagtcatgaaagccactgtctctaaggagagagaaagaggagtatgactcaggaggggaacccagagggtttcaaatttatgtgtcatattgtttctattataaaactatgggaaactaaaaaaagacaaaggattgacatgtgttactaattctaggcagtgagcatgcttatgtgtttctattattctctgtgctttttaattaaaaaaaataaaaaaatacataaactgagaacaacaaaaatgaa

SEQ ID NO: 201393 - DNA, 417 bp, Homo sapiens
atgaggaaagcctcttctgaaagacatcgactcagaagcagggtctccagatggaagtatcacatggccagggtgatcctcactttgcctctgaagtctgttcttgtggttggcaggtggaagatgccctctccccctttacctacatctttcataactttccaagattcgtttccatcttgaatgggggtgggaggagaaggaggataaagaatcagatgagctgaaggacagacacagaaaaagaaaatcaggtaatcactgaaaggcagaaacccagaaaaagactacatcagcccaggtgacaagtccaccaagtcactcctcctataccagctgcccctcaaaaagattctgctgatttcaaagttacatttgccatgtcttcagagcctttcaaaggtgtaaaaagaaaaa

SEQ ID NO: 201394 - DNA, 302 bp, Homo sapiens
tagcttgctcaccagaggaatagttttctagattttttgggtcagttttggcaggaagccatacataggccagtagctacatatttagacaaatatactccacattttacctggtttgtggcaatggttttttcccatctaaattctaccttttattgctttatacccgtggctgcccactgttataaacatgcatcattattctctagaaaaactaaaatgaaaaaaattattaatagtttctatgggaaatcagaggaaacaacaaatgctataagatcaaaaaaaaaaaaaaaaaaaaa

SEQ ID NO: 201395 - DNA, 483 bp, Homo sapiens
aggactttgtcttttccataagggatccccagtgcctaaaatagtgtttggcatagaacaggtgttccataaagaaagttggatgaataagtaaaaaattatgatcattctatgcaataaatgatcaaaaggaacaaagcaaagataaaaagtaaggtaggaaactagacaaagacataagaaaactacagaccaatgtatctcatacactgaagtaaaacaccctcatgaaaatattagcaaactgaggcccggcgttgtggctcacacctgtagtctcagcactttgggaggccaaggtgggtgaatcacttgaggccaggagttagagaccagcctgggcaacatggcaaaaccccatcttgtcctaaaaatacaaaaattagccgggcgtggtggtgtgcgtctgtaatcccagctactcgggaagctgaggaaggagatcacttgaatctgggaggtggagggtgcagtaagctgaga

SEQ ID NO: 201396 - DNA, 374 bp, Homo sapiens
attaattcgttaatttcagcagatggaaggggagatcggatgaacggtggcagaacagagcgctttgggcaatggaagaaggggaaataggtgggggccgtttaggttttttaagggctgtcagaaactcaatctgtgagctgtcagcagcccggacccgtctccaccccctccactccgcagactgcgggaagtgactggcggattcatatggaggcttgtcaaccgtctttaaacatcaagccagcgggtaaaccgagcccagtgtaaattaattcttgtcttacggcccccctttctctgtccccatgaatatttcatggcgggcagcataaatattaattctaatagctctgcacagtggttattatttc

SEQ ID NO: 201397 - DNA, 645 bp, Homo sapiens
agatttgtacacgcttaaagagataggggtagtgtaactgaatttaacagtagttttggagaagaataaatcacaagttcaggtttgaggaaaagctagagaagagtctgtagttctgggagtacagtctccctggtaacactaagttttaagactttttctttttaagcctttttctttttgcacaaaccagaaggacagaataaatcatctttcttcaaattctgagagcaaagctctgagcaatcagtgaattctgagggtcacagcaggccactgctcagatggctaacactgagagccttctaaggactagaagtccaaaatacctttccaaaatctgaaagccaaaaagaaattactaccttgagattaaattcaaatatcagaaccagaagtggccaccacccagcaagtagagctcataaaacctaaggcatgcacagattcacaaaaggcccaggaggaaggatcaaaggttcattccccctacaatctggagcaaggcaaggatgcccgctctcaccactccttctcaatatagtactggaagtcctagccagagcaatcaggcaagagaaagaaataaacccatccaaattggaaaacaggaagtcaaattatctctgttggctgacaatataa

SEQ ID NO: 201398 - DNA, 176 bp, Homo sapiens
caatcctcccaccttggcctcccaaagaggttagattacaggtgtcagccaccacactgggccctggcttttgtttaaaatcgaaggttaagttgttaaatgataatgaatagataggattgtgttggattgacatttaaaaatatgtattttataagccatacatttagtcgtct

SEQ ID NO: 201399 - DNA, 381 bp, Homo sapiens
cctgggaaacatagtaaaaccttgtctctaccaaaaaaaaattttaaaattagccaggcatggtgacatgcgcccagctactttgggaggctgaggtgggaggatcactagagcccaggaggctgaggctgcagtgagctgtggttacaccattgcactccagcttgggcaacagagcaaggccctgtctccaaaacaaacaaaaaacccaaaacttgtaagtagccagatagggggaaaacacctatcaagaagcaaagataagaattaacatctgacttctcagaaaccgggtatgggccagtatggtgactcacgtatgtaatcctagcactttgagatgcaaacaagaagtgagtcaagtgaaatatttaaacagct

SEQ ID NO: 201400 - DNA, 397 bp, Homo sapiens
ctcgagctctgtacccatgcatgctgggtgtggtgatgtgtgcctgtagtcccaactattcctgtggctgaggtgggaggattgtttgagcccaggagtctggggctgcagtgagccatgatcatgccactgcactccagcctgggtgacagaaagagacactatttcaaaaaacacaacacaaaaaaaacaaaaaagtttggccgcaatggctttttagagacaccacatctaaaaaaaaacaagaaaaagaagggcagggcatggtggttgacacctgtaatcctagcactttgggaggctgagtctggaggatcattctgaggtcaggagttctagaccagcctggccaacatggtgaaaccctgtctctactaaaaatacaaaaattagctgg

SEQ ID NO: 201401 - DNA, 680 bp, Homo sapiens
gactagaggaaggctgaacgtgtgtcctttaaacacggggtccagacccggcgtattttgggcgtttccaggctctctcgccagagtggccttgagtttgggggtcttttccagcctcgctagctttttcctccgtgcaattaaaattatggctcttcttccactcccgtaatcattgcacctctaccctgcagacctcctccggggtgttcagcgcggaggtgggtgttggtgtgcagcaagccgcgcccccgcagccctcctcacccaggcgaggggcggggacgagaaagtagcagcagcgccccccagtctttcctctgaagcttccgaacagtctgcttcagggagcgcagcctgaggcggtgtggtgcggtgcggctgcagggcgggcgagtccccggagctgccctcagcgctgcacagtttccagcgagcggaccccggcagatgaggtctgccgagccgggtggctcgaccaaggagtgggtgtgggtgggtctttcggggctcccggcgacccgcggtgccgacgcaacgccgacgtatggtgccaagcgaactttaaaaagctgcttcggacaaaccagagccaggatttccactgtcggggacccgggatcggaagggtctagcccgagggaaatgctggaagatcccatcggccagtgaccagcaac

SEQ ID NO: 201402 - DNA, 485 bp, Homo sapiens
caatagcaaattaggaattgacaggaacatagctaatctgttaataatatctgatccagagaatggatcagatattacagtgcatatctgatccattctgtggttttgtagacctgtgaattaagaatggcctttacatgtttaaatgcttttaaaaagtcaaaaggatacgacttgtgaaaaatatggaattggagcaaagctatgctcatttgtttatgtattgtatgggctgcttttgcactacactggcagaattgagttgttgagacagtgactatatgtggcacacttgtgaccaaatgtggcacacttcactttacactgctgtttggtccactgcaaattgcaataatacagttacaactcaacagcattttgagtgccatgaatatagctgtactatgacatttagttctattaactttttaattactagtgagtacatatcatgtcaaataataaaagaagagaaacaaaaaaac

SEQ ID NO: 201403 - DNA, 566 bp, Homo sapiens
taacgcaagaagacttgtgagttaagtcagtagtgggagttggtataagtcttgtttaggctttcgtctcttccaactagtatttgaatatctacagtgtgtgtagaatggtgttaagcattcattcattcataacttcattcaacatatgttggcatgcctgccatgtgctagtgtaattactggtgcaattactatgtaagtgcacagagtagtgaataagaaccaagaccactacctccatagatcttctgttctctggaggatttaacaaaattaagcatgcaagtaaacaggggtgtgtgctctaaaagaacaagaagcaaagaatatgatgatggtggcatattctgctatgaagaatatggcgaaaggtccggctgcatattctacgttaaagcctaatacaagttctgactctccttctgtaaggtcgaacggggctcggtaggtttctgctagggttgagaataatcatattatggctaggggtcaggatgtaaagattcttccaatgtactcttagtgtagtgattaaggtggatagagtatatgatccatttatt

SEQ ID NO: 201404 - DNA, 483 bp, Homo sapiens
catgtccatatttcataatgtccccaacagaacttattcctgaaggagaggaaatgcatcctgcaaaaacaaaatcaaaactcattaagtgaagcagttaggtcaccgaagagtaacttttatcattttaacacaacatgataaaagtaagtagctcttagctggctaagacacagagaattctccattattcaaaataaggaagacttatcaacacagtatgtattccatggcaaacaaggttttccctttcttctcaaattctaaacacagtaatcacataactgctaacggctgctgttttacagaaatctccaagaaaaaaagacacaaatgcaagtcggccctgaaggagcacattctttcgcagaagcctctcggctgctgatcctctgggggatccagcaccttgtaggaggaaggcaggcagggaaaggatggatagcagtggactctgacagacatgcacttggctccaccctt

SEQ ID NO: 201405 - DNA, 288 bp, Homo sapiens
aatagtaacaaccaagtgccaaacaaactaaagtggcctaaccactttacatgggtctacgtgtgtgatccttatcgtaagaacaattcacagtatcacattttcacagatgaggacactgaggccctaagaggttaattcataggcaaaggtcacaaagctatcaagaggtgggacaagacccatgagcccttgaaactgcactcaaaagcacctttccctgaaacatgattcaaaaggcatccaggaatataaatcatgcattagccacattgcctgcctctatgt

SEQ ID NO: 201406 - DNA, 622 bp, Homo sapiens
gggattacaggtgtgagctgccatgcctggccccttcttgctattttgaaatatgcaatacattattgttaactctagttatgctaccatgcgttagaacacgagaatttatctatctaactgtagctttgtacttgtggaccaatctctgcctatttctcttccctctgtcctccccagagttctcgtacccctattctattctctacttctgtgagaacagcctttcagattccacatgtggatgaaatcgtgagatatttgtcttactatgcatggcctatttcacttaatgtcttccaggtttatccgtgttgccacaaaagacaggattttattctttttgtggctgaatagtattctatcatgtctccataccacattttcttcatccattcgtctttctgtggacatttaggttgatttcatatcttgcgattgtgagtagtgccacaataaacatagttcagatatctttttcacatgctgatttcatttcctttgggtgtatatccagtagtgggattgctagatcatatggtagttctatttttaattttttgagaaacctccatactgttttcagtaatgactgtactaattaacattcccaccatcatta

SEQ ID NO: 201407 - DNA, 772 bp, Homo sapiens
tttactttacagacattcatatatagcagaggcacacgaacttcttctgtaaagggccagatgataaatatttcatgttgtgggtcatatgctttctgtcacatattctttttctatgtgttgtgttttcattttttaagaacccttttggccgggtgtggtggctcatgcctgtaatcccagcactttgggaggccgaggcaggcggatcacttgaggtcaggagttcgagaccagtctggccaacatggtgaaaccccgtctctactaaaaatagaaaaactagctgggtgtggtggcacctgcccgtaatcccagctgcttgggaggctgaggcaggagaatcacttgaaagcgggagatgaaggttgcagtgagctgagattgcgccactgcactccagcctgggtgacaaaacgagactctgtgtctccaaaaaaaaagaaccctttaaaaaatgtaagggtaatttttggcttgggggctataccaaaacaggtcatgggccagacttgactcatgggctttagtgtgccaacttttatatatagcatgtatataaattagttattgtatctaataggatatgtaattcattcatacaatctgcaagtatatattttgtgctcattgtgtgcttatgctgctctagcactgggatacaacaataaagaaaacaaattcctatcctcagtgagtttacctttaatgtgggagacagataacaaacaagggaagaaatttagagaggggtcagtatttagagaaatac

SEQ ID NO: 201408 - DNA, 736 bp, Homo sapiens
aacccttaatggatgtcgttttatgaagttagaagatagatgtagagacagttatgtctttccattgacattgcatgtctatgctaaatttgctcttctcctctcaaattttatttgccatagtagcttctgacttctatactgacataaatatatataaatagagattttgccttaatcttctttggattattgcccttgggtatattcacatttctatgcagtgtttttgagctgtagaaatgtgtctgagagctatgtaaaacatttttctgtttaaattcaggtataataaaatgtatgaattcagcaagaataagtgaaattgtatacataatacttagcatagtacacaatatgtcaagtaatcaaaaagtaactgccattgcatttgttgttaatctgcatttctcctgagttttgtgatgtaaaatatttcagatttgaaaattaaaatatgtggctagggcagtggctcatgcctgtaatgccagcactttgggaggccgaggcgggtggatcacctgaggttgggagtttgagaccagcctgaccaacatggagaaacaccatctctactaaaaatacaaaaaattagcgagacatggtggcacatgcctgtaatcctagctactcaggagtctgaggtaggagaattgcttgaacccgaaggatgttgtgagccgagatcgcgccattgcactccagcctgggcaaggagcgaaactccgtctca

SEQ ID NO: 201409 - DNA, 1060 bp, Homo sapiens
ccttaaggttaatacttctgcctccagaagtattatgaggtggagccattaggaggtgattaaatcatagacattggagatggagccctcataaatgggattaatacgcttgtaaaagagaccccagagagctagttagccccttctaccatgtgaggatatagtgggaatgcaccgttatgagccagagtgtgaaccttcaccagacattgaacctgtcagtgatttgatctaggacttcccagcctccaaaactgtgagaaatacatttccgttgtttataagccacccagtttatggtgttttgttatagcagcccaaaaagactaagataatgccattgaaggtttcctagaggaagtgaaatctgagctgagctttgaaggatgaataggaggtagaataaataggtagaaagtggatagggaaaggaaatattctatgcagaaggagaaactatggagggaagacacagggaaaggagtatttcaagaactttaaataattgtacataactggagcaagtgagaagacaagtgagaggtaagctgttttgagaataggtgtctgattgtgccagctttgtataccattataaggaacttggactttgtcctgaaggtaactgggcaattgttgaggtcaccaccatctactgtctggattaccgaggaaactttctaaatgtcctctccacttccagtcctgctcctctcattcaatctcaacctaataattcagagtagttctgaaatagataattcaacaacaacaaattggcaaataatgtagcctcttaggtgcataagactgtggtggcataaaaagctttaaggagcttttaactgaataggcaaaaaccacatgtgcataccatgaccaatgtgacctttccaagacataaatttaatcgcaccatggcagagccatttaagaagctttgcaatacctttaggagataagatccatactcctaatgtggccatcaaagccttttatgatgtaacctctgatttctcccacactcatcacccaccaccattccttaacttcattcatg

SEQ ID NO: 201410 - DNA, 581 bp, Homo sapiens
aagttaggtagaaattgaaggaggggaatagtggcaaagagggagctatgggagatggggaggggcataggcccacaatctatttgagcccctttcagatctttgtgctcacccctgacctgcacatgtttagggaagattttatagggcatagtggaaagcagtaattggaaggctgaaagagctgagcagagaagatcatcattgcctaatgcagggaaggcagaatttggagttcgaattccaactagacttggcaaaaacctgagggctttgattgaaaccaataaaggctcacacttaaagagttaaagaatgtttcccaggacgaaggcattcaccataggattaaggagggaaccaaaatagactccactatgcttttataaaaacaaaactagctccacaaaatgaaggtaaccaggtagtagtagtatgcctgctagaacaaaaatcaacactctttaggaaaagctaactaaattcagagtctctataatgtattgcatacattgtctgtatataatagaaaattaccatacatatgaataaacatgagaatatgattcttagtcatgagg

SEQ ID NO: 201411 - DNA, 136 bp, Homo sapiens
tggtcttcaacttatttacttagggctctactcatagcttgtgtgatttcaaataaacctagattttattattaaacatacatatgccaaaagtgttatggtcaggaaagctattaaattaattaattaattttgg

SEQ ID NO: 201412 - DNA, 906 bp, Homo sapiens
ctattaaatagagtagtctgcagagcagccctaaggggcagctactgcctagctccgatgaggaaactgaggcccagagaggttaagtaacgtacccagctgctaggaggcagggctgggcttcagaccatggagtctggacccgggacctgggctgacagttgcagcataacaaggattaggtgagatgctacatcagtgaggtgaccacttgtcctgttttgcctggacagtcccagtttacacttgtagtcctagtaaagtgatcagtgacgcttcatttcattcatagattacatggtcaacttatgtattgagtattcaggacaatcctggggacatggtggcactgcctccatgtgagcaatggagggggaggtgacatggccacagagcacccagcctggctcgcctgggggtgcctgggttacccgcagaacggagatgtcctcgttcattaactcattcgctcagcgatccatgggcctgtcacgtgcgccaggcatttgggcgtcatgctgatggctgggcgaggatggggaggactcagacaaaagaagacagccagcaggctctgggaaatgaagtcacatccaagacctgcccttgtgagaaatgtcaagtgttaccgttatcatcatattcccattgctttgtttggcaaattatgacaatatggctgttaactaagcagattctgattacctattgtttgaatgcaaaaaacaaaacaaaaaaagaagcaagaaaaagccttctggctatgtgaccagtatttagaaatttccattcctgaacaggcctcagggcagagccagtccccaggctgtgcggagccactgctgtccctgcaatgccgggtaatcactttgtctttgctgctgcatccatcacgccctgtctctc

SEQ ID NO: 201413 - DNA, 377 bp, Homo sapiens
gagaatctttccccagtcttagtctctccaacacagtaggcaacaccgtcctgtcagtaatccctgactaacaccaccccattccacccctagggggaaaaaaaagacgcacatatgtacgcacatcaaaaagttacagcaacaataaccaaaaaattccttgctttcattttcaacactggctagtaatttttgcctttgggggttggaatcgctcaatatgcatatttctttccaacgtgggagaaaagaatgcacacaagaatgcagcaaagtggagaggatgcgtagaaataatgaaagaagtgtacctagaggtgattatatatggaaagacaacaagtgatctcagagtggcaggtagtgacaaggatgca

SEQ ID NO: 201414 - DNA, 181 bp, Homo sapiens
gtttggagtttagaggtacaactattgctcatgaacctctcagtgtggaaggcctcacttcagtcatacagaataggtaaatatagaaatatgctgagtgttttttatatttaagactttggtgtctggaacatcagtcttcataaaccatgacctcctagattgaagaagcagtggatca

SEQ ID NO: 201415 - DNA, 211 bp, Homo sapiens
tatgataatagtagtagcaaacagatgactagtgtttgtcatgtgccaggcgttttcagagtttccctgtttattaatttcatttaatcctcacaataactgtgtggctgtaagccacatttcgaaccagacacagagagattagataacttgtctgaagccactcagagaaacaatctgactttgagtctagtaaatgtaattgctgtga

SEQ ID NO: 201416 - DNA, 185 bp, Homo sapiens
gttttgtcactattttatgggtaaggaagttgagcttcaaagagagaaaatgatttatccaaaatcacactgctagaaggaaatggaaccaggacacaagcctggtcttgctgaagctaaggcccgtgttctttatgccgtgctaattgttcatcctgtgcagttgtttaaccacagttttcttg

SEQ ID NO: 201417 - DNA, 343 bp, Homo sapiens
ccacagaaacctcagaattaacactgccattatttcttctctccacttcaaacctgttcctcttcctgtgatttctaacttaatgtcatcataagcaaacagttgctcaaactagacatattatctttgacttctcactctcccttacctctagctggtcataaatgtagagattttaacatctaaaaatgtctccaaaatctatccattcccattgtccaacatttctcacctacactctagtctccctgcctctctactctaatgcaatctgcacacgaactgtcaactttctgattattctaccttctatggctctccactgccaatggatgggaggagt

SEQ ID NO: 201418 - DNA, 759 bp, Homo sapiens
taaagcaaacaatggcacggttcttctcccggcccagcctgagcctccgctgagcgaaaggccacagctcccaccggcggaggattttaaaatgatctttgcctgggtcggcctgtgggttcagggaagtgttaccaaccattgcgcgcaggtgggcgcgctcgcctgccttctccgaagcaaacttttcccagcaactgggagcagctacggagacttaaaagatccccgcggggtcgtgggcaccgcacgtgggccctgcagggacctccaccgcgggagattccttgacgtttgacctgtctaatggagtgtggtcttcagccgcccaccgcaggtcctgcgagtcccgggcatgcaagggcccgcagaccacccaaggcaggccttacaggtgcagttgaggtcctttcgaccggggacccccgtatgaccgtcgcctgcttcgctgttgccgtgtggctcaggccttggttttgagcccatctgggtggtgggtggtcacagctgggtttgttcctgacttgaagttgtggaggtgccgggggtgaccccgggttttcaggttttctgagagatgtagggcccgatgaggatttatgaccaatgttcagctatagaagctgataaccacccagagcaataacacttttattttaaacagagactttttctcttaatttctttctgggtagtaaaagaacatgtttcattctttgcataaatactgactctaagcatgaccttgaacgctatatt

SEQ ID NO: 201419 - DNA, 443 bp, Homo sapiens
tgacaataaatacaatagatcaaacagtgattcttaatacctccaaatgcagatgaaatacatcaagcaaatgaagagcaaaactgacacaggcgacaatgattcatttcaatatgtaaaggcctggcagggacttctatataaaagcaagtctttagcagtcagcacaagagtctttgattcactgccactaaacgatgggaagtgccagttttaactctcccaatggtggggagcaggggcttccgtcccattctcctggttcaaactcttacttctacctatgtccagcagtgttggaatgggcagcccaaaataatgtgcacattaattaaatcttcaatagggatgggcgggagggagcctgctgggagcccagattgctttcatcctttctagggaatatgaagagttaagacatttaccaacccagcctctaaaaa

SEQ ID NO: 201420 - DNA, 387 bp, Homo sapiens
cctggtattgactctgttaccaacataaaataaagaacattaatatatgtgtctcaggaaaatagtatgttttcaaaaattaagacattagaaaaatgctaactggaagaaagaaatatctatggttctaaaattctggaaaagttctaaattcaaaaggtctctgatggcagtcttacggtagctttttgaaaaacttagatatccaagtattcttagaataacaagtcaaaagcttgctattctacatcagaggttgaaaaactatggccatctgtttttactggatcactgccacactagtttgtttacacattttttcatactgcaacagcagagatcaatagttgtgtcagagaccacaggactctccaagcccataaggtt

SEQ ID NO: 201421 - DNA, 317 bp, Homo sapiens
atagctggaaaaagaagagccaagatgagcagacaatggatttggatgaaacttggaatttaaagaatagaagaatacataaaatgtattttaatcaatgattccagaagtgaataaaataagaacagatcactatccaaaagaagcaatgagagaaagagactttttattctttttagtttttatttttttaaattttattttaggttcaggagtacatgtgcaggtttgttatataggtaaattgcatgtcacagaggtttggtgtacagattattttgtcacccaggaaataagtatagtacccaataggtagg

SEQ ID NO: 201422 - DNA, 340 bp, Homo sapiens
tctctccctaatcatcagcttttggcatttctattctaagaatccaaatcatgcttatcctcaaactcaaagttcatagaaaagctgtcatattacattgttccagaaacattccacaatgcacattattccctagtttataagtaaaataagtccctgagaaacttttcaggtgagtacctactcagtatttttcataccatagaacacccatatgtacctcaatattatctagtcaatgtagtcacaaatctcacaaaatttaaggattattgattataaataatgaatacaatctttttttaaaaagaggttcatattatgggtaccccagtttgaa

SEQ ID NO: 201423 - DNA, 494 bp, Homo sapiens
agtttttgacatgagaggggacccgaagtgggtaacccatatctgaaggtgggtagtcccaacatgtagctgagtccaggggtttcatgggctcagaatgggggagtgtgtgctgattggtccataagcagtcctggaaaaagcaccatttgactggctataaaagcatcaaggaagttctcactcaggtcatggactctacctggagctggctgcctggttttcaggcttcaggctgtctatggcttgaagatcaggtttcattggggacctgcccctgtctgcctaggaatttgtctgccttctactgctatcaacactttggctcatcagattgttgtaattatgcattcagccttccatagaaagatgttaggccaggtgcaagcggctcacacctgtaatcccagcactttggaaggccaaggcaggcggatcatgagctcaggaggtcgagaccatcctggctaacacggtgaaaccccgtctctact

SEQ ID NO: 201424 - DNA, 443 bp, Homo sapiens
ttctaatggttataaagtcagttgttaaggatattgtaatcgattgatcaagcagtgtgtgttttagctaaggtttatttataacaggatatgatagtaggaaaatgaatccatttctgatgagatttttgcaatttgtccttcactctttagaaaagatcgcaatctcagatataaagtatttctaactttaagtagcttctaaaaagtgatctctagctaggtgtggtggctcacgcctgtaatcccagcactttcggaggctgagacaggtggatcacctgaggtcaggagtttgagaccagcctggcaaacatggtgaaaccctgtgtcgggtgttcttggggggtgttgcttgagcccagaaagtcgagaatgcagtgagccacgatcacgtcactgaactccagcctgatcaacagagcaagaccctgtctcaaaaa

SEQ ID NO: 201425 - DNA, 544 bp, Homo sapiens
ctcctgcctcagcctcctgagtagctgggactacaggcgcccaccaccaggctcagctaattttttgtatttttagtagagatggggtttcacagtgttagccaggatggtctccatctcctgacctcgtgatccgcccaccttggcctcccaaagtgctgggattacaggcgtgagccaccgcgcccagcccaaatctccagtttctaaactggtaagctcaagttgctatgcctcaaggaatttgagagaatatttaatgtaagattcaggacccaatagtaagaattctactcaggacatctgatcttcattgaaacggattctaatccaacttcagtcctcatagcaaggaagtactatttcagaaagtccctagattctcagatgcattggcaagaaccatacactgaagaattcacagaagattttagtcacttgctcactcatccacttgaagtaagaaaaatcaatcactgcatgtttattgttctataataaagcaaatgttagaaataaaagttagaaatgtcaaacacactaa

SEQ ID NO: 201426 - DNA, 492 bp, Homo sapiens
gctgatgaaagaacgataggagcagagagtatcttctgtgatcagcagtttcacagttgcattcaaaataaagaggactaagtctagtatccacaggaggaaataactgttttctggttcaggggccactggtactggcttaagggagttctgctactcctttgagacattttacattctttttttcctttatacaagcataccttgtttttttgcgctttgctttgtcacacctctccgtgggttttttacaaattgaaggtttgtgataaccctgcaatgagcaagtcatcagcgccatttttccagtggtatgtgcccacttcatcatgtctgacattttgataattctcacaatatttcaaatctcttcattatatctgttatggtgatcagtgatctttgatgttactattgtaattgttttggaggcccacgaactgtctgtataagagagcaaacttaataaatgtgtgtattctaactgctaca

SEQ ID NO: 201427 - DNA, 515 bp, Homo sapiens
cctgaactcggctttgcaatgacctgtgtatcatctgctcccacttaggctccgcgatacaggttcaccatctaccacgattcctggctccagcaggacttcaatgttggttgaaagaaccaccaactgaacgctgggaattgtggaaaaggagtggaaaattcccaggtttttactctggatgactgggttagggaaaatacttagaaggaacatatgatttggtaggaaaaagggaaagtccattttggatatgtgggaaatatatcctggaaagatgaaaatgtccagcagacagctggaaatgtggatttgaaatctggaagacagatctggactggggatttgaagagtattattacaggtgacaaatgaagctatgaaagaatcaataacatcacccaggggaaaaaaagagtgaaaatggccagggatatagttgcctagagaacactaatatttttaaagtgcaaagaaagtttctcaagccataaaactaggaatttcccttgaat

SEQ ID NO: 201428 - DNA, 462 bp, Homo sapiens
aaagatgacagtaactcctgtttagttcaggatgttgcttagatccagatgtgtccccagcatagagcctcagtacttcaaagatacagccaacctcaaacttcttttctgtgttaactatatatgatctgtatgggaattccagctggtctctttattgactctgatggtgggagctgttatatatagctttattagcagtagcccaagcgttagagaaaattgagaaataacatgttaatagtttgagtaaggtgcaaaagtgaatccataaacaatgaagtcattcagtgcttagtataaaagaaaaattaggctgggtacggtggctcatgcctctaatcccagcactatgagagtctgaggtgggcagattgcttgagcccaggagttcaagaccagcctgggcaacgtagtgagaccctgtctctagaaaaactttttaaaaatagtttattaatt

SEQ ID NO: 201429 - DNA, 370 bp, Homo sapiens
agaggaagatgtaaatattcagagcaaaatattgcatacctggcccacatgagtcacttatgaggaagagggagttagttctaagaataataattatcttttgggtgagatttaaattcaggtccagagcatctcttagaaaaccatggatacaagcagcttgttaacagcagtatcaggttcttggagtctgtataaaatctggcccatcgattcaaacaaaactggtatgaaatagcatttctcttcatgtctgaggttccagtggtggttggcttccttcttatttcttgccgtgtgtggctgttttcttgccagcctcagattatgcacttacgtgttttccaaaaaatcaaaaccatttccaata

SEQ ID NO: 201430 - DNA, 438 bp, Homo sapiens
catcctccaaaacaactttatcaagttcctgactctgaaagccagcttattgccgactactgagaacgaaccctgcggtctaggaaatttccgtgcttctcacatttgagttatgcgtctttgctttttttcacgtttgttgcagaggctagaacttaataagggatcgcaaagtatgttgattaacgtacggaaaaatatgttgcaaacaatttaatgttttaagcactagaaactagatattttatggtaacataacctctgggaagttcttatacttctcaaggtacaatattcctgagacctcccttgcttgataatcattagacgtattacggattttcagacatacggaagtggatttgtgggagacaggaggggacacccaaacaatagcatctggtgtcacaacaatgcaataaagtcacaagtcttgtt

SEQ ID NO: 201431 - DNA, 401 bp, Homo sapiens
cctcacagacctcctggctcacctcacccccaccttatcacccctctgacctcccctgcgcttactcccttcaagccaaggctcttctttatttttcaattgctgcaggcatattcttgcctcagggcctttgcgtttgctattccctctgtctggaccatgcttatcccagatagccatatggttctttctcttactgcctttagatctttctcaacctcacttcataattacgtcacaccaagctatttaaaaatgccacccacctaacccaccactcctctccataacccccaggcattaagcacgctctattctctttttgtactacatttttctccatagcacttatcaccatagatatgccatatgttttacttatttattcctgtataatctcc

SEQ ID NO: 201432 - DNA, 516 bp, Homo sapiens
tcgtcatctctgtatccccagtgtcttgcataaaatctgcccagggaagatggcccataaatgctggataaattgaacgaatgtataaaagaagcaagcctacctacagtcctctacacaatactcactctctcctccatctttcccaatgttcatcctttttccagagtaacctgaaaaccacacacctaccatgagggcaggagacttatctgttctgttccctattgtatccccagtgcctagaaccctgcctgatgtattgtaggtgctcagtagacatttgttgaccaaatgaatgaattcttcaaacttatcgttcaaaacccacttcctctacccagctctcaccattcccagaggactgtcctccatctactcccctcctcctttctgagggaaaactgctttctgtaaatctctactcatcacaccatcctgtcttttttttttcctttttgatttttttgagacagagtctcactctgttgcccaggctggagtgcagtggcacaa

SEQ ID NO: 201433 - DNA, 642 bp, Homo sapiens
tgaatcacattcgactaaatattgtgctttttaatactcactttaaaaacaaaattaattgggcaaatgttcatatccattttaaaaaactatcctcttaaaactagattgatagtagacattaataggcttgatgttgtttataatattttgctatattttaagagcatgcttttgtatattttctgttttagtgaagcattttaaaaatgcccccctcccacaactgcaggaataaatctaacagattttgaccaaaattactctaattttgaatttcttgaaactgggtatggaaactagacattaaaaaaaatctttatttttaagcacggtttcttggtcagtagcttctgtattacgggagaacacaagaaggggccttcttgacactcaagaaatgctctttttccatctacaaataggaagacaccctttgtggtatttttgttttgtgggccctgaatgaaaacgtattatgatcagttttaaaaattgctgcccctttaatatctgaatatattcgtggctagtgaagcacatgcatctgtcagatcatgggtgagaattcacttttctttttgcgatttctccagccacaaggacaaatttagttttgcagagcagtttgacacctctaga

SEQ ID NO: 201434 - DNA, 502 bp, Homo sapiens
gatagacgtgagtaagagcttcctttaggcagctcccactccagtggaggaaagagcaggacagagggagataactcaggctgggaagagatttctgggagaatgacccttgcactggtcttcgtgtgtttaggtcttctgaatggctttcagtgaagttcagctttctccagaaaggttcaccacgtcagggagggcatacaaggcagagcgcctgataggagctgggagtagtaaggtgggtgtgttcaatattggtagaattttctatatattttaagactctaggtacccattctttttcatttacaggaaacttctccctgtggcttatcttttttttttaactctttttttttttttttttttggagatggagtctcgctctgtcgcccaggctagagtgcagtggtgctttctcggctcactgcaagctccgcctcctgggttcaccccagtctcctgcctcagcctcccaagtagctgggactacaggtgcccg

SEQ ID NO: 201435 - DNA, 345 bp, Homo sapiens
atatatggtattactcaggtagacatttggaagaaatcttttgggagcaatgtcttatttatggcaaagaaaaaaaaataaaggggattctacatccttaagggagatcggtgaaaacctacaatagcaagagtcatgcagggccttgtggtcatgtgcttacagtggcagtgcttagaatacaaactctaaacagaagaggcatatgatggtaaaagaaaaaaatcatgaagaaaaagtaactgtgtaaaagactgacaggtatagggaagtcccttcagacgcaagaacagacaagaaatcaaggatcatgggagttgtagaataaagttgacagtttaaaag

SEQ ID NO: 201436 - DNA, 634 bp, Homo sapiens
tgcagatgctcaggtgtgaagtatatttttggcctgggccctgagtgttgataaaggaagagaaatatgttgaagtaacagtcataattttgtccaagtcagtgtttcctgtgaactttttgataatctttatgactgaatgtaaaattattctctgtcactccttcctgtaccctgattttttttcgcccaacttgttatgctgtatttgaagagaacttcctctgaagaggatccccactgtcttcttctttttcctttacttaacactcatacctagaggcaactaatgatatgggatataaaacatggacctgttttacaaaatcctatcacaacaccatccaaataacaggaatctgtgaaacagtgaaaagaattctctctttattcttaaaggtagtgataacagcacattttttctatagctgtttgtatctatttcaggatgaagacaatatatctttgttaatcctattggaaacaatggtgtgctcttaagtatagcactgacccttttgtgcaaattaatgcatagtaaaatttatccttccaaactgcacaatgatgtgcaacagaaggccatacaagtcttagaaaaattagctggctctggttttatcatcacacgagc

SEQ ID NO: 201437 - DNA, 458 bp, Homo sapiens
gagttgtggtttctgtcttgcacaattatgaaaggtctatttcttaaggaggtacaatttttagtcaagggattgtttgatactctttaagttcactgccaggcctaccacttatctctgtcgtaggaggagagttcctgtaatgagaggtttttaagacgtcctttgttctgggatgaatcagagggaatgactgccttggagctcaggatattaaactgagtggtgtcaaatattcccaggatcaatcgacaatgccatgtgtaccatctcctcctacagggattaaaggcctgatatttagatatgattctagttttctctcaaatccatactttaagagcttatgggctgggtgcggtggctcacacctgtaatcccagcactttgggaagccaaggtgggcagataagttgaggccaggagttcgagaccagcctggccaacatggtgaaacc

SEQ ID NO: 201438 - DNA, 218 bp, Homo sapiens
ccttccacatctcatttctccgaagcgctaggtaatggtaaaaccccatctacaaaaaatacaaaaatcagctgggtgtggtgatgtgcacatgttgtcctagacgcttcggaggctgaggtgggggattgattgcatgagcccaggtgttcaagcctgcagtgagctatgatcaccactgcacttcagcccaggcaacagagtgagaccctatctcc

SEQ ID NO: 201439 - DNA, 520 bp, Homo sapiens
tactttggcttcagtattgtgggacaaaatctttgtagagaaaatcctgaggcttagagaggtgaactaagtttaccaatgtcatacatctaccaagaggtgaagttaggatatgtgtttagaattacgaactctgatttatttggggctgagttcttgagagctctttgaatactaagctaaaaaggttggatttcattctgtaggagtttctgaactgaaagggccatgtcaaagtgataatttaaaaatgaatggataaatgaatctgatagtggtatgtagagtggattagagcaagggggaaaatctgagaagatgatgatatgtgggggtggagaggaatggagtgaggtacctgctaagctatgtcttttttgttttttttgttttgtaaagatgaggtctccctatgttgcttaggctgttcttgaactcctgagctcaagtgagcctcctgccttggcctcccagagtgttgggattataggtgtgagccactgttcctagtctaagctat

SEQ ID NO: 201440 - DNA, 602 bp, Homo sapiens
cagacatgtatggagagaagatcatgcaaagtcacagggagaagacagccatctacaagccaaagtgtgagaagaaacaaaccctgctgacaccttgatcttagacttctagcctccagaactgtgagaaaataaatcactgttgttaagccacccagtctgattcctttttatgacagccctagcataccatacactaggggtacaccttcatcctttagcacatggctatctacttgtccccataccatttgttgaaaagactcttctttctcctttggatggtcttggcatccttgtcaaaaatcagttgaccatggacagttttatttctggactctctattcccttatctgtgtgtctgttcttacaccagtaccacagtcttgattactctagctttgtaataagttttgagataaggaagtgtgcattctccagttttgttcttctctttcaagattgttttggctattccaggtcccttgcattttcatatgaattttaggatcagtttgtcagtttctgccaaaaaggcaataggattttaatagggattgctttgaatctctgtatccatagaggagtagtccatctgaatg

SEQ ID NO: 201441 - DNA, 226 bp, Homo sapiens
aaaatgctgaaagcaaatctatactctctttttattgaatttattactgtaaaattttatggctatagttcagaatctccccatgcaaattctctgtatttatttgcctggtactcatgctaggcccttaatttttttgtgtgttttatatattttttgttgtatagtttatgaagtattcattatgtgagctggtcagagattataataaattttataaaattga

SEQ ID NO: 201442 - DNA, 647 bp, Homo sapiens
tcattgtgtttttatcaactttgttgaagaccagttgcttatagataggtggctttatttcaggttctctattctattccactgatctatgtgtctatttttgaaccagtatcatgctattttggttacatcagccttttagtatactttgaagtcatgtaatgtgatgcctctggctttgttcttttgcttaggattgctttggttatttgcacttttgttttagtccatataaattttagttttatttttgttaattctgtgaaaaatgacaattgataatttaataagaattgtgttgaatctgtatattactttgggcagtatggccattttaatgacattgatccttccaatccatgagcatggggtgtttttttcatttgtgtcatctacgatttattttatcagtgttttctagttctccttgtagagatttttcatctccttgattaaaggtattcctaggtattcaattttttttgtggctattgtgaatgcgattgaattcttggtttggttctcagattgcacgttattggtatatagaaatgctactgatatttgtacattgattttatatccctatcaaatacaggagtataaatgatactggtttcctattatcattctaattctcactgcat

SEQ ID NO: 201443 - DNA, 335 bp, Homo sapiens
aggtggaacctaggaggagcccagcagatttctggaactcaagagatagagctgagagtttgggaaaatcaaggtgactagagttcacaagacacagtactggagcggagagagctacacaaagagagaagcaaggaaaactgcagaggttccctcttgagtattcagaaaagtaccaatctgtgcatgggtgtgatgagactatctgaggccagtgaaagaatcacctaaaggagtcaagggaccagaaccagcactcaaaaagggttagaaatacattagccaaaatggaaaacttcataattcatgaggcattgggtagaatactcaatggt

SEQ ID NO: 201444 - DNA, 498 bp, Homo sapiens
atgaactgtgggaggatataatgactttttttggattaattttggcacagagctagagattttgtatgattctgaggcaagatagtaaaggtgcactctgctgtcttccagattgtagcaaactgcttctggtcctttctgcttttgaaaatttacatagagaaaaacatgttttcttagattaaaagttatatatgagctgctaaggtctacatgtatttgcttcaagaagaatagcacagctaaaaccgtattttcaagtagagcaaccaactgaggaagctaacgtgtaaccactaattctctaagaaccacatgtcttatgcacagactaaactgaatgcttaaatggaattgtctattcatttgtttcacaaatagatattgaatgccgaagtgccaggttctattttagacctgaaacacataaatgaacaaacaaaggttcttgacatcatatagttcatattctaaagaatcttgccctttgcaattttc

SEQ ID NO: 201445 - DNA, 492 bp, Homo sapiens
aaacttttcaaacacacaccaatgctttttctacagaaaaataaaagacacccactcagtcagtttgaacttctatcctttcaaaacccaaatccaagcttctcctaccttcaggaggtatgcccttttctattcagcccccaaggcgcctgctgctcaacaacagttgcacaaaagaataaatcaaggtatcactgtgggcttccttaaatgtatttattttaacctcctctggattgctttatactcatttacacagctgttactgtttgcaaattgcatcatattatattggtctccccatataaacttgggaatatatgtagggaggaagcaagactctcatggaataacctaactgtatctagtacaaagttctgtgcattgtccatactcaataatactgcaagcatttaaggaatcccagtgtgccagtaagggtgtgtgtaacttactttttttttttttttttttgagacggagttttgctct

SEQ ID NO: 201446 - DNA, 163 bp, Homo sapiens
acctacctcataggattgattgttttgaggttaaatgagaaaaatacatatactgagcctggccctgcaaagtgctcaaaaaatagtagctgtaattatgttattaatgttgttattttgctgagtgagtacagcatgaaaagcatgtcttttcccagctgtt

SEQ ID NO: 201447 - DNA, 541 bp, Homo sapiens
caaatatagtaaagcatatctatctcataggctgagagattgaaaatacaaactttgcaggtaaaataagcaaataaaagaagggcttttattttctaagtcgggcacaagcagcaagcccagctgatgcagcccagtggcgcctgtttgggggttgggagtggggggttgtttaaagggaagagttaaaacaaatcccctgggaagtagctggttaccacaagagttaaggatcttgctaaatattcaaagaagagtggccagccaagagaaaaaaagagagtagccaaattgtcaagaagttaattttaaattgatggatgatggcgaaaataccagaaaggtgttattcgacccatttagaaaaatgacaggcagcttcctcctaccttctgagaatgactgcacagtaatgttcacaattcatgacaccacatgagccatcccagtgtgcgaatcttgtagaacatacgaggcacgtgagcagtttgctggagcttgaaccaaatacagaatggggtactgttcctcccgacacaga

SEQ ID NO: 201448 - DNA, 813 bp, Homo sapiens
tcgtcttgatttttgttctcagaaagagaataaaattgacagttgagcttttccaaatcacaaataaagccatcagcagtgctcccttcctgctgttccagccactgtggacatttgccatcctcattttcttctgggtcctctgggtggctgtgctgctgagcctgggaactgcaggagctgcccaggttatggaaggcggccaagtggaatataagcccctttcgggcattcggtacatgtggtcgtaccatttaattggcctcatctggactagtgaattcatccttgcgtgccagcaaatgactatagctggggcagtggttacttgttatttcaacagaagtaaaaatgatcctcctgatcatcccatcctttcgtctctctccattctcttcttctaccatcaaggaaccgttgtgaaagggtcatttttaatctctgtggtgaggattccgagaatcattgtcatgtacatgcaaaacgcactgaaagaacagcagcatggtgcattgtccaggtacctgttccgatgctgctactgctgtttctggtgtcttgacaaatacctgctccatctcaaccagaatgcatatactacaactgctattaatgggacagatttctgtacatcagcaaaagatgcattcaaaatcttgtccaagaactcaagtcactttacatctattaactgctttggagacttcataatttttctaggaaaggtgttagtggtgtgtttcactgtttttggaggactcatggcttttaactacaatcgggcattccaggtgtgggcagtccctctgttat

SEQ ID NO: 201449 - DNA, 253 bp, Homo sapiens
agcaatctcaatgagaatatttataatttattgaatggggactatttcaggctgtgttatatatcatctgttgtcacaacagctcacatttcacatctgggaagatagaggctaagcaaggtctgctctttcactgggcatgtctcttgagtgtctgtgtgtgccaggcactgtgctggtctctagggttacagtggaggctgggatatcaccagctcttccttaatgttgttagccagtgggtagacagaca

SEQ ID NO: 201450 - DNA, 427 bp, Homo sapiens
caagatgctgagaaataatcactaactgtttgaaaataatcaaaggcagattttctataggaattaatatttaggttgagttttgaagaatgagttaaaagtatactgaaagaatgaagtagagaagagcagtaggaatagcctatgcacaggtgtataaagaaagcacacctctggggaaaaacaagttgttaggcataattgtaatacaaggaagatggaaggtagctgtaggggtaaaactggaaaggaaaagggtcagatctgtaagctttgtatttccaccaacgtgagaaacttggctatcttggaggtgatcttctagaccaccttctccagctcatccatgtcacctttacgcgtcttgtagtgcttctgagcattctgcagagacttcttggctgcttccagcttcttgattttgtgg

SEQ ID NO: 201451 - DNA, 440 bp, Homo sapiens
tcctgggattacaggtgtgagccactgtgcccggccccatgtgataagttttagtagattctgctaaagttttgcaaattggttttacaaatttacactcccaccagcagtgtgtaagagctccagttgcttctcatctttgctaacacttggtattgtcagtctttttatttttagttattctggaagggtgtgtagtgatattgtagtgtagttttaattcatattttcctgatacttaatgaagttgagcattttttcttgttagggaccccatgtttattggccattggatttctgcttttgtgaagtgtctgttaaatcttttgccctttttttctactgggctgtttatttttttcatattgacttctagttcttattctggctacatttctttgttaggtacatattgcatctatcttctgcccttttagaat

SEQ ID NO: 201452 - DNA, 291 bp, Homo sapiens
ggctgatagtaccaggctagttctcagatattagggactgcatgcctttttctctcaagtcagctagccagcaacctattaggaaccacttatgcccatacattttatccagtgtggctatgcacataatatatatttccttttccaaaagttatagtgaagcatagttcattctcaactctatttcaaaacatatttaagatggactaaatttttaagtattgaaaaaactaagatttataattgtatctttgtcaaacctctctggagtgatgatttatttcatgtttt

SEQ ID NO: 201453 - DNA, 884 bp, Homo sapiens
attgtgtatgcggtatgttcaatctctgcatggtaagacaggtaattcacttcaatactttcctgaatttttcaaagtttctacaatgatcagggactgctacttttgaaaccagaaatttttaattgatggtccaggcttaagtgtataaagacagttactactcacccacggcaagaaaatgcaaattaaaaagtacattagaatgcaatttttcacctattggatttgtaaaaattcacgttttaatagtttcccacgtgttctcctacatgctcatggaaaggtaaattgatacgctccctctggaaggctatccagctttctgtatcacaattacaaatgatcttctgacccagcaatttctgcttcctacagaaacacttgacccatgcaaaacaaccatgggaaacagtctaaatgtctatcaacaggggtctagttaataatagcccatccatgtttaaaaaatatcctagctatattacaaataacacactagtaacagtgtttagttctatgggagggaggacgactagatggacaaaagtcaccggtatagactttatattactttggcatttcattttttgcatggttcaaaataccatattaaatacaaacgacaaaaatctaccccagtgatttctccacccaagtaccagaaaacaaactgtgggtccctaaatctgtactgtccgggagtcaaaatacctctgccatacataaggtaacaaaatttgaaaagcgagcaccactattttcccctagattcaggggagaggtattctctataggatttccactctgaaattcagagtgccaattaaacatcaaatcagctattcttcaagatgttctataggacagacaagggaaatgac

SEQ ID NO: 201454 - DNA, 207 bp, Homo sapiens
aaatctgccaggcccttgaggatggaaacagagattgatctcaatgaagaacgagtctattggtcctcatgcagagatgcattaacgtctctctgtgctctggaaggggttcacttccccaggtggacctgagcaggctggatgttgcagcctgttcagcggcaggatcgggccctgttcctggaagagatcatgggtaccttgtta

SEQ ID NO: 201455 - DNA, 243 bp, Homo sapiens
cttcatgtggctcatgaatgcatttttttaaaaacatttaatacttaaaactgatggtaaatgaaaattataatgggattccaaagatagaggcattggcccctctttggtctgtgttctctccaaaaatctgacctcacctgaaattcatagaatctgtctctctctctctctctctctctctctcacacacacacacacacacacacacacacacacacactcacacacacacagggcaaa

SEQ ID NO: 201456 - DNA, 463 bp, Homo sapiens
gatctgagagacaagtagatgttagctactcaggcagaaaggagagagaaagagccactagcagaagaagcagtgataagtagggccccaaggctggagggagaaggactatttggaaagtccaggtggctacaagccaggagaaggataggcatggccagatggtacaaggccttgaggtggtgtgaacactaactttctcctgtgtataggaaaaccactggaaggttttaagcagagatgagaggtgctgagatctatgtttttaaaaggtcctgttgacccagcaattcttcttctaagtatatacccctttgggcgatggtttcttccagactaattgtctttccacccatagcgcaacttaacaagggatgacagtgacagccagcatcacacagtgctgtgtgattggggaagcctctcccttgtaaccatctcactccatcctcacctccacctt

SEQ ID NO: 201457 - DNA, 222 bp, Homo sapiens
agggagagagtgaggtagggagggagggagggaggggaagggaggaaaggaaaggaggaaggacagatcctagaatccagataatataaaggtaccaagatgccaagtgtcaatgtcttcatctacaaaaatggaaaaacagagctcgcctcttcgagttgttacagactaaatgcaatagtgaatgagagctcctagcacacaggaagcccacctgccagc

SEQ ID NO: 201458 - DNA, 144 bp, Homo sapiens
gaggcatggggggtggaggtgggagaggtgtgaatgggggtgagagaagtctctgaggaaatgtcattcgagcggaatcactctgagcttggcaaggttaccctgtcttactgacgggaaacctagaccagagaggccaggaag

SEQ ID NO: 201459 - DNA, 196 bp, Homo sapiens
tcactgatagtggatcaccattacagatataataataatgaagaagtttgagaaattgtgagaattaccaaaatgtgacacagagacacaaatgagcacaagctattggaaaaatagcaccaatagactcgtttgatgtatgattgcctgccacaaaccttcaatttgtggaatatgcaatatctgtgaaatgcaa

SEQ ID NO: 201460 - DNA, 228 bp, Homo sapiens
gtcgcatcagcctactgccgagcataacacacaagggcaaagaagacgggggtctgggattggagggcttcttaaaattctgacactagaccaactttccaagttgttaaagcctgcagaccccagatgtaatctgtcagtgtgagaggagttaaatgtcagctccaatatctacattataataattgatacatattacctaataatcaatatattgtgatgttatat

SEQ ID NO: 201461 - DNA, 304 bp, Homo sapiens
tgagaagcccccatgcaggtcggggcaaaggagagggctttatctgccttgagggcagcgctccctaagtgaagcaggcctaccccagaagcacagggacttggctggcgcctgaacttcctgtgcgaagcagcacctgctcttggagccccttagcctgctggtgcacacctggtttccaagtcctgcctggggacttgctaggtgggggacggacctggaacaggaccctaagcccaccccctccgcatacctggcggtccagggctccccgcccagtggagccagcacaggctagccaggc

SEQ ID NO: 201462 - DNA, 383 bp, Homo sapiens
cggatcacttgaggtcagtagtttgagaccagcctggctaacatggtgaaacatcgtctccactaaaaatacaaaaattagctgggtgtgttggtgtatgcctatagtcccagctgcttaggagaatgaggtgggagaatcacttgaaccctggaggttgaagttgtggtgagcccagatcacaccactgcactccagcctgggtgacagaacaagactctgtctcaaaacaaaatacaataataaaaaataaaaacaaactctttcatacactggcatctactttcctttctagcctcacctccaccagttttttttttttttttttagtaacctacatcccagcccaaaaagtctgtgttttccttaataccttgtgcttt

SEQ ID NO: 201463 - DNA, 674 bp, Homo sapiens
  misc_feature (166)..(166): n is a, c, g, or t
ctcacaatagcaaagacatggaatcaacccaaatgcccatcaatgatagactggataaagaaaatgtggtacatacacaccatggaatactatacagccatgaaaaggaatgagatcctatcctttgcagggacatagaaggagctggaggccattatcctcagcnaactaatgcaggaacagaaaaccagataccacatgttcttacatttaagtgggagctaaataatgagaacacatggacacatagaggggaacaccacacactggggcctatcagagggtggtgggtgggaggagggagaggatcaggaaaaatagaggtgtatctgtcaccagagttgcctcccttcctttttctgtatttcctttagtgagggatgatggtgggtgtggcaccagcagtcctaaagagctgctttgagatcacacttgtctgagacacctgtgccttttcaatatagagtcagctactgtagacagctaacaaaagatgaactaaaactcaattcagaaaaaaacaaaacagcattctcagagtaaaaatattagacctggaagcaaccttagaaatcatcatgctttagcagtggattttagaaataggaaactttttattaggtgagatgatttgcctgggattatgcagtagcaaaagcatttaagaatctgga

SEQ ID NO: 201464 - DNA, 424 bp, Homo sapiens
cagaatttgtttcttatgttcaggtttgctaagcattaagcttaaatatcttacacagtcatgtagctgcctgatgaggtttcagtcaatgattgactgcattatatgacagtggtcccataacagctgaaaaattcctatcacttagtgctttgtgttacaaatacctactgtattcaacacagtaacatgctgtacaggtttatagcctaagagcaataggctatatcacatagattactatgtagttgactatactatctaggtttgtgtaagtactgtacactctatgatgtttgcacaatgacaaaactgcctgatgcatttctcagaatccatcccagttgttaagcaacacaggagttaattccttcacaggatcatgtgtgaccttcagacaatgctcaagtgacagcaaaggcac

SEQ ID NO: 201465 - DNA, 673 bp, Homo sapiens
agaaaaattagccaggtgtagtggcacacgcctgtaattccagctacttgggaggctgaggcacgagaatagcttgaacccgggaggcggaggttgcagtgagccgagatcgcacccctgcactccagcctaggcgacagcgtgagacgcggtcttcaaaaacaaaacaaaacacaagggcaaaccaagaataggaagacacggattcatagcccaaggggtctgccagggaaaggaacaaagataattcccaggatgacaggaaagtgaagtcccaggaaattaatctaagaaacaggccacagaagctctgggataagtaagtatagactatatgtttgggtagaataatgtattgagaagttgctgaagaaatagaatagtacatagaaacaaagcaaatagaggtgtggaggaattgataataaatcattaaaaatgaaaacttaaatgttggaaactcctgtttctgggaagatgaagtagacattcttttccctgttcttctagttaagtgcatctaaaatctaaaatccttggacactatatgcaataacgtaagaacactctgaaaggtaaagagaacgcagaccacccaggacccagaaaatgacccagtagtgatttcttcaggttgtctttttgcctcatgtagcccagactatgagccgaa

SEQ ID NO: 201466 - DNA, 709 bp, Homo sapiens
ggacaactttcaacctaaaggcagagctcaagacaaatacacaaacatgaataaacagcaacaatgcagaaaataggggaagaaatgtaaaagtatataatattttcagaaagataagaggaaatattgttgcagtgagccgagatcgcacccctgcactccagcctaggcgacagcgtgagacgcggtcttcaaaaacaaaacaaaacacaagggcaaaccaagaataggaagacacggattcatagcccaaggggtctgccagggaaaggaacaaagataattcccaggatgacaggaaagtgaagtcccaggaaattaatctaagaaacaggccacagaagctctgggataagtaagtatagactatatgtttgggtagaataatgtattgagaagttgctgaagaaatagaatagtacatagaaacaaagcaaatagaggtgtggaggaattgataataaatcattaaaaatgaaaacttaaatgttggaaactcctgtttctgggaagatgaagtagacattcttttccctgttcttctagttaagtgcatctaaaatctaaaatccttggacactatatgcaataacgtaagaacactctgaaaggtaaagagaacgcagaccacccaggacccagaaaatgacccagtagtgatttcttcaggttgtctttttgcctcatgtagcccagactatgagccgaa

SEQ ID NO: 201467 - DNA, 865 bp, Homo sapiens
atggggataataacacacccagcactgaaagcaacacaggatgattcatggccaggggttagcacagcagctagcaccaggcgacagccccatgaaggccagctgttgttatttttagaggagaggatctattttcatccaatgggtcctgggatatgaccaattggtttgtgccgtagtttaggaaaggtcagtgaaagtgcagtgtgagcaacgtgtgtgtgtgtacatgtgtgtatatgtatgcatgtgtatacatgtgcacatgcacacatgtacatgcatgtgtgtgcatgtatgtgtgtgtgcgtgtgcacatgcaggttgagacgcagggcctgacttccctggtgctgatggggaagaaagataaggaagcaaaacagtgggctttggcaggctgaggcctccccctggtttcacatttgctctcaagcctttggtgagactgacatctggctgcaaatagggtgtgccttccagcacctccgtgggtccagactccatccacaggggcctgggcacccatcagaatgcccaggacacctgtctctccggtggaggcctctggggcagaggggatgcttgagaggtcacatggaagggggtttcctctccaggtgctggaagatcgtctcttctcaggacagatgctaacttcacacaggaggggagtgggggcctgtatttaagctgagaacagaacaggcccagtgtgtggctgttgcctgggatgatttgtttaaaatattaacaatcaaggcaagagggttgtttgaggcctggagtttgagaccagcctgggcaacatagtgagacctcatctctacaaaaaataaatataaaatacaaagtagcttggcat

SEQ ID NO: 201468 - DNA, 368 bp, Homo sapiens
tagactctgggggaggggaggccaggagagagggagggaccttctgaatgggaaacagcccaagacgagcgcctgcagttgtggttggccagttctccaccaccttcttatcaaaggaaaactctgttctacctttattttcatttcctcaggtagctctgattttgatagaatttattctattttaaagtcacataggtcttcatttagaggaaagtgtatttggagtctaataatctttacacacacacttttctgaaccacttgagagtaagttgcagacatcataccctcttatttgtaaatacttccgtgtgtatttcctatgaataagacattctcttataaaaccgcagttgaaagacgca

SEQ ID NO: 201469 - DNA, 329 bp, Homo sapiens
ttgaaattttgctgattacttaaatgttaacttttctggatttaaagaaactgttttgttttgtttttattttaagctatctatttgttacagcaatttggtcaaatatacattggtaaatagaatgaaaatatttattcttctccccatctgatatctccaaaatttggaaattatttgtgagtattctcatttttatggcaatgtagttattcacataagttcaataagaaaatattctctttgtaataggatacaaggggaaacacttcttaacttacaaatgcttgactggaatgacatattttaaaatatgaccagacaacttt

SEQ ID NO: 201470 - DNA, 333 bp, Homo sapiens
tgaagaagatcagtatgtaaagagcaactgaaattaaggaaacaattccatttacaacagaatctaaaagaaaaaagtcttgggaatacatttaataaaagaaaagcaatcacactaaaaacaacaaaacatagttaaaagaacttaaagaaagctaaataaatggcaagacaatccatgttcactgatcagatttatattgttaagatggtaatactctctagatcttatctacatattcagtgcagtccttactgaaattcaagctacatttattattttttgcagaaatttataagccaattctaaaattatatgaaacataagatgaca

SEQ ID NO: 201471 - DNA, 251 bp, Homo sapiens
ccaagatcttcaactggccttcctggtttcttacaaagggatcattctgaaggtgaagaagggaggtgtttggtgcaccaacacacacaagcaagaatgaagtggagcccataggtcaacatgcctggtcacctgggctgcttcatctgggagaggatctcctcccagttctccccatcctggctggcacacacagtctttaaaagcagcttgctccagggatatgttcatccttggcagagaccttcctc

SEQ ID NO: 201472 - DNA, 214 bp, Homo sapiens
aagccaaaaagagaacaaagcagagactccctcttagtaacaaatgagttaaacagtgatagctgcactctgaaatttgttcactgtgcttttttttttcccaagtcgaggaagaaaactacatttacaggtgtaagtggtagaggagataaagttagtattcagcatctctggttgaattccgaaaatatttgttcagttgtgggcgctcagt

SEQ ID NO: 201473 - DNA, 711 bp, Homo sapiens
ttcactaacctttctcctgtggtcacatctccctctgaccacaggcaggaaatgtcctctgctggcaagaactcaagtcattacattggatccatccagataatccaggataattgctcccatgtcaaggtctttaactccatctcacctgcaatgtcccttttatcatgcaagctaacatattcatggagcagagacatctctgggaggtcattattctggctaccatgtaagccaaatagtcttcagagtgaccatatgactttaagcttcataatgggaaatattaactatagaactgagcactggatgcattgtcattgatgatatgctgaagagttctgggcatttcaattttttcatgttttaaagaactttttaaaatctgtgacatggcaaaattacttaaattatcttttgaagctcctagaggatgcctaatatcatttcttttccttttaaattaagggtgaaatagattgctgtggttgatgagaaaagaattcagtggcactcatttccttgggattatttgtcatttagtctgatttatcttccaagttcagtcagaagcttggcaatctgaaaatcgcattatagacatctcctgattgcagggtgattaagtggaagaaacttttaagcttgactgtaggaagtttttcagttataagttaaacataggaacaatcaattggaaaactacttagc

SEQ ID NO: 201474 - DNA, 865 bp, Homo sapiens
caccgcgcccggcatcattatgcgattctgtgatcaatgtctctatccctagttttatttcgggaaggcccgggattggtctgtctttcctattcttcacctcttttcttctagcaaagacccttacctgagcagatacctaataaatgcatgttaaataaacaccaaagagcattagatgtgaattttcttgataataatgatgacagagtaaggaagtgcatagttccaggtataaatactgaagtcttatcatgatgttgtaggtttgtcttttgaggccaaagatttctcacttcctctgtccttcctgttagataaaacatccctgtgtttgactttcataaataaataacttcaataaaatgcagttgtaaaataaacaataataggaactgccacaggactctgagatacgatatttcattaggttatccgagcaaaaaatattttcaagaggggaaaagccaatatataacattggagaactgatgaccacatcatccgttgtcacatttaatcatcacgacagccctatacaggtgggattgttattattctcattttacagatgggaaaactgagtctcatgaggttaggtcacttgccctacatcacccagttaggcagtatcaaggcggaatttggagcaggccgggtgacttcactgggccctgtcccgagcaccccgtgcttaggtgacctacatgcttggcagaaagagctgcccctaccaggtatggccaggccaggtgtggtggctcatgtctgtaatctcagccctttgggaggccaaggcaggaggattgcttgaggacaggagttcaagatcagcttgggcactatctctacaaaaagtttcttt

SEQ ID NO: 201475 - DNA, 703 bp, Homo sapiens
tgcgatgctttgccacactgcaaaatgattaaatcaagctgacacacacgtccgtcatctcacatacttatgcttttgtagtgagaacatggaagatctaatcttagcaattttccagtatacaatacagtttttaactgtagactccatgttgtacgatacatctccagagttcattcttatagatttcactcaaaggccagtagcttcctcctgagaggtgagtgcatcatgtcatggcttctgacaggcccccgggtcctctcccagcccagcatccccaaccctctcccaacatctcgcgaccctgtgctttggtgttgagggagcagtggcagtcaggagggactgagcacctgtgctgggcggccagggccaggctcttttgctggtgctgccagagacgcctcaggtcacccaagagtctcaggttcctctccttcctccagaggcggggctggaaatgctgctggctctgctcacactccagggctgggttgaggttggtgttgggagataatgcatgtcagtgttgttttcttcatctgtgaaaaagcagtaacatacacacaacctaaaatttatcatcttgacctttttttttttttttttgagagtcttgctgtgtcgccaggctggagtgcagtgtggcgtgatctcagctcactgaaacctccaactccctggttcaagcgattctcct

SEQ ID NO: 201476 - DNA, 823 bp, Homo sapiens
ggtggcaggaaagagagcatgtgaaagaggaactgtcaaacattataaaaccatcagatctcatgagaactcactcattatcaggagaacaatatgggggaaaccacccccatgatccagtcacctcccaccacatccctccctctacatatggggattatggggattacaattcgagatgagatttgggtgggacacagagccaatccatatcaccatctgacataggtgtgtggtgttcttgtttggtagagatgcgggtcttgctaattgccctggttggtcttgaactcctaggctcaagcaatccttctaccttagcctcccaaagtgctgggactacaggtatgagtcatcatgctcagcctagatggatttttttttttaatctatcttccagtagaatgtaagcctcatagccgtagggactttttccttttaactactatgatctccccagcacctagcacatgaggcactcagtaaatatgtattgaatttgttgataaatttttagtctgttaggcaagaaaagaacttggctatttgcatctttactctgatccctctttagtttttaattatatcattttatcagttgtgtttaaggcattacctgatcatcctgtatacaatttcaaattgttcccttactccctcttacttttccctgctttacttttcttcatagcacctatcttccaacatagcacataattttcttaagcattccccaattagaatataaactacatgaagagtttacagtatttttgtatatttgggttattgttttatccgcagtatctacggtagggccact

SEQ ID NO: 201477 - DNA, 600 bp, Homo sapiens
aactttgttattcttttttctttttattggagacagcgtctcgctctgtcacccaggctggagtgcagtcgcataatcttggctcactgcaacctccacctcccggggtcaagcgattcttcctcctcaccctcccgagtagctgaggagggaggatcagttgaacccaggaggtgttctcaactctggcacatgcttgtagctgaattattgatgatgcctttgatttgttttcttgggattcattgtgccctagtgtctcctgtatgtgccgtccctcatgccttcaactttctttgctcaaaatgaaaccaattgatgataaatgaaaggatcagtaggctttaaagcagttatttacaactgagcatttagagttcccacgcttaaaaagtgggagctgttcccatggctgctgagagtgctgcggaagctggttctctttgtccttaagttgatcgatagcaggcatcagcggggaagatgctttgtactttgcttgttaaacaacgggaacccccggttgttccctttgtctccactaaaaaattacaacatatttgcccggtcgtggtgctgggcatctgtggtcccagctgc

SEQ ID NO: 201478 - DNA, 434 bp, Homo sapiens
actgcaacatttgaagcactggcaatgatgactcctttaacactagtttaactcagtggccattgttgttaaactgttcataatttatattcctcagtaatatgacccaatacttcatgttaccttgtgtattatgagtaaggttatataaataaaacagcaagataattctgaaaatttcttgcctcaattctaagggtaaatacagctatgaattactagagatactaagaattactagaataactaatagttactagagatagtaagaatatcttaagtttcataactggttaagatgttttaaaaattaaatataaaattatgatctattggattctaaaggtatagtctgaaaggtcatgtcatttggactatgctttgttagtaaagcaaaaaaaacccctaatattaaacaagaacttaaattttca

SEQ ID NO: 201479 - DNA, 708 bp, Homo sapiens
tgctacatttcatcaggaggatgtactaccatttatatgcccagttcccaagaataaacagttgggtcattaccatgcctttgctaaaaactgctgaaacagactttgcatccacagtctgcacacgtgaacatgtttctagatgtggagttgggggccaaagagtaaatggattttcatctttgacagatttgccctccaaaaaagacaacactagtttccattcccaacaaaactccgtgagcttacctgacagcctttggtaaacagtatctatgtatattaaactcctgatctcagttgctggcacaggtgaaaaatactatctctaggtggttatttgcatctgtgactgagactgggtctctttttaaatcaacacatgccatttctatatttatttcttacggtgtcactgtgttttgcacattattctatttctcagggtcttggcattcttcttactgatttctaaaagtacacactcaatgttaaagaatttatcctttgttatgtgtgttgcaaatatgtcctccctccctggtcctctgtctctggaactcaaatgaagtaattgtttttgccacacagattattttgtataatttttgtgtagtcagtggtcaaacagaccattctttaccatttctaagttttgtgtcttgcttagcaagatcctttccccttcaaaattatcattctttcaaa

SEQ ID NO: 201480 - DNA, 288 bp, Homo sapiens
tttagcgagatgtatatttttggaaaattcgaaacttttcaccgacgccttgccaagataatagacatctttacaaccctcaagacgtattcagtcctgcaagattccacaattgaagggctggaagacatggccactaaataccagggcattgtggcaaccataaagaaaaaggaatacaatttcctagaccagcggaaaatggattttgaccaagattacgaagagttttgcaagcagactaatgaccttcatgtaggttgtataataaaattcctgttgacagtc

SEQ ID NO: 201481 - DNA, 471 bp, Homo sapiens
gagccgcacggcggtcaaactacagtcctgagccatatgacctgaaaggactatatatacaaaggtggtccagaagattataatcctgtattttttcctgtaccttttgtacgcttagacgtgttcagatacacaaacattttccattgtgttacaacggcctatagtattcagtatagtgacctgctatacaggttcgtacctaggagcagtaagctgtctatatcatatatcatatctatatcacatagtgggctataccattgagcctactatgtacctgggctgtatgtaagtatttaggtttgtgtgaaatatacagccaggtgattttggtatttaggtttgtgtaaaatatactatgatgcttgcacaacagtgaaatcatctacacatttctcagaacctctttttttcttttcttttccttttcctttttttttttttttgggagactgagtctcgcgctat

SEQ ID NO: 201482 - DNA, 555 bp, Homo sapiens
aaccaaaaaacaaaccaggagagaacataggcaggtacgggcgggtgttaattcggacgaggggagagaggagccaggcctcaccgtctcctcggaaggagctgcacagcctgttctacaggctccgtttgctacagcccctgaacgcccttccaggagggggagaagtcccactttcagaaaactgtttcttctatctgataataataacgcatccttgtttggtggcctctatggtctgaatgtttgtgtctccccaaagtttctgtgttgaatcttaacccctcagtgtgatgatgttacagggcagggcctttgggaggtgggttcatgagggtggagcccacctgagtgggattaatgtccttataaaagagaccccagagagctccctctcccttcctgccatgtgaggacacagtgagaagatggccctccatccatcaaccaggaagcgggccttcaccagacaccaaatctgccagctccttgatcttggacttcccagcctccagaaccgtgaacaataaatttctgttgtttataagctacctg

SEQ ID NO: 201483 - DNA, 931 bp, Homo sapiens
ggttaggtttgcactctgaacataacgaacgagggtgtgaatcttggctctcccttttagggcctgatagtctgcaaaacagtgctctgtgggcctgttttaagatttagtacagggaacagtcacaatcagtcaactgactaatttctccttaaccactgccacattctttgacctaaaggatattttaaagataataaaagacccacaaatccattgcaagcactttaaagatactgtgcattggactgagcccaacaacttagcctggtcatgaacttctgccctcttttcactccctacctatcacctatgcaagctctctgctctactcagcactggagagtccttctttcccaaaaatgtcatgccccttcccgcatctgggatattgagtctgccattttcctcacttgaaatgcttcctcctctttccataactcttctttcagcctaactcgaattctctttcttcctgtaggaccttcattgaacattccaacacatacttagcaatttctccctttcttttgaattcactagcacataatatctgtacctttttcttggcacttggtctgttatcttgtttgttattccactttcttagtattgtatttattttcctctaactggataatagcctctttcaggaattttatacatctttgtgtttctagcacatgctatgacctatacatagtagactttgtacagatgcttgctcttatgtgagagcagaagcacatggtgatcaaagaatgtgtggaaatggtctcaagtcaggtcagccggtctaccccaaataatccatttaaatggacaggagggtttgagcctactggcagttctgtaatgcacatgacaggcagctctgtttgtctgagaaagcatcttgagttatggtagaacctgatcggtttatatcaaa

SEQ ID NO: 201484 - DNA, 526 bp, Homo sapiens
ctctcaataataattctttttcttttcttttttttgagacactgtctcgctctggcgcccaggctggagcgcagtggcgcgatcacagctcactgcaacctccaactcccggattcaagtgatcctcccgcctgcctaagtgctgggattgcaggagtgagccaccatgccctgcctgtcttcggtttttcaaagcactttcactttgcagtatttcatttggttttaacaccagcctgtgaggcatgtcccatgctaaagaaacagctttagagaagttaaatgggaggcggaggcgggaggatcgcttgggaccaggagttccagaccagcctgggcaatatagtgatactacgtctctacaaaaagtagaaaaattaggcatcgtggcttgtgcctgtagccccagctactccggagggtgaggtgggaggattgcttgagcccgagaggtcgaggctgctgtgagctatgatcaggccactgcactcaggcatgagcaacagagcaagacattgtcaagaag

SEQ ID NO: 201485 - DNA, 499 bp, Homo sapiens
gcctcgcactctccgtaacagggtgtggggggaccgagacatgtgggctccagacttgaccatctttacctagttatgggatttcaatcatgtcttttaaattctttgagctgcagttttcacatatataaagtggaaatatttttaaaattttaatttgtattataaccttgtgtaaagataaaatagtacacttgaaagcattttagctgaagtcaaacgttcatgtgtgtgcatgcgatggcttaattattttagggcttatcctggttttactggtagtgttactagcactgctacttctccatatctctgaagactatgaaatacttagaactgaagcaacaagaagcacctgttaaagggttctatggccgatgacagatttgacacaactggatataataatatgttagatggtgactagagcactgctgagcagagacttcatgctgttcaaagtcgaaggtgtccctagaattctgaacctgctgaagca

SEQ ID NO: 201486 - DNA, 183 bp, Homo sapiens
ttaacttagttgctaacgaggagattcaaaacctaaatgtttagaatatattttggaaatccttctaaccatgataataaagacgaggtctcacttgtttgcctatacactactggtatcctattctttctttgattttgaatgttatatcctggtatagatagacccgtgggcataacagtg

SEQ ID NO: 201487 - DNA, 124 bp, Homo sapiens
ccctgttcccttgcttgactggccatgagttcgtcagcatgagcaagctgttctggggatcctgaatcattagtaggaatccatctggcttcagttactgcttggttttgaaaaagttctcaca

SEQ ID NO: 201488 - DNA, 121 bp, Homo sapiens
agtaagaggctgtaacacagcaatgtcctaacaacaagctgagcagaccttggtaaaccagctgtctgtgtgttcaacagggttctagctgggtatgggatgtgggcactggtactgacct

SEQ ID NO: 201489 - DNA, 559 bp, Homo sapiens
ttttgcaagaaaaccttattgagcacgctttgaggggaggcgttctctgcttgttagaagttttttattagactccacagttctgaagagttgattctgacagtttttgcagcttactcatgcagtgttggaaggagtgagttttggggctgttttcagtgacatccccacctggtgtgttttgaggtttgtccatgatgtggtgcgtgtagctcctgtgtggtttttcttactgagtagcttatatagctatgtgggctctgcactgctgccacagcacttaaggggagatagcatgaggaaccctaacagcacccatgggagcagcttgaggaaccctagaagcacccagggaagcagcttgaggaacgctagaagcacccaggggagcagcttgaggaagcctaacagcacccaggggagcagcttgaggaaccctagaagcacccagggaagcagcttgaggaatgctagaagcacccaggggagcagcttgaggaaccctaacagcacccaggggagcagcttgaggaaccctagaagcacccaggggagcagc

SEQ ID NO: 201490 - DNA, 622 bp, Homo sapiens
gtaccagcaatgggggctgctgtctccaaggatgaggtgtgtgagcaggtaagttcctctccacagctctctcctgcccaaatcgagcagctttttcattaggcgttctctgcttgttagaagttttttattagactccacagttctgaagagttgattctgacagtttttgcagcttactcatgcagtgttggaaggagtgagttttggggctgttttcagtgacatccccacctggtgtgttttgaggtttgtccatgatgtggtgcgtgtagctcctgtgtggtttttcttactgagtagcttatatagctatgtgggctctgcactgctgccacagcacttaaggggagatagcatgaggaaccctaacagcacccatgggagcagcttgaggaaccctagaagcacccagggaagcagcttgaggaacgctagaagcacccaggggagcagcttgaggaagcctaacagcacccaggggagcagcttgaggaaccctagaagcacccagggaagcagcttgaggaatgctagaagcacccaggggagcagcttgaggaaccctaacagcacccaggggagcagcttgaggaaccctagaagcacccaggggagcagc

SEQ ID NO: 201491 - DNA, 286 bp, Homo sapiens
tccaagaaatatgggactatgggaaaagaccaaatctacgtctgattggtgtacctgaaaatgacagggagaatggaaccaagttggaaaacactctgcaggatattatccaggagaacttccctaacctagcaaagcaggccaacattcaaattcaggaaatacagagaatgccacaaagatactcctcaagaagagcaactccatatctatgtttttgaatggtgtcctgagttccttgaaagaaatctctattataggtttcctataaatctaatgtattgat

SEQ ID NO: 201492 - DNA, 194 bp, Homo sapiens
tacgtcttcccaaactttcctgagaggtgagtggcctggtactagtattggagctgggctgcaagggattttcaatatggaatccaggagctggtcaatacatccatggacctgtgagattatatgcaagattgtgtgtatggatgtgtgtgtgtgtgtgtgtgtgtgtgtgtttaggtagggcaacatctctg

SEQ ID NO: 201493 - DNA, 265 bp, Homo sapiens
actggaaaaagatggacaatgcaaagttataaataaaaatgagattagtagacaatatgaattttggcatattctcagggcttcggagatttgggtggtttgccaagggatagaaaccaatcaattctacaacactgggttctcagaagcctacaaaagtcaggaggaaaatgtgcctttcaacactttgcctggggtaggtctcatacctatgaaagagatctacctacagagcctatgtcattttctaccttcattactctct

SEQ ID NO: 201494 - DNA, 282 bp, Homo sapiens
gctgaattgtgctgactggcacatccattgtgagcggatgtgttttccttctgcaataattttggctacattaaattcgttttgttaacatcttcatcaccgccttttcagtttcagcgggaattgattatgaacaaagtgccatgattttgactattcaggcgagcaactgcatcgagccagcactgaactggttttgtaacaagcttggtgtccatatcgctcttaataacatctgcaggcacaggcgacgatagcagttgtgggccagccgtcaggaaa

SEQ ID NO: 201495 - DNA, 359 bp, Homo sapiens
gtagaaggcaaagatacttgttcaggtccaaaattgctccccatccccacctggcctggataaacacaggagaaagctttctccttatgagatttctaatctaagtttggagtttcaaggagtaagggtgggggtggataccctcccacttctttggttcatccatcagcaacaacaatgccatctggttaccggggaccagtgaggcataaaaaccccagaaaagcagctgtcttctcctttacctgtgtcagaattactaattaaatgacaaatttgcctttagccataaatgaaattttgtgctgctgaaactagcacagctcttactcttaattaactatacttttttgtaacta

SEQ ID NO: 201496 - DNA, 383 bp, Homo sapiens
ttcctaattctctcctctatatttcttttcttttcttttctttttttgagacggagtctcactctggagtgctggagatcactctcaggctggagtgagactctatctcaaaagaaaaacaataacaacaaaaatacaaaacaacaacaacaacaaagaaatagggaacagtatgcagttacgtaaactcttagccaaagcagaatgttgttacccgtgagtaccaaggatcactttttttttaaagcaatacttttttttctatcttaaactgttaccaaaagcccccaataaagacataccacgtgtacaactagtgtatctggtttaacattatctattccaagagacccagatggttccaagcaaatatagctgggtgc

SEQ ID NO: 201497 - DNA, 507 bp, Homo sapiens
tggtgtgcaggcgtgcttctgtttctgtcaaaataaattaggctgctaagtcgtaaattaggaaaatattttgctacttgtgtttcttatttagcaagtagaataaatagctggcctcaaaacaaaacaaaaacccaaaccaacctcaagtcgattgacagaagatgattctgcctttgccaagagtgaggacgtaccttctctgggagacaggaagccttcatctgtctccctctgatttgactcagtccttaccttccatgtacctctggtcaggtcaccttgcccatttctcccattgcccttcatattgggttggggtttgcaggcctaaggaggaagcacgggaggcctatccatatctgaactctgtttcctgtctctcttccaccaatgtgaggtttctcctcacattgcttttacccaatacatgaaagatttcctttgtcaagcttattggaatgccctgtgggagggatgctatgcaaaaacataaatgtattgcat

SEQ ID NO: 201498 - DNA, 739 bp, Homo sapiens
gctaatagtccccagtggcatccttcctctgagaaccgtcctagcatataggaaaatacctgggagagtagcgcaccctccctttggcgtgcatcccccagccaattaattaacagaaatccaaaggctggctcctcaacttgaggtgagataaacctgtggtaccatgcagactccaggtatacctgtaggatcaggtacagtgaaaacagatgtcagttaaagcaggtcttcattgaacaaacttctaacctggaagtacaagtatttcattttcctcaattccttactgttttttatctatatattaaatatatatatatatattttcctaggccctctcccacttggacaagtacctatctctcaaaccctgcttctgggaagccttatataagatgcactgtcttcacatttgctgccctgtagcataagtaaatacagttatttaacttaggataatgccatatgatttgccaaaattgtattttgaattttgttctagacagaagaaattttatatcattaagatgagtgaaattcctattaaaaaggataaaagcgcaactcgatttctgacttcataaagattgaatattgtttcttactcattctacttggaaatagtcaagaaactctctgaaagtagaatatttcaaaaaattctgagaaaattaagatatttagaaacaaaaaggatagctgttttgaaaaataagtaaagtaagggaaatcaaaa

SEQ ID NO: 201499 - DNA, 283 bp, Homo sapiens
caggacaccttgggccagcttggttttactttagatttcactgttgtcccaccccacttcttccttcaccaacatgcaagttctttccttccctgccagccagatagacagatgggagaggcagtcgcggccttcgttgtcagtagttctttgatgtgaaaggggcagcacagtcatttaaacttgatccaacctctttgcatcttacagagttaaacagctaaaagaagtaaaataagaaggcaatgcttgtggaatgtacagtgcatattgacggcacacg

SEQ ID NO: 201500 - DNA, 482 bp, Homo sapiens
ctcttggccatttgtatatcttctttaaataaatgtactgttttttgtgtacattttgagttatatcatttggtaccccgtagtccttgaaaggctctgaaatttttaaaggtggttagtttagaagtagaaattaggaaaggcttttatttcctctgcataccctgtctaaatatgacaagaaattgggactttaacaaatataaacccaaaagagtgtctatgagatgtattaaatatattcagtaaatctgttaatcaagcatctaccatgtgccaggtgcttttctagtcactgggaatacagcagtgaagacataaaatgatgtccccattctcctggagctgtcagtctagcaggaataaacaacacaaatacatatataatgtgtcagatggcaaaggctacaagaaacataaattacagaggggcaggcatgttgctattttagatagggtagctagtaaaggactctggtgac

SEQ ID NO: 201501 - DNA, 397 bp, Homo sapiens
cccctgacttcacttttctcagaccattgcttttttaaaacttgcaattgtgagttctttctctgcacttttgagaagtaaatcttctataccaggaaaagtctttctcccatactgcaatagtcttgaataaagtcttccttgcctgcttaatctgcctggtgctattgttctttaacgttcctaacccatagcttccagaaaatccttcaggtagatattatggttcaataaataatcacatttctccacactccctctatggaaggagtaccccttctattaagtttgaatttagccatgtgacttgcttcagttaatggaaagcatttatgtgaacagatggaaataaaccatctctaaacagagccttaaaagtgtttccatggtttggctt

SEQ ID NO: 201502 - DNA, 169 bp, Homo sapiens
aatggtggcctttgatacctttgtctcttctttgtatcatgtggcatctggatgacacattgttgctagaaatctccaggagccgcatagaattctccccatctccagcccagcccagggcctcttgagctacctagcactgaggtaccagaatcaaatccttcgccca

SEQ ID NO: 201503 - DNA, 248 bp, Homo sapiens
caggcttggtgggtttcccccttctttcccttgtcgggggtgcaggcctgtcctggccctcagcagaggcctccttcccagcccctagcagcacctgcatgattagggcatctcattgtctactcaggaggctgaggcagaagtgcttgaacccgggaggcagaggttgcagtgagctgagatcctgccactggtctccagcctgggcgacagagcaagactctgtctcaaaaaaacaaaccacccca

SEQ ID NO: 201504 - DNA, 627 bp, Homo sapiens
ttccatttctgtattactttttgttttcctgggattaataattgcctctctttttcaattgcttgaaatccctcctactaaatctcataaccttcagcaatcactcagtgtaatttttcacgcaggaaaacataccatctattttccctcttagctctagctctctattctagaacagctgttctcttggtctgttgtgcagccttccactgctgtcatcctgggagttgtctttacttctctcccttgtttctgtcctcccagatcttctttctagggttaatatttgtcagtagcttcctgcaatactaccacccctgtttttgctgagatattggatgccattctaagttcagatcctttgaaagtaatctgttgtcccctacctcccacccctagggaggcagaaacttctctttaactgggtgctctgaaatttcattatgttgtgatttgacatgggtctttttttatttcatttcttaagctggatattgataatggactctttcaataaatatggttactcctgtctgtcagttcttgggaaatttctggcattatttcctttggtaatttgttgactgttgttttctcattgtggcattcctactctttcgatcttgg

SEQ ID NO: 201505 - DNA, 906 bp, Homo sapiens
ggcgccatcataacaggggagaatggcaagaggtgagaccaaaaaaaaaaaaaaaaaattggttgggccaggtagtcaaagggccttgaatgtcatgctaaggatttgaatttattctgaaggtattctaagacattccaatacccactgagctacaacttcaaagtgccatctaactttccagcttgtggcttcagagtcctgacaataagtagaaatggaaccagtagagtatgttggaaactggaagtcagaaggtctggattctagtctgactttgctgtctgggtttctgttttcttctaggtaatgtgaaatggtgagacatgattcctcagagctctgttatcccacaagtctgtgtctaccagccgcacaaggaaaatctttcacgaggttcctctcagttcctgtggcagacagactcttggggaagttgctcaccatcccacctgctgatgtcatggctttctgtaattccttctgtttgagtggtgggggtgggtggctgcagtggtgctgtgacttgcttctcactggtagaatgcagcaaaggtgatgagataggtgggatagatggtgccatgtcagcgatgacatgggtatattatgtgacagtgtggggccgggcacggtggctcaagcatgtaatcccagcactttggggggccaaggtgggcggatcaggaggtcaggagattgagaacaacctagctaacacggtgaaaccctgtctctactaaaaaatacaaaaaattagccaggcgtgatggcaggcgcctgtagtcccagctacttgggaggctgaggcaggagaatggcgtgaacctgggaggtggagcttgcagtgagccgagatggcgccactgcactccagcctgggggacagagtgagactccgtctcg

SEQ ID NO: 201506 - DNA, 387 bp, Homo sapiens
tgtatccctcctcttaatcttcacaaagcctctgtaaggtagatggccttaaccccattttacagaagaaaaaacaggcttcagattaaggctgggaattttcaaaggctgcgtgtctgcaggctgctaggagggctctgtgaggaagactggctaagccttcatttacataaaaaatcaacaactttcttaacattcatttaggaaacagaggtgcattgagtggcttccctgtgccaggcggtgcactaggattaatatgagatttataatcatagtacttccgatggtcttaacccaagtgacagggttaagatttgcgaggccatcagaaactcctgcaattgcctcagttcctggcatcaaatttaaatgggcttatgatgc

SEQ ID NO: 201507 - DNA, 343 bp, Homo sapiens
ttaccccaagaacccaatagggaatttgctttatatttaaaaaccagagtcaaatcagcacaatcgaagaagtcatcagattaaaggtgtcttcacatctccaccttttctagctttgaaaggggagtggtgaattctacctaaagagagcattttaacttatgactcagcgttcagttgagacacaaagttattttgcttttcttcgaaggagctcagaatgaccctgtgcataaaattaatgtaaaggaaacaagactaaacaagaaggctaataagcagcctagtggaatgaaaggaaatctttatttgtatcagtcaaaattgatcaaatattaccatt

SEQ ID NO: 201508 - DNA, 490 bp, Homo sapiens
agcacaactcttaggacatcagggacagaaatggagagatgagataataaaggggttcttggcagatggggctcaggcacttggctactgctgcttctcaggcatgcgggcctcctggtgtcctctgagaatcgccaaaacctcttgttaaagaaaaatagtggcttccacctaatgtagaccactgacggcactggggtttcagttgcggaggttaacgtttgatgatttagacaatgtggtatggacctgtattccagggacttgggcctttgtcaccctcatttacctgtcctccaaaaggaaagcaaggcctaggagagcctggaggcccgagaaccaagctctttgctatagtggaggaagtgagggctctggaggcccaggggagctagggccgaatttccacttctacctctgacccacgtgagaccttctgccagccgccaacacccccattcccttccatttccttgtctggaaacacaga

SEQ ID NO: 201509 - DNA, 440 bp, Homo sapiens
ctcagcctcacccccagggaggagctggcccggtgcttgtgggcccctcccaggtgcagcctgccctggcgctagcgatgcctccgggatcttccagaggaaggtgagacaggcaacaggatggagtaatcgcagcctctaaaaaacacatttcacagcagattaggaaaacagacgtggcaagaggtgggccgacagtgcgggaggcggttccttcccaccgtgggcttcccgtctgactttacagcaaggccgcttccacacgggggtctccaagcccaccctggtgccttgctgcacgcaggctgagcgctttcttccaaggcagacagcggtaatttaattttctctttttcagtcgtgtttttgttatttagaaaacacttttctttcaacatttgccacatcagtagaagtaaattaaaacgttcgttacctca

SEQ ID NO: 201510 - DNA, 645 bp, Homo sapiens
ggatcttagagcaatgggtgaatattaaataataaaacaatttatttcttatttattcaatgttaagtgaaggtattattttcagcatttctcagctactttgtctttattagtttgagattttagtccgtcacttgccgtttgaagtaaaagaattcgaatggaaggcaggcatgtgctcccactgttgacgtctcttatttcatcaaccatgtcttcttttgggtttcagcacaggcttttaattaggttaatgttcttgttgggtacccaaagtagtctgggctaggtgctgaagaaattagaaacagtttccttactggccaccagagggaagcactcccacgtatggcggatgacgggcgttccctcctagtgaaaggaagaaaatgtgtgccgaccaaatctgtgtgtccttaccagtgtatctgctgttcggtaaccttctgccagtttcttccttgtggttttcctgggtgcccgtcatcctgacatgaagtttcccaggggtctgacaaaataaacaagtcaggttcaccggaggtggcacaggtcaccatgcataagatgtgtggtgtcacgtcttatgacaccaagtgttacgataggtcctgtctgcgccttcttggttctgctgtgtctgtt

SEQ ID NO: 201511 - DNA, 173 bp, Homo sapiens
aaatttctttatcactattttcattgctgcataatagacgtacacactttcaggatacatgtgatattttgataccttcatataatgtgtaaagatcaaatctgggtaatttggatatccatcaacttcaatatttatcttttctttatgctaggaacattcaagtgattctc

SEQ ID NO: 201512 - DNA, 252 bp, Homo sapiens
ggtatggtggcaggtgcctgtaatcccagctacttgggcaactgaggcaggagaatgtcttcaacccaagaggcagaggttgcagtgagctgatatcgcaccattgcactccagcccgggcgacaatgcgagacgctgtttcaaaaaaataaaaataaataataataataataataataataataataattggatggcaaagaacctttatagaatgcaattagatgaaaagacaagattttcctttgttta

SEQ ID NO: 201513 - DNA, 305 bp, Homo sapiens
agacgtgaaacttgggtcgtggcgctttcaggctttcatctggagaatgaattgactatagcaaggacgaaaaggcttcctgggggcccagaatagcgatttgcctatcagtgtgacctaaatagaacgtgtaattaacaagtctcttacatgcatcctgtgtctggtcagactgctggcttgccttcttcctaacctcttttatcctccactttcattcctattacgggggaaacaggttgcagctgcagctgcagccgttaaatttaggcactgaaggaagcgggttcaagcagccgctggaa

SEQ ID NO: 201514 - DNA, 501 bp, Homo sapiens
agggtttgtcaaaacacagatcacagagacctacagagtttctaaggcagtaggcctgacatgggccccaaggcttgtatgttgaacaagtttccaagggatctccaggggtaaaagacagcacatcctttttggggcttaccaaaatacaaaagcaatgataacagcagcagcagcctggccaaggaatgacatcacttaacatgttagtcaacactgattttggcactatcacatcagttttctatttaattttcacaacaaccctgtgagagtgggattattaaccccattttccaactgaacgaaagctagctcagagattgacttgcggccaggtggggtggctcacgcctgtaatctcagcaatttgggaggccaaggtgggcggatcacttgaggtcaggagttcgagaccagcttggccaacgtggtgaaaccctgtggctactaaaaatacaaaatattagctgggcgtggtggcgcacacctgtaatccca

SEQ ID NO: 201515 - DNA, 456 bp, Homo sapiens
caaatagagagcttttgccgggtgcggtggctcacgcctgtaatcccagcactttgggaggccgaggcgggcggatcacgaggtcaggagattgagaccatcctggctacagtgaaaccccatccctactaaaaatacaaaaaattagccgggcatggtggcaggtgcgtgtagtcccagctactcgggaggctgaagcaggagagcttgaaccaggaggcggagcttgcagtgagctgagatcgtgccactgcactccagcctgggcgacagagcgagactccgtctcaaaaaaaaaaaagctcttatccagagctgcctttgaaaaatatttttgcttatgactgtaatcctgtggaagctgcaggtcaccgagaaggcccacagggggcagcactaggaatgactctttccctctagtcctctatgcgctaggggagagagttcttggagatg

SEQ ID NO: 201516 - DNA, 486 bp, Homo sapiens
ctaccagaacagctaaaatcaaaaaggccgaggataaaaagagtggaggaggatatggacctgcaactttcatgcatcactgttatgtacacaattatttgcacactttggaaatgtgaatgtttcagcaatgtttcatagcttgaaaaacaccgtataatttggtcatctaacacctagttattgattcaagagaaatgttattctgttggcactgagaaggctgttgaatgaggaaggattagatacatattttatgaaggtcatctttataacaatacataggctgagttaagatactggatttgaattattgaacattactgggtatcacaaaataaaagtaatgcttctgggggactttactaaaaatacaaattctcatttatatttgtatttgtattgtagttcaaggttggaactcagaagtgtatattttaacattggtggcctttgataacattgtaaaggaaagacaagttaaag

SEQ ID NO: 201517 - DNA, 363 bp, Homo sapiens
atctttaactttttaaagatacctgtaattaatgtagggggtgtcagattgctgaccagttattgcaacactatttattgaaaatttccccttcccctccttcttctaacattaaattaccttatatattacattagattcatttttgagtcagtgtatcctgtagtggtttgacaggtctgttcttgtgttcacagtcttctaactagtttgcaaataaaaattcagaaaattaatttagaaaatcaaaaaataattgagtctgtttatttttgctgacattcattttgttgagttccaaaaagtcttgtgggatttttatggccatttgtagtaaacttacacattttggaatgtttgaca

SEQ ID NO: 201518 - DNA, 290 bp, Homo sapiens
ctcttcacacggacgcgcatgaaagttactccattcagaggcctttcccatctcttaatctgattctgcactaatatgttagctccaagccatgtgtggatatttaatatctgaaatgtggctagaccaaattgaaatataaggtagctgtaaaatgcacattggattttgaagacttggcacaaaaaagatgtacaattatctaattttttaaacaatgattacatgttgaaatatgttaaatagattattaaaactgatttcacctgtttctttttagtgtttttttt

SEQ ID NO: 201519 - DNA, 384 bp, Homo sapiens
atctacctgtctgacaagctaatatgcagaatctacaatgaacttaaacaaatttacaagaaaaaaacaaacaaccccaccaaagagtggccaaaggatatgaacagacacttctcaaaagaagacatttatacagagccaacaaacatgcaaaaatgttcatcatcactggtcctcagagaagtgcaaatcaaaaccacaatgagatatcatctcacaccagttagaatggtgatcattaaaaagtcaagaaacaacagacgctggagataaagtcatactgtagtagggtgggctcctaatcccataagactcatgtccctataaaaggggacatctgaagatagacaaacagggagaacaaacacttctcaaagaagacat

SEQ ID NO: 201520 - DNA, 300 bp, Homo sapiens
aagctgattagggaaataataaaatgtgggacatagaataattacagatgcaagtgaccttgtgttgtatgtttataacagtagttcagggaagagacaagttagataggactggagttattatggaaggcttgattcaggaggtgtacatttaggattttttcttgtatgtcaagggggcaacaagaacaacttgatattttacaaaaagaattctggtgcattaagaaggaaggtttcagaatagtaaaactgagggtggaagaaacatagtctttttcttgacaataatgttctctt

SEQ ID NO: 201521 - DNA, 456 bp, Homo sapiens
ggagagaattgctggtggcttacagcaggtaataatggtagaggtagaagtggtcacattctggatatgtttatttttggtttatttttttttaacttggggtaaaacttacataaaattaataattttgaagtgaataattcagctctagtacattcacaacggttgtacgacattgtgaatgtactagagctgaattattcacttcaaaattataaattttagaaaatgacatagaggcaggagaatggcgtgaacctgggaggcggagcttacagtgagccaagatcgcgccactgcactccagcctgggcgacagagcaagactccgtctcaaaaaaaaaaaaggaggaaaattaattggagagacaaagggagaggtgggtgccatttacagacagtgacaaaagcaggcctccctgatgggggtccttggcccacagccctgaaggagac

SEQ ID NO: 201522 - DNA, 561 bp, Homo sapiens
gcaaaactctgtctcaagaagaaaaagaaaaaagaaaaaagcggagtcgttctgtgagtgaaaacactgaattccaccggttcctgatcatattgcctttatttcattcattcattcattctggaaatggggataaatagcccgtttgtctttcctgcaggtttgttacgatggtgaaggcaatttagaaggaactatttagtggaggataaaagtgttttgtaaatgttaagatgcattgttttgtttctgtcctgttgcccaattttctctcagcccaacacctgcctctatttggttcttaggttacacattaattccatttgcttagtaatttaaagaatgtactgtagtacaccaataagctaacaaactcgggcccttgaccccaagtcaccagtgtcacctagattcaaaaaccaatataacgagtcaagtatgaatgcacaatattttagctaagcccttcctgtcccacctctaatgaatccacatgctgccccagggcttggtacatgctgttaagtaagcagctttgctccctcctgctccctgtttttg

SEQ ID NO: 201523 - DNA, 108 bp, Homo sapiens
taattcttgccacagaaccaaattctgtcaatacttagtccctagaatgggctcctctggcctctcagtacaccagaagaaaaaggctagaatcttgacatgcaaaat

SEQ ID NO: 201524 - DNA, 591 bp, Homo sapiens
ggaactaatacaccacttagaaaaaatttgtagaaaacttttctcccctttaccctgaggaatctattttggttaacaggtcaaaatttttttccaggtagtaggggaggaaggaggagcagtgaaggttttgactttgactgcctttacttttttaaggtgggggtagatttgcatttttctttgtgagcctccatttttggcaggaaaacttcagggaggagtaggagcccctaatccccttccagtggacttgttttggaggaaatctgaaaataagacttaatcatcaagtcacttataaactgatgaaataattaaggaatataatggcctggcaatgactaagtccttctatctcctcattgcagatacatgctaatcacttttttctctcttaacaacatttattatgaaatggcatgtttttgccacagcagggtagccatttcccaaccctggagcactcttaattctgagatgcctgattagagcctcaggggtcccaaaagatgtgctgttttcccactttataaaattacattcttttctcacagttgtcacaaacatgatattggttgataagaactt

SEQ ID NO: 201525 - DNA, 395 bp, Homo sapiens
agactacaggtagcccaccatgacccagttactctggggtatctttagcagagacagaacttcaccatgtatggccaggcttgtcttgaactcctgacctcaggtgatccacccgcctctgcctcccaaagtgctgggattacaggcttaagccaccgaacccggcctaaaatagcttcccagcggtcctttaggtcccagtaggtaaagcctcaaggcaggctctagagtgccaacccttctgacccagaggtgagggtaaatgtaaataggatccctttcagcgaaagttagggccacacttctcatgtccctaagccattggtacttgtataaattctctgacccacctatgtatgtggtgcgtatgtgtgtaatgtgtagctataattctt

SEQ ID NO: 201526 - DNA, 592 bp, Homo sapiens
acgtgaatgaaaaattattctgtttacagacactttctacagaaactacttttttaacatttttttcaaatagtcagttgggagaatgggaagattttcttaccccttagaaggagactttaatgtttttatgcaaaaggcttttaaactgaaaatccatgcatcaaactgaagtatgaaaacacagctttccggatcctttaagaattcttagctctttagtttccagaaaacttcccaaacatttttacttttcattctttttttaaaatgtacttttcaggtttaatattctgttaaccacgggagtgagtgggggtgggggtgagcttcagctccagctttgtgttctgcaaagaggtcagagttctaaccagatacttggtatttattctcctttgaaaagctggaaagctcagattaatatggaaaagaactttacaaacaggtatataacaaaagtacaatcatatccaacagacacagaaaggagaatggtggttgtagggctgggggtggaggaatagagagagagaaagtgcgcccaaggtggttgggttacagttgggttaagtatatcccagggggacta

SEQ ID NO: 201527 - DNA, 482 bp, Homo sapiens
aatagttgataggctgcagttaacctgcaggactccttggtacagggtgcagtgttgagttcaatccaaccaagacaccagcatacactgggtggggagagcagctatggcctgggagcactaccaggggaaaggcagctggtggagcaccttggaggaaattcaagcctccttggcaattagggaagatggattgtgtgtttacagccgtgatcacccatgtgctctgtggtctcagacttccatgtccctgcacttatcgcacaggggccctgcaacatggcagtcactgaggactcagtctgcagtcgagatagacattagggagtggtgaggtttgtggtgaaccaaaggtgcagatgccttcggaaggagaaggtcacccctcaattttagccagttgttgtcatgtcagaatattagcaaatcatcttgatttttcaaatatgaaaagtaggaattctgtggagaacttcccagtt

SEQ ID NO: 201528 - DNA, 790 bp, Homo sapiens
tatgggcctttggaaatccttaatcctttggcctccacgattctcttttgaaaatattttctgtttctttatactgatcctttcccatattgtctggttcaggtaatcacttgttatcagagttcttccaaaatgaaaacgttctgatttgtactttctctcttgaaggtgacttgagtagtcttgaattctccatctgttctggagactttggttgaatacaggcactgaggacacaaaagtggacgggggcttctggttcctgccagggagctgctcccaattgttccacggacccccatgagattcctgaaattgcgtgcaaattattgtgcatttaaacatttttcctagggagggagagtgtttttattcagatcgtcagtgggattgaaactcttaacaaggaagaattgatctagcacacatctacatagttcttcagtatttacccaacctcctagtggttacagtaggagggactctttgaaaaaggtttcttggccaggcgcggtggctcatgcctgtaatcccagcactttgggaggccaaggtgtgcagatcacgaggtcaggagatcgagaccatcctggctaacacagtgaaaccccatctctactaaaaaagaaaaaaaattagccgggcgtggtggcgggcacctgtggtcccagctactcaggaggctgaggcaggagaatggcatgaacccaggaggcggagcttgcagtgagccgggatcggcaccactggattctagcctgggtgacagagcgagactccgtctcaaaaa

SEQ ID NO: 201529 - DNA, 508 bp, Homo sapiens
caggaaggtgcatgtgtgagaacctatggtatgcccgcttagggccagggctgcagaggttgctcgctgctcaggggcctgcccggagccctggccacatgtcccgcctcacatacctgcaagggccatttccctgtagatagagcagttgcctgacacagccaccacctctccctttttcccaggcctgctggagaaggatggccctccctcctgccttgtccctcaggctgcctgagggtttcgttttcttgtggctggcatggcctttcagggtactgtccccaagcactttatgaatcataatcgcagctccagcatgtccattcacccccactgccagcaggctctttacagctgcattttgtctccacactcttctgtctttctttgctttcatcaggccctctttggcccagcaaaaagctgtaagtgacttaatacagctgggtggccagcctgggacagacagccatcggagccaagcctctggcatcaaatatagatc

SEQ ID NO: 201530 - DNA, 315 bp, Homo sapiens
atttagagaagacagcatccaaactatattattccgcccctgcctctcaaaatctcatgttcttctcacatttcaaaatataatcattccttcctaatagtcctccaaaagtttcagctcatttcagcgtcactcaaaagtccaaagtatcatctgagttaagccaagtcccctttacctatgagtctgtaaaatcaaaacaagttattcactttcaagatacaatgggggtacaggcatggggtaaacattcccattccaaaagggagaaattggccaaaagaaaggggctacaggcttcatacaggtttaaaa

SEQ ID NO: 201531 - DNA, 786 bp, Homo sapiens
tggccgggcgtggaggctcacgcctgtaatcccagtactttgggaggccaaggtgggtggatcacttgagatcaggagttttgagaccagcctggccaatatggtaaaaccccgtctctactaaaaatagaaaactcagccggttgtggtgacacatgcctgtagtctcagctatttaggaagctgaggcaggagaattgcttgaacctgggaagtggaggttgcagtgagccgagattgtgccactgcactccagcctgggcgttgcagcgagactcaaaaaaaaaaaaagtattctgttctcactactcaaacttgggagagaatactacacaaaaacaacaacaaaacaccagaaaaaccagagaccattctcacaaaaagatacaaagtccatactaaaatgtaataaatccagcagtgtattaaaaataatgtgtatacagggatgtattataggttgaaagaaaaagtaccttggagatgtgtttgatacagttcaaagtgatttttaaaagcgagatggtgtaaaggaaacaatgagtactaagcaaagaactttcagaatcattttcagtaatgagacattggagcacggtaacatcttgccataatgtgataggtgaggtaaatatttcatttgggtaaaatgggttattgtgaggttgatgaaataactaggatgcagttcagagcgtgagaagcaataatttgcattatatcagaattcatcacctctgttctcattaaggcctgaagaatgtcagctactactacaattctaca

SEQ ID NO: 201532 - DNA, 286 bp, Homo sapiens
ctagccaccattcctccaccaaaaccactcttattgaattccctgatctgtcctagtgatgcttttcctaatctgcctctcactctaggtggctcctcctatatctcccgcctgggggcccattcctcagtttccccttcccagaccagctctctaggactctgaccttgaccctctgctcttctctgattattcctgctcactggctggttcccatcaccaccagatacacctcgatgatttgacatcctgaactcatctgagccctccctgctgagccccagtc

SEQ ID NO: 201533 - DNA, 434 bp, Homo sapiens
cctggcacaggcctgcctccccctgccccagcccagggccaggccacactctgcctccaaagccaccgtccccccgaggcaccactgcatcccccaaggggcgggttcggaggaaggaggaggcaaaggagagccccagcgccgcagggcccgaggacaagagccagagcaagcgcaggccagtaacgagaaggagtcagcagccccagcctcaccggcaccttcgccggcgccctcgcccaccccagccccgccccagaaggagcagccccccgcggagacccctacagacgctgctgtcttgacctcacccccagcccctgctcccccggtgacccctagcaaaccaatggccggcaccacagaccgagaagaagccactcggctcttggctgagaagcggcgccaggcccgggagcagccggagcgggagg

SEQ ID NO: 201534 - DNA, 400 bp, Homo sapiens
attgcaggctactgagactggcctgatgatgatccttctgagaaatacttatagcagatgatttgtggatgataactacgccaagcaagacactgtctccagtaaccccaggctcgtctgacttcctcaggggattataataaagaatcacaaaaagaaccctatatggacagtctggtctctggacactaacaacagcacaatccaaaggcaaagaaaggaggaaccaccttgtttcatgtctgcaagctgctccatatgaaagcattgctgacatgttgacccaacagcaaaaagagagcagcagtttacacaccctcagctctctgtcctttcctttctattgatgttggtccacttttatgactgaatacatattaaaatcaccatttcaaattat

SEQ ID NO: 201535 - DNA, 732 bp, Homo sapiens
attgcaggctactgagactggcctgatgatgatccttctgagaaatacttatagcagatgatttgtggatgataactacgccaagcaagacactgtctccagtaaccccaggctcgtctgacttcctcaggggattataataaagaatcacaaaaagaaccctatatggacagtctggtctctggacactaacaacagcacaatccaaaggcaaagaaaggaggaaccaccttgtttcatgtctgcaagctgctccatatgaaagcattgctgacatgttgacccaacagcaaaaagagagcagcagtttacacaccctcagctctctgtcctttcctttctattgatgttggtccacttttatgactgaatacatattaaaatcaccatttcaaattataattatctgctttcattggtctctttcacaagtctatgtctatatttatgtttacatatataaacacatatacacatatatttgcttgggaagtttcactacattgctttgtatttctcttttataaggtaatgcatttaattccaaaactaccacattaattgtataaattgattattacataagtttccttgatgatttacagaagaactattgagaggtcagtgttagcacatcaaaatatagtctggtatggcattttaaattgacccaggtatctaatattaaagcctttcaaatttatctctcctgctattattttattaagatta

SEQ ID NO: 201536 - DNA, 697 bp, Homo sapiens
tagagtaccccgataatggtcgagtttaaggcagttgcaacatgaaaacattctaacacttcatgaatatcaagcagctggtttggtttttgacttgacgcttccattttgggtaatttggctatcagtgcactcaagcatgtgtgaaagactcacgcagagggttcagggttggggacagccccgctgctcctcaggaggctggccacatgacagtggtctgtctctgcactgggatgccatgtagctgtaaaaagagtccatgtggacccatctctagggctttttgttaggtgatcaaagcaaagtgcaggacaatataagtaatgtgctggctacatttttgtctaaagagggcaaaggaatttctctttttgttagcttataaatgcataaaaggagtctgaatggatgaaatttacagaggttactgtgggggtggggaggacaggagagagaattgccacctaggtcttaactctttcttaatatgtttgaactatatgaatgtgctatctattgaaaaataaaatttttaaatcaacttgagaaaaggatctgagtaatccctgtaatcctggctactagggaggctgaagtgggaggattacttgagcctaggagttcaagattatagtgagccacgattgcgccactgcactccagcctaggcaacagagcgagacctcgtctctta

SEQ ID NO: 201537 - DNA, 280 bp, Homo sapiens
attacaggcgtgagcacccagcctggttctaattctttgaggtcttccatttcctttttctctccactccccagttccagcttacacccctgaaacacggtgactccatcctcaagccttatggctttgtgcaaggtgggggtgtggagggaggtgatcactggggcagcttaggtttctttggctggaggaattccttgggagggtctcaaaggaagggcctggatcccagatctttctctggttcctaaccgagggctcaggatccatctccttatgg

SEQ ID NO: 201538 - DNA, 624 bp, Homo sapiens
acgtcgcatgctcccgcccgcaatgcggccgcggaattcgattgtgatctgagatcgcacccagggtggtttgtgaaggcaggctccgtggctctgggctccagtccaggctgtgtcctggagcttctgtgtaaggtcaggagagtcgcacagtccctgtgagcctcagtttccccttatgggatatgggtcataggaacacggcctcgaagggtttctgtgcacctgagtctcagcccacagccttgcacacagaagacgctcacattccccttggtaagcaaagggaaacggtatgagccagaccaggaggggacacccatgcctggcgggccttcgcgcgtgtgtgtgtgtggcaagggcgccgccgtgtggccgcgtcagccccacggaagcgctggacccggaacttcgctgtattctccgttcttgcgcttttatctgtagcttcccgcgttcctctttttttaatgtttctgtttttgttttgagacagagtctcgctctgtcacccaggtcggagtacagtggtgcgatctcagctcacaatcactagtgaattcgcgccgcctgcagtcgacaattggagagctcccacgcgttatgcatagcttgatattcata

SEQ ID NO: 201539 - DNA, 893 bp, Homo sapiens
ccggctaatttttttgtatttttagtggagatgggatttcaccgtgttggccaggatggtctcaatctcctgaccttgtgatctgcccgcctcggcctcccaaagtgctgggattacaggcatgagccaccgcgcctggcccatcagtctctttttctacgatagcgcctggctgcccctccaccaggtgggagaaagggcacagggcctcaggtgtcctccctggccttgccaagaagggtgacctgaggtccagggcctccagcaagcaggtgccgctgctcgtcgtcctggtgtgggtctggccgcacccagggtggtttgtgaaggcaggctccgtggctctgggctccagtccaggctgtgtcctggagcttctgtgtaaggtcaggagagtcgcacagtccctgtgagcctcagtttccccttatgggatatgggtcataggaacacggcctcgaagggtttctgtgcacctgagtctcagcccacagccttgcacacagaagacgctcacattccccttggtaagcaaagggaaacggtatgagccagaccaggaggggacacccatgcctggcgggccttcgcgcgcgtgtgtgtgtgtgtgtgtgtgtgtgtgtggcaagggcgccgccgtgtggccgcgtcagccccacggaagcgctggacccggaacttcgctgtattctccgttcttgcgcttttatctgtagcttcccgcgttcctctttttttaatgtttctgtttttgttttgagacagagtctcgctctgtcacccaggtcggagtacagtggtgcgatctcagctcacaatcactagtgaattcgcgccgcctgcagtcgacaattggagagctcccacgcgttatgcatagcttgatattcata

SEQ ID NO: 201540 - DNA, 532 bp, Homo sapiens
cctggctgggtggtggattattttcaaattttttccctgcatttattgagatgatcatgtgattttcttcctttattcttttaatacgttttattacattggttgatttttggatgctgaaccaaccttgcattcctggggtaaatctcacttggtcatggaatgtaatctttttttaatgtatgctggatttggtttgctagtattttgttggattttaacatctatactcaagggatattggtctgtatttttttttcttgtgatttatttttctggctttcatagagtaagtgacaaaacgtttccttctcttctatttttttggagaattttttgaggattggtgttaattcatctttaaacatttgatggaatttattagtaaagccatctagtcttgggcttttctttttttcttttttctttttttttattactaactcaatctctttacttgttataggtctgtttaaatgttctatttcttttatcaaattgataatttgtatctttctaggaatttatcggt

SEQ ID NO: 201541 - DNA, 451 bp, Homo sapiens
ctcaaaaagaacaaaacaaaaagctagcaaacaattcgacaggatgccaaaaagataatacaccatgaccaagtataatttataccaaggacacaaggatggtttaacatacacaaatcaataaacatgatacatcacaacagtagaataaatgacaaaaaccatatgattatctcaacagatgcagaaaaaacatttgataaaattctacatccttttatgataaaaagctgtcaacaaaccaggtacagaagaaacatatcttaacataataaaggctatatatgacccacagctaacatcatactgagtggggaaaaactgaaagtatttcctctaagaactagagcaagacaaggaaggatgctcacttttaccacttttattcagtatagtactggaggtagagccagagcaatcaggcaagagaaaggaataaaaggcatacaga

SEQ ID NO: 201542 - DNA, 135 bp, Homo sapiens
gcctttttccaaacagaacttatattttaaaagcttaccatttttttcccttcatggtctgtgtctttggtgttccccatcacaaaacccaagatcaaatacattttctcttgtattcttttagaattattaaca

SEQ ID NO: 201543 - DNA, 549 bp, Homo sapiens
actccagtgtgtgcaagagagtgagactctgccttaaaaaaaaaaaaaaaaaaaaggaattcattaaatgttcagctgtttcttcctcctcacatgtacagtggtgtcctcctccactcactgctttacctaggataagagcagccttgggtctcttcactcttggaagagtcttttcatattctacttttaaatccatttagtttccttttgtccttagatcttatttttaaagaaaaggttatgatttttaggttttctgacttgttatcagggaagtgttttggcttgttactaagatgggaataaaattctttgcatctttgtatactctaagcagaagtgggagtcactttttttcacattggtcgagacagcatcttgctctgtcacccagactggagtgtggtaacacaattatggctcactgcatcctcgaactgctgggcatgagaattgctagagcctgggaggcgaaggttgtagtgacccgagatcgtgccattggactccagtgtgtgcaagagagtgagactctgccttaaaaaa

SEQ ID NO: 201544 - DNA, 152 bp, Homo sapiens
cctataatcccagcactttgggagtccgaggtaggcagatcacctgaggtcgggagttcgagaccagcaaacaaacaatcaatcaaacaaaaaacacgaaagcagaaaacgtacaatggcaggaagccctgtgcaccttgaagacagcgttt

SEQ ID NO: 201545 - DNA, 442 bp, Homo sapiens
gtatacatggttttaaaaatagaaacaatacactctggggaatccaaggggacatggcaggggttaagggttgtaagaagactaactattggatactatactcactacctggttgatggattcttcatactttcaacctcagcatcatgctattacccacaaccattgtgggcacatgttctcaggccctcctgtgggttataatttttaactttggcaaagtaaacctctaaattgattgacgctcttctcagatactttttggtttacctaccaaaagaaaaatgaagtgttctaccaaaaagacacatacacccttttgttcattgcagcatcgttcacaatagcatatttcaaatcgctattttccccatcccccttgcgtatgtacccactgaatgtaaaataaaattggaaaaaaataaacattttccaattataa

SEQ ID NO: 201546 - DNA, 455 bp, Homo sapiens
ttttgttgattgtccggtttaatgctagtgtcccttccttccactccctcctttaaaacaaaagttctcagccttgcctgctaagaactacctaccagagtttttcaaactgctagtcaaaaccaattagtgtgttgccagtgccgtttttaaaaaacaaaatagaatagattagaacatatcagagtatgacacaaatcttttaagttagatacattgctgtatatgtttatgtgtgaatgtataccagattgtaatataaaatttatattgcttgctttccaaatagcttgaaagccgcttacctagagtgttagttaaaaacacagtttctggcctggcacagtggctcacacctgtaatcccagcactttgggaggccaaggcaggaggtttgcttgagcccaggagttcaacaccagcctgggcaacagagggagaccccatctctgcaa

SEQ ID NO: 201547 - DNA, 323 bp, Homo sapiens
agtgattctcctgcctcagcctccagagtagctgggattacaggcgcatgccaccacacctggctgatttttatatttttagtagagacagggtttcaccatgtttgccaggctggtcttgaactcctgacctcaagtgatccgcccgcctcagcctcccaaagtgctaggattacaggcatgagccactgcacccagtgaagagacctattttaaataagggtatcaagggtagtgactttgaaagtgggaatttaggatgaggaagaagtagccacaggagggtagtaagggagtaacagtgttccaggtaggagaaagat

SEQ ID NO: 201548 - DNA, 785 bp, Homo sapiens
gtatatattattatataggatgtttcttgataggaccatgagtgtcaatttattttgaattagactaaatatttatgtggtaggaatacttattcattcaaaaatttcacatttaattagtttgaggttacctaaaataaaacaagtatatattctaaattcgttgctttttcaaaacttattataaagagaaattagaattaaagaagtctaagggtcaggcatggtggctcatacctgtaatcccagcactttgggagacagaggcaggtggaccacttgaggtcaggagattgagagtagcctggccaacatgatgaaaccctgactctactaaaaatacaaaaactagctgggtgtggtggcgcatgcctgtaatcccagcttcttggaaggctgaggcaggagaatcccttgaacctgggaggcagaggttgcagtgagctgagattatgtcaccgtgctccagcctgggcaacagagcaaaactccatctcaaaaaaaaaaaaaaaaaagtctaaggataagaaatatcaatggttcagatgatgaatttacatatatgtgcttgataattttttcaaaatttttacctgagctttattgaggtataatcgacaaatattatcttaggtgtacaacatgatgttttgatatatgtgcacattgtgaaatgattaacacagtcaagctaattaacatatctaccacctcacatagttaccttctttgtgtgtatgcctgataatttaatttaaaaaaatcaatttgtattctattctaga

SEQ ID NO: 201549 - DNA, 421 bp, Homo sapiens
taagtgaattaggcatgggctagcacaatattacacttatagagccttatgtgttaaaatttatgtacttatattttacccttgaatttagcttatctaaatcatagcacatctaagattataattaaaaattctttttggctgggcgtggtggctcatgcctgtaatcccagcactttgggaggccaaggcaagaagatcacttgaagtcaggagttcgagattagcctggcgaacatggcaaaaccccatctctactaaaaatacaaaacttagacaggcatggtggtacatgcctgtaaacccagctactcaggaggctgaggcaggagaatcacttgaacacaggaggcagaggttacagtgagccaagatcatgccactgcactctaacctgggcgacagagcgagactccatctc

SEQ ID NO: 201550 - DNA, 470 bp, Homo sapiens
ttcttctttttaccttttttcagtctctttctctctccttccctctaccccgtctcagttgaatgattaatttgtttttatttgttcttgttttaagacatgttatttaatgccacatatttcctttaattgaggacagtttgattttcattttttttcctttttaagaaagaggcatttgggctgggtgcggtggctcatgcctgtaatcccagcactttgaaaggctgaggcgggcggatcactaggtcaggagatcgagaccatcctggctaacatggtgaaaccctgtctctactaaaaatacaaaaaattagctggccgtggtgacgagcacctgtagtcccagctactctggaggctgaggcaggagaatggcgtgaacccaggaggtggagattgcagtgagccgagatcgtgccagggcactccagcctggacgacagagcaagactctgtctcaaaaaaaa

SEQ ID NO: 201551 - DNA, 163 bp, Homo sapiens
ctatcacagcacccagtgtgcttcctgtgcagaaggcacttatgcaatttgtaactaattatttatgtatttatttttaatgtctcccccattagatagctccatgatggcaaagaacatctttgttcattatatcaacctcatttaccttaacacgttgact

SEQ ID NO: 201552 - DNA, 796 bp, Homo sapiens
ctaatcaggtatctttttgtctttcatatcttcctatctgtgcttaacctccccatccttgaccttttctccgccttttgcattttcccttcttactttgctcttcagagcatcggaactgcattcctaccatggggcggggggaggagagagggggaactcactcccgcaattctgtaagttgtcttagacaagtaaacttccatgcgaagtttatgatatccaatcatttggaagttacttccgtgttagtggagtaacagaaataaaacgacaaagttaggacttcacagaagaattttcagcaatacaaaattaacttaaagaatacgatgtcgtgttcaactcctaccaaataaggttaaacttttgttatggggaaaatgagaaccatcagccctgtataccaaagagcaaacgccaaacgggaaatttaaaaatatcaggatggtccatcaggtgtatgcctcacagaatttaagagctgaactgataccatacttccggggtacagaacaactctcaccctcatacaagtaggaatagaaagcaagtgtaaaatacgggtcgtcttcgcctgtgatcgcacagtaatacgggcgttttgatctttttttttttttttttttttgagagggactctcgctctgtcgcccaggctggagtgcagtggcgcgatcttggctcactgcaaactccgcctcgcgggttcaagcgattctcttgcctcagcctcggcagtagctgggactacaggcgcgtgccaccgcgcccgggtaatttttttgtattttta

SEQ ID NO: 201553 - DNA, 343 bp, Homo sapiens
ctccacatcaaagaatcttgtgggttatttatttcttccaggcttttgcctatgttatcatttccagtcatagtcccacttcctcccacacagcaacataccataaaaccttcaattacttgcaagcccatcataaatttgctttttttcatgtcttatgtacttatagtctctaccacactgcatagtacttaatgttttcaccaatttttccacatgttaatattgtctcccaaagtggagttatcactttgtggaattataaattccttgaggttgaaaattatgtatttaagtggtagtatctaacatttaataaactctaattatatactatattcta

SEQ ID NO: 201554 - DNA, 487 bp, Homo sapiens
aaagctagctatacctttgaaataggaaatttgtagttagaaatgtttgtgttctctttgtttaaattgtagcttgtggtataacaaaacattcactcaacaaattttgtaaagaattggctgtatgcagatactaggaagatggcagtaatgaaacagacacaaatccctgctctcagagagataatattctaacaaaaacgtgtttgtaagtgtgcgcagaacccatttcatgatttctgcttggtttgtggactcgactgaggttgatgtgagcagttcctgtaaaggaccatccctatcccaggttgttcagagaattgttttccgtccaagccctctgagtggctcttgtgtttgtctaccctcttcctaattgtcgcttttaaatacctcatagaaatactctgtctccatatttcaacttggtcagcatgtgtacctgactagcagccagtcaaattttggtgctggtgacatgggtgtg

SEQ ID NO: 201555 - DNA, 622 bp, Homo sapiens
cagaggttgcagtgagccaagaccacgccactgcactccatcctgagcaacagagcaagactccatctccaaaaaataaaacaacaaaaaacaaaactattgatacaccttatgaaagtaaggtcttgctaaataatgaaggtctggctaaataataatggcatatccacttaaataagcaaaggaaatctgtataggctgatatgagaagctctgtatgtagatgaggaaccaaagtacatatgtgcatacatatatgctggcatatacctaggtttttttccaccttaattagatgatagaaatagtacttgttatcttgaaggagagagattgatacttaggcttttcatctttttgtactacatgactttagctatgtacatgtaatgtgagtacatcgtaaacatgtgaatgcagtttgaggtgcctgctgagagattccatcaggcggttgggatcatgtctgaaacttaatagaggggattgctgataacccagttagagtagatatacaatgcaaaaggacaagaatgcatcagtagaaacagagaactagtggatttataatagtggaacttttacaggtatgtgacttcatagaaaattacggtaggagaaa

SEQ ID NO: 201556 - DNA, 448 bp, Homo sapiens
  misc_feature (6)..(6): n is a, c, g, or t
ggcgantccaggaggttacaaaagatgcactcttctaccatcggacgtaatgaggaaccaaagtacatatgtgcatacatatatgctggcatatacctaggtttttttccaccttaattagatgatagaaatagtacttgttatcttgaaggagagagattgatacttaggcttttcatctttttgtactacatgactttagctatgtacatgtaatgtgagtacatcgtaaacatgtgaatgcagtttgaggtgcctgctgagagattccatcaggcggttgggatcatgtctgaaacttaatagaggggattgctgataacccagttagagtagatatacaatgcaaaaggacaagaatgcatcagtagaaacagagaactagtggatttataatagtggaacttttacaggtatgtgacttcatagaaaattacggtaggagaaa

SEQ ID NO: 201557 - DNA, 270 bp, Homo sapiens
cagcctccaagcctcagcttccattgagggagtagtggagtcctggagccaggcggagcagaggtgggcccactggtgccagaatccagtggtgtaaacctagtgaaaaactcattttgttaatgcagatgcattaaacttggattggaaactgtctctactaaaattacaaaaagagtatttaagtggtgcagattaaatataaccaagattgtggagatatttaaaacacgaaattaaaaatataatagatgcactgttgcaaattac

SEQ ID NO: 201558 - DNA, 526 bp, Homo sapiens
ttgatttcatgtggtgtgagactcactaacattgaattagtgatgaagttaaagagaggctttctctatccccatagaagatattttgtcacttaagaaataattgaactttatgttgcactgtactaacagattaaaactacccttttaaaatacaggaataaataagagttaaaataagagtttttatcatatagtctttatagccatgtactactgtgtgcatactagctaggtctacctggccaggtagacctaacacgccgcagcagggctctgtacagtccggcccggtggggaggagggagggaaggcaggcacacgaagacacaggtatgtcgggaagtgcacacaaaccgttgtctttccttttaggttaaagaagaaaaactttgtaatcaatatcccgctcataaagtaaaagtggaaaagaagaaacttgatagcttacatctggcgtatcggcatactcctctcccattacatatgcacagtatatcaggggaactgctaccgacaacagcag

SEQ ID NO: 201559 - DNA, 473 bp, Homo sapiens
gtggggagtgacagtctagtaaacacacgctatgcctactaacagttagccctaattgaatacctacgatgcgccagatgctattctaagagctttcatgtatgactgcgtttaatcttcacagcaaccctaggagctattatcatccttatttacagactaaagcacatcaaatgaaagaatagggcattatcaagtacatacaaccatcggggatgacacaaaggatgcactggttagctgaagaagccttctcagagggcataagagtaagactgagtctctaagcagatgcctgtaatcccggctactcgggaggccaaggcaggagaatcgcttcaacccgggaagtggaggttgcagtgagccgagatcgcaccactgcactccagcctgagtgacagggcgagactccctctcaaaaacaaaacaaaacaaacccatgttttgcatgtttaaactttttggtttac

SEQ ID NO: 201560 - DNA, 407 bp, Homo sapiens
cattttactataaagacacatgcacacgtatgtttattgcagcgctattcacaatagcacagagtaggaaccaacccaaatgcccaccaatgatagactggataaagaaaatgtggcaagaatactcaatggaatactatgcagccataaaaaggatgagttcatgtcctttgcagggacatggatgaaactggaaaccgtcattctcagcaaactaacacaggaatgaaaaaccaaacactgcatgtctcactcataagtgggagttgaacaatgagaacaaaccaccatggcacgtgtatacctatgtaacaaacctgccattctgcacatgtatcccagaacttaaaagtaaaatttttaaaaattaacaatagtaaaaagcttatagaataaagatatgaaga

SEQ ID NO: 201561 - DNA, 404 bp, Homo sapiens
ccgtaatgttgacattagcaagcttccaacaaaaaggttggcagccctagccatattttttcttttctgtctaggttattttagctgtggtcctgcttaataccagaggcatgaaccaaatagattttcacattgcttccaaatctatgaatatatatagagaaaagtttattcatgaaagagagaagggaggaaggaaagaaggaaaaaaggaaggaaggaagggaggggaggagggagagagggagggaaagaaaagagagaaaaagaagaaggaaggagaaagaaagtaaagtaagtccagggagcgagagaggggaggaaggaaggaaggaaaagaaagagaaagacggaaagaaaatgagaaagaaagaaagagagagaaaggaaggaaagagaaagaa

SEQ ID NO: 201562 - DNA, 463 bp, Homo sapiens
ctttaaccatttttgcacaggaatagcctctcactttttccaggccttgggcgatgccggcagggcaggggatgactgcctaatcattctgcctgtaatgcttctcccttaagaaggcaaaggactgcctcaaatcccaaggcaaataacgttatgcaatataaaatgaaaagaaaggtggcgggggtagggggcacggagaaagagtgaagccagaaagagctaaccacaagctgcagatacattcctctggttgggtttatggggaggatgggccagctggcttcccaagtgcacagagaagacgctccatgcatcttcactcccttgctaaggaactgctccaatccttggggtccttacaacctgctccttgactgtacttgcccttgacctccagggcattgaaccagggctggcggtcagatgggacggtgaatgcaaaggtagactccctactttc

SEQ ID NO: 201563 - DNA, 282 bp, Homo sapiens
gagaatagacagaatagaagcagaaagaaaagatattttattaaaagaatagatgagtttggtataggacaaaggaaatgaaaaaaagcaaaaaaataaaaagcgactgatattttgagtcttgctgattaagggaatgtgattaactttttaaaattccctttgagccttctgaattgaggggataaatatccatgtagaaatgtgtaaaaataatttaaccaaagatgaggtgagaggccaaggctctagaaatagatttgaaagttatgattgtatata

SEQ ID NO: 201564 - DNA, 115 bp, Homo sapiens
taacaaacatatttacactctaaatgagttaaattatttttataggacatattttaacaaaagtcatttcctgtcacaaacctctacaaaccttagcagttttaaagtttacatt

SEQ ID NO: 201565 - DNA, 421 bp, Homo sapiens
aagatcatacagctaggaaactgttgagtggcattagggtgggggacagaagacaccacaaaggggctgttcgtaactgggcttaacccttgatcctgtcaaattagtcccacctcccgcattcctcacagatgtaacattaaaagagttgagtgaaagttaacagaccatgtcctccctgagaacataccaggaaacagccacttctagaaagataggaagtaggagtgtggagaaaagcaatgcactccaagagctgcctgctgtcagtcagccttcacacttccacagcctagaccaagtaagggtccttagcaacccttcagtaaagcaagaacttgtcccatgggctggtggaagggactcccttccaccagcacattccgtcctgctcacacagaaacagctatatttattctac

SEQ ID NO: 201566 - DNA, 470 bp, Homo sapiens
acaagcataaattatttatgaaataataactcagatacagagattacttcctattggccttacatatgaatataaagaaatacatattatgaacatgagcatacttattttataattatgtaaatgtttgtgtaatgttatatataagtgcaataaagtcatgcttatacatggtttcaattcatgcttctaaaaaccactcaatgtagtcattatcatatgttaataaataatctctgaaaatgtgcttctagtagttgcacaatatcccatcataaagattgtcatgctgtttttaagtcatacttttgagtatataagttatatctgatatttttctgctacatatatactattataaatctaatagtagctgattttttgtcaacacatatgattgtttcctcacaatagtacaagagttggttgtaactttatttccttccaacatttatttaggttcagcgggt

SEQ ID NO: 201567 - DNA, 208 bp, Homo sapiens
tctgggggagaggatatagaggaggagaccccagggttttagggtccaggagttgcgtggtcagttgggcattcaccctggggcccttttttggcccaacacatcctgagatgagggtctttgtggtcagaaagagacgtccagcccaatgctggtccactcttagcaccagactgctttgccagggtgcaggtgagcatgcctgagc

SEQ ID NO: 201568 - DNA, 262 bp, Homo sapiens
tgttcacaaccgttaaaaagtgtgagtcatccatttaaaactgacttaatcaaagcttaatttgttatatttctcagtgtctgccttggacaaatctctgattttaccaaaagctgctatgttcaaaatccaacatcccatacataaagtgttgactaattagttctgtctgtgcagcagctctcacagccaaacctggcccatggttagaatgcattaagggtgagatatattttttaagctgccatgaggttggaaaaaa

SEQ ID NO: 201569 - DNA, 511 bp, Homo sapiens
tttttatatctctgcatttcaacccagtaatagtactactagtagtagtggtaagtggatgggtttactcaagatatttccagtcatatttttttcttacacatatttgaaagtattactatttttatttattttcaacttttattttaagttcaagggtacatgtgcaggatgtgcaggtttgttacataggtgcatgccatggtggtttgctgctctctagtcattttttttaaatgtatttcttgatcatttattttacacttgggagaacatgtttaatcaatattttcatgtaattccgatctgggaagtaaagcatctgttattaaggaaaaataattgactgcatcccaggacaatatgtttcagctgataaacgagctgcaccattgctataaagtaaagcgatattgttatgaaatatttacttaagaaatgtaagtactatacataagagctttttagataagatttacttttctatacatttttaaattataagatggag

SEQ ID NO: 201570 - DNA, 698 bp, Homo sapiens
  misc_feature (33)..(33): n is a, c, g, or t
  misc_feature (46)..(46): n is a, c, g, or t
ggacgaattgaaatgtgttgtgtatggtatcantgttgaggtagtngattagtctttattggcagcgtcagtacagactaatacactgggtgattaaatgtgtgtgtgtgtgtatgtgtatacatgtttgtgaaatatatatgtgtagccaatatatttttaaacacctggttataacattaaatttgcatagtcttttacgttgattttagtcattgtcacagttactgtattaaatattttctatcttacttctagctttcaagtaatggaaacacctccttttttcctgtggtggtctttctatcctagcagtttttttcctctccctataggtgataaaattgactcatataaccctatcttttaaaaaatgtttaattcttcttagccagttttaaatatcaccagaaaatttctgcttaactctaccgaaattatttactttctttctggttttgcatatctttcatcatcttaatttacagctctgacactcatcttatatttcttgcatttctagtttcttcgctaaggacctgctcctagggaaatgcattttcagaaattactccattttctaaactttgaagattatcctactttatataagcaccatcatcctttaaatttaattctggagtgtgttgctaaaatattaagtatgcaaaaattatattctttgtgaaaactatgtc

SEQ ID NO: 201571 - DNA, 732 bp, Homo sapiens
agctgggatttgaagccaggtctactgaattatgcaactccttccccaccaaatacacacacaagcacacacacacacaagcacacacacacacaaacacacacacacacttaaattccatgcccaagcctccccctcccccaagcatagtgagccatttcacaccttcaatttgggaccccttgtcctctcccaccacagcctggtaaacacctgcccacctatgtctcaaggcttagcttacgttattgtcaacagaaatctttctgaacacacaaatcactgccaccacccctcttctctctcctttctttctctcttccccagtgtagaatccgtcatactgtctgggttataagttccataaggagcagaattattttccttagaaagctctgaagtcccggtcaccagcacagttcctgacacagggaagacctgcagcaatcgtctgctgaatgaataaagaatgaattgactcttcctgcctctggctcttttagttctacacaccagttgttctcaatcaggagtggttttgctcctgtggggacgtttaacaatgtctggaaacaatttctgtcattactcatggggtgccactagcatctagtgggtaaaggtcaaggatgctgctaacttccttccatgcaggtatagcccctacagcaaagaattacctggcccaagatgccaacaataccaagagtgagagaccctgcctgctccaca

SEQ ID NO: 201572 - DNA, 330 bp, Homo sapiens
ttccctgagttctgtgagccgctccagcaaattaatcaacccaaagaggggatcatgggaacccaaacttgaatctggtcgatcagaagttttagaggcccagacttgcaactggtgtctgaaagtggaggtggtaggttgggggagcagttttggggactgtgtcagtggtatctgacacttatctcctggtagatagtttcagaattggaggacacgcagctggtgtccactgcagaattgattgtttgtttgtggggggggaagtgcccatttgatcacagaagcctttaatttgtgttgatttttgttgtgagaaaataagaaaag

SEQ ID NO: 201573 - DNA, 422 bp, Homo sapiens
cctcccaggccagactatcatttcaaatgaacttaagacagattatgctaatttgagagggaattaggatgaaaatagaaactctctgggtgtaattaacggcatagggaactaactagagcataagaagctggatacatttcttagagaattgtatttccaaataaactatgagctgccttaaaaatggttacatcagtaaaacaagcagcaggttataaaaaagggtgatatcagtaaatcaaccagcaggtctccatacttacaaagcagaaaatgagcctgcagcagggaaaaccacagagatttccacccacatcaacatagccgtggatgataattaacatgggtattttattaaaagccataaagctaatcctgagaagaatttttaaaaatatataattcatattagaagtatt

SEQ ID NO: 201574 - DNA, 755 bp, Homo sapiens
tgcttcatattgaaagtagcaaaaacactattggcgaaaacattgttataatttctagtcttattgcagtaagaatgctgtaaccacacaaattataaataggtgataagaaccataatgaaaaaaatgagaacaaatttgattcattcctaggccagataacattaaataaaaacagttaaatgtgtaaaatatgaaatatgaattaatatttgtaaacatctgcagacaactctttttataaaccttcttattgctgttaataaatataagaaagttatattaggaacattagctaagcttttgactatgaaaactgcctacattaaacatggatttatatagacccattttcctgcactgaaggcaaggcgcatctctgtgattctgaccagacatattcatattttcttaccctagaggaagtacatgggactgaattcttgaaaagagccatcaaattagggataatactaaattgatactgtgcaggtgttctccagtgatattctactgagaatgctaaggttctggtcaggaactataaatagcagattaccaaacactgctttttctgtgatgataaaagcctcataagtaacaaaaacaatgtttaatttagactcctgtaaacaggatgcaattagtgattttttttaattgggttcagtaacttccagtaacaaatgtagtcaacaccaaattagaatgtgagcttccttacaatttttgtacatagactactatcatctaat

SEQ ID NO: 201575 - DNA, 433 bp, Homo sapiens
aagagaaagtctttcaactatatgtaaaccagtaaaaaaagaaacaaaaatagtgtttttatagatttgagaagatactgcattcataagatgaaaagaaaatgccatgggaaattactgatccatattgtattttgtctaccttttattgtggcacttagtatattatgatttgtattgtaattgtttttagtcgtgtctgtcttagctcatgagactgtaaactcctggaagccaggaagatggtaatgacctgtaactgctgaatgaatttaaagtggatagccagttttctcttagcacgtcccttagaactcctttgagcagaacatttcaggtacggtagctcctgtgttctgactgtagattgtatttatgagctattgaagtttgctaagtttccagggtagagaaagtagcgatagagtcatcc

SEQ ID NO: 201576 - DNA, 314 bp, Homo sapiens
aaatcgtcccattccccagtggattcggatgaaaactggtaataaaatcaggtacaactccaagaggagacattggaaaagaaccaagctaggtctgtaaggaattgaacatgagatggcacacatatttatgctgtctaaaggtcacaatcatgttaccatatcaagctgaaaatgtcaccactatctggacagttggacatgtttttttgggaatatactttttctctctgaatctgttaggaactttctggttggctgggttccgtaataaatacatgagacctttcatttcaaaaaaaagaaaaataggc

SEQ ID NO: 201577 - DNA, 332 bp, Homo sapiens
tcttgttagctccatgttagagatgatacagcagcctcccagggatgttcattcacttgtctggtatcatgcagatagttaatggctgggccatattggagtccagggccttcagactctcaggctcatgctcccttctgccctgctgctgttttaatgaaaatcagccttgttctgaaccacagttttacaatgaagcttaagattaaactgaaaatgctcaagttctctgttagggcttcagattctatgtctatacttgtcttattaatggtaaaaataatgtaacaacattaaagaaaaattttgaagggtgaaacactgtttagact

SEQ ID NO: 201578 - DNA, 282 bp, Homo sapiens
tcttgttagctccatgttagagatgatacagcagcctcccagggatgttcattcacttgtctggtatcatgcagatagttaatggctgggccatattggagtccagggccttcagactctcaggctcatgctcccttctgccctgctgctgttttaatgaaaatcagccttgttctgaaccacagttttacaatgaagcttaagattaaactgaaaatgctcaagttctctgttagggcttcagattctatgtcagttttcgggatcctctagatcacctcg

SEQ ID NO: 201579 - DNA, 790 bp, Homo sapiens
cggcacgaggagctgggggaaaaacaaatccaccaccttgcctcgctttcagtctttcctcgtgactcactccttctgggaaggcaatgcctcggccaccttttgaccctaaatccagctggaactgagttcgccttgctggctgctgggctctgccttgatcatctgtctttcgggaggcagattggctgtgcatcatttcaaccgtctgcagtgacaagttttttagagcctctttgtttcatttagtacccaggccttggttaggaccttaaaggaagttaaaaccccagtggcaccttttatttagggatcgctggctcgcttggcctcagtcttctactcgcctttcccacgtccacctgacatcctgggacagttggcagaccttccctccatggctcaggtgggcaggaggcagagtcagcaggggtgttaagtcacttctacatctctgcgtggccgtcatcgctgctattctgcacatgtgttgccactggggaaaatgggacactatatagagggtgtcttctcccaccacactctgtgggggtgggagaacccacaccaaacgatcatcatgttggatttgcatcatggcacattgagaatgtgttcagtgggactgtggatactatggaacctttcccacagagtcctttgtaatgcctctgctaggatccagttcattgctcaaacacccatacatttttgccctttatatgcgaggattttattctgaaagctgtgttatctgtgctgcttttccaagacagagcaacaactacca

SEQ ID NO: 201580 - DNA, 358 bp, Homo sapiens
ggaatgggtactgctgattggttggggatggaatcacagggatatagaaaaacagtcctggtccttgcgtgctgagtctgcttctgggttggggccacagaggagtggctggtctgagaggggccattgggtagtcagaagtgcaaaagcctgaaaagacatctcaaaaggccagtcctgtgtactacaatagtgatgttatttacaggagtaattgaggatgttgcaaatttttgtgccctctggaataataactgctaatcatttaactgacctgcatcttagcagaattctggtccttcgcatcctcctgacctggtgtcctttcattagttttacaaaggcagtttagttttgg

SEQ ID NO: 201581 - DNA, 461 bp, Homo sapiens
agttgtgctggcaacactatttcttaacctgtgtggtggttacaaaggttttccttttattataacatttcattaatatgtatgtttatgttttatactctgtatagagcatggttttttgaaaaaaaattctttaaaaaagattttgacgcaagggcatttctcagagctccatttacagtaagtagtttagcaggggtttaagagcagggttttagagtcagctgcctttgatgtgaatcccagttcagccacttgttcactatatgtggtgaccttaggtgataaatttagcatctctgagcttcattttttcatttcaaagaaataagataaggctacgtatcacatagggttaacatgggatcaaatgagagaaagtggtatcttacataatgcttggtacacaataagcagtcaatactttttctctatttatttatttattgagatggagtctc

SEQ ID NO: 201582 - DNA, 198 bp, Homo sapiens
acgcgcacgcggtcaacaattctcgtgctagcctcctgagtagctgggactacaggcgcgtgccccaacagccgtggtaattttgtatattaaagagacgggtattgccatgttgcccagactggtctcaaactcctgggctcaagcaatcctcccacctcagcctccccaagtgctgagataacaggtgtgagccac

SEQ ID NO: 201583 - DNA, 147 bp, Homo sapiens
ttggaaaacttacatttgtcttatctgagttcctttcttgggaaaccaaccatcgggcctcctgaatgataccgggaactgagactttccagatcactgccactggacagtgaggtgcacctgctccttgttgaccaacttcttatc

SEQ ID NO: 201584 - DNA, 111 bp, Homo sapiens
atacaaatccaaccagtttaaaattcctccatgatccccccgtcctacacaataaagtacttctttgaatggaaaatgagatcttctaagacctggcccctatccaccact

SEQ ID NO: 201585 - DNA, 755 bp, Homo sapiens
gaatcatactatatgtgaccttttgtgtctagcttctttcaatagtgtgttttcaaggttcctctatgctgtattatgtatcagtacatcattccttgttatggccgaataatttctcattgtatggacagaccacatagaaatgcttctatggcatccaccaagttagtgttcgtatcatcttcctcctttatttcacgtctctggtggattacattatagatattctggtgttggaaaaccctttcattcctgaaatacacttgacttggttgtgatcattatgcatttgataaattgctagattggatttgctagtattgtatgtagaacattggtatctttctataaatgagcttagcctgtattttatttcttgtgctctcctcattagctctggtatagggtggtgttagcacagtaacatgtgtataagggaggaaatatttcttccttaaaagcctgatagaccctagccatagagtcgtaggatctggtcccttttggaaagtaggtctcgcctagcatttcagtttcctctctagttattggtttatccaatctttctacttcttcctgggtcagtctaatgtgcaggcagtaatgtgtacaaaacagcttgatgagatatcacaaaacaacacccaggtcaagaaatacaaaattgccaatattccaggaatctcactggtgattcctcccaatcactgcctatttcctttccaaagtaattattaccttaacttcagtgataa

SEQ ID NO: 201586 - DNA, 363 bp, Homo sapiens
tgggacagagtctcactcttttgcccagactggagtgcagtggtatgatcatggctcactgcagcctccacttgtcagacccaagcagtcctcccacctcagcctcctgagtagctgggactacaggtatagatcaccatgaccagcttatttttgcaattttttatagaggtggggtttcgccatgtctcccaggctggtcttgaactcctaggctgaatccatcctcctgccaaagtgctgggattacaggcgtgagccaccgcacccggcgttggtctcaaattcttatcctcaagtgatcctcctaccttgtcctctcgggcagtgagaaagttctgggcagtgctgggaggtccaagg

SEQ ID NO: 201587 - DNA, 170 bp, Homo sapiens
agggggcaacgtggcggggcccactttcccactgatgaggcgtcccgatccagccctttccttgccacctcgggtgcttgaatgtttttatctgtctccaccttaccacgagcaattgagctaattctacaagcaagagatatacaaacaccaagggcttcgtgacaaag

SEQ ID NO: 201588 - DNA, 701 bp, Homo sapiens
aaaaggtttgcactttcaagtactacagatctggtattagtctaattgaagataatatagaattctatttttgtctagcgttcattctactattaagctctaaaaggctagaactacatttcccattcaatacttcataagttattagaacaaaatacatgttgacgttaatataaaaatgaacattaggtgatttcatgtcctttccttgtttcaacaattaaaaaactacacatgcacaaaatgctcccgtataaaatactacaaacaggtgagataactagaagacaccagaaagttcatggaaaataacttacaacagctgagagaaactgcaggtcaaattattaaatcatatctcatgtctaaaacaatggaacctactggagagtttcccttcacagcagacaacagtctctcccaccacgggaaccctttttaaaagttctaccatagtaatgagtacaaagcaaagaacaggcaaccaagcacaactgcctaaaaatctgagaaaacaaacgcgcaagcatcaaaagaattcactcatgaaaaccagaagattcattacatttgggtgactgttcacatattatatattcttctactaataaaagaacaatatatgcagatgttttgttcatacacacaaacatacatatattcacacactaaaaatgcacatatacatttatctaaaaaac

SEQ ID NO: 201589 - DNA, 515 bp, Homo sapiens
cattggaggaaaaacatgttggcttttctcttgacgtgggagaaattgaaaagaaggggaaggggaagaaaagaaggggaagaagatcaaagaagaaaagaagaaggggaagaaaagaaggggaagaagatcaaaacccaccatgccccaggctcagcagggagctgctggctgagaaagagcctgaagtcttgcaggactcactggatagatggtattcgactccttcagtttatcttggactgactgacccatgccagccctgcagaagtgccttttacgtattggagcaacagcgtgttggcttggctgttgacatggatgaaattgaaaagtaccaagaagtggaagaagaccaagacccatcatgccccaggctcagcagggagctgctggctgagaaagagcctgaagtcttgcaggactcactggatagatggtattcgactccttcaggttatcttgaactgcctgacttaggccagccctacagaagtgctgtttactcattggag

SEQ ID NO: 201590 - DNA, 479 bp, Homo sapiens
caggcataaaccaccacgcccagcctgatttctaattctggtatagtggggtggcggagagggttcggcttggtggtgactcccaggttgacaccaggaccttgggaggaggttgagggagctccatgtcagatggactcagatcacaaacacagtaggccccaggtctgcctgaggttctgaagtatcccagaacagcggacaataggtttttcatctctactagaagaaaaacaagcaaatctgaactgcctcagcaagggaggtgcttaagaaaaataacattttcaaatcaattgcagccagggccacatgcttgttccctccttcctgggaggacttgcagagctaccagatccttcctgtcttggagagggggccatgctttctggaagcagtgatgcttaaggaagcccaccaggtggcctcaagtgacatctgctgtgcccacagctgctgcttttttctttctttctttc

SEQ ID NO: 201591 - DNA, 145 bp, Homo sapiens
agaggggcccttttggtgcactcctagaggactcgacttttgtggcctcaactagctccagacttgctcccagggattgaggggggaaggaaaaacttccctgtcctatactacacaggcatccgaccttaacctgtgaggcccc

SEQ ID NO: 201592 - DNA, 652 bp, Homo sapiens
ccaaatgtcatgtgtttacatatgaatctattcacttctttatttttaaaattcttctgagaagtactttagaagtaatccctaaatttaaagtatttataacaaaaattttacatattctcaccagtttagagcattacccagaaggaattgtgactccatggtccaggggattagagttagtcattaggggtgggaatttcttctcagaacgaagttagagctctgtaaccatcttatgtgaccaagtagatgtttgagaaagatctggaattaacgtaatgaaggtgagtagcactgagaatgcccatagagtctgtagcttagatgggggtgggtgtcaccatgatcttagtgttgcactttttggaaactaggtttaggtgaggaatgaagtcacaatcccctaagaagggaataatgaataaactagttatatcagcttattactttagagtagaaaacagacctcatgcaggaatcattctgcatatgtggtgaagccttcttggtgagcagacaaacaaaaaagaaaattcactttttctaaaaaaatagcacatcagacctttgtagcctggagaactcattcttctctactttagaggtgtttctttttctaataactgggaagggctgtctctaaccggag

SEQ ID NO: 201593 - DNA, 555 bp, Homo sapiens
gcattgctcttgtgcactgaccctgtcttatttcatatttgaaaggattaagttggggacttgtaatacaattatttaacaaaagggttcttttcagcagatactgttaaagatatacacagaatagcaaaccccacttcctgcaaaggtgaattttacttttaatgtagttcttcatctcagatttgcacaagggctggtaaacttaaatattttcaccccaaaatgcctcctgagtatgaattagagatggagtgcttggagaaaatagttctgttctcacctctaacattcccttctatccccaaaacatgagactgccctggagaggaagtgttagctcattgaataggaagggaaatattttctccagtttgaaggtggggtggccggacctggttgcctaaccctcatcctgggagctctggaatcccgtgttaccaacccctgtgcttacttcctatgagacaccttgccctctgtctgtgaggttcctgatttctcttcttgaaacgatattatttcctgctagtctaaatgttctgcctgatttca

SEQ ID NO: 201594 - DNA, 338 bp, Homo sapiens
agaggcctcccctctacgtgcttcatgtaaatgtgtttatagttgatatccatcatctacaagtgaccaaggcacaatagtttcacctgatatgttagaaaatcccagtagagtttagaaatcatcatttctaaaggcaaattttaaaagatttctctcataagtaaatcaataaacaaatatttgtgcacactagtctttcaacagcaaaggataattttgggataaagaatgatgcaaacctggcaaaattgatatagtcagtttggctggctatgcataaactatcttccttatgtttagcacatctttaataattagaagtgacttcctatagc

SEQ ID NO: 201595 - DNA, 129 bp, Homo sapiens
gccaaaaatatttttcatataccaccacagtaatattaatataataaatactgtcaataaaatgttcttaaaagagaacacaaaacattacagtaagcaacatatgctgtttctactgtatgcccaaaa

SEQ ID NO: 201596 - DNA, 467 bp, Homo sapiens
agtcaagatccaagtctgttcagtgatatattgtctcccagttctataaagtgatgggtcagaaaattaccattgtgtgagtgtttaatctatgcccaacacagtgttaggtaatttgatgaaagtatttcatttaatcaccaagtgaccctttggagggatgtattattaaacacgctgttcagaaaaggacaccaaagctcagagaaggtctttgagaaccaaaatgtgagttcaatttcagtatgtctgactgtaaagatgttctttttagtctactaggtcatctcgccttttgaaaccagggatctaggccatacctggtctcatataggtattgccccagtggtatcagcctctacctcataggagaaggacccaggacaaacaaagcctccatcaccatttggaggaaccaaatcaagttctataatgcctagtccagtcccaacccctaataagattcc

SEQ ID NO: 201597 - DNA, 345 bp, Homo sapiens
ttgtaaacacctctgtacttgggccagccaaaaatgctctgtttagcaactatggtcctatagtcatagtgttaaattatttgtataggggaattaaatatctggaggattcaaattacagttgttactggaaataatttagagcatttcagaattggacataaatcaattattagaaagttattttaaaaagagtattgaattttctttttaacatagtgaatgaaaaaatgacaatagcaaattataattattggaaagtcacacaaatttagaagactcattggggtccttgaatttatgtcaaagtacttctataaactacttagtctaattctccctttt

SEQ ID NO: 201598 - DNA, 366 bp, Homo sapiens
tataatctagtgtatatatgtctgtatatataaatatgtaaatatatgtgtgtatacacacacacaccactagaaaagattaaaaataaagaatacattactcattcaataatagttgtcaaaagaaatgaaaaaagcagaatagaagcataaaatatgtaaataatagaaaaaaatgacaaaagataaaaataaaagttataaaaataaataaactctcaggttaggtaaaaatataaaatccaacttcatgctgtttataagaaacaactaaaatacagtgacatgtaaaaagcttaaagaaaaacaccagggaaagaaagaaagcggacatacaagaaagaaagcggagattatgctattaat

SEQ ID NO: 201599 - DNA, 243 bp, Homo sapiens
cattacactattctcaccagactcctaggcgacccagacaattataccctagccaaccccttaaacacccctccccacatcaagcccgaatgatatttccgatagtgatccggatctgaagtgatagaaaaggaggtcagagaggcagccaggggccaggtcatttaccgtagcttgtaagctatgttaagactttgggtctcatcccaaataatatgggaaaacatcagaaggtatagccaa

SEQ ID NO: 201600 - DNA, 217 bp, Homo sapiens
ctggctgtggagatgacttacaggacagatggagaccaagttaggttagaagtgcttaatattgggttgtactgtctgcattcaatatgaacttgtgtaaggtagttgtgaggttgtgttcaaggtttttcactatagcataaggaaaggaaaaaaacctaatataacaaacctcagatcttacctataaaattatgttatttgcaaggtaagaata

SEQ ID NO: 201601 - DNA, 196 bp, Homo sapiens
cacacagcttccttgcctctctaaactcaccgtttggtcatccccattggcaggcatctctactcttgtgacgcctagcttcaagtattcttctaaattggttaaaaatcacatcaaaaagctactaaaaggactggtgtaatttaaaaaaaaactaaggcagaaggctttgggaagagttagaagaatttggaag

SEQ ID NO: 201602 - DNA, 212 bp, Homo sapiens
cctgagccacagagtgaaactctcagaaaaaaaaaaaaaaaacagaaagaaaagaaaaaagaattgagtatcagttatccactttagatgactaactttccctcgttctcacctggccgattgttcaggtttctaattctcagtccctaacctttcggccttcctacctaccctactcttatttcctcatgtctccatccctctggctccct

SEQ ID NO: 201603 - DNA, 462 bp, Homo sapiens
  misc_feature (404)..(404): n is a, c, g, or t
  misc_feature (411)..(411): n is a, c, g, or t
  misc_feature (447)..(447): n is a, c, g, or t
  misc_feature (449)..(449): n is a, c, g, or t
cagtaaaattggtaccaactctacttagcatgtctgatagaattcagctgtgaatctatcttgtcctggactttattttgttggcaatttttaaaattactgtttcagtcttgctacttgttattgatatgttcagagtttctatttcttcctggtttaatttaagagaattgtatatttccagaaatttagccatctcttctagatgttttagtttgtgtgcatatagatgttcatagtagcctggaataatcttttgtatgtctgtaatatcaattgcaacagctctcatttcatttctaattgagttctctcttcttttcttggttaatttcactaatggtctatcaattttgttgatcttttcaagaaccagctttttgtttcatttatcttttgtggtntttgttncaatttcatttaattctactctaatctttgttatgntntgtcttctgctat

SEQ ID NO: 201604 - DNA, 338 bp, Homo sapiens
ggtagttgcaggtttagttttttaagaaactgacaaactgtttatgaaagtggctatagtacgctacagccccagtggcagtgtctgaacaacccagtttccccacagccttgtcggcatttggtggtgtcactattttctagtttagccatgctgaaaactgtatcatgatatttcgctgtggttttaatctgcatttccctaatggctaatgatgttgaacatcttttcatgtttatttgtcacctgtcttagtctgtttgggctgctataacaaaatatcatagaccgggtggcttaccaacaacagacttatattccttacagttctggaagct

SEQ ID NO: 201605 - DNA, 367 bp, Homo sapiens
tctcagagttttaatggggcacaccgtgtgctgggcattgacatagatgggaaaagcatgacctaaaataagggctggaagccaagactgggaggaagggcaaagggagcaggcagcctggcaccaggtaccagtgaggtgtctgctctttgtccccatcacctgtcagctaaggaattctgcatgtcatcagtgcaataaaatgtgatcgccagagtgaaaaccttgtaatagaccagctgtggcttctctcaacaccagtatgtccaaggaggatgcatttttattgcttttgtggtcttaacaaaaaagattcatgagcattgtataaaaggcatattaaaacaattcggtaaaaggatgaaag

SEQ ID NO: 201606 - DNA, 647 bp, Homo sapiens
gcaaatgctaataagcaaagcccagattactaaaccatttgaccacacgtgtagtagtgtttcagcccactcttttaagaagttttcagaaagccaatgagctaatagcttgaatatattacagtttgaccttcatttcagcaggacagacaaatcattgacaaaacggctgcaagaatatcagcccttttaataagttgtccagtaatatgatatttttatgattattcaatgaattgatttttatggaattggctttcagtgaatttatttatcagccagttttctgaagggcagcccaacactatatgccataaattttctttgctataattaacttcagacactctgtctcctatctttcctaatttcatctctctctctgccctgtttatatttattggatgctctggtatgtaattattagaattttccctttactttaaaaactgttctttcatctttgtgtgtatcattgattgatgaccccatcatgaccttaattgcaatttacaaacttacttgctacaaagttaggttaatgagattattcactatacaggtagattcaacataagtttccattatcatttttaaagccagtatcatccactaaacatcaatatgtcatgcgatgttttaggagc

SEQ ID NO: 201607 - DNA, 230 bp, Homo sapiens
agggtgacttggttaaaaagttcaagcacaaaggatgtagaagcaggtggatgtcatcagagaacagatgcggatctagtgagatgggtcctaccacccctggaatatgttcctgggagaggggtggtctgctagagtggactgggaatagtaatattgcatacttttgtaaattcacaaaaccctctgatctgtgatagaggaataaagggcagaggataaaccccaga

SEQ ID NO: 201608 - DNA, 266 bp, Homo sapiens
tccctcactggtgctcgagccgcacgccggtcaaatcctaatgtgagtggtaaacctgtgtttcactgtggtaacgttatagaagacccaatcacagtgactataggtaacctgcagtgtaagagaaatgctttattgggcggaagcttctgttctcagttgtgtcgctcagaagtgtgggtccctagacaccttattttcctgctttgtttccttcgagcgaaatggaagagggaagggactaacactcactttgcccgcggtgt

SEQ ID NO: 201609 - DNA, 466 bp, Homo sapiens
attagggtaagttgaggagtctttatttacaaggcactacatactcaggattgggcagggtgtagggaaatctcacaagatagcacaagactctaggactagcagcagcagagctgtcacctctcctagacctgaagccgttgttggggagagaggtttctcagagcccagaaaaaaagaaaaaaaaaaaaaacatcatgcagattttaatgccttgggaggagcagtggctttctcttaaggacagaatttgcctcgaaatgatactcagggaaaaagagatgaagggaatcaatactctgacccaagactctcccttctctgcagtggtttgctagtcctctccttggtcaaacccaaacagaaaaccatagggcataggagtctaatgatgtaatccaagtcagccccctggaaggtggaaaaagaagggaaaatggatctggatctggagggataccaaaaa

SEQ ID NO: 201610 - DNA, 426 bp, Homo sapiens
tgaatacacacacacacacacacacacacacacacacaatcttttatgaagagttatattttagtgtactatgtaagtgacagagaattagctttatacttatattggcccatactggaatgtgtattagaatatccatacacttacttaaaatttctgtaattcttaaacctctatcatagtgcttattatgttgattacttatttgaaaactggattaattgaatacagatgaaaggtaaaatgttcaggatggacactaactattaacttttaaggatacctaagaatgtttatgaaaaacatgttccatgctacaaatactagctcataataaaagagagggtggaaatcttgactttgttttctgggaaaaagtaattattagttctcattagtttaataagtcacatttttttaaaatag

SEQ ID NO: 201611 - DNA, 246 bp, Homo sapiens
tccaccttgatgtctctaatctggctcatctgatgtttgtctagtatctttccttaggtgtggcccatgagtgatgggctccctgagttcctgcgtacccgtatatctttcttttgtcctgacaggtaaatgatgtcttgcttgggaatagaacccttggagcgtgtagatgggataccacggtcttccagctcctattgcaggtgagaagtccactgtcaatttgattagtttttcttaaaactt

SEQ ID NO: 201612 - DNA, 613 bp, Homo sapiens
aaatgaaaagaaaaagggtctgtgaattcttcttccctctgcctctaactatatttattaccaaagccacctgtgttaatagttatttgagtattgtacaaaactcttttgtttaggtaaattcacacatgtatttgtataatttgtttttgttttcctttattcaaattatatgtagcctgtgagcatactctgactctgaagtttttttgttgttttttttttaacttatgttttgtaagttactattagtacaagtagagctgtatggtatgtcagtgatctactttgaccagtttaattaataattgtgaaaattagaaataatgttactgtgaataattcttcatttaagccattttaaacatgaatgaaatgtatgtttgttagtttattttgacggagtcttgctctgtcacccaggttggagggcagtggcgcagtcttagctcactgcaacctcctcctcccatattcaagcagttctcctgcctcaccctccagaacagctgggattgcaggcacatgggattacaggcatgtgccaccatccccggctaagttttgtatttttgtagatacagggttttgccatgttggtcagacgttggtt

SEQ ID NO: 201613 - DNA, 587 bp, Homo sapiens
ttaatagatatttacttagctcctattatgagtcagttgctatgttacgggctgaagatacaggagtaaaacaaagtttttaaaaactctgtctttatggagcttacattctaggagagtggttctcaacgaggtacaattttgcctcccaggggacaaatgacaatacatggagacattttttattgtcacaactgggtggtaaggagctattggcatctagcgtgtacaggccagggacgctgctaaacctacaatgcataggagagccactcaaaataaaggattatgtagcctgaagtgtcaacagtgccagtctgttctagagtgaagatgaaagagacagaatatgctatctatacaaataccttacacctagaactgcacatttctcaagagcagaaaatatgttttattcttcatatcccaaataccaactcaaataccaaccttagtaacttgccaacagcagatgattaataaattatgaataaaatagaaacaagacatttttctatattactattaatcatggcatagtacacaaagtcttcttataagatggacagggttcaaactaaactttt

SEQ ID NO: 201614 - DNA, 646 bp, Homo sapiens
ggaacggcatgggaaaagacagaagtttctgataatgtggcatgtatgggaaattgtaacctaactgtatacattaggtttctgataaggtttgtggttgaggaacttaagaccatatgagaaaattagattgggagttataaatgatttgcatgtatttttcccttctttaaagtaaaaatgtagcacattaaataaaggtaacatgccagtgactgacaataaattctataaggaattaattttctcttattcactctatttctagcctagtatttagcatatagtagatactcaaatgttagctgaatgaatgtgtcatgtatttcaaaatatttttagattttctcttcatcccttgtttgctagacatttttcagggtataacttttttcttttggatatagcttgtaaagatatacattactgaattctcaccccctcctcccttgttttttcactcatttaatttttgtttttttaatgactcaggtgtttccttctgggtcctccccatctttggtctttcatttcttcctttctttctttctctttatttagagagagggtcttgctctattgcccagactgcagtgcagtggtgcagtcatagctcactgcaacacagaactcctggactcaagtg

SEQ ID NO: 201615 - DNA, 191 bp, Homo sapiens
gtcggatatattaacttttgttcacaaactaattcctattaggctcatcttgattgttttcatggttctgggcaggcttctatcttgctgagtattatgctaagcttacttttactgccagacttagcatggtaagttgacagcatgctttgaaataaaaccaaaaacaaaaaaatgaaagaaacaaaagc

SEQ ID NO: 201616 - DNA, 352 bp, Homo sapiens
ttttttttttttagagacggagtctcgctctgtcgcccaggctagagtgcagtggcgcgatctcggctcactgcaagctccgcctcccgggttcacgccattctcctgcctcagcctcccgagtagctgggactacaggctcccgccaccacgcccagctaactttttgtatttttagtagagccgggatttcaccgtgttagccaggatggtctcgatctcctgacctcgtgatccgcccgccttggcctcccaaagtgctgggattacaggtgtgagccaccgcaccctgccggaaagacatttaaaaaacaagtaaagattcggccctagactgggacatggggcccac

SEQ ID NO: 201617 - DNA, 314 bp, Homo sapiens
gagaaattacttctgctgactttttttaaatatgaaaatttgaaacatatacagaagtagacaaaaacgtgtaatgagcccatcacccagctttaactgttaccagtttacagccagtcttgtttcatcgataaccccacccacttatcccctcttgttttatcttattttgaaaaaaagtcctagacatcatattatttaatccgtatttcagtatgtactctttaacaataaagtctctcatatgagtgcattaactttttttgttttgagacgatgtcttgccctgttgcccaggttggagtgcagtggca

SEQ ID NO: 201618 - DNA, 445 bp, Homo sapiens
ctgcccatcaggaaggtcaggctggaatttttggaaagaggcgcacctgccatccaccaggaaattttgttgtcttttgttctgctagaactaaatcagacacaccaaggttaactagcactatcttcctagcttgagaaacttgatggcaggcttgaataacacctgtatgaagccatcagagcaacaactagattaatgtctgctagaattaaatcaggcacaccaaggttaactagcactatcttcctagctcgagaaacttgatagcaggcttgaataacacttgtatgaaaccatcagagcaacacctagaatagtgtctgatttaataattgagactatggtctagccaaggagacacataaaacatgatttccatggttggttcatattttatatttattaatagaatctggctggtattataaacagctttgccaaa

SEQ ID NO: 201619 - DNA, 183 bp, Homo sapiens
tatatgtttatttcaaacattagagtcagtcacacactgcttcttggtttctcatcagtagatgatgtcattgcatctctgacagaaatgcttctgctctgaaagtgcagggagaggctgtgctattaaggccaactctgttttgttccacacactagagtgaggagaactcatttcagaatt

SEQ ID NO: 201620 - DNA, 406 bp, Homo sapiens
agcttcagagtttattctggcgctctgcatcactgctgctggtgagggcttgtcagcgcttctgtgcctcatctgcccccttgagaggctggagcccagctatcggttggctgcagaatggattctgatctgtgaagagcatatcttgggggtggggagcacacacctcacatggttttggagggttactctaaatgcagtcggaggcagcagaaggtggaatccagcagctgctgccttttcaaaataatgctttttaaacactttttcctttaaagtaattcattaaacgtgtttagagctcctttcttgtgaaccttttagagtgtttctatggaaaaataaaaccaaaggtacatttaaagatattttcttaaggtattgctaaaaaatccatttttgtgga

SEQ ID NO: 201621 - DNA, 441 bp, Homo sapiens
tctatttttttctatttgagaaaaaagataacagtatgaccgacataggtaatgagagattctgtaactcgtaacattatataactgagaaagatcattaactatgtaagtatatgcaggaatggatgagggggaatcacaccaaaaaatttaaataggcacctactatagggacagaataaatgagggaagacaggaaggaaggaggcaacaatgatgacaactttaccagtaaaaattcctagaatgaaaaaacccgtaatttttcaatttaatatttcagaggcagtgaaaaagtcactgaaaataacaaattagtagtctagaataaatatcatgtaagtaactccaaagaaaccaaaaatcattaataaaactgtaagaagacaaatctaaaaactctaatattaaaattacagaagtcacaggaagaataaaagg

SEQ ID NO: 201622 - DNA, 448 bp, Homo sapiens
gattaccatttctgttcatctactctgatgtggttccaagtgtttctgcaagtctaggagggtcttattacaatggccgagtgatgtggttaagaaatttggaaaaaatatattcacttcaatccaatgaattcttatgaagtgccaactctttagaacatatgtgtctgggctcagtagctcatgtgtgtaatcccaatattttgggaggccaaggagggtgcatcacttgaattcaggtgtttgagaccagcctgggcaaaatgacgaaaccccatctctacaaaaaaatacaaaaattagttgggcatggtagcacacctgtagtctcagctacgagggaggctgaggtgggaaaacagattgagcctgcgaggtcgaggctgcagtgagccacgatcgcaccactgcactccagcctaggcgacagagcgagactccgtctcaa

SEQ ID NO: 201623 - DNA, 434 bp, Homo sapiens
ttaagaaggagatgctgggggaagactggcaagaggaactctgcacatgaggctgaatgcacacatgactcttaggaaagtggtccagggctgagagctggcaccagctgcgtgagcctgaggaggctctgccagcagacaatgttcctatgggaatgcataagtcagggctctccagagagacagaaccaagaggagatacagacataaagagatttattttaagaaactggctcatgagattgtgggggctggcaagtccaaaatctacagggcaggcaggcaggctggaaactcaggcaggagttgaggctgcagctttgaggcagaatttcttctcctccaggaaacctcagttttttgttcaactgattggatgaggtccacccaaattatagagggtaatctccttgacttaaagtcaactaattgta

SEQ ID NO: 201624 - DNA, 735 bp, Homo sapiens
tcctccccagtcgtgacaagcaaaaatgacttcagacattcagacattgccaacttgcccacggcggagggagcaaaattagaatcacggaggtaaattttatagagagttggctggttctaagtggaaaactactctcttattgcatgaaggttaaatgcactcacatgtgacacacactcacattcataaacacacacacgatacaatgacaaaatccctaagacagagtggtcctcgtttctgatttttccacactttcatttgcctgatttgttgtaaatgcctctaaagtttgagcagaacatcaagggttccgttttcaaagtgacctcaactgcctccagcgtttcaggtgttgagctctagaagccaggatggaagttttcaggcagatacaactcccaggctttcattcagcttctataaaacaacagtgcacacaggcacatgcctcatcaccagtgtctgctgtgtgcacccaaaaaagaaagcagacgcagaaagatgattgaaaatgtattccatagggctctagggttgtcttgaaatgctctgttctgaaacactctataaaaattcctcacagattttcagtgactagaggcatggggctgtgggagggggtgctcagctgcactcttttattattgagctgattcaaaggaacagattttatgttgataaatgtacctgatactgactttaatgttcatggactgggtcttttctatc

SEQ ID NO: 201625 - DNA, 410 bp, Homo sapiens
tcaaaatatgacaaagaagtatattttggggtgaaatatttttctttccttcaccctgaaagcctaggaatctgcaatttagcaagctggtttgctaggagagtctgaagcacgttaaagtttgagaaccatttgttgaaactattcttctgctaaggtgttgtaacactcaggaggtttttcctgtctgactcactcccatgaggacaggatagggaaagagcaaggtcacaggggcttgaaatggtgtggcatagaaaactatgatacttcagcaggcccacagggtggaaggtaagaagtgtaaattgtaaagtaaggtctatagaggctgataagggatgtcccatggaaggccctttattgcaaatgtggactatggtctttatggctaacacagtgaaaaataa

SEQ ID NO: 201626 - DNA, 327 bp, Homo sapiens
  misc_feature (279)..(279): n is a, c, g, or t
atttaaaatttttcccctcaaaataaacagactcaaaattatacctgtggtaaatgagttttttaaacctgaaacctaactgcctgtgaaagactgttcacatgaggaattaaaatgcagcctcacaaaaggatagtcaaaaaagggaaaaaaatttagcatactcagcatcagaggtaaacttacagccattaacacataagtgtagcaaaacttaaaatttgttcagaagacccaaatttcacatgtcaaggaatatctttaattcctttcattcanaaattgactacatagttttctttgaggggaaaagaccctggggtaccg

SEQ ID NO: 201627 - DNA, 491 bp, Homo sapiens
gaaaattaaacgagacaaggtaatgaaatgttctggaattagatagtggtgatggttgcagaaccttgtgaatatactaaaaagcactgaattctacacattcaaggggtgagctttatggtatgatatttatatctcatttaaaaaattaaatgagacatatatagaatacctagcacaatgcctgacatagagtaaatacagatagcaacagctattactatctcattattatgtgttatccttatcatttttacaataatgatgattaaaaagatgacaactgttatctttaatagatctgacagcaatctctgtatcttagtaggacaaatacatctccatgtgcacattagtcaagaggaggagatgatcgggcagtttctgtatacatttagatcacagatgggattactagacaaggagctcatttggcatctacaggaggctcaggggatgctggcagctgggtcacctttccagaatgaatt

SEQ ID NO: 201628 - DNA, 366 bp, Homo sapiens
acatccaaatacatcgtctgtacaaggcggacgaactacaggtgacaagtgtagaataagccacaataactgataagcttaaagataaccagcacaatttcacaagagaaccagctcagcccaactaaaaattacttaatagcaattgacactgaagttgtattaagtgtataaattaggggatgaaactgaacaatcccaaggatgagaaattggtaaacataagagagctgactccatagggacatttaaggtagtggttctcaaccttgccgcacattcccaagtcccaaggctcaggcctcaccccagaaaagttaaatcaaaatctgttagggctggggactaggcataaggtttttttgt

SEQ ID NO: 201629 - DNA, 449 bp, Homo sapiens
attattgagcattttcttactttctgacaaaacaaaatatttcaaggtcatcttgaatttttctgacagcagtcctggtacaaccaccatgtcaaggaactctagcttcttttattggaagactgtgagatggtgtttggattgcttgacatcttattattgaactgttgaagtctggaagtgccttttctcaatgagtgtcctgtttatgtcagaaatgggtaaaagatgtggggagcaagcagctgtgacccaactcacccagaacaatgccaactgaccttggactctgagaagttacttagaatgaaccaggggtataatttatacctgatcttgacctcacatcttaaggatgagaagaggatatttgttataaacaataagctttcccattcagaaattactccttagtatctctactataaacaggtggaagacactttgca

SEQ ID NO: 201630 - DNA, 509 bp, Homo sapiens
ctcagcctcccaagtagctgagactatgggtgcgccactgcacccctgtgctcattttagagacggagtctctctttgttgcccaggccggtctcaaagtcctggcttcaagcaatctccccagctcagcctctccaagtgctgagattataagcatgagccgccacacctggcccctgtgctcatttttaagggacaatgttatacttaaatgtcatagctacgtgcagaatcagggtgtgacgaggtagaagtggaggcggcaaagtgcagaagtagcatatgattctttttgtcttgttccagaatttactttatagaaattactctcctaagcaattatgaattatacctcccttacgttctagaatagtaaaaaactgaggttgacaagaaaatctcccatattgtgtaagtcttttaaatcaccaataatctctttaagcattctgagtgtcagacttgagaaaaacagaaaatgatgacaggtctctgtgtacctagattta

SEQ ID NO: 201631 - DNA, 623 bp, Homo sapiens
gcacgagccacagggccctccctgactttgggataatgtaaattatttttcaaaagctacaactattctatgctaacaattttggggtttttcttttttcttcttctttttttgttttattgacacagagacctgctctgtttcccaggctggagtgcagtggcacaatcaatcatggctgactgcaaccttgaagtgatcctcctgcctcaggcctcctgagtcgctgaaactatagggatgtgccaccacgaccaactaattttttttttttttagacaggctctctgtccccgaggctggagtgcaatggcacagtctcagctcacttcaagctccacccaccatgctcaagcgattctcctgccttagcctcccaagtagctgggattacaggcacacacccccactgcccggctatttttgtatttttagtagagatgggttttcaccatgttggctaggctggtctcgaattcctgacctcaaatgttccacccaccttggcctcccaaagtgctgggattacaggcgtgatccaccgaccccggcctgattttttattttttgtagagatggggtgtcactaagttgcccaggttggtctcaaactcttgggctca

SEQ ID NO: 201632 - DNA, 416 bp, Homo sapiens
acaggcatgcgccatcacgcccggctaattttgtatttttagtagagacgggggggtttctccatgttggtcatgctggtctcaaacttctgacctctgacctcaggcgatctgcctgctcagcctcccaaagtgcagagagtataggcgagagccactgcacccggacttttttttgggacagagtccccattaaagtcattctcttaaatccatagtactcccctaaggtgtccccttagagagagtaaatgcttcagaaaaacagataaagtcaagaatactggcatcattcacgtgtctatttgaaagctgagaattttttaaaaatctcgccagtccaaagtaaacctatttgaaagtgaccactgagagttggcctcctgtctaaaggtttagctgtaagtaaacaatct

SEQ ID NO: 201633 - DNA, 452 bp, Homo sapiens
gccatcatcatttgaattccaaccagtggggagaagaaaggggaaaggaacagaccttcctttaaggatacttccaagaagttgttcatactacttcctttcatatcttgtggactggaagtcaatcacattacttgaaatatttcatgtttttattggaaaccatgagcccaatcaaaactcaaagttccattattctgtagataaaggaaagtggatattgagggacaacttgctgttaccgatgtcagctgaccactaaacactcatagcaaatgacactaaaagggtttctttggtggtatttttcttgagatttgaactcgcgttcaactaagtcaactaaacctcagatttggactgctctaggagtacttgggggtgaggggaattgaaaagcaaacagaaaagtataaaatcatccctcagtctctgataagagctttcaggca

SEQ ID NO: 201634 - DNA, 530 bp, Homo sapiens
aactctgagtaatcctatcatcctacaaatattttttgtgacataataaaccacgagacaagttgtgtgactagaatttcagcatggaattacctcattaataggcttacaatttgggaatattttagtacataagttaaaaacaaatcttaagcagaaaagattttttagttttttactcttctttctaccaatgttcaaaaaatttccaattaaggatgctttatcaaaatacacattccaaacattggttcctcattacctgcttccctgatgtttatcacttattttccatcataataatgggtaagagcttatcttagagtatcataaattttgttttaaagttgatggtagtacagaagagagatgcctgtttttctctcccctttgcactccaccttttacaggcatcttctactttggctccaattttttgacattcagaagatctcataagacaatgacattaaatactattagtagtttctgaccatggggattagttatctgcagttgccagcaccaca

SEQ ID NO: 201635 - DNA, 593 bp, Homo sapiens
  misc_feature (593)..(593): n is a, c, g, or t
agaactgagaaagcagccactcgaatcattttctgtgttctgggatttagaggaggaacactggttgagaaagggaatatttttaaggctcttgacacatattgcagatggcttttaaaaataattccttgagtaagtacttcagtaccaagcatttgattctttgtaattcttggtagtatggttattattgtgaaaaatataggttatttctatcatctgaagtgtttcttcttggagggtgggatgtggctagaatacagtatgattgtgaagtaataagactaattttgacatgtggtttgtggaactggtttcattacttatagtcacatttgaggctttacaatatttctcacagtatctactacactgccttgaatgtagttcaatgcatgttctctgaaggaatttgaacatccaacctgtagagtaaaaaggaataagagaacacttcgtaggaccctaaaatgaatttttatattcaatttgtacagaagaatggtgaaagaatggagaaaaaatgaaactgagagaccctaactgtcccatttccatctctcacacttataataaaattcctctttgagtcn

SEQ ID NO: 201636 - DNA, 433 bp, Homo sapiens
agactgagtcttgctctgtggcccaggctggagtgcagtggcttgatttcagctcactgcaacctccgcctcccaggttcaagcaattctgatgcctcagcctccttagtaactgggattacaggcacatgtcaccactcccagctaatttttgtatttttagtagagacgggggtttcaccatgttggccaggttggtctggaactcctgacctcaagtgatccacccgcctcgggctcccaaagtgctgggattataggcatgagcttccaggtgaagctgatggatgcagattcaagaacactctttgagaaccactagctagagcttggatttgaatgagccacacgtgtgaggcatggaggggcccatgctagggtcataaatatagtgggagatttgcctatgtcagttttagcattggtcgtgaga

SEQ ID NO: 201637 - DNA, 318 bp, Homo sapiens
aggcggggttggggcgtgtggtggttgcagttgaagaccagcttctgagcccctgcgtgtttggtgggaggggaacctctgagcgtagagtttcctgccacagtgcactggtgtggaaactgagatgctgtgaagtttctagagaagtggggggtgtgtggcaaattgtttctgaatcatgggaaatggtttatgatgcactgtcaatcattcttcacttaagtgtagtaaattttattgttattctggccacttcatattttggttttgtgaataaaaaaatatttcctggccgggcacagtggctcatgtttgtaa

SEQ ID NO: 201638 - DNA, 389 bp, Homo sapiens
ttctaccaatagtgcacagtttttccacatagtgcacagtttttccacatcctcatcaatgcttgttattttctatttcattgatagtagccatcctaataggtatgaggttatattagtccgttttcatgctgctgataaagatatacccaagactgggcaatttacaaaagaaagacgtttattggactcacagttccacatggctggggaggtctcacaatcatggtggaaggtgaaaatcacatctcatatggcggcagacaagagcttgtgcaaaaaaactcccatttttgaaactgtcagatattgtgacacttactcattatcatgagaacagcaagggaaggacttgtccccatgattcagttacctaccattgggtccct

SEQ ID NO: 201639 - DNA, 531 bp, Homo sapiens
gaatatgcaacatttttctttctgttcctggcttaagtttcatttaacgtaatgttctctatttccaaccacattattgcaaatgacaggacttcattcatttttatggtggaataataaaggacgtatttttgagaaatcaaactgagagagttttcagttcatttcagacaatcgacaaaagattgcatgttttacttgaagctctgaacagatccaaatccctcttgcagagtcacatagaaatatattctcttacagccttcaaagatatcagccctgctcctttattagttagcaatattttgagccagttcaacattaatattagtaaaaagtttagttatacttttcaagaagtagagaagttccattctctaaccttttctgctttagcctctgaagacttaaatacatagaaaacaaaacagaaatgaaattaagaaatgtttgaaatagggcaacccgctcgggtccccttccacactgtggaagcttttttcttccgctctttgcaataaatcttgctgc

SEQ ID NO: 201640 - DNA, 346 bp, Homo sapiens
catctgggtaaggcctcacaaactaggtaagctgaaggcacttgccagctctactacttcaatggcctgggaagggctgtgaagacactatcgcactgtccataagctcattcagccatctcacttctaggaatcttattaatgcttcctgtaaaagccccaatcattttccagtgcttcctgtagtctcccagcccttaaaagaggatgctatacagttagagagggtccaggcgtctccagaaacatccctttcttccatttctgcagaactcttctcctgatggtccaaacaacaccctgggacctctaacttgatgcacttcagaaatctatactctaggcc

SEQ ID NO: 201641 - DNA, 563 bp, Homo sapiens
gacatgaatgaggaagtactccaaagttttttacgtcttcctgaatggatataacattattaggttttctctctcttaagaggggatccacctcccaagtactccccaaatgcaccccttaactaggagcagggtgttattaatagttttctgattaaatgatatcatatcctctcaatgagattgagagaagtgccgtcatcatagtgcttcatctttgctgtctcagaatcaaaactgtgtccctcactctaaaaaagactgattatttgatcatctaatttttctcttttaaaaaattgccttccctggccgggcatggtggctcacgcctgtaatcccagcactttgggaggccgaggcgggatcacctgaggtcaggagtttgagaccagcctggccaacatggtgaaaccccgtctctactaaaaatacaaaaattagccagatgtggtggtgcacacctgtattcccagctactggggaggccgaggcaggagaatctcttgaacccaggaagcggaggttgcagtgagccacgatggcgccactgcactctagcc

SEQ ID NO: 201642 - DNA, 338 bp, Homo sapiens
ttttggtgtatctggacaatggcatattatgtaatatttaaaagcaatgtagaataatacatacatataaaactatatttgacttattaagtcaatcccaataaataaaatcccaaacaactggttgtccgcaatgagagatttaaatctctcattgcgcaaggaaaatattgccaccatttgtagaccacgtaaccttcaagtatgtgctactttttggtccctgtatctaactcaaatcaggaactgtattttttttaatgatttgcttttgaaacttgaagtcttgaaaacagtgtgatgcaattactgctgttctagcccccaatgagagattt

SEQ ID NO: 201643 - DNA, 503 bp, Homo sapiens
agagaataggagaatatatgaaaggtaaaataagctcactgattacttaatagatactggttgggaattaaagaatggtacttcaaattaaatgctggtggagaggaaaggtagaaatgtaagaaaaggttatcaggtaatttccatactgttcatagtaggggaccaacagaatatagcccaaaaaaagtatgaaggaagggagagtaatggtattatataaaggccttactctatagatacaatacaagccttcctaaataccaaaagataacctgaaaatagtatgcaaataagatagacaatatagtaaaagaatacacatgtacacatattaaacagatggattcaagggaccaaggacaaacaattatatccataattgcaaatgttcttaccttaactattaaaagaacaatattttcaaattgtttaacaaagcatagccaaacattatgctgtattcgagaaatatccaaataaaatttaacaagatttaagat

SEQ ID NO: 201644 - DNA, 492 bp, Homo sapiens
tggaagtatcggtaggttcaaaggactgcctgctcaaaacgacttgtctgcttttgcaacctaatcatgcaagtgtggtgcatgccaggaactctatgttaagtaaataacagtacagatgataagaggtggcgtgaaaaatcatgaaagtagaaagtgatggtgtcatagtgcgagataagctgggtttagataatgcctctgcaatttactactggtggggcttaggtgagttattttcatgatagtggataagtctcacaagatctgatggttttaaaaacgggagtttccctgcacaagctctctttctcttgcctgctgccatccgtgtaagatgtgattggttcctccttgccttctgccatgatcgtgaggcctccccagccatttggaatcgtaagtccattatacctcttttcttcccagtctcgggtatatctttatcagcagcctgaaaacgacctaatacacctacctatttcacaatcg

SEQ ID NO: 201645 - DNA, 198 bp, Homo sapiens
tcatctctattctgttttcggccttccaacatgtgaatgttaatcactataggaggaaggtgactattttctgatccaaaaatcatgatgtatggtctgattaaggatttttatgtatatatcatgcctttcaaaggtataaagggagaacttcagttacacatttaatgaattttctttattaaaagagaaaaattg

SEQ ID NO: 201646 - DNA, 518 bp, Homo sapiens
cattatactttgcaggaagaaaataataggcatttattctatagtaattgaatagacagatatagcaccttaaaaactaatgatagccattcatctctatgtatcatgtatctgtcaaagtaggaacaacttggcacagcccaaaaattagccaggtgtggtggcaggcacctgtaatcccagctgaggcctggaggctgagataggagaatcagttgaagcgagaggcagaggttgcagcgagtggagattgcgccactacactccagctgggatgatagaatgaaactccagctaaaaaaaaaaaattgtattctgagtctgactttgcctggacttaagtagatattaagaccaaaaaatttgctggctatgtgagtggcgtcaaacaaggtaagacctcagcagggagggtttcctttattctattaggttggtgcaaaagtaattgcataaacccaagttatgtcctattttagtgtggcaaagagggaccatgtcacctgatttggggctgg

SEQ ID NO: 201647 - DNA, 560 bp, Homo sapiens
taactgtttcttacttttagtgagaacttattattttgtaagaacagtccttttctgggtaggcgcggtggcttacgcctgtaatcccaacagtttgggaggctgaggcgggcagatcacttgaggtcaggaatttgaaaccagcctgcccaacatagtgaaaccccatctccactaaaaatacaaaaattagccaggtgtggtggcaggcacctgtaatcccagctgaggcctggaggctgagataggagaatcagttgaagcgagaggcagaggttgcagcgagtggagattgcgccactacactccagctgggatgatagaatgaaactccagctaaaaaaaaaaaattgtattctgagtctgactttgcctggacttaagtagatattaagaccaaaaaatttgctggctatgtgagtggcgtcaaacaaggtaagacctcagcagggagggtttcctttattctattaggttggtgcaaaagtaattgcataaacccaagttatgtcctattttagtgtggcaaagagggaccatgtcacctgatttggggctgg

SEQ ID NO: 201648 - DNA, 440 bp, Homo sapiens
tctgtaaatgggaattattatggagatgtagctttagagtaaattcctagaagaatgattgctggtcaaagagtaaatgcatatgtagttttattagatgttgtcaaatttccttccatatgagcagcacacaatcacttttaaaaggcacttttttggccgggggtggtggctcacgcctgtaatcccagcactttgggaggccagggcaggaggatcatgaggtcaggagatggagactattctggctaacagggtgaaaccctgtctctactaaaaaatacaaaaaattagccgggcgtgttggcgcatgcctgtagtcccagctactcaggaggctgaggcaggagaattgcttgaacctgggaggcagaggttgcagtgagctgagatcgcaccactacgcgccaggctgggcaatagagcgagacttcgtctca

SEQ ID NO: 201649 - DNA, 506 bp, Homo sapiens
gggcccagagaagggcatgtttggagcctggctgtgtcaccttggaaacttggggcacgtgtggagtgtgagtgagtgagctgctggaatgaactgaccagacaggacatcatctatgtatgggattagaatggaattacaggagaaaaccaaatccctcaaattagcattcaggatcggaaaaaaaaggcccatgctcttagaccaccaccaagaccttgtcttgtcctgcaccgagcaacctccgtgtcaccctgctccacctgctccatgaagccgcaccctccagagaggacccttcccctttccacccttcgcggaccactcaatgagctaccctgcacctgaccccttctgtccaagtcatcacagtattcccagagctggaacagtcaatgcctggcacatcgtgggcactcaacatgttgaatcaatggttacaaatacatgaatgtacttgttgaataaatggttataaataaatgaatgaatgatccccccccttc

SEQ ID NO: 201650 - DNA, 397 bp, Homo sapiens
tcccacctcagccgcttaagtagctgggaatacagtcacccgccaccatgcccagctttcagataggtctttgcagcacggcccatgctcttagaccaccaccaagaccttgtcttgtcctgcaccgagcaacctccgtgtcaccctgctccacctgctccatgaagccgcaccctccagagaggacccttcccctttccacccttcgcggaccactcaatgagctaccctgcacctgaccccttctgtccaagtcatcacagtattcccagagctggaacagtcaatgcctggcacatcgtgggcactcaacatgttgaatcaatggttacaaatacatgaatgtacttgttgaataaatggttataaataaatgaatgaatgatccccccccttc

SEQ ID NO: 201651 - DNA, 363 bp, Homo sapiens
gtccttaggtaacccttcttcctctgcatagtggaattcattgtgttctgggtatttatgtaacaattggtgcatgtagctgttcattagctataaatagttgcatctatatattttctctgagagattgtaagcctttggaaggtcaatacagtggcttatcattggtttactttataaatgctgaatttctacaaaatgccaggctctgcctcaatttacagttaccatcttggcagcacctaccacagtggttggcagatagtaattaaaatgagtctttaggtctgactttgagagtatcaaacctgttggcatcagataagaccatgcataaaatttcaaatgttgcaaatccagttg

SEQ ID NO: 201652 - DNA, 1899 bp, Homo sapiens
taaggtggggaataaggttaggggtaaggttaattctacaagttcaaagccagtagcccctgatgcgctgttggacgtgaactataaatttggctctgaggttcccaggcatggaagaatatctagatctgtacagagaggttgtgtgtgtgtttaacatttccataatgtacaatttcctctaagagtaaaggccatgaggaaatgcccgtggaagataaaggagaccatgtggtctgtggcaaccatggatacatttctttcccaacgcattctctgaggcactttggtaactctgcctctttgctctcagcattgtgttagaaaataaagccagcagacaaggattaaaccctcatgttgctgggttccttctagaaacaattggagggctaaccaagtcacctttggtggaaggcagtaaggtgagtcattgctgtggctggactgaataggatagccttagctgtaaaattgggctgatctttcaaatggactcatgcttgccgaatgactcacgctcctgtttacaaatcagctctgtgaagaaatgcagagtgggaggctctgcttgccagacggagaccttagacctccaggggtggagaacggagtacttcctctggtgctcggcttcccttcctgggggcagatctctcagcttctggttggtggctctcaaaatccagacacaaggtcagctgcagccagcgtgggccctggagtagctccagttatggggcagcaatggccccctctcattttgagagctcactttgcctgtggatggttttaatccatctggataaacttgaggcccatgggaataccatatactatggtaaccatgtacactgctctaaagatgtggctgctgttgtataactttttcctttatttttgtcaatttcctattttccagagtcttgcatacccactatgtctactgtgatagtgaacgtaaaaacatacaagatgttggtgttatcctcaatctcttattcttaatcctgaacaaattacatgaaaaaatcgttcatggagtttttcttcatataaaactttttacaatgaacataaagggcatagctatttctttttttttaaaaagaaacgtagaatattatttcttggttgtgaaatcgcccttcttggaccccaagttgttttttacagccctaaattctcttgtttatagagcctgtttatagagccatagacaggccaatgggtctctacagcaggcacctgcatgagttgactgggacctgagctatattccccctctgccatttactagcagtgtgaccttgggcatgctccttacagtctctgagtcagtttcctcctctgtgaaatgggcatgatactacctacctcataaggtaggggtgaggattaatggagtaagaggcacactcctgtccagggccccagacagagtaggccgtcagtaaactgtagcagctattgtgatagggtttgaaattcaaattaacgcatatttcttgagcacccaaggtgtgtgctgctggatctttcaaggggtccagaattggtagtatagttgcttttctcaaaagactgtcgcctggcagaggaaaaggtgttaaggtatgagtgaagacagatcagccagacatggtgccgcttgcctgagatctcaacactttgggaggccgagataggaggattgcctgagcccaggagttcaagaccagcctgagcaacatagcaagattctgcctccacaaaaaaataaaataaaaataaaaagattagctgagtgtggtggcgtgcacctgtagtcctaactgtttgggaggctgagacaggaggattgcttgagcccaggagtttaagtccagtccgggcaacatagcaagaccccatctctta

SEQ ID NO: 201653 - DNA, 418 bp, Homo sapiens
cctggcactggcttcactgctgcttttgataaggatgtttctacccttgagaggaattttaaccaatgggatttaaagggagtcataaaagaactggacttttaagtggaaacagttttttttttcttggtctatatacctcactaacagatagtcataaaaaaattttgcttaaatttttgtttatctagaaaataagttcattttcaaaaacttagaaagtacattgcaattttaaaaataaacatcacccaccattccacaacctagagggatctactttaaaatttcgtttttgagccaggtgcagtggctcacgtctgtaatcccagcaatttggatggccaaggcgggaggattgcttgaggccaggagtttgagaccagcctgggcaacatagtgagaccttgtctctaac

SEQ ID NO: 201654 - DNA, 264 bp, Homo sapiens
cgaactcctgacctcatgtgatccgcccgcatcagcctcccaaagtgctgggattataagcgtgaatcactgcacctggctagaaacatcttctaaagcctaatctttttttttttccttatataatttaggttgactatgtaaacccaaaacacatagggtagaaactcgtgaaaaatatttttgaggatatctttgcaaagtgttggggttacaggtgtgagccactgtgctgccttctttttaaaaaagtttttctggcca

SEQ ID NO: 201655 - DNA, 368 bp, Homo sapiens
ctcaatgctttagtaaagatattaaaaagaaataatactgggacttggagataagagaagtttggaatgataaatggggcttttgcatagttactcttaaacattaaagagaaagaattggacagtgatgactcaatgttagtaatggagttagacacattttcttgaagcaggttgtcaggcaagcattagcacagtggtcctttaggagatgaatttattgctttgggatgtgcctataccaatcatagacaaccaccatgacagtaggcattatgggaagtttgaccttagcgtgttttaagaaaaaacttgttctggaaatgaattaatttcctgtccagtagacacaaattctttttcttaaa

SEQ ID NO: 201656 - DNA, 813 bp, Homo sapiens
tctggaaacaggactcttctaaaaagcatgtaagggaacttgaagcagcatctcaatttgtgcaatatgataaagaaaaaaaactgtgggatccagaaaacaatacacaattacttttatttatggctaccagaacttcaggaaaccgactaatgtttgtgcacataatgtttttattatggatctatctggggcatattgaacatacagtgccctcaaaaatggtcagttttactcatgcccaatcccatatattttttagggtaatttttctggtccagttaagttagaccaggacattttcacttgacaaatctgagtaaacttctctggaaaaaattgtttttgaccattcgcctagaatgaatctctgggtaaggaagatgcatatagtcgtataatttactgtagttattttgacaccttttcttaacgacacaccacagatttattgctggatatttttttccttcctaagccacttgccatatagttctactcttctctagctctagggaggcttcctcatacagactaggtcaacagattccattccactggctcgtggatgggtttggctaccgagaagcagttaagagaagatcagaattatagggagcagggagtaggaaaaggtgaagaatttattttcctgcttccctgctgatcccctcccaggctcctacatgttggtcacatttctctaccaaatggtagttcctgtggggttcttgtaaattcaccttcctctttccatagagacaaaagctccctgctttcattcaccttcgagtactgcaaactttttttttt

SEQ ID NO: 201657 - DNA, 608 bp, Homo sapiens
  misc_feature (489)..(489): n is a, c, g, or t
  misc_feature (496)..(496): n is a, c, g, or t
  misc_feature (498)..(499): n is a, c, g, or t
  misc_feature (505)..(505): n is a, c, g, or t
  misc_feature (509)..(511): n is a, c, g, or t
  misc_feature (521)..(521): n is a, c, g, or t
  misc_feature (530)..(530): n is a, c, g, or t
  misc_feature (568)..(568): n is a, c, g, or t
tcctgcctcagcctcccaggtaactgggactagagacatgagccatcatgcccagctaatttttgtatttttagtagagatagggttttgccatgttggccgggctggtttcgaactcctgacctcagatgatccacctgcctcggcctcccagagtgttgggattacaggtgtgagccaccgtgcccagtgggtatgtatctttttttatctgtttgctttcaactcttttgtgtctttgaatctaaggtgtgtcttttgtaaatagcatatagttggatcttgatgtttcatccagtctgacattctctaccttttgattgaggtataaaaaccattcacttttaatatagttattgatctggttagatttgcctttttattatttcttttctatacattcttgtctattttgtggtctgtatcctctatgtagctagctctctgagcttccttaaaacaattaaatggtcaggtcatttctagatntccattngnnagtagntgcnnnctggaatatngtgtccctntgtgatgtcatggctcctttaacttttcatgttccttnaagtgctgtcctttgaagtcttgttgcttcaaatgctgtc

SEQ ID NO: 201658 - DNA, 589 bp, Homo sapiens
  misc_feature (470)..(470): n is a, c, g, or t
  misc_feature (477)..(477): n is a, c, g, or t
  misc_feature (479)..(480): n is a, c, g, or t
  misc_feature (486)..(486): n is a, c, g, or t
  misc_feature (490)..(492): n is a, c, g, or t
  misc_feature (502)..(502): n is a, c, g, or t
  misc_feature (511)..(511): n is a, c, g, or t
  misc_feature (549)..(549): n is a, c, g, or t
tcctgcctcagcctcccaggtaactgggactagagacatgagccatcatgcccagctaatttttgtatttttagtagagatagggttttgccatgttggccgggctggtttcgaactcctgacctcagatgatccacctgcctcggcctcccagagtgttgggattacaggtgtgagccaccgtgcccagtgggtatgtatctttttttatctgtttgctttcaactcttttgtgtctttgaatctaaggtgtgtcttttgtaaatagcatatagttggatcttgatgtttcatccagtctgacattctctaccttttgattgaggtataaaaaccattcacttttaatatagttattgatctggttagatttgcctttttattatttcttttctatacattcttgtctattttgtttctctgttcctccttgactgcctccttttatattaaatacatatttttagatntccattngnnagtagntgcnnnctggaatatngtgtccctntgtgatgtcatggctcctttaacttttcatgttccttnaagtgctgtcctttgaagtcttgttgcttcaaatgctgtc

SEQ ID NO: 201659 - DNA, 700 bp, Homo sapiens
agtgaagtgctggccggagggagattgacgagttgactaagttgaaattaagaatctctctttatcataaagactgcagttggcgccgggcaggagggcacactacagtgtatgtacgtacctcagccctcaccctgaatctaccaagagctcctgggaatcagtaagaaggctgccatgacgtccagcgtgtccctcacaggaaaggcctccacccagccagcaaatgcggcagggatgcctggctttgccaaagagtgaaagcctccccagtgggatctgccgtagcgcacaggggagcagacggagccgcggcgcagggcagcgggagcctcagccaccgctggagagagcggatgttctgaacgtttcccctggacgctgcctgccacaccagtggaagctgagctcatgctgtaggacctggctgttcacttgagtcagtcgagattcacagaagcacatacatgtgtccaccagaggcacagatgggtgccggtgtcacccccacttgccccagcccagacgtcctaggatgacaggtagggaagagtgaagaggccacatgatgcctggcggacagtccagacaggagggcaccccctttgtgttccttctttgaagcgtgggagcggccaagccggaggccatgaggaagtaggaggcagcctctaccttgggagggacaggtggacctggc

SEQ ID NO: 201660 - DNA, 769 bp, Homo sapiens
ccaggctggtcttgaactcctgacctcaagtgatctgcccgtcccaggcctcctaaagtgttgggattacaggcgtgagccattgtgcccggcaagagaggctttcttaatttcccttctcaacgacctgttaattaatcttcctcttcaaaccctgctattggtgaagccagtcgggtttcttactttgctcttttgccgagtcaggagccagctggaatgggttcagcttgtctttactctcccctgagtcacttcgagtttggttctactgatctacaggaagcttcttcccaccactgaattcaagggacagtcttcccatatgtctttaccagctctcgcaaatgaagacagagcctgtctatgtcattcagactggcctcaaactccagggctcaacaaagcctcctgcctcaacttccccagtagctgggactacaggtatatgctcagcttcaattatttttgtattagtttgccagggctgttataacaaagtgccaccaactgggtggcttagacaacagaaatttattgcttcacagttctggaggctggacgtccaaaatcaaggtgttggtagaattggttccttctgaggactgtgaggaaggaatctgttccaagcctctctccttggcttatggatgaccatcttctccctgttcctcttcagattgtctttcttctatgtatgtctgtgtcaaaatttcccctttttataagaatgccaggtgtattggattaaaagcccaccctactctag

SEQ ID NO: 201661 - DNA, 358 bp, Homo sapiens
ggctctgcatgctgatgctctgtgtctgaaatagaaatgctgacttctctgaagaggtcctagtgtcatccagataggtcaatgaaattaacagactatcacgttgggtaaccgactgctatagacgccatcactgttcgtacatgtgttagagagacatacacacaaacacatacacctcctttcttacatgcacgctgatcactaattcaaattcttacacatttagacaactatttttccccagagtagcctttctggatacttttttggttgtttgttgatgcagctcttaggatagtagcagaattaaagttgagctgagcatatgaaaaggatcagagtaccctgcaaagtg

SEQ ID NO: 201662 - DNA, 1026 bp, Homo sapiens
tattaacatctattaactcatttaatcctctcaacaaccacatgaagtcagtagattaccattcccatttcgtagatgaggaagcaaagaagtaactttctcaaggtcaactaccaggaagggtcacgtggatgtgggcttcggtctctctcaggactttggatccagtttacggtctcggagttcacagggctttttggagcccctggacctttgcccagccgcctggcttcctcctgggcccgaagacacctccatgagaggtgggaggtgcggccgtggctgtcgagggcaacccccaggagcctgagaggacgtggcgtgaaaccctgtgggttagagcgacccgcaccttccgtttcccggagccgcctgcgtgaatgttcttcccggctctgctgccccctggaggctagtggaggtaaatgcgtgaagtcggcgttttccctccttccgtttcccggagccgcctgcgtgaatgttcttcccggctctgctgccccctggaggctagtggaggtaaatgcgtgaagtcggcgttttccctccttccgtttcccggagccgcctgcgtgaatgttcttcccggctctgctgccccctggaggctagtggaggtaaatgcgtgaagtcggcgttttccctccttccgtttcccggagccgcctgcgtgaatgttcttcccggctctgctgccccctggaggctagtggaggtaaatgcgtgaagtcggcgttttccctccttccgtttcccggagccgcctgcgtgaatgttcttcccggctctgctgccccctggaggctagtggaggtaaatgcgtgaagtcggcgttttccctccttccgtgtcccggagccgcctgcgtgaactgtacttcccggctctgctggcccctggaggctagtgtgcggtcaactgcgtgaacgtcggcgttaccctccttccgtgtcccggaggcgcctgtgtgactgtacttcccggttctgctgggccctggtaggctactggaccgtacctgcgtga

SEQ ID NO: 201663 - DNA, 798 bp, Homo sapiens
ctagaggatccccagctctctctacctgaacctctctgtcttcctctgtttctctctccctttttctgtctacctctgtcactctgtttcttcctccctctctcccctcttctatttctgcctttttgtctctctctgtctctctgtccctctctctctccccatcctttctctcctcccatctcctcccatcagcactccctctggggaagccagctaccatatcctgagcagccttgtgtagcagcccatttgattggaaactgaggcctcttctgttggaacagccatgtgactgggcgtggcagcagaatctcaaccccagtccaggtttcccatggctgcatccataactgaaagcttgatgtttacttaatgggggaccctgttgtgggaagtcagggaccctgaatggagggaccaggtggagctgtggcagaggaacatgaattgtgaagatttcattttaatatggacatttatcagttcccaaataatacttttataatttcttatgcctgtctttactttaatctcttaatcctgttatcttcgtaagccgaggatgtatgtcacctcaggaccacgtgtgataattgtgttaactgtacaaattgattgtaaaacatgtatttgaacaatatgaaatcagagcaccttgaaaaagaacagaataacagcaatttttaggggacaagtgaagataaccacaggtctgactgcctgcacgggtcaggcaaaaatagccatactttttcttcttgcagagagcctataacagacgttcagtggagagat

SEQ ID NO: 201664 - DNA, 689 bp, Homo sapiens
ggccagagaaactgttctcaagagtgtgaattaggtggcagctactattttatggtacctcgctatccactttgtaagagtctccgagagcagagggagcacatcccctgacacctcgcacatgacagttgcttcatcagtgctggttgtgctcctgagaactcagcatggagagaggcctagtccccgctcccctgctcccaattgctctgtgactcattctcacggctcgcccttcaggttctcgttcttgaatttctcctgctccctcccactcccagtcctttgccatgtctcccctgtgcctggaacactttttgatgcaggtcacctccaggactctgccactttcaagttgagtgttccaggtaggtcactgaacccctctgagtttcagtgtctttatctgtaaagataaaaactagacataacctttggctgactgggagagttgggattggataaggcaagtactgagtccaaggcctggctctgagtccctgccccagggacagcagctcctgtgattttggttcatcatggtaggtccctccttctctctctcttcttgggaactgccaccatcctttctgttctttaacctgcttctccgccaataaaggcagagtggaacactctcttcctggctcctatttcctcgctgcctccaaagacaagcctgtcacctc

SEQ ID NO: 201665 - DNA, 378 bp, Homo sapiens
ctctcttttgcattaggcgcgttggagactctgactacagtgatggagaagaggacttttactacactgagatcaagctcaacacagactcagtggcagacgggctgagcagcctggccccggtctcaccttcccagtccctggcttcacctcctactttccccatcccagattcaagccgaacagaaactccttgtgccaaaacggagactaagttgatgacgccgttgagccgctcagctcccaccaccctctacctcgtgcacactgaccatgcttaccaggtgacttgcaggggactgtgagagcaatcactttgaccttgaccaaaaccaggggccatctggcctatgagtaaaagacaactcagtggaaaaa

SEQ ID NO: 201666 - DNA, 391 bp, Homo sapiens
agccatctccctaagatatgtggtttgtggcttgaaaagttttctaatgccttccctccctagaactaatgactcagaactgagaaagactgacacagagcttcatcttctgctggggctgcaaatgctctggagattgcccacgccctcttgcagccactgctagatgaagatgaaagcccactgcccagacggcatcagtatttcacctgctcagtattgcacagaaaagtcttggtttgacttacagcctgctcattgctggaaggtcacagcactgttttttgatggagttttgagtagtcattttttctagtgctttaaacagattaaaatgtggttttatgggtagtcatttcctagatgcttgtgaaaacaattctaatcctaa

SEQ ID NO: 201667 - DNA, 488 bp, Homo sapiens
cttactttttttattttgtgtagagactgggttttaccatgttgcctaggctggtcttgaaattctggactcaagcaatccacctgcttcagcctcccaaaacgctgggattacaagtgtaagcaaacatgcccggcccaaaattggtttttccacagagacgacaatctgaaattactactaattaaaatattttcccggccgggcgcggtggctcacgcctgtaatcccagcactttgggaggccgaggcgggtggatcatgaggtcaggagatcgagaccatcctggctaacaaggtgaaaccccgtctctactaaaaatacaaaaaattagccgggcgcggtggcgggcgcctgtagtcccagctactcgggaggctgaggcaggagaatggcgtgaacccgggaagcggagcttgcagtgagccgagattgcgccactgcagtccgcagtccggcctgggcgacagagcgagactccgtctca

SEQ ID NO: 201668 - DNA, 374 bp, Homo sapiens
ttctggttcttttatttacagcctatttgtgtctttgaatataagtatgtatgtagtatatagacaacatatactttgatgatgttttattttaaattcaccctgccttttaactggagaatttaatccatttacatttaatgtaattactgataaagtaaggtttacatttgccattttgctatttgttttctatatgtcttatgcctgcctttgttcctctgtatcaggtggggtccttcagggaatccaccacacaagtgaaataatgacaattgtttgtgatgaggatttgcaaaacactccaactactttatttcagtgaacacaagactgcactgggaatatggggtattagttttcaaggctcctaa

SEQ ID NO: 201669 - DNA, 536 bp, Homo sapiens
cgtggggagccccagaaatgcaccggctctgggctgggctctggcagattcatatgaatgggagagtctctgtctggccagcccttctgttttgttttgttttgttttgttttgttttgttttgtgactgagtctcgctctgtcacccaggctggaatgtgttggtgtgatctcagctcactgaaacctctgcctcccgggttcaagcgatcctggtggctcagcctcctgaatagctgggattataggcgtgcgccaccacgcccggctaatttttgtattttcagtagagacagggttttgccatgttggccaggctggtctcaaactcctaacctcaagtgatcctcccgccttggcttcccaaagtgctgggattacaggcaagagcccccgcgcccagccccttctgtttttaagaaagataaacccctaacctctgaagagcttttgcagtgacatgggcatggacaccaccaggtctcgctgtgatgaggtgggtggaggcttctcccttcctcctccgccctttcttc

SEQ ID NO: 201670 - DNA, 574 bp, Homo sapiens
gaaaggtctgaaaactggatatgatttcatcaaaaaacataatgcaacatgacatttctttcattctgtacagagtggagaagaaaatacctgttaaaaaatattgcaatacaggaatatgaaatacagaacttctcttccttagaaaatttacaccagactaagactcttaagttattataacaaagttagactgatttattgaggatgaggttagtgcctggaaagtaatacagtgttacaaattagtttttttagatgctgtcaggttaggctggtggtgtgcgcccatagacccagctccttgggaggctgaggtgggaggatcctttgagtgcaggagtttcggtacagcctgggcaacacagtgagacccccatctgaaagccattttttaaaaatgttgtcttgaggagcggccaagatggccaaataggaacagctttggtcggcggcttccagcgaggacaatgcagaaggaggatgacttctgcatttccaactgaggtacccagttcatctcaatgggactggttaggcagcggatccaacccacagaaggcgagcagaagca

SEQ ID NO: 201671 - DNA, 272 bp, Homo sapiens
cagtatagtatagttgctagcatagctccaggttaggataagctgttggaacatgagattgacattccacctgttccttcaacacaggggcaaagtacagcatggttaagagtcggatttctaggccagacagacctggctaggaatcctaattctgccacttattagctatgtaacctcgagcaagttatttaacttctgtatgtgtgtttcttcatatgctaaatgaggataataatagataccttacagattttgtatgaagattaaat

SEQ ID NO: 201672 - DNA, 281 bp, Homo sapiens
aggattgcctcatttcacagatgagcactacaggcctagaaaggttaggagacttgtctaaagtcataaaactagttagtgcacagctgataccagaacaaaaatgtcccagttcctggtccaatgcagaggtaatagatatctaaatataataaaatatttctctggcccctggtcaaatgcagcaacaaaaggcctttggaatccctttttctccaatcaatgtcctgaaggtcctccctttcattttctctgcacaaaagttggggtggggtcttcaa

SEQ ID NO: 201673 - DNA, 293 bp, Homo sapiens
ccccacccccccaccccattgtcacttgctcacttggcatctttggtgacattaaccatgtaatgcgttgcagcaaattgctattgcctactcttttccccagcaaactgaaactcagctccatacatgtgtacagcttccttataacactgggttaatgcatagctgggttcccaattcactgttgatggagggttgggggtatgggaaaaacacaatgcaaatattttctgtgtttcattaaattaaaagtctagtgggacttggccataaggaagatttatggcaaactg

SEQ ID NO: 201674 - DNA, 492 bp, Homo sapiens
ctctaccaattccttgttttaaatgggaatacactgtgctgggtgccataaggatactaaagagttattaagatgtagtccctgctattagggggcttctaatctacctaagggcattataatttaaagggtaacatatatttattagtttaacgagagagatgcctataataaagaagggctaatcaaccagttcagggtaggagaaatatatctgaggcaattgtgatcaaataagaatttagaatgtaaataattgtaatggcacataataaagtaatgcagttgagtaaagtcctcacttaatgttgtggtggataggttcttggaaactgcaagtttaagcaaaacaacatgctatataacaaaactaattttaccatagactaattgatataaagaagagttaaattcttatagcatacagtatgtcatttcacttaaagttccagttttcacaaacctgttgatataaagtgaggtcttactgtc

SEQ ID NO: 201675 - DNA, 460 bp, Homo sapiens
cacacacacacacacacacacacacactaaacaggcatgttttgcaaagactcaaacagaaattgaacaactgaaacttaaataaatttaatatacagtgtatggtttaattattaaaccaagttaataacaacaggattagtgaactagaatactgagatgagtaaataaaagaactacagaaaaatgaaatgatcacaatacaaaaatgagtatacatgtacaaagaataaaatgaaatgaaatcaaatacattggtttcactagcttacatataaataacaaatcacattaataacaaatatttataaatttctgaaactgaatatcagatgggaacccttgaatgcagaagtgtattgtgattaatagtggcctaccaataaaaaatactcaacagaaataaaagtcaaactgcataacagcaaagaaaagaaaaaattttaaagccataagagag

SEQ ID NO: 201676 - DNA, 491 bp, Homo sapiens
  misc_feature (335)..(335): n is a, c, g, or t
tgagcttttggggagtcaggatgctggcccatgggtattaagtcaggtaaatcattaaagctcccactaacccattcttcctagtaggggcttgttgggaagtgagtaggcatggcacatgggtgagagtgccaggccagggagggtcagctcatgtgagtgccctgcgctgctttgggcttctttgctttgcttttttgccttaggcttcctgcctacctttctgaatttgggtcacccttgggatagtttgaaagggacattcatgtccattaactccaagggtcctcacaactgccctgtgatacaagttacagtgacctcatggtccaatnaaaaaatgactttgccaagatcacacactgagcctcccaccccaagacatgctgccagcctttccaggatgacattagagggtggaaggaacccagagcaggaggggccttccagccatggcccagccctccatttgacaaatggggaaattgagt

SEQ ID NO: 201677 - DNA, 604 bp, Homo sapiens
ggcgcggcaagatgctggatgggtccccgctggcgcgctggctggccgcggccttcgggctgacgctgctgctcgccgcgctgcgcccttcggccgcctacttcgggtaggtgccttcggcggccggcgcgcactggtgggcgggggcggcggggccggggcggggtcgtccggagtccccgaggcacccggggtggctggggccggggcgcggcggggccgccgggttgcctggcgctgtttgtttgcggcgcgcgcgtcgctccgtccgctgcgcggcacggctagagaggcgggtggacccgtccggcttgcgccgggccgcggtcctccgtgaccgcagagtcgtcgtcgtcgtagtcgccgccgtgagcaggactgcctcgcgcttagggactgggatcaggtcccgacttccttgggccgccgtgtccttgccaaaaggctggagcctgagtcctcagcccctggccatcgcccacctagcagcttccccccctttctcttctcgagaagttaatttaacaataacaaaaatacgtacaaaatccagatgttcctcgcgctgagccccaaacggagagagagagagaaagagagaaat

SEQ ID NO: 201678 - DNA, 1631 bp, Homo sapiens
ggcgcggcaagatgctggatgggtccccgctggcgcgctggctggccgcggccttcgggctgacgctgctgctcgccgcgctgcgcccttcggccgcctacttcgggctgacgggcagcgagcccctgaccatcctcccgctgaccctggagccagaggcggccgcccaggcgcactacaaggcctgcgaccggctgaagctggagcggaagcagcggcgcatgtgccgccgggacccgggcgtggcagagacgctggtggaggccgtgagcatgagtgcgctcgagtgccagttccagttccgctttgagcgctggaactgcacgctggagggccgctaccgggccagcctgctcaagcgaggcttcaaggagactgccttcctctatgccatctcctcggctggcctgacgcacgcactggccaaggcgtgcagcgcgggccgcatggagcgctgtacctgcgatgaggcacccgacctggagaaccgtgaggcctggcagtgggggggctgcggagacaaccttaagtacagcagcaagttcgtcaaggaattcctgggcagacggtcaagcaaggatctgcgagcccgtgtggacttccacaacaacctcgtgggtgtgaaggtgatcaaggctggggtggagaccacctgcaagtgccacggcgtgtcaggctcatgcacggtgcggacctgctggcggcagttggcgcctttccatgaggtgggcaagcatctgaagcacaagtatgagacggcactcaaggtgggcagcaccaccaatgaagctgccggcgaggcaggtgccatctccccaccacggggccgtgcctcgggggcaggtggcagcgacccgctgccccgcactccagagctggtgcacctggatgactcgcctagcttctgcctggctggccgcttctccccgggcaccgctggccgtaggtgccaccgtgagaagaactgcgagagcatctgctgtggccgcggccataacacacagagccgggtggtgacaaggccctgccagtgccaggtgcgttggtgctgctatgtggagtgcaggcagtgcacgcagcgtgaggaggtctacacctgcaagggctgagttcccaggccctgccagccctgctgcacagggtgcaggcattgcacacggtgtgaagggtctacacctgcacaggctgagttcctgggctcgaccagcccagctgcgtggggtacaggcattgcacacagtgtgaatgggtctacacctgcatgggctgagtccctgggctcagacctagcagcgtggggtagtccctgggctcagtcctagctgcatggggtgcaggcattgcacagagcatgaatgggcctacacctgccaaggctgaatccctgggcccagccagccctgctgcacatggcacaggcattgcacacggtgtgaggagtgtacacctgcaagggctgaggccctgggcccagtcagccctgctgctcagagtgcaggcattgcacatggtgtgagaaggtctacacctgcaagggacgagtccccgggcctggccaaccctgctgtgcagggtgagggccatgcatgctagtatgaggggtctacacctgcaaggactgagaggctttt

SEQ ID NO: 201679 - DNA, 310 bp, Homo sapiens
ttttgttcttctgaatcccattagcctcctagttctctgctctgaaccacagactcccctccctgttatctgggttagattgactgttggttgactgatgactgatggcattgatgtaaaaactgactgtgtggctgatccctgggagactgtatcgtttctttgtctcatactctctttgccttagtgacaaactgcttttaaggtttaatttgtgaacatttcgatgccttcatatgtattttttgctttaaaattggtatcattggatgattctgaattctaaactgagcccccagacactgaaagg

SEQ ID NO: 201680 - DNA, 674 bp, Homo sapiens
gtgtttgcatgacaacgaaaagcctaatggcgcatttctcagaacatattgccattattaagcaatgcatgactgtatattcaatgatgtttatttactgaatggattaatgatatcgcttgaggtatgaagtaacatatttgagaactccaaaaacaaaaacattctacaaaaatgtaaggcattgccattttttgtttagaatgcttcctcttaatctcttagcagcatttaacatagttgaccactttctccttaaaacacgatcttctcctggtttttgagacaccagtttctcctggttttcttcctacctcaagggcctctcctccttagcctccttcctggctgtttctctgctgactctgaccctggtccccttctcttaagtgccttcatggatagcactgaacaccatctatgtgccagatacttccaaatctgtatttttagcgctgacctcgccctaaaactccagactcatacatacagttacctgtctgacatctccacagggatgtctatagacttatttgttgtttgtattcttgtgtgtagtcttttttcttgtccaatattagaatctcctttcagagtttaggaagtgtcacactatgtaagaggctgcttctcatttgagaaatctaaaaggccagatatttgtttccccagca

SEQ ID NO: 201681 - DNA, 395 bp, Homo sapiens
aaacaggcagctaagggtaggaggcagggtatcagtcagcttgaaactgagtacctctggtatggcaaaaggaacctgatatatgtcatcctctgtaaatggctattcccaagaaagggaagccatccctgattctgtgggagaagcagccatatttaaccacaactacgttgccccatatgctcaaagtagcaagcatacttctcagatatagcttcaactatattgaagcttcacaaaaacaaaatctatagtatgttttggatttaatatgctttaactttttttttgttttttttgaaatggagtctcgctttgtcgcccaggctggagtgcagtggcgcggatctcagctcaccacaagctccgcctcccaggttcacaccattctcctg

SEQ ID NO: 201682 - DNA, 245 bp, Homo sapiens
acccaatgtgaaaatcatttcaagaacaaggtgaatacagacattttcaaaacaacaaaaactacgagcggcctcccaaagtgctgggattacgggcatgtgctactgcgcccagctgatttatttttattttttcttgctttggatttattttgttttgaatccaggggttgatagttatcattagttctggaaggttctcacccccatatatcttcttatattacctctgcttcatctacttt

SEQ ID NO: 201683 - DNA, 279 bp, Homo sapiens
aattatgcaagcttggggaacttcgtgaggaatatgaaagcttgagaaagctgagagaagaaaagttacaagaggaaaaaccctctgaagatcaaatccacaagctgttaccagaggatacagaaacagggaaaaggaaaatggatgaacagaaaaaaagagatgaaccattagtactgaaaacaaatctggaacgttgtcctgcacgtctctcagattcagagaatgaagaaccttctcgaggccagatgacacagacacatcgctcggcatttgttt

SEQ ID NO: 201684 - DNA, 360 bp, Homo sapiens
taattttataattattatgattcacccagttccacgggacaaaaataaggaagaactgggtaagtgtatatatccatcctgatgttctaaaagcattctaattcaggtttttttccatttccatattaaaattttcatctacaggattctataagaacatcacagtcaggagtgctcttttgtcttcctctccctttaattttgtaatacatgaaaaagtctctggggccaggcacggtggctcacgcctgtaattccagcactttgggaggccgaaactaaaaatcttaccaacaactagtaattctatatgatgcttttgctctaacctgaaattctaaataatgcctttgtttacac

SEQ ID NO: 201685 - DNA, 264 bp, Homo sapiens
atgaccttattttaaaccctcagggctaaggttccccttctgtcaaagaagagcagtaacagtacctttcttatcattgttttgaggattaaatcggataatgtatgtaaagtacttagcacagcactaaataaggcattaaataaaagacaaaacaaactgcctagcatcttgattacaactctatatagatatatgtacctataccaaccaacgatagaaagatcatgaagagatacagtcaaacagagtaagacttattat

SEQ ID NO: 201686 - DNA, 540 bp, Homo sapiens
aggttgacagtagcttatcgtgtaccctctttcctagcagcacatttgcactctattatgtgccaagcaataggactcagataccaagaagagtgagacagtcactagactaatatgcctcagtctagccaagatcaggaagtaaatgcaaaacctcactgtaacctttgaaagaaggacacacacacacacaaggggcaggagtggagcacagagaatgagaagctctgcctgggatgtttccacaaggcttcacagagagagcagcgcctgagcagggtcgcagagggcaaccaggcatttgcagggcaggtgaagagaacacacagcatgcacacagagactcaccaagtgaagcatgcagaagctgccaatcactcaaaatgctggggtgtaaaagacaaagcaggaggccaggcacggtggctcgagcctgtaatcccagcactttgggaggccaagaaaggcggatcacctgaggtcgggagtttgagaccagcctgaccaacatggagaaacccggtctgtactaataataca

SEQ ID NO: 201687 - DNA, 178 bp, Homo sapiens
agtcattttatccagagcctgccatgggcctccccatatgggtatcaggacatgaaaaagttgcagtcccttcccagaggctcttcctatctggacagttttgtaaatgacagttgatattataaaatagtgctttttatgggcacggaggccggtctcctagaagagagcacgtttg

SEQ ID NO: 201688 - DNA, 612 bp, Homo sapiens
ggtgtttgccactatgcctggttacagtctgtaatttctttctttttttgtgaatatctgttattttactcaggcagatgcttgtttgcaaattaagttgggatatattccctctttttctgttttctggaagagtttgtgtagaagtgttaatgctttttctttacatatttgatagcatttatcagtgatgtcatgtaggcctggagttctctttgtgggaaggttttaaactatgaactttatttaatagatctgagagtgtccaggttatctatgtcttcttgagcaagctttgattgtttgtattttcaaagaatgtgcccattttatctatattgttgaatttgttggcatgaagttattcatgatatatccttattattcttttaatacctgtaggatctgtactcttttatacttgatattggtaatttgtgtctttttctatttgtcttgatcaatctggctggtggattatccactttatttatctttatacttatttttaaaaagtcagcttggtttgattttctctattgttcatatagttcatggacttctgttcttttttttttttttttttgacagggtctttctttgtcacccagg

SEQ ID NO: 201689 - DNA, 385 bp, Homo sapiens
aatttgatcattaaatatgtctgtgtatttaagaaatgtcaaaaaccactattttagtctttaggactgaatatgtctcatgtgttacaggacaggattatgaatttgttgtttgcctgcctctgaactaactggcaagaatagtcaatgtcttttctacagtttatcaccctataggtcatcacaggtggaaatgtgcgtgcgtgtgtaaagcttagaactttaaaagtagaactttagaagtcctatgtctatctatatttatcttcaaaaagagacatagaaatggacgtaggaatcagtttggagagaggaaatgctgcttttaaaatgttgctgaatgttcagaaaaggcatgccaataaacttattttactggaaattc

SEQ ID NO: 201690 - DNA, 785 bp, Homo sapiens
tttgatgttccattccatccctgcccaccgccatcatcacaccccctcaccatcacccttaatgttaaacagaagtatatccaactcagatgtgaaatcacatccatcttctaattaaaaataaagcagctgtgaaataatgatattctttcaaaataagaaaatggtgattagagcagagctgattgggttgagggaaagcaggttacttaattatggttattgtgtgtctgaatttttatggaaagaaaggaagtattgtttaggacgatgaaccctccaaaacatagaggggtggcattgtgtagaagtactctgggttgtgtctttgtcttttcagctgcttgtcttgggtcaccagtcttgcctattagcatgtgacgttgatgagaacttagcatgattcaaaaagctaagccaccaagacgatgggtagtgtttgatttggagtgggttttatgactactgatcatttcaacttcaaaacaaccagagctcatattctttagagagcaatacattttttttgacaagtaatgtcaatagtggtgagggaaacataataggttgtttagtgtccatgatttcattcatttattttttcctgcttatctctgcaattcctgctcctcctcgtccctggaacagtcttttcctttgtgtccactcacaagctcctactgtttatcccccatagccatcttgagcatagaaatcagctcccctcactccagttctctgttaaattgtttaccttttccttgatgctgcatgatacctgtctg

SEQ ID NO: 201691 - DNA, 246 bp, Homo sapiens
gtgttcaagtctagattagattaacaaaaacatcaaacagagtttcaaggaggagggagcagtcagtagtattacatgttaaatgagacaagtaagaagaatgaaaatgttcattggatgtagtaacaaggaagaggttaagttttgtggggaggaagctagattgtggtgcattgaggagtgaatggaagatgaagtggaaatcgcattttacgatttttttttgtgaagtttagcttgaaggga

SEQ ID NO: 201692 - DNA, 524 bp, Homo sapiens
tattttgtttaatttttggtctccacattagaatgtaagttccatgaggacaaggatttgggtctgttttgttcttggctgtatcctcattgcctagggaagtgcctagcacttagtaagtcctcagtaaatatatgaatgacttaatgaacaaatgaatctttccctgcagggcagctctacattctgtattttggtataaaaattggcttagttagaaatggctactcacacacaactcaccccttggctcaagccccacgtctgtactctgcaaaaggcctgcagccactgaatggttgggcacgaaggcaggtttccaaacttaatagagtggtgccctttttgaaggaaacaagacatcaaaagcctctgtagtacactcggagtcctcatgttgagaaactttagctaatgttgtatatttaccctaagaccatcttccatttgacaccaaaaaaagaggtaactggtaagcatttttaaagattatcactaaaataaaagtaaatttaaaaatcttt

SEQ ID NO: 201693 - DNA, 405 bp, Homo sapiens
atcaagcaaaatgaggactaaaagtatccactagaattgactaaatcccttggatcgattgactgtagcaggaagaaccgcagacaaaacccctcagacaccaggttaaagaaggaaggggtttattcggccaggagcatcggcaagactcctgtctcaagagccgagcaacccgagcgagcaattcctgtcccttttaagggctcacaactctaagggggtctgcatgagaggatcgtgattgattgagcaagcaaggggtacgtgactgggggctgcgtacaccactaattagaaaggaaccgaactggacaggggtcttcacggtgtctttttttttttttttttttttgagacagagtctcgctttgttgcccaggccagagtgcagtggcgagatctctg

SEQ ID NO: 201694 - DNA, 344 bp, Homo sapiens
gccatctagcatctatttctagccttctccattccatcaaactcccagaccccccacacttccttcagcaggtgacgtaatctcttacttcaggaagagaggcagcccactgttatgctataatcccacaccaactttcttttccctttccccatttgaccctggaagaggtttccttccttcaccctgacactgggccagtcaccctcccaccccctgaggcatcacagggactctctgctggctcatccccccatttccccacaacatcattttcaacctactacatgttcttccacattgaaataatcttcccttgaccctcatctcttttctgtgatcac

SEQ ID NO: 201695 - DNA, 359 bp, Homo sapiens
caggaaatgcagcataactagccaaagggaataatgtgatagtttcccattacttttaaaatagttttctcagctgggcatggtgcctcatgcctgcaatcccagccctttgggaggcagacataggaagatcacttgaggccaggagttcaaaatcaggctaatccacacagtgagacttcgtctctacaaaagaaaaattaaaaaattagctgggtgtggtggtgcatacctgtagtaccagctactggggaggctgagtcaggaggatcgcttgagcctgggagtttgaggctgcagtgagtaatgatcacatcactgcactacagcctgggtgacagagtaagactcagtctgaa

SEQ ID NO: 201696 - DNA, 468 bp, Homo sapiens
agaagaaggagccgtattgcacaatgaactaccaatcatcaatccaggctctcctgtcgcttccctacatcctctaccctctccaaacttctcccctctcttgacttagcacctccgaaaaggtacatcttggcttaaggaagggagcttctgacttaagccttgtaaaaatgtgctgagggatttgtttctgtggcctcctttttgagctgagaagactcacaagtgatgtgaatggcaaagcttggcttgaagctgttcccttgtgcctctgtcacttcaaggcctgggacccgattcgatctaagccagttcggtctggcttcccctgaccatatgggtgttgggtaagaaagagctatgaggaaggtcatagaaagagtcatgaagaaagatttgcacagcccatcaggacccagggagctttgcatcttgaagaaaaataaagcacactgaaatactgaatta

SEQ ID NO: 201697 - DNA, 328 bp, Homo sapiens
aggaatataaaatggtctcagtaagtattgtatgtgcagtgtcttgctgagattacatcttaataaaaactgttgaactgttcattaaattttcattaaagttctgtctagatggccaggcactgtggctcatgcctgtaatcccagtgctttgggaggccaaggcgggagggcccaaggccaggagttcaagaccagcctaggcaacatgacaagacctccatctctacaaaaaatgaaactaagaagttctgaataggaatgaaagggtggtaggtgctaggagtttgctgcttcttgaaccatagcactttgctaagtttaaaaa

SEQ ID NO: 201698 - DNA, 413 bp, Homo sapiens
gctgggcagggttaaggcctccccatggcctggactgccaggttctctgatgggaatgtatatcccagaggcagtttattcccctgtcatactctcaggactcctagttttttgactggctcacggtgtaggctgcagcccactgcttctttcaaacgtgtgatttctttcagttttcctgttaagttcctgtgttgcttcttggaaaaaagttcacaatgtgaatctcttcttactattttgtctttccaagtgggagaggtatgctaacaatgacttcaatctgctgtcttgaaaaaaaaaatatgtgtgtgtgtgtgtatatatatatatatatatatatatatatatatatatatataaaccttaacataggtatgcatgtataagaataaacatagcataaatagtgt

SEQ ID NO: 201699 - DNA, 476 bp, Homo sapiens
ctgtaatactgtgcttatttatgtaggaactgtgatctcgtctcctccttttcccatctccccctctctaccttagtttttccttatagtctcaagctgaaaacaatgaccaggtgcctaagagataagaatactctttcttttgaactcatggcattagcagtgacctggatgagattggaggctattattctaagtgaaatagctcaggaatggaaaaccaagcattgtatgttcttacttataagtgggagctaagctatgaggatacaaaggcataagaatgacacaacagactttggagacttggggaaagggtgggaagggggtgagggataaaagactacaaatagggtgcagtgtatactgcttgggtggtgggtgcaccaaaatctcacaaatcaccaccaaagaacttactcatgtaaccaaacaccacctgttccccagtaacctatggatataaaaaaattaaa

SEQ ID NO: 201700 - DNA, 394 bp, Homo sapiens
gttcgcaatgaggattagaggccctcacatgcacctttcacccactaagttgacacagtttgaggaagtgaattttagtaacacaggtggagggcctaggtggggatacaaacattctcatgcatcgctaggggatgtcaatcgatacagcttgttttggaggtaaaaatctgatattggattttagtttgtcgtaccttctgacccagaaattctgcttctaaaaatctattctaacaaaatgaagtatgtatgcaaagatttagccagaaggacattcatcataaccttatgtataatagcaaaataaaacagtaacatccaaatactcaagacagaaagctattttactaaatattggagagggagaccctgtctcaaaaaaaataaaatt

SEQ ID NO: 201701 - DNA, 429 bp, Homo sapiens
gaaagatgcaaatgtaacccaagacgtttatacccagcccacacatttctgaacaggcaaaactcaaggaatgttgctcttgtgagctcctcctaaggaaaatactcaaaggtgaagctcagccatccaggatgggagcccaagctaatagtctggcacagcagagctcccgggatggctgagcaagggctcccacgcctgcgctcagtgtagaactcacgcctttcataccctgggggaccattccaatgcccccttctctatacaagaaatgattttcagttaataaccatgttctcattaataattattttcttcattacttaattttaaaacaaaaaattaacttcaaattttaaaaatattattcaatcaaatgaaatatttcatgtaccaattaaaagttatactgattaaaaaaaactacac

SEQ ID NO: 201702 - DNA, 368 bp, Homo sapiens
taatagagcaggctaatagaggaaaacctggagacagactacctgggttcaaattctagctttgctatttatagctgtatgttattggatactctctgtgtcttagtttcttcatttggaaaatgggaatagtaatagtattaaaatcataaggttgttgttaaagactaaatgaattattacaatgcttggtatatgaagagctaggtcaacaaatgtaaggtattttcacaaagaagataatctagtttggatgggtcaggaatggcttcagtgaatgccagacatttgaccatcagtattcattaggtggatgaggtcagaataaagatgagagagggaaatagtacatttaaaggcataggaac

SEQ ID NO: 201703 - DNA, 312 bp, Homo sapiens
acctctcaaggtgctgggattacaggcatgagccaccacgctcagcctttgaataggtcatagatttcttaatttcatttattgtatttttaacttttagaatgtctgtttgctctttttagagtttctatttctcttaaatttgatattgcatctaatttgtacatcttttcctgtgtatttaaaaattgccattttaaagttcttttctgctataatagttctaacatctgtggttctgctgtgtgggttttcttttgattgttttcctcttatgttatcctacttctttacatgtcttaaattttttat

SEQ ID NO: 201704 - DNA, 675 bp, Homo sapiens
tgggagaactgcttgaggcctggagtttgagaccagcctgggcaacagcaagatcctgtgcctgtgaaaattaaaaaaagaaaccacacacaaaaaaactggcttagtggcacactccctgtagtcctagctacttgggaggctgaggtgggagaattgcttgagcccagcagttcgaggctgaagtgagctgtaatcatgccactgtactacagcctgggtgacaaagtaagataccctatctctaacaacaaaaaaagttccacgattgatttcctctgatgtttctaatgataatggagaaatttaaaaattctttcttggtcattttttagaatgatattacctgatcctcttttaaaaaaatcttttcatggccaggcacggtggctcagactgggtgccatggctcatgcctataatcccagcactttgggaggccgaggtgggcagatcacgaggtcaggagttcgagaccagcctggccaacatggtgaaaccccgtatctactaaagatacaaaaaattagctgggcatagtggcacacacctgtagtcccagctacttgggaggctgaggcaggagaatcgcttgaacctgggaagcggaggttgcagtgagccgagatcctgccacagcactccagtctgggtgacagggcgatattccgtctc

SEQ ID NO: 201705 - DNA, 474 bp, Homo sapiens
agaatatttaaatatcctgatcaattttttttttactatcaatgaagtggaatgtaataaaaatgtgagggcattttaatagtataatctttattcaaaaaacataatatggtgaagtaacctcattaactattagctgtatgctttccaacccattaccgttttcctgctttttaagtaattttcctcatcaggtagaatgattgcctttagggaagctagtccttgtcaagaactgtgaagggcccgcggtgttagcctgcatgcaagctgacaagttagccttctcaactttcatacaagctggcagaagacacatgaagggtccaggcaaagcaggcagcatgaattgtgtgttcacgtgggctccccttgtccacccctgaatcccaaaagtaatgcaaagtaggccaacttaatggtgtgcatgtactggatttgcatgacaactgagagaccttgagtgtaagaaac

SEQ ID NO: 201706 - DNA, 428 bp, Homo sapiens
tttacactaccgagtcagtatttttttattaaaaataatagcagaggttttgtgcattcctgctgcttcacgagccatctgtcacagacaccttgggcaaagaagcttcaaaatgcatgaggagcactgatcagctgcaaaaaagaaagaaagaaagaaagaaagaaagaaagaaagaaagaaagaaaaagaaaaagaaaaaatccaagaaagagcttgtctcttgtttttagacagatgagttttagcatctcatctagcatttcccctagtagggaccatttttacaagtaatttaattgatcttattaggcttggtacaggaatcagttatctttatggttacagtcagccaataggcaaagctagggagtctgaaattggaagcagcacagtaaagctaagcaaaatcctggagaattattgaa

SEQ ID NO: 201707 - DNA, 769 bp, Homo sapiens
ttctcttgaaaacaatgagagagataagccttatcagtatgataaagacgaacatttcaacctttaaatcgagagcatttcccaggggagaattatagatgaaagaatctgtaaaaaactgcagagcatgaatttaagaatcaatctccttaaagaaaataagattacaaagagctagattcatttcttaccacactagtaaaatgattataggaagtaattctgtatctaaactcatccattctttcaacaaatgctttttaagtatccattgtgtgtcatgcactgctctaggaatcaggcatacaataatgtcaagggaacctacataataaaaggaagatggggagaaaaaagtgtcagatagctcagtaagcaccagaaaagcaggatgagtgggttgaaaattacagaatatgttattttagaagggctaaccaggaaaggattgtctgaagaggtgacgttttgaaaagtagaaatgaaataaagggtagatacaagcatgtgaatatctggaaggaaatcaattcagtagagcaatcactcagtgcaaaagctgtaagcataatcgttcatgtgagaaacagtaggggatgagagaactagcggaaagttgcaagaaataaaggtggagaggtagcccaagtgccaaacacgtgggaactctgtggtaacccatagaagcagcttttactcagagtcacctcagaagccactggaagatcctaagtataaaaaggatccagtctgatgtttcaaaaggaac

SEQ ID NO: 201708 - DNA, 377 bp, Homo sapiens
accagggacgttattagctgattcaggaaggcgggaccccggcacttggttagacagaacaagctggcactctgacccgcagtgacccttcagaatctccaaggggcagctctcaggtgcccaagtcagtctgcaccagtacagacaggtgcccctccattcagctccttctcaaggaatggccgagtgccggtgtcagaaggggtttaggagtgagcaggactgaaacagtctctgccttctgagagcttccagtgtaagtcaggagacatatactaaacctggaaacagatatgtaattgcaaatactgtagtgctgtgaaggagggaaaaactggtgcttttagagaatcagagggaggccctgttttcctttg

SEQ ID NO: 201709 - DNA, 380 bp, Homo sapiens
ttaaacagacatcccagcacagaaggctgtgtaaatgacaaaagaaattcctactacatattttggcagtgagggatgaatatctatatctgccagggtattgtgtgaagtggacagggtggagagaatagattgggagaagggattccagaaggtgataatgattggatgctcactttctcagtgctaacttgtaccctgaaaattcttattattacccctgactttgttaacatctcagtatctcatttttttacaaccacttcccttgtctcaggcctgatggtgttaatagttgacctcattttgctaaaatctaattgcagcacacagactgggaattctgccatcctctggttcccccagtcccagccagcttc

SEQ ID NO: 201710 - DNA, 464 bp, Homo sapiens
tacatcactttctcagtgagtccttcctgcccatcctaaccatatttaacacatcataataaaaatctgtggggcagctaaaacagtgcttcgagggaaatttatagtattaaaatgtttaaatgttaccttagaaaaggaggaaggaaggtctcaaggcaatgagttaaagcttccaattttaaaactagaaaaggagcaaattaaacccaaagcaagcagaaggaagaaaacaaagagtagaaaattaatgaaagacaaattaccaaagctcactcaagaattaaaaaaaccctaaatatccctgtctattaaagaaactgcagtcatcattaaaaaccttcccacaaagcaaattccaggcccagctagagtttaacagttaccaggcttcactggtaaattctcccaaacatacaaagaactaataccaaatatacacagatttttccaaaaaaaaaaaa

SEQ ID NO: 201711 - DNA, 380 bp, Homo sapiens
aacatgattaaaatattttataaatggaagatgcaaaaattagggtaagaattaaagaaatgaatttggatgccctatttatttatcaatctagcaattaccaattaccaacacacatgacactgttcattcttctgtattaagagagaaatgccttattcctaatattctgctagagccctgccttctgagggaggaagcacaggcctgctctgcacagactgtcagctggtgtgggaagtccttgtgagcctccttccccagcctttgatcttctcctctgatcgcctctcttctgtgttcaagctcatctaaaggctgcatttgctctcagatttcttgctttcatgttctgcttcctctcaggtttctgggaatag

SEQ ID NO: 201712 - DNA, 189 bp, Homo sapiens
gggcgacagtgtgagactccatctcaaaataataataataataattgctgacataccaggccccaatctcataattccaagtggaaacatgtaaatgtggatgcatgaagcaaaatgagatgtgtacaaggagataaggtgaaattacaaatattgttctgaggagaccttctgaattccaagcacctg

SEQ ID NO: 201713 - DNA, 134 bp, Homo sapiens
cagccaccacccaatgtctcccagaggacagcctcccaccaagagctgagcccccagctctggcctcctttctgtaactagtctctggacacagccactctgtgttccacagcatctcaaactcagcactttct

SEQ ID NO: 201714 - DNA, 640 bp, Homo sapiens
ctctccccataagggtgctgtgtctaagaaggcatggaacccaggccattaacatctaaggatgtcatcttgttggagggtcatggctttgtgtacatgtgtgaaattttcaaacacacagagaagcagatagactggcacaatgaactccaagtgtccatcattcaatttcaacaaccattagctttctgcctttcttgtttcatctggcccacctccccatacacacactccatccctgtggatcctctgtgggtttgttctagattcccggatagagtagcatcactcgctttctcgccactttcttccctagtaggcactctcatctctcatctgttataccagcagagtcctcggggggaaataaacttatttcaataaagatttctgattgcaacttctaagctgaaacttgacgatccagccttctggaattttcagcatctgaaagatcccagatgggcttgtgatcagaagattttagccattttttccctcactctttcttttttactttggagattttgatgactatttatcctgagtgggaggtatataaactaaaaaaataagcttcaatttggaggtttcaccataaatttctttgcaggcaccaggaggatttcatagcacatgt

SEQ ID NO: 201715 - DNA, 476 bp, Homo sapiens
cttcttttagcatcctgattcctgttctgtgggttcagtctcatcttatatctgtttgaaaccacttactaaaattttgtgaaggttttcttttgtgacctgcattacctagtttcctgcagttctccatgtgatctgcttaattggtttccatcttttgtattcaggcctttgttccagcgtgggtgcttttgatgtttgacactaaatctgaaatggaagctctgtatctgggcagaatctgtcattaggtgggctctatcttgggtcagatatagcaatagccccttttgagggagcatttgttttgagggtctttcatctggagaataaatctctcctcttcagcttggctggttgttgctggtggcccacggaggagatatgatcaacttttccttatccaagtgtctgcacagtaatctcaatagtatttgacccatgtgaattcatctattcacttactcatgttggat

SEQ ID NO: 201716 - DNA, 499 bp, Homo sapiens
taatttgatttctatgtttttcattcactctttctggcattctgttaattccagcatttgggctctctggactgttgtcctccagttttcccttatttattttccatttctgtctttttacttcattttttgagacgatttccttagcttaatttccagatctttacggagtttttaatctcatctaatatttttaatttctaagagctatcttttgggctgggcgcggtggctcacccctgtaatcctagcactttgggaggctgggcaggtgggtcacttgacgttaggagttcgagaccagcctggccgacatggtgaaaccccatctctactaaaaatacgaaaattatctggacgtggtggcacacacctgtaatcctagctactcgggaggctgaggcaggagaatcacttgaatccaggagacggaggttgcagtgagccaagattgcaccactgctctctaatctggggaacagagtgagatgctgtctcc

SEQ ID NO: 201717 - DNA, 439 bp, Homo sapiens
ccactctttgtttgatgctctcactgtctgtcttgcattgcttctttcccaagtgagagattagtgtcagtgtctctatcatgtagactttctgaactcagaattagggctgatagcacatccttgggagaataatccaacccttactcttctctagagcctatcagctatgaagaaatagtctagtccaaaaagagtccttgagtgttgtcttccttgacataagagtccttgagtgttgacataaacagaggtacaatcagagggggtcaagaacacttttcctagcaatgatgcggccattttagaaaggagggtgttaacatttggaaaaaataatctgctgattatattgaatggcgtgatgtccttgagtggatcgtcttccaagtactgtttttgtacctaatcttaattcagtacctcgtcaaacctgcat

SEQ ID NO: 201718 - DNA, 456 bp, Homo sapiens
gaaatactaagaacactgcaacaaaccaagctacctacaagctgtagatctctgattgatatgagagagtcagattgtcattagatagaatgagacattaaatattttaacttgcgaaatattatttggctgtctttttttgagaaataatgaagttagtttcaaagttctcacttttcttgatctgtgaaatgactgccctatggtagtctttgtaaggaggacagagctagaagaattaatattaactggtatgtgattgtttttatatacctgacttaaaagcaatgaatcagaggatctgattgaatgaaggaaattaacagatctgtgtaacactaatactttctatacttttccagtaatctatgaaatgtccataataggaaaaatgcattcaggagccagatggaccagattttattatttccttactagcaaactaaatgaatcatt

SEQ ID NO: 201719 - DNA, 134 bp, Homo sapiens
gctagacatgagaactgcaataagcaatctctataattcaaaaagagaaaacagttgtcatagtaagaacacagagtagcagttcaggcacagccaagttacaaaacttgaaccgactgcttggattacaagga

SEQ ID NO: 201720 - DNA, 438 bp, Homo sapiens
ccaccctccccttccctccctcatccgcacctctgtggagatcattcccccaggtcacgactgccttgctgttctccagtaatcgagaatattccagccttaaggcctttgcattgacagttccctctgcctggaaggctttctccctagatgcctgcaaagagaactaaccgcctccccttcagtatcctctcggtataacagggttttactatttatgctcaagaagtgtagtgaagattcaattatatagaagagacatgtgcatagcagttacacgtggctgttcattccttctgtaccttgccttcacctgcctgtcagttccttcagtgactgtgactcccttccccatgaagagataaagcctgtggctaaaaaatgtcttaagaagtcataatgatttgaccttaacctcattaaaaccaaaaattctct

SEQ ID NO: 201721 - DNA, 406 bp, Homo sapiens
gctgttcttaaatttctgtttataaaagccataatgcataataatttactgtagtcgttattcctagttttcccaggtaggcagtggtaacatctgtttcacaagataaggaagcagaaatttaacaacaatggcagaatcaggatgtcaatcttgtccttttttccttttcccactttgccatgctgccctctgggtaataagatggagactaatttttgaaggcttaatttgttgagccagtgtcattagtttttaggtaacattttaatacagaataagtgtgtcttggtcttattaacagtgctatgttatgtaaaggaatttagttgtaggaatattttctttgaaacaataatacctgtttttttatctcttgattgtaaagtgctgtgggaaatacaga

SEQ ID NO: 201722 - DNA, 287 bp, Homo sapiens
aaagaaaataggggcatggagatgaaggccgaactcagaaagcactcatctagtttagactaccctaaaacacttgagctcaatagcattcaaatacacctacactccactgagaggcccaacaataaagatagccaccccaaccgatgggatggaaaaggcacagcacatcaggatggaggatgaaacacaggttctcaagtggaaagcatttctaatgtgtgcacacacagacacaaacactcacaaatatctaaaaggacaccatgtcatatagaattattaaa

SEQ ID NO: 201723 - DNA, 217 bp, Homo sapiens
aaaaatatccaggcatggtggtgcccacttgtagtcccagctactccagaggctgaggcaggaggatcacttgagcccgggaattcaagggagcagtgagctatgatcacaccagtgcctccaacccgcatgacagagcgagatcttgactcaaaaaaagaacgtaaaaagaggctgggtgcggtggctcacacctatagtcccagcacgttgagag

SEQ ID NO: 201724 - DNA, 510 bp, Homo sapiens
gtatattttcaatctataaagcttagataaatttcgtatatgctcacctttttttgtgggagacttgcaagagaaacctaccctaaaagctaacctagccaccttctatttgcagaaataaagcaaaaatcattttagtgttgattttgatgtaccagaacctaaattgcttaaattaaaaactttttagagcagtgtgtagaattctatttgtgtccgtgagtatggctaataactccattttaagaaccagaaaaggaaataaaataagttaaccatctcccttgagctgcaaaagttgctaatcaaaaacttcatgtaaacaatgtaccgatatcagactctggttatgatctgtatacatttagtgtgcaattcaagtataaaggctttcattttttggcagcccagatgcaaacaataaaataatcctgcttatttcctctcagcagcaggttttgtcatccatatgtaactgaccgaacagtgtttagccacaaacagaaaaca

SEQ ID NO: 201725 - DNA, 278 bp, Homo sapiens
ctattacagcataaactattacagcataaactattacagcataaactattacagcataaactattacagcataaactattctctctcttctctgactctcaaaggcacgccctagtgtaatctcttcagtgatctggaattttacacaatacaggaagacctattgacttctaacagcttctgttttctgccctgtaaaactcatgaagcaagaaattactaaagaccttgaggtagggggtaaacagagaacaacgcacaaaatagtataaaacaca

SEQ ID NO: 201726 - DNA, 434 bp, Homo sapiens
cctccccaccccctcaacacaccatcctgctgcctgtgtctccagccttatgtggtctggcaaggttgggctacttccggcagccaccgtttgctccctaggatgcaatcttagcctccatggggctggcctgctggaatctgggaccacgtgagcctatgagcctcagggaggctgggatgccagggaggagccagcactcctggaggctctgtgatctgctctggccacattaaataaaggctttgatccctccaatggggagaagggagagctctcccttttcagcaccttctaatatccttcccccttgctgtgcccggccccactgtcacctcaccgaggaggagacaggatgtgtttccagcggggccttttttcttcccgatttagactgggagtgaatgaagctcattaaactgattgtggttgta

SEQ ID NO: 201727 - DNA, 262 bp, Homo sapiens
agatctctgccaagttacagtaggtgtagcatgttcctactattggttcgtccacccactcatcactcactcagcctgtcattcactcatccattctctgtgaaatgggtctccccacatgccaggcaccgatgttggtaaatgcagcaggcacagccttagctctcatgggcttaaaaattcggtggagagtctgggcatagtggctcatgcctgtaatcccagcactttgggaggccttggcaggtggatcatgaggtca

SEQ ID NO: 201728 - DNA, 408 bp, Homo sapiens
catcctgggccacatgtggcctgtgggccatgggttgggcatgcttatcctagaagtatctagtttgttatatgaaattgctaggaatgaagcatccatttcaaatagcctgctaactttagccttgctcaaggcatttagtccttttgtaatctcttttttgtcttatctgatttaatttgaacaaaccttactttacacttttcatatttttgttgcattttgttcaagaacattatattgcattattattgtatattgtaatttcttaaaggtaaaggcagcctctaactgcaaataaaacatctcaaataagacgtttcaaaaaataagaccaaataaggcagcatgttaggatctggcatcatatgtccctaatagtgtctagatttgttaatattggtaatt

SEQ ID NO: 201729 - DNA, 204 bp, Homo sapiens
actttacttaactttgtatttgtgtgatttatctatgctgctaggtacagcagtaactcactccatgttatttctgtaagagtatatgagagagaatggctgttccattgtaaaggatcatataatactggattttttcttaaagctgaactgttagatgcttctcttgcagccattgcctacatctaaattcccccttctcaa

SEQ ID NO: 201730 - DNA, 422 bp, Homo sapiens
ccaattgcacatacggatacctccacgtggaggggtttctatttgcctctatctcctacttggaatgtgaatcctctccttctgcattcaaatagtattttggttctatctcctcaaggcagccttccttggttacttcctgtcttgattccctgctgcttccatgctctcctgtaaagcagtgcttacctccacaatagtctgtaaatgtctcccacctccatttctgaggcaagagttagtcttcttctttgtacccaagcatttggcacattatatgggctcaacaaatataggcacgtcaataaattcaaggaagaagaaaagaatttttactttattttcctggggaaatttctattctgaataagaaatattatcatcaatgagataacaagaaattattacaaaaacttcataac

SEQ ID NO: 201731 - DNA, 266 bp, Homo sapiens
actgggagggtgcatggggtcaggggtgggcttccagggtgtggataatgtgttattactggagctcagtggcagttaggggtgtttgttttgtgaaaagctatcaggctgtacccttatgatttatgcacttttctctatattatgcatcaacaaaaagtttacctaaaaaaaatctaaaactgacagtacattttttagcattttttagcctgaacttactggaatctcccaatcttctggctttttttttttttttttttttt

SEQ ID NO: 201732 - DNA, 397 bp, Homo sapiens
ttttagttaccttaactataccacatggtggtgtcatgattggtgtcaatgtattgcatatatatatatattacaatataccacatgataggtgtcaatatactccaacaattagacttaattttcttcctctccgataatttttccgcctgctttgaggaaacatctggtcatattgcagttaaaaatcaaacctcttaacaataaatttatttaattaaatgccataaaaattaatcaagaatggccaggcatggtggctcacgcctgtaatcccagcactttgggagactgaggcaggaggatcacttgagcccaggaggttgaggctgcagtgagccacgttcgtgccactgcactcagccggggtgacaaggcgagatcctgcctcaaaaaa

SEQ ID NO: 201733 - DNA, 452 bp, Homo sapiens
tacctcagatagagaatggaaagtcagatttcctgaattgctatgggtctgggtttcatccatccaacaacctgcctcacctgtagccttctccatcatggtgttcatagtcatctgaatcatctttttaaattgtttttctcacacactacatccaatccatagcaactccacctacttctactctcaaaatctaactacttctcaccacttctgctatttgtaacctggtccaagccagcatcatctctcgtcactgcaattgcatcctatccggttttcctatttccactcttgctaacataaagtcaactcacaacacaggagtcagagcgatctggttataacataagacaaaacatgccactcctctgctcaaaactcaatacagtcccatctcattaagagtaaaggtcctacagtgtaaaagtagaagtccctacaatggcctg

SEQ ID NO: 201734 - DNA, 291 bp, Homo sapiens
attcagctggtcttttgtggggcatgagaatttagagtagtctgtggaactactcttctagagaatgatttcatggactgagaccatttattgattccccaaacataaccttccttatgtgtaaaaaattttgcatacaaagaccctgcacagcatcaaaaccaagggcaggccaggcacggtggcttatgcctgtaatcccagcactttgggaggctgaggcgggcagatcacttgagatcaggagctggaaatcagcctggccaatatggtgaaaccccatctctacta

SEQ ID NO: 201735 - DNA, 748 bp, Homo sapiens
agcactgggaccaagactaataaaacaccagcctcacggaagacagctttatcttgttgatcggaagtctgccagctctatttatgatggaacataagatctctaaatctgaatttacgctctgtagcgtaacgagaggtcaataagattaaacgggggctcaggagaggaccagcgtcaggctcactgcgaggtgctgcacagaaaacccacagccagagcccctgggcccagcccaggcaagaccagaaaaggagggggcaggtgggagaccagcctggggctcccgggaagcccacgggatggaggcgggagagccaggaggcctggggcaaccctgggacggttcctggatcgaggagagcaggggggtgatgagggttccctcagggctggggagccttctcctggtctcagacccaccccccttcagctcccaagccctgggtgcccctggctctgaggacagttgggaatcttccctgaggcaggttcaaggacagagctctgaccctggcccagggctgctttgggtgcctatgaactcggcttctggctcagagcagttccctgcaccccttcctgagccctctgtcctctggaacccgtgggcagggtgagggacgggtgttccttctgggtgggggcctgggcgcccagccagcacgacgctggcttgctgagcttagggcagaccccgacttcagaatttatacaaataaatgcaatgaaaagtgctggcaacctg

SEQ ID NO: 201736 - DNA, 390 bp, Homo sapiens
tatttgtagcttcatcaacattaactggttcactttaatgatgcactgaggaattagttcttcctgcagagatttttttaaaaaggacttttgagaagtgtgcaggttccttttgtatatttacaaaagctttatttactcttaatttttttgtcatttataatgtttatcttcttaaaattagtggtaactcaggctgggtgtggtggctcacatctgtaatcccagcactttgggaggccaaggcgggcggatcacctgagatcaggagttcaagaccagcctggcccgtctctaataaaaatacaaaattagctggacatggtggcgcacacctgtaatcccacctacttggggggctgaggcaggagaatcacttgaacccaggag

SEQ ID NO: 201737 - DNA, 1185 bp, Homo sapiens
  misc_feature (1017)..(1017): n is a, c, g, or t
  misc_feature (1121)..(1121): n is a, c, g, or t
  misc_feature (1131)..(1132): n is a, c, g, or t
gcaatacgctatagtatctgataactagtacacaatgatacctatgaaaggattcaaagaacaagggtgagaaagctgagctctgccctaaggcctctaaactggcgtacaggctggaggtgtgatcaggctaagtagctagtaggtgtagggctgcagatatctcagtactggggaatgggcaaggaatgaagtaatggtaatatctaggaggcccaagccccaagtcctcaggcaatggcagccaggaagatgatggcaaaaggagacctagctggtgggggcagataagctgaaaagaagtaggagagggaaggggtagctaggaagggtagacaaactacaaaactttcaaaggtgtcgtgaaagctcaaacacaacagacgggagtcactaaatgcaaaggctctatacatctaacatcatgtagcaatgaatcatgggtttgactatgtagtgtatctttccaattgcaaaacctgtatctagtccattaaattaataaaatattcagttagattttaatctcttcatgtttctgccaggaccaatcatgttttcagattgtggtatctggggttttcaaatgtgatctaaaaacaaaagtatggactatttcgcttgcttaaaacttctgggtcacatgagctaatatccagagcagttaatttttatagaggagatggtgtctcagttttgttacttgctgtgacaccatggtcatcagctctctgttatagtttctcatttataaacaggatgttgataacattattaatgtagctcagtcttgaattgctattcttctggttgctaaggaaaatactaatatgaatccaaagataatactaatattttattaatttaatggactagatacaggttttgcaattggaaagatacactacatagtcaaacccatgattcattgctacatgatgttagatgtatagagcctttgcatttagtgactcccgtctgttgtgtttgagctttcacgacacctttgaaagtttngtagtttgtctacccttcctagctaccccttccctctcctacttcttttcagcttatctgcccccaccagctaggtctccttttgccatcatcttcctggctgncattgcctgnngacttggggcttgggctcctagatattacattattcattcttgccattcccag

SEQ ID NO: 201738 - DNA, 710 bp, Homo sapiens
taagaggatccccgtatgtttgcctggccttattttatatggaccaaatatagacttgtgttgttctttaatgaatcattagaagtgaacttgatatttattgaggaatgaagataaaaggattgtagcttagtgtgtacgtgctttgcctgcactgtctttaatgcagttgtgggtaatgaggtttcaacaaaaggctgcatatgtgatgatggtaccataagataataatatattttcactgtaccttttctatgtttagatacaccaatacttacaatcgtgttacagttgcctacagtattcagaacagtaacatgctatacaggtttgtagcctaggagcagtggctatgccataaagcctcggcatgtagtaggctataccgtctaggtttgtgtaagtatactctatgatgttcacacaatgacaaaattgtctaaaagcacatttctcagaatatatccctgtcattaagcaatgtatgactgtacttaaaacagtgacaaactggataaaccaatgaactctctagtatactgtaattctctcaattctgactaattctgattattccttttgcctaactgggaataagttatctgagatggtatagcctaatttactaatgagtttggttgtccgtggcaactgttcaatatctaggctgcagtattgatgttttatattggtaagcaagtgaaacaaaa

SEQ ID NO: 201739 - DNA, 661 bp, Homo sapiens
acttgaacctgggaggcggaggttgcagtgagccgagatcgtgccactgcactccagcctgggtgacagagcgagactccatttcaaaaaaataaaaaaaggataaagtaaacaataggaaaggatttggtggggtgagggtggggtgttgagggctgggcctcatcttgtattctgaaagctgagaaacggctggtcagctggaaggctggtggatgggcaggagtgagccaagctgaggcgttctgcaagaagcaggtctgagtctgtccaaccaatttgtatcctgtggggagaacaacttcattcttaacataccctacaaaccagaaaacaagtttttaaggaagatgctgggcatgctgatagcttttctggtctcctaaggaagagtttttaaaactaaatccaaggaagaaaaatgtaacaacacgtggaagtgaacactggatgaataagcttgtttcccaaattagaatcctaacgtccatatttagcttcatgtattcccctttggcttccacagttcaactccttttattttgagacagggtctcgctgtgtcgccccagctggagtatagtggcactacctcggctcactgcaacctccactccccgggttcaagcaattctcagagtagctgggattacagatgccc

SEQ ID NO: 201740 - DNA, 1052 bp, Homo sapiens
atctttttccttctcttctcctgtcaggctgtctgctgttgtgttcctggctgtcaagtttgtatacctttcacagcaagtgttttctgccctcccctccccagccaccctcttccgactccacgtgttttgacactgatgagtgtttctttttctccaatgaggggtaaggactagaaagattgttaaaaaaataagcattagccaagctagttcctgtgactagaagcaaatgtgatgcttgaactgacctttgtgttcattgctcatttattcagtaacttactgagtttccctttttcacttaaaaaatattggtgggccgggcacagtggctcacacctgtaatcccagcactttaggaggccaaggcgggtggatcacgaggtcaggagttcgagaccggcctgagcaacaacgtgaaaccctgtctctactaaaaatacaaaaattagccaggcatggtggcaggcgcctgtagtcccagctactcggaagactgagacaggagaattgcttgaacctgggaggcggaggttgcagtgagccgagatcatgccactgcatcccagccggggcgacggagcaaaaaaatatgtatgtgtatgtacgtgtatgtatatgtgtgtgtgtgtgtacaaatatgtgtaacatgggccaggtgtgatggctcactcctgtaatcccagcactttgggaggccgaggaatgtagatcagttgaggtcaggggttcgagaccagcctggccaagatggtgaaaccctgtctctactaaaaaaaaaaaaaaattagccaggcatcatgaggcatgcctgtaatctcagatacttgggagactgaggcatgagactcacttgaacccgggaggcagaggttgcagtgagccaagatcgtgttactacactgtagccttggtgacagagtgagactctgtctcaaaaaaaaaaaaagtcacaaaatttataccatactgttttccacagtgactgcgccattttaggttcccacctgtagtgagcaaggggccagtcgtccttgtttccggttatc

SEQ ID NO: 201741 - DNA, 334 bp, Homo sapiens
gtcctatcttcccctggggttgactttggctttgtgtccagtcagtgctgttgtgcaaggagggaaaaagaagtagcttcatgttcaaggtgagcaagcatcctctgggcccaaggccgtcctctgtggaagtcctggaggggcctcaggccagcatgtctgcccccaagctcctggtcctctctcttccccccttccctctgtggagcacgccctaccatgctccccagtgcggcatcctggagtcccactttgcgtctccagttccttcccgcctgcaccaggcatctgtggaaggtcgtgcacctgcctttgcactgtctcttggtgtcag

SEQ ID NO: 201742 - DNA, 226 bp, Homo sapiens
ggtagtatcagtaccaatagagctggagctgctgatcccacatgacccacgctgttcctggtggactcagcccatcagaaggcttcctcatccacacaagcgttcataaaagatgcacacaagtgtctaacacgaaattagccctcactaagatgaatgctgctcattcatcaaagagtagatccctgctccttgcagagagaagactgcaaggagcttctgggtt

SEQ ID NO: 201743 - DNA, 465 bp, Homo sapiens
tccagatacctcttaaagtgcggcaccgcctggggtgatctggcttatgccccttgctccccattcaaagacacacagagagggacattgacagtgcacaggagatatcaacagtgtttcctgacatccatgatgcacgggagagaaccaagtaggtaggattcagacttctcatcttcacctctcccaaatcacacacatgccttcctgagaaagagaccctttgtgagatattaaagaccagccaaattctactcccacatcataagaaactggagttcactctttaattagagaagatgccaatggctttggaactggacaggcttctaagcatcttttagttcagtgtcttcttttacaaaagagccctggagggcaatgaccgcaccaggctcacatgtcattgggtgtgtggcagcatttccctaagctgagaccagggtcactggtgggtgcatttcc

SEQ ID NO: 201744 - DNA, 349 bp, Homo sapiens
tgcagtctacccaagggcagcataggatctgtaggaatacagcattttccgcttccatttactctcacctggatatggtctccaactcattcagcttgtcttacattaaaaaatgagatagtattgtatgtgaaagtgttttgtaaactctaaagctctatgcaagtctatgatagtggcattattattattattatcattatggatagcatgacggtcaagcattgcattggtcctaaactgatgagaattggtgagaattgcaaagataagcacagtgctaggcctggctgactgttattctaggtagatataaaggtagcatttacatcacaatttactatcatta

SEQ ID NO: 201745 - DNA, 375 bp, Homo sapiens
tctctccagccacattaactgtcttactctgccttaaaccctccacatactctcctgccttagagcctttgtactatttcctttgcctacgatgctattcgtcccaactttggcattgctgactcccacaactccttcaaatctttgctaaaatctcaacttctcagtggtgcttaccctgactcattattgagaaaatcactctcccatctcacctctacctttatcctgttcttatctttttctccctgaaaatcttatgtcttgccaatataataaatgatactctctccctcccttatgttgtttattttcttccttgattagaataaaaacttgaagttgtgacaactttttatcactttatttcactga

SEQ ID NO: 201746 - DNA, 259 bp, Homo sapiens
aaagctaagccaattaaaaataacagccaccagctactagcttccttctccccaagtgaaaaacactggatttttttatataaaaaatttggttcatcctacactaagtaccgtgtcttaccaatttgcagcgctatttccttaatgtgattgcctgggatgggacccgcagccgcattaaatatgaaagagggaaaaaactgttaataattgatcctagccaaatggctgccttgccataatgggcttttcaggcaga

SEQ ID NO: 201747 - DNA, 408 bp, Homo sapiens
cttaataaatcattacaaatatcggtaattgaaagattatgtaagagagggaaatgtggatgaggtaggatgtgccaactaatgtttattgaacctttgtttatactgtactgagcttttcttctcttcagtagagtttagtccttaatatgcagtagtcaaaattagcatttaaagttagtattgctgtgaagagggagttgtgaaaaaataaaaaataaataaaatattgtattattaagagtttgtccctgaaatggcctttgaagggctgagaatttgaaatgtctgtaagtagactggtctagagcctgtagtagagaccaaataatgctgccattacagttaacccaattaacctaaagaagagattatgtaagtttgtaaagtgcatgtatgttgcaagca

SEQ ID NO: 201748 - DNA, 688 bp, Homo sapiens
cgtggcattcctttgtctaagactcagcgtcacaacaactgatctatgtggtacaatctaaacaaccttgcacagacacaaggcccttctaagactgggatatctgactttccaaacttacctttaaccactgtccctcttctagcagacatgacagccataataaactatttatccttctgaataacgatgctttttcacagccctctctcctttctttgctggttacaaacctttttctttcttcatctatctggcattttctagggagaaagcctatagccttctaagatttgtaaaatggttggtgaccaccccaacagcaaagaaactgagccacagggaaaagtgacatcgaaataactctgtgctgaactccagcaaaacaatcagtctgcaaagggtggcttggggctgggaagaagctcattaaagattgttgaaagaatgaataaatctgagtatttgaattcactgcttttgtggtcctgtaaagacgatcaggtgatggcaatccacactggggccttatcagtattttctattttttaaaacatgaaattctatactccattatgatttatgttgttgcatgctatctggtcggaatatagctttgtaatgaatacattcgtcttaaaactgacttggctttttctcctaaattaaaaagacaactctgatgatc

SEQ ID NO: 201749 - DNA, 239 bp, Homo sapiens
tgccctcaggtgattccagctcttcatatagctgctgcctcacagaattaggatgagtagtgggaagaactgagtgtgggaatgaagcagatgggacagagtccaagaacccaaaagcaaggaggaagagattggagtgatgcagctacaagccagcaaaggcccaggattgccagcagccaccagaaaccgtggagaggcaaggacggggtcttccctagatcctgtaaattccagca

SEQ ID NO: 201750 - DNA, 814 bp, Homo sapiens
ttattgcaggcatttcaattggatccacttactggtgtcctgagacactgatcccattggtcctcgggtggtttggttgacacctttgtactcaggctctgagcatcccccaaattttacctcagggtggcaattgttattgttttctttactgttattatctcttttgtattatattgtttacttaactctcttcccaactagtaaatatactagatagaggcagagatttttgttccttacgaagctctaaatttctgaaacagtgcctgatgtaggcactcaataaatatttgttgaacaataaatgaatggatgggaatttggggaagctctcacctagcttatatacagaacttgttcttatttccaagattacttcaaacttccagtagaaaaaaaaatggcatcatcacttatactccatgattccatttatctttctctggccctgtactcccacttcacctttttgaaaaggcgcatcgatgtctgtcccttatataggtatatgggtgaaaactagccaagttttctcataagtaattttcagggttacaaaggaagaggcattacagtaaactggtgataaatgtggactctggcagtagactttctaggtacagatgctgaataggttaattactagcactgtgaacctgagcatttacttaaaatttatctactttagctttctcatctgcaaaatagaataaaaatataactacctcattgaattgttgtaataatgaaattaacctgttaaggatttattctacttcctacccccatgagatcaattccttagctccca

SEQ ID NO: 201751 - DNA, 389 bp, Homo sapiens
cagcaatggaagaatgacaaagaaacaccatgggccaggtgtggtggctcacgcctgtaatcccagcactttgggaggccaaggcgggctgatcacttgaggtcagaggtttgagaccagcctggccaacatggtgaaaccccgtctccactaaaaatataaaaattagctgggtgtggtggcaggtgccggtagtcccagctactctggaggctgaggcaggagaattgctggaacctggaaggtgaaggctacagtgagccaagattgcgctgctgcactccagcctgggcaacagagtgagaccctgtctcaaaaacaaacaaaccaaccaacaaccatggaagccatgattcagcaaacacatccctaggacaaagattcccagc

SEQ ID NO: 201752 - DNA, 642 bp, Homo sapiens
tgacactaaggcttgggggctgggtgacttggtatatgtttctacggaaggagaaagatttggaaagaaagatgattagttgttttggacatcctgaatttgaggtgctgttatggatttggagagatgaaatcaatagacttgatggttgcttgaaaccttgaagttgacaagattgggaggatgaaagacagatccttggagaggattcttggagtttagatggtagatgcaagtcgagaaggaagaagcagcatctgggtaggatggagaaagactaggctcatttagtcaaggaaactaggagatgggaagccgagaggcagagattgagaaaaagcctttgaattggatggatctggtcagtggagacccagagctagtagaggagagagggtgagagctagatgtgagggctctaggttgagggcagagaccttgtttacggagtagatactctttttttttttttttgagacagtctcactctgtcgcccaggctggatggagtgcggtgacatgatctcgcttgctgcaacctctgcctcctgggttcaagaaatcctcctacctcagctttccgagtagctgggattacagatatgcaccaccacacctagcaaatttttgtatttttagtag

SEQ ID NO: 201753 - DNA, 355 bp, Homo sapiens
tgcctaattgctcaggctagaagagtggacagtcttgctttgttactgatcttaggtggaaaaattttcaccattgaataggatgttagctgtagacttttcatataatctttattatgttgaagtattttttttctatagctatgtgccacataacaacatttcaatcaacaacagactgcatatataatggcggtcccatacattataatggagttgagaaattcccatcaccagctgggcatggttgcttatatctgcaatcctagcacttcagaaggccaaggaaggaggattgcttgagccaaggaattcaagatcagcctgagcaacaaagtgaaaccctgtctctacc

SEQ ID NO: 201754 - DNA, 377 bp, Homo sapiens
ctatgttgctggcatgcagtccgcactcactatgcactgaattaatgggctgatgaatgaaaagttcacagccttgaagctcctgggggcattcctggcagcagggctgagcagacagatgctaatggattcaggcctgccagcgccaactcttctaggaagcccagagcaatggccctgcctgggacagcctgtgtctccttccccttcctttttttttttttttttgaaacagagtctcgctctgtcacccaggctggagtgcagtggcatgatgtcggctcactgcaacctctgcctcctaggttcaagcagttaacctagccttagcctcctgagtagctgggattatagctgcccgccaccatacctggcta

SEQ ID NO: 201755 - DNA, 760 bp, Homo sapiens
  misc_feature (698)..(698): n is a, c, g, or t
  misc_feature (703)..(703): n is a, c, g, or t
  misc_feature (730)..(730): n is a, c, g, or t
aaatgctttgtaacaaacagttaacaggtaagattgtcttgctctctaggaaatgttacatgaaatagtttttactccttttatttattctttcttaacttctgatagaacacatctggaaattccttttgcagcttctcttccaacatacccttaccatccatcattctctaaagcagggatttcttacctggggtccctgagtttcccagtgatactcaaagaagtctgttttttaaaacagatcaaaaacgctgttcaaaggggcattctctgtcacaccaacacagattttttaaagacctgcattgagatgacaaataggtttgaaaagtagccacatagtattgggttttaccttggcgtctctgacattccatgatgacgtctgtccctgggattgttcagcaatccccctctccatcacactttagtaaatgaagacggtgacatttcccgggactgtatctaatggacaacagttaacattgttcagaacccatataatagaactcacaaattttaatattatgcgtcattatttctgattattaatttcctagtgctgaatttaagaaacaaaaacctttctgtaatgaaagcaaagcatgagtgaaccctaaattttagcagtaaattctatttaattctatttgcacaatttcagagtatttaaacttattttatattcggggganggggngcaaaagaaggtggttatttttatggnggtagtcagcggaaatccggacagcattta

SEQ ID NO: 201756 - DNA, 612 bp, Homo sapiens
tgaattgatgataataataatagtaataaatgttgttatattaataatgcaaatggaatgtggtacaataaaatgtattccaaaatctaaaagcaaatcacaggatagagaaaacctttaatgaacacagctaataagaactcattaacatgcatacatatatacctacaaatatatcatagtaagtaccatttcttcttggacccttcctggcactgtgctaactgctttctacaaatttagcttacataaacccttgatacacccttgaggtgagtaggtattatctgtagtttacataagatgaaatagagcctcccagcagttaagtaacttgtgtgaagatgggacccttgttcctaatggttctagaacctttatccttagtgataataagtaagtacatgaattgcctgaagaagtggtcagagtttatcatagaaaatctagatagtactcagtgtgtggaaaaatgtacacgctcttgcatttatggaaatgataatgttcactatttctgatattctattaactatcttttttttaaactatcttttaaattaactaaaataaaatacaaattaccaaaaaaaaaaaagaaagaaagaaaaa

SEQ ID NO: 201757 - DNA, 988 bp, Homo sapiens
tgaattgatgataataataatagtaataaatgttgttatattaataatgcaaatggaatgtggtacaataaaatgtattccaaaatctaaaagcaaatcacaggatagagaaaacctttaatgaacacagctaataagaactcattaacatgcatacatatatacctacaaatatatcatagtaagtaccatttcttcttggacccttcctggcactgtgctaactgctttctacaaatttagcttacataaacccttgatacacccttgaggtgagtaggtattatctgtagtttacataagatgaaatagagcctcccagcagttaagtaacttgtgtgaagatgggacccttgttcctaatggttctagaacctttatccttagtgataataagtaagtacatgaattgcctgaagaagtggtcagagtttatcatagaaaatctagatagtactcagtgtgtggaaaaatgtacacgctcttgcatttatggaaatgataatgttcactatttctgatattctattaactatcttttttttaaactatcttttaaattaactaaaataaaatacaaattaccaaaaaaaaaaaagaaagaaagaaaaaaaaaaaagtgtgttggggccgccccggggccccggagagaagaggttttttgagacccattgcggtgtggggggcgggggcccagattggtgaagagtgtggaacgtggggcccagcagcgtggttccccgagaggagaaacgcggggcacatagaaaacaagaggggcggggggtatttctccacccaaatataataaaagagcgccgctggggaaaacaccgggggggggttttcgtggaaacaaatatccccgaagaagaggggagagcacgaaaggggcgacgaaaggggggactccaccacacaaagaggggagtgctcccagccaggagaatccgcagtaattaacaattaagccccgcgcgtgggtgga

SEQ ID NO: 201758 - DNA, 268 bp, Homo sapiens
agagagagacagagagagagaggaagggaggaaggtaaaaaggaatagtaatttaaagtttatttcagctataatgcaggttattctgacttcaaggtagcatcacatggcatacttctgagtcaattctcgacatattctgttgtgtttatctctgtctgtttatataaaaaggcacaatgagacatttctaaacatggcaggatctcaagaaatattgtttccatgagctttccttgaataaactactagaagatgaacttcaacc

SEQ ID NO: 201759 - DNA, 282 bp, Homo sapiens
cagttgcaacttgaactagcttggctaaaagaagaagatttaatagctcatataaccagctaggtgaggagtgttgttggaaaggaccagaacagggtcttggtgttgcctgcactttctcttttcccctctcatctcctttaattcagcttttatttttggcttttttctcccaggctgggtgatatcatgaaatgaaccataattagtagcagtttctgagctcacaatttcccagcttcttaactagagaggaaagggctcttccccatggctcttatt

SEQ ID NO: 201760 - DNA, 597 bp, Homo sapiens
catgaatgtgtttggagtataggcacgagccactggccaggactttttccagttcttttcttttcttttttttttttggagatggagtctcgctctgtcacccaggctggagtgcagtggcgtgatctcagctcactgcaacctccacccccgggttcaagcaattctcctgcctcagcctcccaagtagctgggactacaggcgcacactgccacgcccagctaattttttgtattttagtagagacggggtttcaccatgttgcccagggtggcctcgaactcctgagctctggcagtccacccgactcggcttcccaaagcgctgagattacaggcgggaggcaccgtgcctggccaagttttctattcttaattagtgatctgtttctgtattgaaggataattttttttttcttctcagcaaccatggcctgagactgaagaataattatttaccttaccacattgaatctagcatttctaaaaactcaaacaaaaagcagtttaatactaagtcattatttaaaagttgaagtacccaaaatttataaaactctatacaattatattatgacatgggatctattcagattt

SEQ ID NO: 201761 - DNA, 404 bp, Homo sapiens
gctagctaaatatgatgctagtattagtgcaactgagtgaaagatggagcatcttactagtttagaaaagactttacaagaatgagctttggtggagaaattgagtttggttaagtttgagatgcctattaagcatctaagtgacaaaatggagcatgcagtggggtgtattccagtctcctctctttcagagaaagaggagaaggtatgaaaaataatgatctggaagagtgaatggaataaggaaatccaactgaaatattggacagttctgaaataacacatgaggtttgctgtcaaatttagagtgagagcaaataccgttgtatgttttcccctagttataatgagctgtgtgggtacaggtatggagtaggtggagagctgggtttaactgaaactga

SEQ ID NO: 201762 - DNA, 561 bp, Homo sapiens
gatctagaggatcctgtgatccgttagcagaagagaaaatgtttgattctaaagagaaggcttcgaggagagaaacctaagatgggagaattgacaagttagataagggagcgagacagagagaaagccagcagatgaaggggaagggtaaggggaaggatcaccgaaggagatgagggtgcgagagagagaggtgccgattagtctagaagtatcccaggacagaagagcagaggtgtccccgaaaggtttgcagacgcctgtgaaggatgctggtggtgggaccggtagagaggcagaagcaagagagctacggttcaggttgggcaccagtgatgccactggttctctgcaaggggattccatgacatgaaaccgtagcagaaaacatcgttaccagtatcctgaagcagttcactcagtctccagagacagaagcatctgctgattcttttccagacacaaaagtcacttaagcggatcagcgctgatccgcttaagtagtttgtgagtcaggctaagcaccatgagataaaccacatttctctgccgtgcagatta

SEQ ID NO: 201763 - DNA, 355 bp, Homo sapiens
cagatttctaaagggctttgtttctctacattcttttacttctaattatcagctcataattacagccacgtgccctatgggactggttaatccctaacagtgagttatgatgcacgttgtacagtgtgctcagttaccaagccttgacctggtgaccaaaaagaattctatctgaaagggtggcagtatacgaaaacactgccaagtgaacaagtgttttataaaaattaattaggttccagctacttgggaggctgaggcttgaacctgggaggcagaggttgcagtgagccaagatcgtgccactggactccagcctgggccacagagtgagattctgtctcaaaaaaaaaaa

SEQ ID NO: 201764 - DNA, 338 bp, Homo sapiens
  misc_feature (7)..(7): n is a, c, g, or t
gaccttnattaaaaaatacaaataaactaaaactttaaaacctcagagaaaccgtagaaaatgccattctggatgtaggccgtggcaaagattttattatgaagactccaaaaacaattgcaacaaaaataaaaattgataagcaggacctaattaaactaaagggtttcttcttgaggttttatagttttaggttttatttgtatttttttaatctaatttaatttattttacgttctgggatacatatgcgggacgtgcaggtttgttacatatgtaaatgtttgccatggtggtttgctgcacctatcaacccatcacctaggtattaagcctca

SEQ ID NO: 201765 - DNA, 213 bp, Homo sapiens
actataaaacctttgttaagtcctcaaagatttgaggtggtgcctcatagaacctttcagacacacaaaaggccatccaagtatctttaggtcatgcctcctagttcctctctgttaaacaaaaggtcttctaataatcttaagggctttattccacagcagcctcacagggagcccaaggtagagaaggacttctgcctgagtgagtggatt

SEQ ID NO: 201766 - DNA, 207 bp, Homo sapiens
tgctgggattacaggcgtgagccaccgcacctggtccagggtttttatagccctatctttctactagaagcagcagtttcttctttttggacactaaatttccagatatgacagggatgctttgcacacttagattttcatggagtcaataaaaccttagctttccatggaaatgtttaagagacatttgggaaacatgtttttaaa

SEQ ID NO: 201767 - DNA, 265 bp, Homo sapiens
gcattaattcagttaggatattggcctccagttgcattcatgttgctgcaaaggacatgatattgttttttttttatggccgtttcagtttcttgactgcttaggatagagcttttctaactgtcaaagtgaatctgatcagagaattaaatttgacacttttagtatattcatctgccatctattgagcatgagctgtgttccacgaactgtgctagtggatattgctgagggcagatatggtccgtgtcctcaggaagatcac

SEQ ID NO: 201768 - DNA, 497 bp, Homo sapiens
agcaaagagttttatgactatgtgctttagaggccagatggcattgttttcttcctgtctttggcaggtttcaggcaagttgcattagtcttctggactttgactgcctagtgtgtaaaatggcaatgaaaaagtaaacgaataaaccagactttgtttcttcttctcttctgtacttttcatcttcttcctcctcccttttccttccttctttcgtaaggttgcacaaaataatgtacattaaatgtgtaacgtgcagcatgaactacattttatacatatagataaaaactgttatacatatttttttatttgtgtcattaacttgttcttgttgattcaatgaagattacctgcagttagctgaaaagtcgtaatacaaacaattattttatggctttcttttttcagtatgatttacactgtccagttatgtctttttgaggcataatcttcatcttagttttcctggggggtttttctgtaactcctgtgct

SEQ ID NO: 201769 - DNA, 480 bp, Homo sapiens
cacgtgtcagtgggtgagaggtcagtttccgggtcaaggcctggacatgagggagcgggcacaggttttcagggggcccaagagcggcaggggcagcttggcagctcatcaggtccactagagggtgtcccagacaagagcagcccccgaactgaggtcaagaaacaggttggattctcagagctctgattggttggacaggggttccagatggacaggggttctgggtagaggagcagtctatgcaaaggctcagagaaagagaagtgcagtcatgtctgcggaatgacaggggtgggggccagccaaggcctcccctgccaggccaaggcatttagatttcatcctaagagcaaagtgtggcctgcctcgggctcccccacccccaccagtctccctccaggatgggcccttggtctgcccccccacctcccctttccagcaggagaaagggtgccctgtctgtggccccagtcccag

SEQ ID NO: 201770 - DNA, 216 bp, Homo sapiens
cttgggtagaaaaatggagttaattatgcccacatcacaaattgatgtgtggattacaaatgatgattatattataataaggcctatcactgttcctggcatgtagtgtttatgaagtgatagttcttatttattatgaataagttctcacagtgggaaggaatgagagaaggatggagaagtgcttgggaatgcagttaggggtatgtaggatga

SEQ ID NO: 201771 - DNA, 221 bp, Homo sapiens
aacaaccaactggtcttcatttaccaatggtcttctccttaccattagagcactcagtaattgtacaaactgtgtgagcgtgtgtttgttttgctgaactgtttttatttgtggcttctgtttttattgtttcagtctttttcccacttggtttgatcaactctacctgacttggtcaaatccgagggaacgttccaaattatagggaaacaaggcctctg

SEQ ID NO: 201772 - DNA, 347 bp, Homo sapiens
aggcaggtttgaggtcttagatgggcagtgagagcatcttggatgtctgcttcaattttctgttttattattttattttcacaggcattcaattttgttttattttttatttgagacagggtctcactctattgcccagcctggagtgcggtggtgcaatcacagctcactgcagcctcaacctcctacactcaatccatccttccacctcagccacccaagtagctgggactacagatgcgtgccaccatgcctagctaattttttgttttgtttattggtagagatggggtttcaccatgttgcccaggtttgtcttgaactcctggactcaagagatccacccg

SEQ ID NO: 201773 - DNA, 765 bp, Homo sapiens
tcatcaaggaaattgtttctttcaatgagaacacactctttttaaatttttgtcttagataaaaagagaaagctaaaaaaaatatttagaaagtctgcaaacctatgaaagcctggagttatcatgtagctcttaatttaaacccttttgacctcatataatatattttatctaatagattaacttttttttgccctgaaatagcttcattttgttttgttttgaaattctcattcacttttaaacttttaaacaattttccaatagtattttaaaaactaaacaaatgtgtagatatttcttcagtcatcaaagatgtaattagcattaacagtatgtaattacttcctataaatcacatttgtgaatcaaattgtgtgaattttataatggtatatgtatttcaaaatcttaaatctatgtttagataatatagaaaattacaaaagttatatttcttggttttagccattatttttcattatgggaaaatatccatttaataagtgcatttctagagcaacttcaaataatttaggaaatgtaaaatgacttaaaatgcacaatatttgtaaatattgtgaatagcaattttagtattgctaaaactaattcagagttaacaagagcctaaaatgatggtatttttctggctttttctcatgttgggaatataaatttctgcttgttctgtaaaataacacgctgttgattttttgggaagaaagatgctgctagtcatcatgtgtctttcttcttgtaagt

SEQ ID NO: 201774 - DNA, 302 bp, Homo sapiens
gcggagagagggaggaccgggcgtcatgctgtttctggcctgaggttttgtgtgcctttgttttccttttgctctattcgtgtattcctgcctacggcctgtgcggggaattaggagctcagtactgaaacggcggttttcctaaacagtaccggacgggcgcgggggctgacgcctgtaatcccaacactttgggaggccgaggtgggcggatctcttgaagccgggagttcgagaccaccctggctaacgtggtgaaaccctgttcttactaaaaatacaaaaaaaaaaaaaaaaaaaaa

SEQ ID NO: 201775 - DNA, 458 bp, Homo sapiens
agcgagaccctgtatcaaaaaaaaaaaaaaaatgcctattagaccttcaagtggtgaagacaagtaggtaattggatacacaagtctgggctcagggtagaggctgggctagagaaagaaatttgggagtcatcagtgaatagatgacattttaagccatgggcttggaggagataacctaaggaatgacgagaatacatctgaagatccagcctcagacactctggtgtacagaagcaggtagagaaaaggagaaaccattaaagacctctgttgggccgggcatggtggctcacacctgtaatcccagcactttgggaggccgaggtgggcagatcactcgaggtcaggagttcaagaccagcctggacaatatggagaaaccctgtctctgctaaaaatacaaaaattagctgggtgtggtggtgcacactcacttcactctagccagtagtccc

SEQ ID NO: 201776 - DNA, 472 bp, Homo sapiens
aaacagaggggctcacgttgccggcttctcccattacattttcatttctcactctgaaaaaggacagttctagcagtgtggtgggtggagagaaccatcattggcaagccctggagacctttctagccttgggttagaatgcacagcacccctctgtggcacttccagatatccaaacaagcccttctagacgcccttgtctcttggaacgttaaagacacagctccctgtcttccaaggcagcttgtggttccacagccttggagcgtcctgcagacagtttctgtttttgaaagtttttcagaaattatgcatttattatagagagaccatgtaggttcccttattccctttgtttagagcatcttttatttttacattttagtgattctgaaattgggatgcatcttaaaatagatgcatgtgtttggatatggtgctgtgcctttttcgtgtgaaggggtgttcccca

SEQ ID NO: 201777 - DNA, 427 bp, Homo sapiens
acatataaaagcgataatacaccataaccaagtgggatttatcctaggaatgaaaggttggtttaacacttgaaagccaattaatatatacaacataataatagaataaaagacaagacccatctatgatcttctcaatagatgcagaaaaaacaccgaacaaaatgcagcacccttttatgataaagacactcaacaaactaggaatagaagagaacttcctcaatctgataaaaggcatccacttaaaacccacagctaaaataatacttaatggtgagagactgaatactgtctcctgaagatcaggaacaagacaaggatgtccactgtcatcacttctattcaacattgtactggaagttctagctaaggcaattaggcaagaaaaagaaatggcatctagactggaaaggaaaaagtaaaa

SEQ ID NO: 201778 - DNA, 434 bp, Homo sapiens
ccccgcgccgccgccgccgcgagtccagctcgcaggaggaggaggtcatcgacggcttcgccatcgccagcttcagcaccctggaggccctggagaaggatatggccctgaagccacatgagcggaaggagaagtgggagcgtcgtctcatcaagaagccccgggagtcggaaacctgcccccctgcggagcccagtgagaacaggcggcccctggaggcaggcagccccgggcaggacctcgaacccgcctgcgatggggcgagaaaggtcccactgcagccctccaagcagatgaaggtcaccgtgtccaaagggggcgaccgggacagtgacgacgacagcgtcctcgaagccaccagctcccgggacccgctcagcgatagctctgcgcatgcggtctcggggagaggctactctgtaagtctcccagca

SEQ ID NO: 201779 - DNA, 397 bp, Homo sapiens
tttattactatttaatctagcataaccggtaaggcccattgtgcgaacaaccaatctgttcatttctgcaagtcctaatacattttggtttccttatgaaccaggatgcaggttctaattactgcttgttcagtttgttttggcaaaaggtgacatttagagggtttaaagaaagcatggcctctttttaagtgttttgcgttgattagtttttgaacttttgtggtcaaaagttctaatctcttatcttttatgatctgcattctcaagatctcacattattgggaagaaaatgaaggaaatgagtgaaggtctctcttacaagcagaattagctggactttgagaaacacgatgaacgtaatgcagggtttttcttcttttttttagctgattag

SEQ ID NO: 201780 - DNA, 450 bp, Homo sapiens
cagtcgtggcttcataagtcatataaatatggtctctaaactctgaatttacatctgtctccaccggtaaatatttataatagccaaaggatatcctggacattttctcctaatctgtttgaccctttccttttctgcttgatctagatgcttggatccaacttactttcttaaaccctcttgttcgtttaccttcatgtatatgtaagtccacacttggatcactgctatagtttgtttactactaatacagaggcctgaaggctactatagaaaatcacatagctgtgtagtttgccaacgccaggagtttaaccctcagctcactgaattattccttttcttgaccttaatcagctacttgtttcattcccctcaaagtttctctgaatctttgtcactctcctcaaagctcccttttctaactcacctctcttactcttagcagat

SEQ ID NO: 201781 - DNA, 558 bp, Homo sapiens
  misc_feature (21)..(21): n is a, c, g, or t
atccttaattaaattaattcnccccccccggtattatcatgaagaaaagtgcattgcttgctcttcatctacctcctctatattagatccaagattagaaaagaaaaaaaaaatactagcatttgacttcaaaattgagattggtattattcttcacagcagcaggaagttatttttttaatgtcagtatcacttcctcaaccttattatatatagatatgacagttttataaattataaaatataaatgtaaagtggaatcctccatgtaacttagttttatttcttaattggtgcataaaataaaaagataagaattacataaaattaatgacttagttctgggcaatataagtaactttcaaagaaagtttagtgatgtatttttcaaagatttacaaaattttattgtaaaaccagcattattttacatcattttgtcacatatactccctttaggtggttcatttctatcttactcttcctaagatgtccaatattttattttaatcttcaaaataacatttatagattgatttttagaagttccccttaatt

SEQ ID NO: 201782 - DNA, 534 bp, Homo sapiens
taaggtgggaacctccttcaaaagtggacatttctttggattcttgagacaactgcattaaattaatgctttttcatattccatccttccttcattaaaaaaatatttatcacccactatgtgccaagtatcttgttgggtactagagatataatagcaattaaaaagaagtccaccagctgggcacagtggctcatgcctgtaaatctcagtactttgagagacagagaagtgaggatcacttggatgcaggagttcatggttacagtgagctgtgatcaagccactgcacttcagtctgggtgacagagcaagacctgtctcttaaaaattaaagaggtacaccatcattgccttcagttaaacttagagtcagtttgtggtagaatgcaaagatggccccatactttacccatgcctgtaaacatgtcctttgcctataactttgtagtaccctcccactctgactctggacttgtccatgtgactaactttggccaacagaataagatggaattaatggtatgcccgtgt

SEQ ID NO: 201783 - DNA, 511 bp, Homo sapiens
ttggtgactcctgtgcagatttggcactgaaacaatatgaaattgttacacttctctggacaagtcattatgcttttggctcacaggctccacttccctggacaccccttcaccctaagcttcaagtaattcagcttcacccttcagagcagagctcagctgtcacttcctctaaggacctccccagccgcctctccagcagaagggcccccaccttgctctttgcacctctgtccctcgaggtgctgctgtcctttgtggaggtgaaaagaggtggtgttgccctgaacttcagcaaactgcagggacacgtgttgttctaccccaggtcagagtgtgtcggtcatcactcgatgccactcacagaccaccaacttcagaatatctaggtgtaaagctctgtacaaaagttgtaacataataatgtaaataattttacattattattaataaattattatttatagtacactattacataatgtaaaggctattaaaacatgtttgtctt

SEQ ID NO: 201784 - DNA, 315 bp, Homo sapiens
tacttttttttatattttttagtagagacggggtttcaccttgttagccaggatggtcttgatctcctgacctcatgatacgcccacctcagcctcccaaagtgctgggattacaggcttgagccaccatgcccggcctgtttttgtttttaatctcccatggttaagaaaataacccatgataaaaggataatctttggcctctgttgggtacagagaacaggcaaactacactggatgtgaacatggcatcgtgagtgtttttttgtttgttttgtttttgttttgagacggagtctcgctctgttgctcagg

SEQ ID NO: 201785 - DNA, 537 bp, Homo sapiens
tgctgggattacagtcgtgagccactgtgcctggctacattttactttttcttaagatggatgcttcaggttaactcaaaagagtaactgaggataggaggagaaaatagccttgaagaacgcatttctatatctttcttatattaggaggtaaatatagcaccctatttacattctaatcccaaagtttaattatatctctatatagtaagaaatagggctttaaaatcatgacacagaggtgtgaaagaacgtggaatgttcaagaaaaagtagttgagtgatgagagaatgggcaaaggaagtagagtttgggagtggcagatgctaagcttgaaagttaggctggattctgaatgtagggatgctttacagcgtgtgaaggagtttgaactattatgtgggcgatgcatttggatagaagtttttaaatagaggactgatatgactaaatttggtttaaaaagatgattgtttggaatgtggcacacagatgagagagacacttaatgctaaataactatacggtgactttca

SEQ ID NO: 201786 - DNA, 304 bp, Homo sapiens
ataacccagtactaggacttctgaggcttaaatcgacttgtatattgcccctaaaaatgtttctactaatttctactcctaaagtatattaatttagatattatctttgttttttcatcagctctgagaattgtatccaaaaacatacgagggaattaactgcatccattcagtgacaactgcaccattacaaagaaaggataggcataaaactcaatgaccaaaaagctatgaagcagttccctccttctctcactgaccggtaacccaaacacccaggaaaaaacaattgcagaatatagga

SEQ ID NO: 201787 - DNA, 269 bp, Homo sapiens
gaaatactaaaaacttaacctcaagaatttcattaggcaaagctcacaatattttttttggagatattctttaaaaaataatttatctttcttcaaaatcttcaaattgtaaaagtaggtgaggagtaggacataatttattctactgtgttggttaataaccttgaaagtttacttaaaaggcagtctctttcctgattatacaaaacatttaatgggaggaaaaaagcgctcttgaagtattgccatacacagacttttaaacttac

SEQ ID NO: 201788 - DNA, 165 bp, Homo sapiens
caaccaccattgggaccctggatcctccagggccgctcgctgcctgttctccagtggccacctgtgaccaggaaggtctccttccttcctgttgtctccatctatttaaaaacaataacaaagtaatgaatgaatttccttacaataaagcctctcatgtctgta

SEQ ID NO: 201789 - DNA, 395 bp, Homo sapiens
ctgctttcaaacttccaggctcaagcaatcctcccgcctcggcctctcaaagtgctaggattacaggtgtgagccaccgcacctggcctatattatttttatcaccacattaaataagatctaataatcacagtgattttgccgtggtgacaagtgtcagatgtgtttctggttgcaatgcaatctgaaagtatctgtggtttttattagggacaaacggacaaagtcccaggtcctgtggttgtcttcattaataattgagggaatggtaattatcagttagagtcagtgaaaataaagatgtgaaatttttttcctccatcagaattcacagacaccctgaacacccctaagaggctcagggaccccaggctgaagttcacctaaaagttctt

SEQ ID NO: 201790 - DNA, 378 bp, Homo sapiens
cgagttaggaggactgcttgaatccagaagtttgagggcagcctggaaaacatagtgacaccctgttctctgtaaaaaaaatcaaaaaattagccgggcgtggtagcacacgcctgtggtcccagctacttgggaggctgaggtaggaggattgcttggatccagaagatcacggctgcagtgggcctggagtgacagagcaagaccctgtctcaaaaaaagaaagaaagaaagaaagaaagaaaaagaaacaggtgtagggctggacacatggctcatgtctcatgatccgcccaactcgggctcccaaagtgcttgggattacagtgcgtgagcccaccggtacccggaccagtacttgtcagataagtaacactt

SEQ ID NO: 201791 - DNA, 377 bp, Homo sapiens
gcatcacctatgaattattctgatccaaaaaatatttaaactggatatagttaagcctgtaaacctaacttccactttacaggaaataaagcaatgagttaaattacagcatgagaaaatggacaaatccagaatgtaggatattctctaaaatgacttgcttgttactttcaaaaaatattcatgtaataggggaaaaaacatacataggtgaaaagagagataacagatatacagtacttgaatacggattgatcctgatttggagaggaaaaaacagctctgaaagctgtcttggagaagttgaaatttcaatataaactgactacattcagtgacattaaggagttatctttcatttttcttaggtgtggtaa

SEQ ID NO: 201792 - DNA, 472 bp, Homo sapiens
gtgcccttcattctttgtggggtctaatttcttcattgagtaaagactcacataagcttcttctctttctaaaacttagttctgatgaagccatccctccacctgttgtcagctgtgggaaccccatgtcacacacgtcctgtcccatgagctctatacatccccaccggggcaattctgccaatacgtaaattcacctaacgagcaatttaccagttgtagtcacttactggaaatgtgttcacagactttgtactgaatgaatccaggtggtctagagaggttgggaggagccaggaccaacattctgggacttcatacttcccctttctactcagtttccccctcttttttcccattatcctccttcctaactctatgctcctctctgccctcacaatcttgtgaagctggagacagctgagagccaggcaggttgcatatcatgaaaaccacctcactcatcatctgt

SEQ ID NO: 201793 - DNA, 590 bp, Homo sapiens
gaattctggtgtttgtccaggttccttggcttaccaggaatgaagatccgaactgtacagacttttttcaaaagtatgtacatatgtatgtatgtatgtatgcatgtatgtatgtatgtatgtatgtatttcctctttttaaatttaaaaattacaggatacatgtgcagaatgagcaggtttgttatataggtatcctttgctatggtggttcgttgcacctattgacttatcctgtaagtttccttccctcacccccagcccccaacgggccgtgttgtgtgttgttcctctcactgtgtccttgtttcctgaatgttcaactttcacttattagtgagaacatgccgtatttgttttttttttgtttttgttcctgtgttagtttgctcagtatgatggcttctagctttatccatgtgcctgcaaaagacataatctcattcctttttatgactgcatagtatattttggtgtatatggaccacattttctttatccagtctagcaatgaagggcatttgggttggtttcatgtctttcctattgtatatagtgctgcaataaacatacatgtgcatgtgtcttta

SEQ ID NO: 201794 - DNA, 401 bp, Homo sapiens
cctttgtctacaacttcgggtagcttcatagcccatcccccaccaaacccaaccaataatcatcttttttaacaagtaaacaaacaaaaaaacccatcaaatctcaaatctcttgactcaaaacctctgggagggaaagcccctcaaagtctccacttttaagctctccatgtgtccaccatccccccaaccagctctggcccaggtttggaaacctgctctcgcccaggttgtccttgcagtgggatccagggaccaccagttccagcacaggatgggcttattttaaaatgcagattcctggactcaccccagacttaaacatcagaatctctaggggtgcagtctgcacttgtagttagttttgcaggaggttttgaagcacattaaagacagagaac

SEQ ID NO: 201795 - DNA, 555 bp, Homo sapiens
agccgccgcctcctcttcctctgcctcctggaatagggacctaccctctgcaccctctactttttgccttgtcgccaggtcgctcccaccctcccaccgccccctccccagacaataccatcagactctccgaacgtcccaaccctcgccttgcccctcgaatgctccccaagccggaggggagccgttccacctttctggcaggaagactctggcaaggggagggaggcgggcgccggggagtcctggagaggcgggagggcgtggcggcggctctcacgttgcagccctgcctgcagctagtgggatgccggcggggccagcccgctcctgcttgcacacggtctgggaagagctgccgagaaaacaccgtctggcccggagaagcgcaaaccctgctccttctctctctcctgaaaggaacggaaacgttcccagcgctgcttaggcgctctccaagcgcggactctactgcggctcccaccgcgctccctgcatctcgcccttccctcctggggtcctggacttctctctgacaaagagccctccttcccc

SEQ ID NO: 201796 - DNA, 569 bp, Homo sapiens
agggttgttttacagatcaaactaatgagcaggtgctggaaaactttcagcacagtgtctgtctgagctcctactctgttctgggggctgggggcagagtactgagggtatgaaaaggaaccacagggcagtggttcatgcacaagtatatgtatctgtcaatttctctttcatcccttgcctgccttattcaaatactaaacaaaacagagtgatatgaggcagcttacagtatacctataatacaacagaatcaaaaataaaataagctgggacgtaggataaatgaaggtaggaaaatacactgcagctgggaaaatgttagtaaacaaaatgtacatcagaaaatcccatatatttgctaggcatagacacaaaatttgttctgaacttccagatagtcacgcacaaaactatgcagtaaagattaataatgttctcaagttaggcaaaagccagtttccaaggggaagaccagctttcctgttgcaatgtcatgaaggggataaaaagggagaaaacgacattggctataacaggaaattcaggagagtttttaaagagctatt

SEQ ID NO: 201797 - DNA, 1481 bp, Homo sapiens
  misc_feature (2)..(2): n is a, c, g, or t
gnctacgtcccctttctcatcgtcggctccatcttcattgcgttcatcatcctgggctctgtagtggctatttattgttgcacctgtttgagacccaaggagccctcgcagcagccaatccgcttctcactccgcagctatcagacagagaccctgcccatgatcctgacctccaccagccccagggcaccctcccggcagtccagcacagccacgagctccagctccacaggcggctccatccgcaggttctcctttgccagggctgagccgggctgcctggtgccctcaccgcccccgccatacaccaccagccactcaatccacctggctcagccatctggtttcctggtgtcaccccagtatttcgcttaccccctccagcaggagcccccactgcctgggaagagctgtccagacttcagttccagttgacacgcccaggccatgaatccacaactcagtcagatggcagacaggtggagccctgctcccattgccacatgcaattctgagaaaatttcccttgtaactgatcagtgtcatggaggagcatgctaggaaaacacagcaccttctaatttgaaagttcctgtctccaatcacagaaaggctaaaccagagaactgttttctggttttgcaaacatgtgatcattacatttcaatctatgctacttttattcaaaatatgcagcagtttgactttaaagttgcaaactggctaaaaacgttttactggacattcagctatattgcttagaaaagggctacatgtttctttttcatataagttgttcattgagttatgataggaatatattcataaataagcaaagaaaaatacctaattgtaattatcaaaggttcacttaaaaaattaactattaggtaaacttaagggggcagtgaaaaatctatttatgatttcgggagtaacctaaccatgaataatattagcataatgagaacatttactttttaaataaataactaaattttgtttacaatatgagtttttccagaatacaaggtttcaataatcacatgaggagtttaaagttttaaatatatactcagacattcattgtaacacagagtgtatgtaaaatcatttcccccactcactggagggagtatttattgcagactttttgttcagcaacatttagtgtttcagtgaaagttggacagttggggcttaaaacatttatttgtaaaatgagctatgttcaaatgtaaatatttgtaatttaatgtatttaccacattgactgtactaattatttagtagtcatactgtaatttttatgttaataataactggagttcaaagtctagctattggtataatcatctaatattatatatatctccagtgcccctgaattttatgtttgatgactatatatttgggcatatatcttgttggattagaataaataaaacactttatattttcatgaactctaaaaaaaaaaa

SEQ ID NO: 201798 - DNA, 318 bp, Homo sapiens
gatccagcaaccaagagtttaactccaagcacagcagaggggccccaggcccctgctccaactgtgctgcctcctgccactctgattgggggtggcacccttcaggttggtgagtgtccctacaggttgtcccacagctgcagacaccctggccacacacctctcagactccagctccacggattggggaaggtcctgctggagtctgcttgcatttcttctcgaagctcaaacgcctgctcctcccttcctggcctcctccctcccttccttacccctgacccaattaaagaactcacctaccgggaagcactatat

SEQ ID NO: 201799 - DNA, 458 bp, Homo sapiens
ggttacagatcatgttggagggcattcatttattgttatttgaaaatgacttcacaaagagtgttttctctggaataatttggtttgtacccatttggttatttttcagtaaatacatgttgagtgcctgtaatgtgccataggctgttccacacaccctagctacagcaatgaacaaaacagcaaaatctcttccctccaagagcttagcatctagtggagagaatgcagacaataaattaagatgaagagtctaatataggatatctggatgtgtattgttgttgagctggtgtccctgttgggggaaggagggtctaggacttcctcttctgctatcttgctgacatcattttccgtttggaattacatctttaatatgttaaaagaaaatagctactaatgtaggattccatggcttttaatagaaagactttaaaaagaaaaactaaggagat

SEQ ID NO: 201800 - DNA, 492 bp, Homo sapiens
gagaaatccagtgttggagaaacatttggctaggtgatgatacaattaaccaagagattatgagaagaatatatctagatacaaaaataggaaggagaaaacactaacttctgaattttaaacaagttgagactgaggtgtttgaagcatcaataaagagttgtgtaagtgtagtactcaaaaggtcaagattagaaaaatagaataagtcacagtttgctcaagttcgaaacattactattactattactattactattaccaactatataccccccaaagaaatccacagaatgagcaagtgagcagagagaggacaatgacaaactcctgtaaattactgcagtactccgattcataatatctactctggttgccaagtagtttttttttgtttgtttacttcttagatctgaccacattaacctccagttaagtgaagttattatatgtaccatataaataagatttaccaagcatggttctattcat

SEQ ID NO: 201801 - DNA, 318 bp, Homo sapiens
gaatttcagaattgtggataaaggtttatggctgtgtgtgtgctcctttaaccatgtactccatcccttttatcccttttgtgtggtagttgggacacaggcaagaaatagatctctcaggactgtttggagtttggctacataggcaaagataaaagtgctctcatgttgtgaatatcgtgctaacattcttccttgccttctacctgctcttgaaatatgatgtgctgagactcaagactggtgatattggctagcagagaccacctatggtatatttgctttgtgtaagaataaaatgtctacgtgtttttgttt

SEQ ID NO: 201802 - DNA, 673 bp, Homo sapiens
ggcaaccctgactcggaccgctcgggagagccccaggagaggccagcgccgcgcagcagccgccccgctgcgcccacctccccggctgctcccggagggctcacaaaggcggtggccgcccgagtggccttctccatccaggcgttcgcgtcctcctccccaccttctctcccgaaggcgaaaatggcagggccaggcgagaacctgggacagcggtggccctagccctgcgatcctcacccctcctgctaggagaggctgcgggctgcccgcggacgatgtggccgcggctgctcccgagcgcatcttcggcccgggtccccgccgccacccctcttctctgctccttccatcccgcccagaggagttgatgccgctgtcgccgccgccgccgctgctgaagccgcggctgatggatgccagggagtgccgcattgcttagcgaccccgcctctgggtttgctggtaggagcggctgctctttcttctttcttgctttggggttttatagaaaagataaggacatttttattttattcttcacaacgtcctccccttctcttcgtttttgaaatgtgcattcccagagatatccccggtcccctccctccccctccccccttttctccaaccccgcggcaagtccgtggaaatgaagggctagaggaaggca

SEQ ID NO: 201803 - DNA, 519 bp, Homo sapiens
acaccaaaattcatggatgctcctcaagttcggcagtctgccctgaagataggaaaacgtcctatacacacatacaaaaggtcagccgtctgtatctgtgggttccacatcctacaaatgctattatcttccatcccagttggttgaatctgcaggtgcaaaacccgtggatacagaagcccgactgtatttcctttttttctgagacagagtcttgctctgttgcccaggtgggagtgcagtggtgcgacctcagctcaccaccacctccacctcccagattcaagcggttctcctgcctcagtctcccaagtagctgggactacaggtgcacaccaccaatgcctggctaactgtctcactttgttgccgaggctggtctcaaacccttggctcaagtgatcctcctgccttggcttcccaaagtgctgggattacaggtgtgatgcatcacacctgctgtcttttattatataattttcctacctccctgaggtttatctaatattaatacactgt

SEQ ID NO: 201804 - DNA, 661 bp, Homo sapiens
gtaactttgcatatttccctttgtctaaacaaattaggaatagaagggaacttcctcgatctgaaaaagggcatttataaaaaccaacagctaaaattgtacttaatggtgaaatattgaatactttccccattgagggggagagtaaaacagggtttcctattttcatgatttatatgacatattaagtgctgtatttgaattcctaacctgtgagataaggataagagaagatatatataaaaatcagaaaggaatagtaagaatctattttcagattaccaaacaactactaaacctgataagtgaatatagcagaatatatagtcattacccaaaaatatactagaagtaaacaattggagaagtaagtagcaacaaaaaacacaaaatacttaggaataaatttaagccaaaaaaccctacagatcattgctaagagaaattaaagaaccactccccccaaaatcacgaaatatattgtgaattctatcaattcagtgttcttctagtcacagtggcaggaggcttttttgtatttcattcatatggagtgcagaggactggaatatccaaagcaatcttgaaaaaagttgaagccctgtgtggtggtgcactcctgcagtcccagctacctaggaggctgaggcaggaggattgc

SEQ ID NO: 201805 - DNA, 454 bp, Homo sapiens
  misc_feature (422)..(422): n is a, c, g, or t
cctagaggatccccacgccgcaccgccggttcaaagtgctggcattacaggcatcagccaccacgcctggctttcttctgtgtttttttactgaagtatttaggccattaacattgtttgtaattattgatatatttgggtttgtaacaatcatcttgctctttattctgtttctcttatctatccttaattctttttctaattttctgcctatttttgtattttttaaattatattctattttacttctactactggctaaatattacggcactttttagaattttgagtgctttttttttcctagaggctttcaacattcatttttagctttcaatgtctagttttacatattataccctatcgtatattttgctgggatctcacacaaataatacttccattccaccttctcacctttngaaccggcggtgcggcgtgaggtaccgagctc

SEQ ID NO: 201806 - DNA, 449 bp, Homo sapiens
  misc_feature (417)..(417): n is a, c, g, or t
gcgactagaggacccagcgcacgaggtcaaatgctggcattacaggcatcagccaccacgcctggctttcttctgtgtttttttactgaagtatttaggccattaacattgtttgtaattattgatatatttgggtttgtaacaatcatcttgctctttattctgtttctcttatctatccttaattctttttctaattttctgcctatttttgtattttttaaattatattctattttacttctactactggctaaatattacggcactttttagaattttgagtgctttttttttcctagaggctttcaacattcatttttagctttcaatgtctagttttacatattataccctatcgtatattttgctgggatctcacacaaataatacttccattccaccttctcacctttngaaccggcggtgcggcgtgaggtaccgagctc

SEQ ID NO: 201807 - DNA, 374 bp, Homo sapiens
accgaagttcttgcctggtagcctccattttctcgatgaaatataaggtaaagatagctgagagacttgtacagagaggggaatttaagggtcaattaagggtatggaatagtcatcttggagataaggaaattgactgaagttcttgcctggtagcctccattttctcgatgaaatataaggtaaagatagctgagaggcttgtacagagaggggaatttaagggtcagttaaaggtatggaatagtcatcttggagataaggaaaatgtcattacaaagccttgacaatgagtccagttatatgaagtttgtaagaaattagctactaattaagttttctttgaatgaaggaaagaatgcttattctatcac

SEQ ID NO: 201808 - DNA, 233 bp, Homo sapiens
aaatattcttaaatattccttgcagtgttaagtaaatattctttttttgtgtgtgtgtttttttaaagatttatagttaacccttcaataatgcaggagtaaagagcactgatcaaccaaacagttaaaaatttccatatgctatggtttggctttgtgtccccacccaaatatcatgttaaattgtcattcccaatgttggggagggaattggtgtgaggtgattggatcat

SEQ ID NO: 201809 - DNA, 463 bp, Homo sapiens
tgctatgctggtggtacaggctcagtgatgggaaattcaagtaaggaaaatagaagactatgaaagtcggtgaattcacttttgtcttctctggatatttagtcccttagcactgagtggaagggcttcacagaatccttggtttttcaagaaaagaggagaaaactcttctatagattgaaaaattatatggcacgtggattttgaagaaagtattttcaagggttagatatctcagatttctgttctgttgtctcttatcctcctctttccacaacctaatggaaaagctattcttactctccagcttctctacctttagaactggggaaacaccaccagcatgactcactggggtgtggtgacggttattttttcttaattagtcaaaatgtgcaatgtgctaattacttgaatcataagaaaaaaatcattaaataaaaatcacatttgactggcttta

SEQ ID NO: 201810 - DNA, 775 bp, Homo sapiens
tcccccacccaaacgaacaggaaggaaaatgtcagctgggctttgtgctctgttcctcaggctgccgcagctcccatctgttggagccaacgcagcttctaactgggcgactggcagggttggagggggtgggctgggcacagcgctcagttgccagagatggactgacaggccctctgcttgagaactccaggacctagggtggtgaggagaacagcctccctaggtcagggcagtagaggtgactccctgccagtttggtcactgtcataggggaagatgtaggtctccccatgcacccaggccgatggcaggctccgtgcccccctttcccgccagtctaggatgggctctggcccagcgttttgtccctgaataagaaggccaggagctcctcccattgcccactgcttcttaaagatcccttcaaaaaagagcactgggcatggagggtagaggtgggctctgcactgggcactggagcccccttgcctttgggccctgtggctaccagaaaaagccacatgtgggtggcctgacccactttcctggccaggtgctgttgtggcgaaacgatggaaacagaagggcagagctagggatctgagcctcctaggccttcttccttcccctgtgctgactcaggcttctccttcttgcggagggctctctctggtcctgggatgggtcctcattatttgcaaagcatggaactaaaggcctcagtgcctgggagattgaggtctgcccagggtctggcacctaggaacacccc

SEQ ID NO: 201811 - DNA, 645 bp, Homo sapiens
ttgcttgttttttgtcggtaatcatgaaattataccaccagctcacaagagctaggaggacttgggacaagattttagagatgttaaagcacgccatccacatgatctcattaaatcctgacaatcatgtatggtgccgggatttaccaagaacacctggcttattagggactctgggcccagggacctcggcacaacagaatcactggtgagatgctttgtgtggtgagaggctctgcggagacggggatggggagctgggcgtcttcccggctaaggaggagagagtttctatgacttagttagtttcacttctgaaccttcagaagcagccagggccaggaggacaccgcctgtcccagagcctccagaccatcaaaggccaccttcccttgcttctggggacacaccttgtctgtatcaggaggaggggctgcagtccaggaagccaggcggacttagccctggtgctccccacatgactcagctgcttcctcccaggggccccagatgccctgtcaaggacacgtcccagtactctcgtcaagctgtggcaaggacagagccaagatttcaaagtagggctgtctctctccgaagctcaacgtccttccaggacagggcactgtccatcccaagcaccta

SEQ ID NO: 201812 - DNA, 144 bp, Homo sapiens
attacaggagtgagccaccatgcccggccattgaatctccataaccatcaagaggtacagtaaacatccccattttaccactgagaaaacagaggcacctaaaagtcagttatctccaagataatatccacagacccagtaaac

SEQ ID NO: 201813 - DNA, 338 bp, Homo sapiens
gtgcgagggaaggaaggtcctgaggcctgtgttgaattaaaaagggcgtgactcaaagtattgcagccagctgcaggggagaactggaacagttcttgatgagtgccaaggtcagagctgggaagtcaatttcatgtgtgccatccaaaaggtgaggccaggacagaaaactagtatggaatattagttgtgcctgggggcaatggtcaacatccataacaggtatagtaatatagagatatggatatagaaatataatatatgtagatagagataaagacatatttggacatattggtacatattatataatacaataaaatgaaaatccataaaca

SEQ ID NO: 201814 - DNA, 376 bp, Homo sapiens
gtgggctccacaaggtcactgatgacaccaatgtcactcggctacagctggagacagagatggaggctctcaaggaggagctgctcttcatgaagaagaaccaagagaaggaagtaaaaggtctacaagccctgattgccagctctgagttgaccatggaggtaaatgcccccaaatctcaggacctcagcaacatcatggcagacctcccggcccagtatgatgagctggcccagaagaactgagaagagctggacaagtactggtcccagaagactgaggaacacaccacagtggtcaccacgcagtccaccaaaataggagctgctgagacaacattcatggagctgagatgtatagttcagtcctaagagat

SEQ ID NO: 201815 - DNA, 185 bp, Homo sapiens
acttatccaggtctcagcttaagtgtttttcttcataaaggccttttatgagcatattttatgtatttgtgagtttgcttaatgtctgtctgacataagctacacaagagtgaagtctgtccgtttgattcaccacaatataagcagtgtctggcacagggcctggcacatagtggtcccgctcc

SEQ ID NO: 201816 - DNA, 594 bp, Homo sapiens
gcaggtgatctagaggaccccatgtctctcactgaacctcctaaaattgaattaatacctctcctctgtgttcctatcaatttgaacacatatcagattgaaaataagctgggtgtagtagctcatgcctataatgctagcacttcagaaggctgaggcaggaggatcacttgagcccatgagttcaagcgatatacccacctcagcctcccagtgtgctaggattacaggcgtgcaccacctcgcctgcccatattttcctatcaattattctactattaatatttttatttaggccaggcgtggtggctcacaaggtccagcctaaataaaaatattaatagtagaatatacatacacatatatatatatatatttagacagagtctcactcttgttgcccaggctggtctcgaacccgtggcctcaagcaatctgctcacctctgcctcccaaagtgctgggattaaaggcataagccaccatgccagcccaagggaagccttttcgaagagctaattctgaatcttcatcctgtggattaataaattagtctggtgaaacagtgtgagaagagaatactatactgggcaa

SEQ ID NO: 201817 - DNA, 328 bp, Homo sapiens
ccatgaaggcttgatgagggcttaggagctttatttctacagaaataatccattctctgccatctcatctgaagttcggagaaacaagaattgcttctctattttcaaaccttatgttttcttttacaaataaaaatacatcaaatttatttattgagtacctactaaaattacgggatctatgtccttaaggaaatcatgctgctgtagaaattctgatgtgttatacaatgatttagaaatgtactgtggaatcttataaactgcatttgatatgtgtggctaacctcctaagataaaactttgtctttcataataaataactatt

SEQ ID NO: 201818 - DNA, 1200 bp, Homo sapiens
gaatctgccaaattttcttaggctcattatccactaccaccatattctgacttgtggtggaattaataatatttctagaagaaatatttgcaatatttaagcaaattttagaatttttatactagaaataagatcttggacataatgtaactgtatgtctaggtggtgctaagtaacgagactttctgcactgagttttagaatgaagaatgggaaggaaagctcttcctaaataaagcaggaaacatggataccagcttaccatttgtaaccagaggtgtttcttaatctttttcagatcagttgtacaaaagttaagacagcaataatggtttttatagaatgttctcatgacggttaaatattaagatgtatgtgaagtacatagcccagtactagaaagatctggcgtctcttctgattatttattgcctgtgctgtaccagttaatgtttggaatatcagtactgtattcaacagatatctatttgatatctagtatgtgattgggccagtaataggccctaaggggacagtactatttttatcttcatggtgctcactttctagttgaaggaggtagaaaaaataattattgcgggtagtgataagtgaaacaaaaataataagacaggattggggtagagtgacatgaattggggagaaggaaggattccatgagatcagttgtgaaaggaggcttctaagaaagcaacactggagttgagaagggaataagaaagagccaactacctggagattggtagaaggatgaaaagacatgcacaagatttgaagaagagtttatgaagatgaaggcttccaatgaactgagatttctacatcatggggagggtaataaaaatgctctttaaaatatgttaaacaaggtatctgtatctatgtctgcatgaaagtagagaggagacagaatagctgatgcaacagatgacagtgaataatcgagtatctacagcttctacaatgatcatcaaccaggttctttctgcccaactgcagcaagtcaatcactgagataatggattttgcaaaagagaagactattcatgaggcagccagtgaggaggtgaagaacaggtctcaactccacctcccagaagataaggcttagggatatttataggttatagaagtggggtcagctaagatgtgggaaaaggtgattgtcagtgggggaaa

SEQ ID NO: 201819 - DNA, 406 bp, Homo sapiens
gtgagacattcttgccaaaagcaaacccgggtgaatcatagctggagaccttatttctcatttatgggaaattaaggggacagaggaataagtttatgaccccacaaggaaacagatccaggaaagggaacgttctgtaacacattggcctgcccattgccaaagaaaatgtctttgaaaagaaaaaaaaaaaggccaggcacagtggctcacgcctataatcccagcattttggaaaaccaaggcaggtggatcacctggggtcaggagttcaaaaccagtctggacaacatggtgagaccttgtttttaataaaaatacaaaaattagctgtgcatggtggtgtgtgcctgtagtcccagctactggggaggctgaggcaggagaatcgcttgaacctgggagg

SEQ ID NO: 201820 - DNA, 516 bp, Homo sapiens
ttccacaccttcccctagggctccatgctgcttgtggagcctcacagccaggacctataataatagcctgtttgcagaggagtcagatacctttcctaggccagccctgacaccaagatccccacagaaaaaagcatcgtctccccgcaacctccttgccacttcccctaattacgcctggttctattccttattttctcctcttatttttttttctatcatccatccatggtggcctggaacactgcaagagagtaaattcaaaaacagaataaaactacgcttttgttcaagcacagaaaacaaaacttaaagtcagcaaacctgggttcaggccccagcagtgccacccatgagctgtgctccttgaacttaaagtcagcaaacctgagttcaggcctagcagagccaccgatgagctgtgctccttgtgcagctgctcatcccttttcagttctaagttccttgtctgcaaaatgatcaaactgtctcatgatgtcactgtgatgagtgagt

SEQ ID NO: 201821 - DNA, 615 bp, Homo sapiens
tttcctactgcatatgtgttccacatagccaccccagcaccatttgtgccctctgagaacacccagactcttctggtggattgtgtattctctaaaaattctccttggcctcacaccatccatttcagtatcctccctctttttctcatactcagctactccttcagggctactctttttctcttgcctggtgattaaagaagcatgagagattcatccactcatttgtgaatattgatcaagtgtgtactttgtgccaggtactgggacatagccccaatgggggaaaggaagtgttttcaaagagtttttagtctatttgggaattaaagctgtggaaaacataattgtttgatttatacttttgcaagagaacatctgctagcaacagctgacttaatcttagagaggccacataggggcctccctgagatggtaaagaacattaaagctgagccctgaaggagtgtgaatggtgtgtgtcatggggagagtagtctcagcagaggggatagggttgttgttgagagatgcagagagaggagctgaaaatccaggattcctagagcaagggaatcgttgagtggcatctgattgaggtaggaagaaggtaag

SEQ ID NO: 201822 - DNA, 432 bp, Homo sapiens
acaggtgttatgtggggcatactattgtttgcttttgttgagaatcaggtggttaatttttgactgttcttgatttctaatgctgaaatgacatgattctgttattcagcaaacttggaaatcttgatgttttgacaactgcctcctaggaaaactggccatatgttaattaacctagtagatggaaaattaaggattatgtgaggttaattttaccctgataatgacaaaaccttgatagcatttaatattaatacttcttctcaaaattgaatgtttatatcaagtactgatttttattttaaaaaagaaaaaactataatccttctgccttccaaaagccatgctgtgatagctgcccaggctgctctgttacatctcccatttattgtttacttttataaatttgcttctaagatggtatgtgtttca

SEQ ID NO: 201823 - DNA, 444 bp, Homo sapiens
tgcaaatatgactgctagaacttggcactgtcgtgtactttgatgactcatttggtagagtggaagaccgtcggtctctagaacttggcactgttgatcatctggtagataattctttgttgtaggcggggggtgccctgtgcattagcctcttcccactagatgccttccccctagttgtgacaaccaaaaatgtctgcagacattgcccactgttccctaggggtccaaattggcctggttgagaccaccaccctaggtagtacatgcttcaagcacttgaaggcctactatgtgccagccactgtgctaggtgctgcctaaagaaaaaaacagtagcctcctatctttggactcagtagaacacaggaagatagggttagcttgcgagtttatgagagcatgtggattggtatatccaaggttagtgatctgtccaccctg

SEQ ID NO: 201824 - DNA, 737 bp, Homo sapiens
cacgtgtatatatattatatatatatatacgtgtgccatgttggtttgctgcacccattaactcgtcatttacattaggtatttctcctaatgctatccctcccccagccctcaccccatgacaggccctggtgtgtgatgttccccgtcctgtgtccaagtgttctcattgttcagttcccacccatgagtgagaacatgcttgcaccgccgcttctaaatgttttaaaaacagacaccaatgcccttcattggggaaatgaaagacttttaagtaaaacgattttgagtgaaataatatttgttgttttaaaaagttaatattaaccactctccatcatatgttgaaattatcttaagatgtgaaagttaaaattagaaaccttgtaaaggaaaaataggaaatagtttcatgaacttgacacaggaaaatatttcttagactagatactgtagcactcaccacaataagaaatcaagcgaattgcacttcatttttaaaaagcttctccttattatgttgttgtttaacaacttaaacgctatctctagaccaggaataattatttgctatataatacagcaaaaaatatgtatgtataaatggactcattcaaaatatataaagaactcctattacaaagaaattgacaaacagcccagtatatcaatgaatataaaaatttgagaagatattttccataagaagatatctaaatgaacattaggcatgagaa

SEQ ID NO: 201825 - DNA, 230 bp, Homo sapiens
tctgaggatcccgtctcacttcatcgcgttcagccaggcaacaagagagaattcccgtctcaaaaaaaataaataaacaaatgaatctgtgcatctgcctagaacagctctgtaatatacaaagaggcacatttgctgcagcactgtttgtaattgtggaaaactagaaataatctgagtgttcccaatagggaaatgggtaaggctcattcatacaaaagaatacaaaa

SEQ ID NO: 201826 - DNA, 664 bp, Homo sapiens
ccttgctaatatcattgagccactgagttaatcaaccctggatattacctcttgttatgtaagactgcttgatgtgtaaaataatagatgtgcttgtcatctaagccacttttatgttattcgtattaacagaaaatgtgtattaatgatacaaatttccatgatggacccaaatgactatagagccacccaagcaaatatgaaatatttcaggaaaggaaatcagttagagcatagactgcatttctgaactctagttgattgtgctaccagcccgttacttattattataccatttagtctattatttccggctcctttttgtggcctacatggtgcttcatgtcagttcccagccttttcttccaggctctatcttctgtgtgagatgctccttgcaggaagtctaactgtttattactctggaggttttagtttgaagtttttttagttgacaaacaatgaatgggattgataattatcttctggggtccttgtgaccttccaattttcccagttgaagttctctatctgtagggtatgctctccttccttcagttttggggcttaccttgactctaatcaaggcaagatttaagtctaactcattagtgagattagcaagagttaaatcaacctaagcgaagcctgaccagataatgta

SEQ ID NO: 201827 - DNA, 284 bp, Homo sapiens
ctagtatttgatagaacaacagggtggctacagtcagtaataattataaatttagaacagacctcagggagtacaactggattacttgaaacacaaaggataaatgcttcaagtgatggataccacatttactctgatgtgattattatacattgtgtacctatatcttatacattgtattcctaaatatatatatataatcaccacctactatgtacccaccaaaacaaaatttatgaatgaaatgagaatcttctttaaaagacaaatactcccccattaaa

SEQ ID NO: 201828 - DNA, 276 bp, Homo sapiens
tcttcggaaagtcagcatggataacagactgatggaactctttcctgccaataagcaaagtgttgaacacttcacaaaatattttactgaggcaggcttgaaagagctttcagaatatgttcggaatcagcaaaccatcggagctcgtaaggagctccagaaagaacttcaagaacagatgtcccgtggtgatccatttaaggatataattttatatgtcaaggaggagatgaaaaaaacaacatcccagagccagttgtcatcggaatagtctgg

SEQ ID NO: 201829 - DNA, 487 bp, Homo sapiens
tgtcagattaccggcgtgatccagtcattcctggctggtgcatcttatatattattttcttgggataaagttaaagaagtgggatgggtaccaaagggtcagaaaagtttgggatggttgaaacgttattgccacattgcttttgcatgagaagcacctccaaaagggttggcctttagggctgtgcccaaatgagctttcttatactgtttatcatgccacttctggtctcgtcggtgactacggagcttcctagcagtacgaagtccacgacacttgcccatcctgtcggcgccacgggcctgagcttgaaagagctttcagaatatgttcggaatcagcaaaccatcggagctcgtaaggagctccagaaagaacttcaagaacagatgtcccgtggtgatccatttaaggatataattttatatgtcaaggaggagatgaaaaaaacaacatcccagagccagttgtcatcggaatagtctgg

SEQ ID NO: 201830 - DNA, 940 bp, Homo sapiens
cttaaacatctcatcgcccttcctccttccaacatctcattgcgccttccaacatctcatggctccttccaacatctcatcgctccttccaacatctcatagccaccatcaccctccttaacctctacattctacctacgccatgagatgttggccttccaacatctcatagcgggttgtgcattcttctctggagacaccaaatttcattggagtatctctccttacaaatgtatttccccactagattggcccctcaagaacaaggattgtattttagttacctctgttatctctgtacctggggaggagtgagaaaagagagcaggaaaggcaatggtatagtaccaacatttgttgagcttctattatgaggaattgtctatgctacacattgtacataaagtatgtatgattcacagtataaacattataatctggaatcaacctaaatgttcattagcagatgaatggataaagaaaatgtggtatatagacgcaacacaatactatacagccataaaaaaaaaaaagaatgaaatcttgtcattcatggcagcatggatgagcctggaggacattacgttaagtgaaaaaagtcaggaacagaaacacaaatgccacatgtcctctttcatatatgggaaaatttaaaaagttactctcatagaagtagagagtaaaatagaggctactagaggctgggaagggtagaggggcaagggtcatagggaaaagagagttaacggatacaaattacagctagaaagatgggaagagtgaattccagtgttctaaagcagggtaggtgactacagttaatgattatttattgtctacttattgtatattattgtatattttcaaatattgtatattttcaaagaggattctgaatgttcccaacacaacaaaataataaatatttgaggtgatggat

SEQ ID NO: 201831 - DNA, 1538 bp, Homo sapiens
gagggagagggagagcttctttaggttcctggtaaggatctctgaagacaattccttaggcttggataattcccagacatttgctaaaaagcagcatcctccaaagctttaatttggatcacaggaaaatgatgctcccgcctcagattcaaacacagttttatctcacactgcaagctccctggcatgggcaaagtcctcgatgcctttcctggtggtttccaacatcaaggacatacttgttcctcctcctagctctctccctcagccaagtccttccttacaatgaattgtcctgcagaactccctcttaagcttggcttctgggacagaaaacctactttctgaaagggtatggggactgtcagagcatgaactggactcaagctcccaattacagagcagacacaaggctctgcctgcaccaggccatccctggatttctgcagctccaggactctcttccagcatctagatgcagctactctcattccagctttgtgtcctgtttgatgcaaaatctttattccttcctgtttcaatccctgttgcatattctgtgtgacaaagcaagaagctggaaatcgagttctgagctttatacccagctctgccacaaatgtgccatgaccttgaataagtcacatgacttatctggacctggattctctcatctgtaaaagaggaagctgagctatactactttttaaaatgtctccagctttaattttattagaatatcagctgcttcctcctctggtttctcatggcaggttgtgcattcttctctggagacaccaaatttcattggagtatctctccttacaaatgtatttccccactagattggcccctcaagaacaaggattgtattttagttacctctgttatctctgtacctggggaggagtgagaaaagagagcaggaaaggcaatggtatagtaccaacatttgttgagcttctattatgaggaattgtctatgctacacattgtacataaagtatgtatgattcacagtataaacattataatctggaatcaacctaaatgttcattagcagatgaatggataaagaaaatgtggtatatagacgcaacacaatactatacagccataaaaaaaaaaaagaatgaaatcttgtcattcatggcagcatggatgagcctggaggacattacgttaagtgaaaaaagtcaggaacagaaacacaaatgccacatgtcctctttcatatatgggaaaatttaaaaagttactctcatagaagtagagagtaaaatagaggctactagaggctgggaagggtagaggggcaagggtcatagggaaaagagagttaacggatacaaattacagctagaaagatgggaagagtgaattccagtgttctaaagcagggtaggtgactacagttaatgattatttattgtctacttattgtatattattgtatattttcaaatattgtatattttcaaagaggattctgaatgttcccaacacaacaaaataataaatatttgaggtgatggat

SEQ ID NO: 201832 - DNA, 904 bp, Homo sapiens
  misc_feature (1)..(1): n is a, c, g, or t
nctcttctccctgacaagtctgagccctgaacaaagagttaagttaccttttaaggatttcgtggggcggcaggggggaatctgtgcaggaggaagaatattacagaatgcaagaaataacagcatgcccagcgtgggagggcttgcacagacagaagactcgatcatgttatggaagggggccgattggtagagtggttgtcagtgcagtgaggggttgggatcgagtgcaaagtgaagaggtgggcttcagacaggggcatggacacttcataaactgttgtgggataatttaggaatcagaccgaggggttgaggaggatatattatttaggtgcaccggcccagtcggattaacatccaaaaagtctgagccctgaacaagtctgagccctgaacaaagagttaagttaccttttaaggatttcgtggggcggcaggggggaatctgtgcaggaggaagcatattacagaagcaagaaacaaagacaattattcaattaattgagacatgcattatatcatttcttactttccaaggaaaaaatgtgttttatggcttgagtttatctgtctagtgaccttgcagctgcacagctagagaaacagggtcttcacaatgcctgggaaaggaggagagataaggcttactagccacagaaaaacaggcagataatttttaaagggctccagctctttctctttctcagggggaattgggttttcttacatagaactgagtttctgcttacacattctttaatttcttttaactcctattccaaaacaagtaagttcttcttatttttgggggggatagagtctcgctccatcacccaggctgaagtacaggggcgcaatctcggctcactgcaacctccacctcgcagatttaggtgattct

SEQ ID NO: 201833 - DNA, 295 bp, Homo sapiens
atgctcggtcccaaatctcatgactccttccaacatctcattcccccttccaacatctcatgcctagagccagttaacaaaaaccgggattgaaataaaaacactagggccatgagatttccaacatctcatcgctccttccaacatctcatcccgccttcccacatctcatggctgatgaggttggagagatgggcaggcattatgctaaagagcctgtattccaagcttcctgaaagctttgggaaacaatctgcttttgctcctttaaaaaccctaactctgggccaggagt

SEQ ID NO: 201834 - DNA, 357 bp, Homo sapiens
ggaaaaaaggggtaaagaacgggtggaaaaatataaaacaacacagtaatagatgtaaacctcacaatgtcagtaatcacattaaaaataaatgatctaaaggcaattaaaaggcagttagtatcagactgagtgaaaggtgagacccaagtataaactataagaagtgtgttttacatataaagacaccaatagcttaaaagtaaaaggaaggaagatgatatacaatgagaatactagtcaaaagaaaactggagtgactttttaaatatatcaaagtagatttcagagcaaagaacattaccagggataaagaaggtatcatgagggccagtctgccagaagaccataacactc

SEQ ID NO: 201835 - DNA, 868 bp, Homo sapiens
aagtgacatattctcagacatcatttttcaattaagtatgtgtcttcactgcttgccaggatggctgttatctttcaaaatgtaaaagactgagaaaatacatgtttattttcaggtattatatcttgatcaatcctctttaagaggaagtatattttaggtagtaggtggataatggagaatttccttgtgtcacacctaagaagcaatatttttgttctttaatagttagttagtttaatattttgtgccaccttcttttcatgtcttgaaatgtgatgtatttaaacgcttctcgttaccttgagcttaaagtcttgcagcttattctgagtgtctgctatttgcaagtgtaatcttttgctgaaaaataagtttattattacagaaaagaaattgttcccatattttctgattaatgatctcaaattatatgcataaaagtcttaaaggccaggtgtggtggctcacgcctgtaatcccagcactttgggaggctgaggtgggcagatcacttgagctcaggagttcgagaccagcctgggcaacatggcaagaccccatctctacaaaaattataaaaattagcctggcttgttggtgggtgcctgtagtcccagctatttaggaggctgaggtgggagaattgcttgagcccgggtggtggaggttgcagtgagccaagattgtaccactgcactccagcctgggtgaaagagccagaccccttctcaaaaaaaacaaaaaacaaaaaacaaacaaaacgcaaaaccaaaaaagcaggccttaaagcactgcgtagcactgttttgaaaaagttgaatttatttcattttattgactgctttggattttatttctttcctct

SEQ ID NO: 201836 - DNA, 333 bp, Homo sapiens
taaggcctttgaatcctgtttctgaactggcacagataacaccttaatgttaataagaaagtcctatctttttcacacaagacacctccagcactaggtcaacatgcctaaatgaagatcacttatccaccagcaaattccagcctgaacagttcagattaatgccaagtaggctttccagatcaaaaattatcccttgaagctgctagtggagacctggccaacggccctggtagttcattaactgaattctagtcaacctcatttatcacattccctcaaagtgatttattactattttaaggcctttgatttgaacagtgcttcataata

SEQ ID NO: 201837 - DNA, 419 bp, Homo sapiens
attatataatggtaaaaggccttgtacaacaggaaaatatcacaatcctaaatatatatgcacctaaagctggagttcccaaatttataaaacaattactaccagacctaagaaatgggatagacagcaatacaataatagtggaggatggctgggcgtggtggctcacactgtaatcccagcactttagaggctgaggcagtcagatcacctgaggtcaggagttcaggaccagcctggccaataagtctctactgaaaacacaaaattagcctggtgtggtggtacatgcctataattccagctacgtgggaggctgaggcaggagaattgcttgaacctgggagatggaggttgcagtgagctgagatagtgccattgcactccagcctgggcaacaagagtgaaactctatctca

SEQ ID NO: 201838 - DNA, 210 bp, Homo sapiens
taataagtcaagggggaaatgtatgcttttctcaaggaaaatgttacttttatattaacgtttctggtaattacagcaacatctagtggagacaaaccagcattacaatccactggtgtaactaacagtatcaaactctactctcagttatggtctataggacccccattaagagtggtcatcttaatgctaatattctaaccctatatt

SEQ ID NO: 201839 - DNA, 640 bp, Homo sapiens
taatttcctttatcttaggagatacttatttccaacaatgttacatattttcagtatgtaaatcccaatatttcaatattgcttctctaatgtaatctctgtgtcttgtgcttctgtaacaaaagccaggcctatctaccagtttagcatctttgatcaaactattagtggagttttaaacacaggaaaactgacctcatcaactttcttccactacagaaatggaggcagtcatcttgttaataggaatccaggtccataaagagaaaggtttgataaccttagaacttgagtgttacttttgaaaactataagttgtgtaccgttttgttctttggtaccttaccaatttttgcacactacagaacaaatttctttttatagaaataaaaggagttttagagagacaaggtctcgctatattgcaggctggtctcaaacccctgggcccaagtgatcctcccgcctcggcctcccatagtgctgggatcacaggtgtgaggcaccatgcctgggcaattaagatatatttttaaaactatgaatgaaaactgaactttagcaaaagttttcgtgtacttattgagatgattatgatttttttttttaaagacagagtttgctttttttgagacaaggg

SEQ ID NO: 201840 - DNA, 778 bp, Homo sapiens
gacaagttgcagaataatatatagagagagctatatatagcatggtcccgtttatgtaaatagtgcctaattttaagtattcaataaatgtaagccattattattacaatgaacatgtactactttataatcagaaaaatcaacaaatttattaaattaagtgtttatgtacttccttatttaataactaaaaagtatattacttcaagaaaagtaaataacatgtgcttgcctctctggcaatcttaatttaaaaaacacttcataattatacaatgtcacatttaaatacacctaagttacaggaatcaagtagcactgagaagaacactgcaacacttccaattacctaggtttacattcagcatgttagaccacagagagctgtgctgacatgactatatttagagtttaaaatcataaacaggccaaatcagaggtggtatttcaagggctgtgattaacaagattttcttgatcaatgtcttatgctgtctgaaaagtagggattttggtacagacttttttttttttgagatgaagtttcactcttgttgcccaggctggagtgcaatggcacgatctcggctcattacaacctctgcctcccgggttcaagcaattctcctgactcagcctcctgagtagctgggattacaggagcccggcaccacgcctggttaattttttgtatttttagtagagacagggtttcaccacgttgaccaggctggtctcgaactcctgacctcaggtgacccacccgcctcagcctccc

SEQ ID NO: 201841 - DNA, 525 bp, Homo sapiens
aaaaggtgtaaacttagacttatctatctagcagaggaggcactgtacatctccaggcagtcacaaacatagctttatccttctttttgggaaaatgtgtcttgtctaagtttatactgtcatttctctcctaccagctaatgatatcttaagttagaacatcatgccaagagaagtatgttttcaaccaagaaagcaaaatcaacatgatcctaaatgaactgcttctgcatgtcaacagtcttgatatacctgagagagtgagatacagagtatgttgttaaactttttataattacaaatattgcttgtatttcttttgaaatttgccacacgctgatattaaaaataatagatagaaaatcaagagagaaacttgtagctttaatttattttgttgtttggataattaagattgtaggatagacagactaataattctctacttttaaaggaaaagtatttctctttgagtctccttcactttgtaaaccatggttgaaacaagttcagagattgaaaggg

SEQ ID NO: 201842 - DNA, 613 bp, Homo sapiens
cgtcttcattgcgcctgcccagcttattggggcctaagaatgcctgggacatgatgaatggtgctttttaaatgtgtgttatatgaacgaaataatgctttggacagataggctgctgagaatttgacttttatcagaactcaagggacacaagaggtattagttttgtttgtttccgcattcattttctgtttctctttttcctgtggtgctcactgagggaggttagtctagtggttaagagcatattcttcagagagaggcagctataggttcaaatcctacctctaccattaattagccctggggccttggacgagtcacttataatttttgaacctcaattttctcatttacagaatgggaatacaaatatttaccttaccagataatttggtgggatttctacaagttaatgttgagttaaaaaagaaaaaaggcaaaaaaaaagtgtggtatgaagataaatggttaccataaatacctaaaatgcatgtgtgtgtgtgtgtttgtgtgtgtatatataaaacacgcatcatcctatacaaacttgtatacgaagtaatatgtaaatacagtggataatttagaaaaaaagttgtgtttactctgg

SEQ ID NO: 201843 - DNA, 300 bp, Homo sapiens
ggagacaactatggaatcacttgcagtggtaagtccttttaaaagcactggacacttagcaaagtgccggtcacacagaaaccctcccaagaaatgttacctattaagtattacgaaaaaggcaaagggcattcagaaggcacctttgaggaggagtgaataagagtttctctttacccaatgcttaaagtatgtacacatacaataccttaaataatccttccaatgaccccatgaagcaggtgttaatagcctcatttacaaacaggaaaaccactcccagaagtcaagttacttgtc

SEQ ID NO: 201844 - DNA, 408 bp, Homo sapiens
tccaaattatatcactaatcattaacaagaaaggcatgagtctggtagtcagattcactcctcctggagctctgaggaaacactttcctcttgtcatgtttgttctcatgtctgccatttaatcaacaggccatagaagtgtaacatcagtttggcctcttttaatcctcacttggaaactcatttctcattcctcggtctcccttggagtgagtgacttactagaaaacaaaggtagttcatgattattcatttctatttagaatttgtggtcttttgtgagaaaattgccccaaatcctcctactacagaaagtgttgatttttcaagctaatttttcattctcctcactgactaacaaagtaatatccaggctgggcaacatagggagacctcatctctacaaaa

SEQ ID NO: 201845 - DNA, 416 bp, Homo sapiens
  misc_feature (307)..(307): n is a, c, g, or t
  misc_feature (322)..(323): n is a, c, g, or t
  misc_feature (364)..(364): n is a, c, g, or t
  misc_feature (395)..(395): n is a, c, g, or t
  misc_feature (403)..(403): n is a, c, g, or t
ctgagagcgagcaagggctgcgagggctgccagcatgctgtcacctctcaataggagatcagttaatgcatactgaaggaaggcttgttggagaagaatcctctcctgaaccctgtggagactctagaatcctgcggatgtctctctccctaagtaagagatgttacttcctggagggaatgcagtgttgggaatctgaagacccagctttgagctgaatttgctttgtgatacctgaaggagctgcaaatgaacacttcatagcaatgtggaactccaacagaaaccggtgaataaagatcagtgncccatatagagaccnnaggagctggagtcaggaggcatgtaccactgccacaagtgntccaagcccacaaaaaaagggggcgaagggngtaccccntattgccccaagg

SEQ ID NO: 201846 - DNA, 473 bp, Homo sapiens
gaagatcttgcccttggcatcagggcacatgtttttggaaggattaaatatgagcatctataaagggaggcgggcaacatgagtaccctaagaaaagtacaaacaaagtactgtagggggttaaagaagagatggcgctaggtttggcattttacccatggtataccaacatcccagcaaggtgtgccgggtatgcgagagaatggcagctgccttttcctggtgcctggcttattctccacacccttggccccccagcacagctaatgaggcattccttgtgctcctagttttgccaccccagctcctttctggcttccccagaaatctgtggtctaaaaagatgtcaaagtgcctcctagtctaattttccaacatgcaatgcttttagaagagcacttacaattttcactttgtgtgtgtttgaacagttttaaacaatgtcaccctagactagactgcagtggcacaat

SEQ ID NO: 201847 - DNA, 284 bp, Homo sapiens
gtgttaaccaataccatggagtttcctctcatttcctccctttccatatttctacctcctttctctaccagaaaaaccagactcttattattggtaatatgtttgcttactactcacttataatatgtttacatacccctgaatgtaaccaatctcccattgtcaccacctcctgccccaggcagatgtctgtcaccccatgctgggatctgacacccttgctgggcagcgtcccacatgggcaccctcctctgcttgagccgggctgctgtggtccatgctga

SEQ ID NO: 201848 - DNA, 2406 bp, Homo sapiens
agtttactctacatcatagcagagaaaatggacaaaacacagctgttttgcatgtaggagaatactaaccctgcacagattgtgatggtgatgtggaatatactaaagcctagaacgcacctcctctgcatgactaatatgttctgcacaagacatgaaggcacagacagcactgtctttcttcctcattctcataacatctctgagtggatctcaaggcatattccctttggctttcttcatttatgttcctatgaatgaacaaatcgtcattggaagacttgatgaagatataattctcccttcttcatttgagaggggatccgaagtcgtaatacactggaagtatcaagatagctataaggttcacagttactacaaaggcagtgaccatttggaaagccaagatcccagatatgcaaacaggacatcccttttctataatgagattcaaaatgggaatgcgtcgctatttttcagaagagtaagccttctggacgaaggaatttacacctgctatgtaggaacagcaattcaagtgattacaaacaaagtggtgctaaaggtgggagtttttctcacacccgtgatgaagtatgaaaagaggaacacaaacagcttcttaatatgcagcgtgttaagtgtttatcctcgtccaattatcacgtggaaaatggacaacacacctatctctgaaaacaacatggaagaaacagggtctttggattctttttctattaacagcccactgaatattacaggatcaaattcatcttatgaatgtacaattgaaaattcactgctgaagcaaacatggacagggcgctggacgatgaaagatggccttcataaaatgcaaagtgaacacgtttcactctcatgtcaacctgtaaatgattatttttcaccaaaccaagacttcaaagttacttggtccagaatgaaaagtgggactttctctgtcctggcttactatctgagctcctcacaaaatacaattatcaatgaatcccgattctcatggaacaaagagctgataaaccagagtgacttctctatgaatttgatggatcttaatctttcagacagtggggaatatttatgcaatatttcttcggatgaatatactttacttaccatccacacagtgcatgtagaaccgagccaagaaacagcttcccataacaaaggcttatggattttggtgccctctgcgattttggcagcttttctgctgatttggagcgtaaaatgttgcagagcccagctagaagccaggaggagcagacaccctgctgatggagcccaacaagaaagatgttgtgtccctcctggtgagcgctgtcccagtgcacccgataatggcgaagaaaatgtgcctctttcaggaaaagtataggaaatgagagaagactgtgacaactcatgacctgcatccttaatatccagtgacttcatctcccctttcttcaccacaattccaggcaatggcctgtcggaccagacaattctaccactgcaaagagttgtaaccattttctggtatcacatttatttttcaagacatacttttcaagacatcattcactgacccactacctgcattgagtataaatgcctggatgttaaggattccaatttaactttgaaaagaactgtctcattcatttacatttctgttacagtcagcccaggaggttacagtgagctctccactaagaatctggaagaaatgcatcactaggggttgattcccaatctgatcaactgataatgggtgagagagcaggtaagagccaaagtcaccttagtggaaaggttaaaaaccagagcctggaaaccaagatgattgatttgacaaggtattttagtctagttttatatgaacggttgtatcagggtaaccaactcgatttgggatgaatcttagggcaccaaagactaagacagtatctttaagattgctagggaaaagggccctatgtgtcaggcctctgagcccaagccaagcatcgcatcccctgtgatttgcacgtatacatccagatggcctaaagtaactgaagatccacaaaagaagtaaaaatagccttaactgatgacattccaccattgtgatttgttcctgccccaccctaactgatcaatgtactttgtaatctcccccacccttaagaaggtactttgtaatcttccccacccttaagaaggttctttgtaattctccccacccttgagaatgtactttgtgagatccaccctgcccacaaaacattgctcttaacttcaccgcctaacccaaaacctataagaactaatgataatccatcacccttcgctgactctcttttcggactcagcccacctgcacccaggtgaaataaacagctttattgctcacaaaaa

SEQ ID NO: 201849 - DNA, 3367 bp, Homo sapiens
cagttctcttcaagtcatgtaatcgacttttttgaattagttttcagtttcattttgttttccctaattcaagttgggaacacttcattttccccaattcaagttgggaacacttccttggtatttccttgctacatggactttagcaaatgctactttactctccttccagctactcaggaggctgaggcaggagaatcgcttgaacccgggaggcggaggttacagtgagccttttcctagttttactgttggaagcctaactcacaggagagattatgcaatacagtcctgaagtcaagggaggagagcatgtaggagaatactaaccctgcacagattgtgatggtgatgtggaatatactaaagcctagaacgcacctcctctgcatgactaatatgttctgcacaagacatgaaggcacagacagcactgtctttcttcctcattctcataacatctctgagtggatctcaaggcatattccctttggctttcttcatttatgttcctatgaatgaacaaatcgtcattggaagacttgatgaagatataattctcccttcttcatttgagaggggatccgaagtcgtaatacactggaagtatcaagatagctataaggttcacagttactacaaaggcagtgaccatttggaaagccaagatcccagatatgcaaacaggacatcccttttctataatgagattcaaaatgggaatgcgtcgctatttttcagaagagtaagccttctggacgaaggaatttacacctgctatgtaggaacagcaattcaagtgattacaaacaaagtggtgctaaaggtgggagtttttctcacacccgtgatgaagtatgaaaagaggaacacaaacagcttcttaatatgcagcgtgttaagtgtttatcctcgtccaattatcacgtggaaaatggacaacacacctatctctgaaaacaacatggaagaaacagggtctttggattctttttctattaacagcccactgaatattacaggatcaaattcatcttatgaatgtacaattgaaaattcactgctgaagcaaacatggacagggcgctggacgatgaaagatggccttcataaaatgcaaagtgaacacgtttcactctcatgtcaacctgtaaatgattatttttcaccaaaccaagacttcaaagttacttggtccagaatgaaaagtgggactttctctgtcctggcttactatctgagctcctcacaaaatacaattatcaatgaatcccgattctcatggaacaaagagctgataaaccagagtgacttctctatgaatttgatggatcttaatctttcagacagtggggaatatttatgcaatatttcttcggatgaatatactttacttaccatccacacagtgcatgtagaaccgagccaagaaacagcttcccataacaaaggcttatggattttggtgccctctgcgattttggcagcttttctgctgatttggagcgtaaaatgttgcagagcccagctagaagccaggaggagcagacaccctgctgatggagcccaacaagaaagatgttgtgtccctcctggtgagcgctgtcccagtgcacccgataatggcgaagaaaatgtggtaaggcattatttcctttatcaaaccatatacagtataaaaatgcttctttaaaagggtaattgaagttctgactgattcacatatcatcaagcaagacttttatacagaaaaaaacagcagcaggggttgcaggataatatagcacgaaaaatataattaggcttttcccaatgtctataattaaacaggctctacttgcttaaatacatggttgttcttcttgtctcctattgttatttgtagagaagatctccaatggcattgtgcatatgagggtgagccaatgtacttattcttatgatagaagcatgaaacatgggattgtatacaagtggaaagaaacacaactataattcacttgcaaattatagtttgattgtatacttcctttttactgcattccttttagtatttatgtgttccattaatcagagtataaataagggccaggagtgtggtaaacttgttttttccactgttaaaaaccatgaaacagctagtagggagattaaaattaactgataagactcagacttattttataatggtctcatggatctttaatttcagatgcaagcaatagactaaagctttttgccgcccaccccaaaacactactatcaataaatatttaagatataaatggttattctgacttgaacaacagacatttagagtctatttttcttgcttctagcctctttcaggaaaagtataggaaatgagagaagactgtgacaactcatgacctgcatccttaatatccagtgacttcatctcccctttcttcaccacaattccaggcaatggcctgtcggaccagacaattctaccactgcaaagagttgtaaccattttctggtatcacatttatttttcaagacatacttttcaagacatcattcactgacccactacctgcattgagtataaatgcctggatgttaaggattccaatttaactttgaaaagaactgtctcattcatttacatttctgttacagtcagcccaggaggttacagtgagctctccactaagaatctggaagaaatgcatcactaggggttgattcccaatctgatcaactgataatgggtgagagagcaggtaagagccaaagtcaccttagtggaaaggttaaaaaccagagcctggaaaccaagatgattgatttgacaaggtattttagtctagttttatatgaacggttgtatcagggtaaccaactcgatttgggatgaatcttagggcaccaaagactaagacagtatctttaagattgctagggaaaagggccctatgtgtcaggcctctgagcccaagccaagcatcgcatcccctgtgatttgcacgtatacatccagatggcctaaagtaactgaagatccacaaaagaagtaaaaatagccttaactgatgacattccaccattgtgatttgttcctgccccaccctaactgatcaatgtactttgtaatctcccccacccttaagaaggtactttgtaatcttccccacccttaagaaggttctttgtaattctccccacccttgagaatgtactttgtgagatccaccctgcccacaaaacattgctcttaacttcaccgcctaacccaaaacctataagaactaatgataatccatcacccttcgctgactctcttttcggactcagcccacctgcacccaggtgaaataaacagctttattgctcacaaaaa

SEQ ID NO: 201850 - DNA, 2401 bp, Homo sapiens
agcatttgactaagacggtatgaatttctaagtaagcacatatagaactggatgcccttgtggtacatctcaaggctgatttgaaagcttgagagaccatcaagaattggatttggggaagagcatgactaatatgttctgcacaagacatgaaggcacagacagcactgtctttcttcctcattctcataacatctctgagtggatctcaaggcatattccctttggctttcttcatttatgttcctatgaatgaacaaatcgtcattggaagacttgatgaagatataattctcccttcttcatttgagaggggatccgaagtcgtaatacactggaagtatcaagatagctataaggttcacagttactacaaaggcagtgaccatttggaaagccaagatcccagatatgcaaacaggacatcccttttctataatgagattcaaaatgggaatgcgtcgctatttttcagaagagtaagccttctggacgaaggaatttacacctgctatgtaggaacagcaattcaagtgattacaaacaaagtggtgctaaaggtgggagtttttctcacacccgtgatgaagtatgaaaagaggaacacaaacagcttcttaatatgcagcgtgttaagtgtttatcctcgtccaattatcacgtggaaaatggacaacacacctatctctgaaaacaacatggaagaaacagggtctttggattctttttctattaacagcccactgaatattacaggatcaaattcatcttatgaatgtacaattgaaaattcactgctgaagcaaacatggacagggcgctggacgatgaaagatggccttcataaaatgcaaagtgaacacgtttcactctcatgtcaacctgtaaatgattatttttcaccaaaccaagacttcaaagttacttggtccagaatgaaaagtgggactttctctgtcctggcttactatctgagctcctcacaaaatacaattatcaatgaatcccgattctcatggaacaaagagctgataaaccagagtgacttctctatgaatttgatggatcttaatctttcagacagtggggaatatttatgcaatatttcttcggatgaatatactttacttaccatccacacagtgcatgtagaaccgagccaagaaacagcttcccataacaaaggcttatggattttggtgccctctgcgattttggcagcttttctgctgatttggagcgtaaaatgttgcagagcccagctagaagccaggaggagcagacaccctgctgatggagcccaacaagaaagatgttgtgtccctcctggtgagcgctgtcccagtgcacccgataatggcgaagaaaatgtgcctctttcaggaaaagtataggaaatgagagaagactgtgacaactcatgacctgcatccttaatatccagtgacttcatctcccctttcttcaccacaattccaggcaatggcctgtcggaccagacaattctaccactgcaaagagttgtaaccattttctggtatcacatttatttttcaagacatacttttcaagacatcattcactgacccactacctgcattgagtataaatgcctggatgttaaggattccaatttaactttgaaaagaactgtctcattcatttacatttctgttacagtcagcccaggaggttacagtgagctctccactaagaatctggaagaaatgcatcactaggggttgattcccaatctgatcaactgataatgggtgagagagcaggtaagagccaaagtcaccttagtggaaaggttaaaaaccagagcctggaaaccaagatgattgatttgacaaggtattttagtctagttttatatgaacggttgtatcagggtaaccaactcgatttgggatgaatcttagggcaccaaagactaagacagtatctttaagattgctagggaaaagggccctatgtgtcaggcctctgagcccaagccaagcatcgcatcccctgtgatttgcacgtatacatccagatggcctaaagtaactgaagatccacaaaagaagtaaaaatagccttaactgatgacattccaccattgtgatttgttcctgccccaccctaactgatcaatgtactttgtaatctcccccacccttaagaaggtactttgtaatcttccccacccttaagaaggttctttgtaattctccccacccttgagaatgtactttgtgagatccaccctgcccacaaaacattgctcttaacttcaccgcctaacccaaaacctataagaactaatgataatccatcacccttcgctgactctcttttcggactcagcccacctgcacccaggtgaaataaacagctttattgctcacaaaaa

SEQ ID NO: 201851 - DNA, 3038 bp, Homo sapiens
catagctgaattcaatgtttattcttatggactacttagcatttgactagacggtatgaatttctaagtaagcatgtaggagaatactaaccctgcacagattgtgatggtgatgtggaatatactaaagcctagaacgcacctcctctggcatattccctttggctttcttcatttatgttcctatgaatgaacaaatcgtcattggaagacttgatgaagatataattctcccttcttcatttgagaggggatccgaagtcgtaatacactggaagtatcaagatagctataaggttcacagttactacaaaggcagtgaccatttggaaagccaagatcccagatatgcaaacaggacatcccttttctataatgagattcaaaatgggaatgcgtcgctatttttcagaagagtaagccttctggacgaaggaatttacacctgctatgtaggaacagcaattcaagtgattacaaacaaagtggtgctaaaggtgggagtttttctcacacccgtgatgaagtatgaaaagaggaacacaaacagcttcttaatatgcagcgtgttaagtgtttatcctcgtccaattatcacgtggaaaatggacaacacacctatctctgaaaacaacatggaagaaacagggtctttggattctttttctattaacagcccactgaatattacaggatcaaattcatcttatgaatgtacaattgaaaattcactgctgaagcaaacatggacagggcgctggacgatgaaagatggccttcataaaatgcaaagtgaacacgtttcactctcatgtcaacctgtaaatgattatttttcaccaaaccaagacttcaaagttacttggtccagaatgaaaagtgggactttctctgtcctggcttactatctgagctcctcacaaaatacaattatcaatgaatcccgattctcatggaacaaagagctgataaaccagagtgacttctctatgaatttgatggatcttaatctttcagacagtggggaatatttatgcaatatttcttcggatgaatatactttacttaccatccacacagtgcatgtagaaccgagccaagaaacagcttcccataacaaaggcttatggattttggtgccctctgcgattttggcagcttttctgctgatttggagcgtaaaatgttgcagagcccagctagaagccaggaggagcagacaccctgctgatggagcccaacaagaaagatgttgtgtccctcctggtgagcgctgtcccagtgcacccgataatggcgaagaaaatgtggtaaggcattatttcctttatcaaaccatatacagtataaaaatgcttctttaaaagggtaattgaagttctgactgattcacatatcatcaagcaagacttttatacagaaaaaaacagcagcaggggttgcaggataatatagcacgaaaaatataattaggcttttcccaatgtctataattaaacaggctctacttgcttaaatacatggttgttcttcttgtctcctattgttatttgtagagaagatctccaatggcattgtgcatatgagggtgagccaatgtacttattcttatgatagaagcatgaaacatgggattgtatacaagtggaaagaaacacaactataattcacttgcaaattatagtttgattgtatacttcctttttactgcattccttttagtatttatgtgttccattaatcagagtataaataagggccaggagtgtggtaaacttgttttttccactgttaaaaaccatgaaacagctagtagggagattaaaattaactgataagactcagacttattttataatggtctcatggatctttaatttcagatgcaagcaatagactaaagctttttgccgcccaccccaaaacactactatcaataaatatttaagatataaatggttattctgacttgaacaacagacatttagagtctatttttcttgcttctagcctctttcaggaaaagtataggaaatgagagaagactgtgacaactcatgacctgcatccttaatatccagtgacttcatctcccctttcttcaccacaattccaggcaatggcctgtcggaccagacaattctaccactgcaaagagttgtaaccattttctggtatcacatttatttttcaagacatacttttcaagacatcattcactgacccactacctgcattgagtataaatgcctggatgttaaggattccaatttaactttgaaaagaactgtctcattcatttacatttctgttacagtcagcccaggaggttacagtgagctctccactaagaatctggaagaaatgcatcactaggggttgattcccaatctgatcaactgataatgggtgagagagcaggtaagagccaaagtcaccttagtggaaaggttaaaaaccagagcctggaaaccaagatgattgatttgacaaggtattttagtctagttttatatgaacggttgtatcagggtaaccaactcgatttgggatgaatcttagggcaccaaagactaagacagtatctttaagattgctagggaaaagggccctatgtgtcaggcctctgagcccaagccaagcatcgcatcccctgtgatttgcacgtatacatccagatggcctaaagtaactgaagatccacaaaagaagtaaaaatagccttaactgatgacattccaccattgtgatttgttcctgccccaccctaactgatcaatgtactttgtaatctcccccacccttaagaaggtactttgtaatcttccccacccttaagaaggttctttgtaattctccccacccttgagaatgtactttgtgagatccaccctgcccacaaaacattgctcttaacttcaccgcctaacccaaaacctataagaactaatgataatccatcacccttcgctgactctcttttcggactcagcccacctgcacccaggtgaaataaacagctttattgctcacaaaaa

SEQ ID NO: 201852 - DNA, 245 bp, Homo sapiens
ggtgtactggtgcccgccagtagtcctagctgctcaggaggctgaggaaggagaatcgcttgaacccgggaggcagaggttgcagtgagccaagattgcaccactgaactccagcctggcgacagagcgagactccgtctcaaaaacaacaaaaaacagcaacaacaacaacaacaacaacaaaaaagggaggccatgtcttattcatcatcacattaccagcaagtgtccagtgcagttcctag

SEQ ID NO: 201853 - DNA, 554 bp, Homo sapiens
agaccctggcatcacaattccactgtattagctgtgctaatctagagaggaaaacaaaacaaaacaaaacctcagccattcacattccttgaatagaatcagaggaggagagaagtaagtataaagtttgaaagaatcccgagaagaaatgttgatataaacagctcttggcatcaggtggatggtgtcagggaagttactattttcgtggggacagaggcgctgacgttcagctccattggacccagagtcctgtgctatgttctctcgtgactgacaaagcccccaactcatttctccctggggacgacattcctgctttcttattcattacggatcctttgagatttttatttcgtatccttttatttactgatcagagctgccctgaaggcttcttctgggacaccagaaactcccagcagtcccctgcctgcggggaggctcttcatcccaaagctcattattgttagaacaggatgggttcacacccgggggctctctctccaagcctcctcactccccatcaattccacctgttcattcagagtcgt

SEQ ID NO: 201854 - DNA, 330 bp, Homo sapiens
cctgtgttatctaactgactacttaatggagtccacattgggtgtgatattctgctcaagattaatttcgggtaatgaagatctgaaacaaggtatttaagagccccactaatgtttcatttatagcaatctatcaaaacgatagatatttagcctctttactggatatgaaacattaacttaaagccagtgctgctttctgtgttaaataccagtacccctgccttcgattttatcaaacattgtgaaaaatctgccaccacctcccggagaacacatatcatggacttagccttaagttatgattctctggcaccttggacaactgac

SEQ ID NO: 201855 - DNA, 285 bp, Homo sapiens
ggaagggaagaaagctccccacatacatgcacgatgtgttttctctattgttctgttacctgctttctccttcagattgtataaggctacactggccttttacaagacaaaattggccattcacactgataacgggtattaatttaatcagcctcaaattgataacaggtatctcttgtggaaacaaagataatttgttattgattgtgatcatgtcttctgatgtaaactcgaggcttattttgtcttgtaaaaggccagtgtagccttatacaatctgaagga

SEQ ID NO: 201856 - DNA, 409 bp, Homo sapiens
cggtgtcacatggctgccttatttgtgtgtctcttctgtgacttcaaatttttcttttattataatgatttgggtgattagatttcagactcaccgtactccaatatgactttaccttaacttaattacgtctgcaatgacccatattttcaaatagggtcacaatcgcagataccaagggccataactttaacatacttttggggggcatacaattcaacctgttacagcttctaagcaaaagtgtccctatatttgagatttttttgagtcaattgtctgtatgtagtttcactcgtgtcagtgtgaagagaccaccaaacaggctttgtgtgaacaataaggctgtttatttcacctgggtgcaggcgggtgagtccgaaagagagtcagtgaagggagatagggg

SEQ ID NO: 201857 - DNA, 413 bp, Homo sapiens
atgtcagagcagaactatacatgtggctagatcaagtaagtggcttgtgaagactaagtaaaagaggcccggccgggtgcagtggctcagtatgaggcaggagattgttaggacagtattaagcaggagattgtattgatttcactggtcccagtgactattaagtttagctgtaattgaaatctacccagcattaaactctgagtctgctgttttgggattctcaggttcctctctgttagaggaagtggttcattgcccatgacactggttccttgtgcctttctttccagttgtcatcctggtcttgtgagttagttataaagtggttctcctgcccaaatcccaagattcacagtggttaaagccaaataaaaactgaaatatcaggatgtgctctgattcccacatag

SEQ ID NO: 201858 - DNA, 442 bp, Homo sapiens
atagaacacacattaaatgcaacactcaagatagtttcagctgctttgtgaagctggttttcttacatcttctttctcaatcataatatggaaaatattattgcctgtcctaaaatgaaaattctttttctcagcaatttatttggagtaaatttttcttctgcagatgaccaaatatttatttgtcatggtgataataaaggtttgattaattgctgattttggaaatagtaaaagacttaaaaatgtcaattttcagcagggtgcggtggctcacccctgtaaccccagcactttggaaggctgaggtgggcggatcacaaggtcaggagtttgagaccagcctggccaatgtggtgaaaccccgtctctactaaaaatacaaaaattagccgggcgtggtggcaacgcacctgtagtcccagctactcaggaggctgag

SEQ ID NO: 201859 - DNA, 495 bp, Homo sapiens
atttaatatccaatgatagatgattaaaaattggtatgtcaggtgaaataacatgcaccaattaagactactggcaaatttgggaaaatgttcgtggtaaatcattaggtaaaaaatattataaaacaataaccatatgattaatattgtacaaacaggaagtatatgaaccattatatcagtgattctgggtggttgacatataaaaattttgtgatgagtaaagttatatgcacatataagtataaatttgtatttatttaagtataaatttgtattcacctatttcataggtgagtgtgtgtgtatagataaacacatggaacaaaaagttaggtatatctgtgtagtgtggagggaaaaagctaggaaagaaatacaccaaattattaagtaaattggcatttgaatgtggggattattgatgtgtaaaaatttttttgattgtagtctccagaaatcaccaataaagtatatcgtttaaagtgtatatta

SEQ ID NO: 201860 - DNA, 462 bp, Homo sapiens
gggctctatcccggcgcagctgcctctctctcaggaccgctgctgtaccgcggtttcctcgtcctgccgagagggtgctgcctgccctgcccagccccagggcgagggtgtatgcgtgcagaagggacttgggaaccagggcgggcatgaggctgttggcatttctgtaacggaggcctcctgcattactgtggattttagtgggggaagaattggcttgttttacaagtcagctttccttgttaatgagctttccttgttgctcacagcttattgtccatgtagtgagtacagttgagaaatctggctgttatttatgacaggggtacccaatccctgggccatggactgataccagtctgtgccctgttaggaactgggttgcacagcaggaggtgagtggcgggagagcgagcaaagctatagctgtatttacatcagctcccatcactcccattaccg

SEQ ID NO: 201861 - DNA, 271 bp, Homo sapiens
ggtgttcagcgacaacgccctgccacactccgctcatattcctgagtacccactgcatgccaggaactcttctaggccttgagaatgcagagtgaacaaaggaaagtaggccgactggagttgggtatgggattagagagggatggagatggggctgtgctatttcagctggagcagccagggaggttgtggcaactgagtggagatctgaacaaagtgagtgaagagccaggtgcggtggctcacacctgtaatcccagcactttgggag

SEQ ID NO: 201862 - DNA, 355 bp, Homo sapiens
aaaaaattattacctggcaaactgagttgccggtcatattgaggacaaaatcttaaatatgtgctattagcattgtttttagactagtaatatgcagaaaacagttttaggcctgcgttacatattgcctcttccagctccaaagttttggaccctgtcagttttgcaactacattatacattattataatattcttttttttttctagaaactgggggcagcctcaaaatcatgttaaagagggagttttgttagaggcatctttaatgaacatgaatgtgagtgctctctaaattcttagcatctcactggatgtaaaatctatcagttaatagttttaaaaatgtctctttt

SEQ ID NO: 201863 - DNA, 469 bp, Homo sapiens
tatttgtttcttagtcagtactgagctaagatatatttgtttgcatttgacagtgagagcattatttttaggtaaaacatgtcttcccaggatggttcaactagtagtacagagggtcttcagacaatgttgtttgattataatattgatgaagaaaaaagaaaccagttcctggccggggtcactctctgtgtggagtttgagcattgtccccacgtctgtttggattacaaggatccttgtaatccaagcagtcgtcatcatcaccatcatcatcattattttggtttgtttgtttttgagacagatcttgctttatggcccatgctggagtgcagtggcataatcacagctcaccgcatcctcagactcctgggcttaggtgaccctgccacctcagcctctcaagtagctgggactacagacacaagctaccatgcctggctaattttttggtttctatttttgg

SEQ ID NO: 201864 - DNA, 561 bp, Homo sapiens
cagttattaaggagctttgggaccaaaaatggcttaaaaccggggaaagaaggttccaacccaccctggggacaaaaggaaaaacgggttccaaaaaaaaaaaaaaaaaaaaagctcgggctttcctcagtcagaaatgcaagtttcccccttgagactggggatcacttgttctgctctgatggtacctgtatgtctgacctgcaaaaggctggaaagaggagctttgtggaaagagttcccttagcctttgatagtcggtttttgaaggaaaaagactatgaggagctcctacttcaagagataaaaatagcaagcaggaatcggtctgggcttcctctcctacactggatgataatgcctgacgggcatcaccattgttgctgattttctttgaatgagtcattttcccagcacatctagtggggaacatgtctctttggttaaccactgtatcccggcgcttctgtaaatattgaatgcatgagtcagaaactgtacacatatgactatcgctccaccaactttttgttatttccctaagcttgttcaggtaggaga

SEQ ID NO: 201865 - DNA, 165 bp, Homo sapiens
actcacatttcactgcccagctgggatctcacctacttcatgaagtcttcaggtcactattgccacagcaactctttgctgctttaaacctctgataaattaagtccatggttagcatttgataatcaatggagtacttagtacttttaatcccctcttatatag

SEQ ID NO: 201866 - DNA, 518 bp, Homo sapiens
aaactaaacatagcattaccatatgatccaccaatttcactcctaggtatatacttaaaagaattgaaaactggtgtgcaaatcaaaacaaacacgaatgttcatagcagcactattcacaatagtccaaaaaggtgaaaacaacccaaatgtccatcaacacatgaacggataaacaaaatgtgatatgtcatttgtggctgccaggagatgggaagtgattacttaaaggatgttcttctggggtgattacaaagtgttgaaactagagagggatgatggctgcacagcattgtaaatgtgctaaatgccactgaatcgtacactttaaaattcttaaaatgctgaatttcatgttatgtgtattttgcaacttaaaaaaaacatgtttacctaagtattgatagaggcaacattggcaaatgtgaatgtgtttagtacacatgcatcacattctacctgacatccttttttggagcaagaaagggtataaataaatacttcttttagagcttaaa

SEQ ID NO: 201867 - DNA, 406 bp, Homo sapiens
ctctcagtggtgtttgacactctcaaccaccaactctttgtgaaacctttttttccctgaaagctgtgaggtcgtgctttctcggttctcttctcatgtctctggtaactcctgctttgtctactttgggttttttgttttgttttgttttttgttttttaagagttgggatcttgctctgctgcctaggctggagtgcagtggcgcaatcatagctcactgcaacctcacactcctgggcttaagtgatctacctgccttggcctcctaagtaactgtgttcatttgacacagtttaggaactaaagatcaggtaaaaccagccagttcctgagctggaattgaatctgttcagaatgtctgggaactaactccatttttacgtgtcaaccatacctggctaatt

SEQ ID NO: 201868 - DNA, 572 bp, Homo sapiens
cactcacgtaagaaatgtaaacctgacaagtgtttcaggcgaatgcaatttttatctgaaatatgctccaaatcctggggtgggggggagtgccttttgcaaagtgaatcatcactatgggaatctggcgacacgctgtttgtcttccagccatggagacagccagacctcactggggaaggaacagggaactgtgtggcttgagaccacactacctaagctggggtcctaaatgattctccatctgtatcaatggaatatttcttttgtgctggtgtttctcagtcttcacgactacttcccggagggaaggaggatagtaagggtgtccccattcactgggaaaaaggggtgttctgagaggtcacaccactctccaggaggcccacagctaggaataaatagcagggccacctccgctttcaaccaggagggaccagagggagccaggaggaaaaacagtgccaccttgacagccttccacagcatctccagcttagaggatgtgctaaccggtggggattgcttccttgaccctgccctgcagctatgccagggcttctgactcccag

SEQ ID NO: 201869 - DNA, 284 bp, Homo sapiens
acccagggacagccacatctttacttctctttcagaccaggttactttcagatcagcagggggcagaggtagggcaagggtgttcttgtgtaacttggccatggcaggggttctcattgctaactaatagacgggtctggatgcgcagagtccttgaggatagtaatagtgtcaggattgcagaaccctaatggagaatgcatgtgtgtacaggtccctgagcctagctagctcagtattgggcaccctgtaggccctcagtaaatatcccacaagtgaatacg

SEQ ID NO: 201870 - DNA, 487 bp, Homo sapiens
cctcagtagcacaaagaaggaaaaacaccaatcaattctgttacttaacctatgcatttgaaaatgcagtcaagtagtcagtcatgccctttgcaaagtacacaggcaaatataatactaacaaataacacttgagactaaattttaggtgatgaaaacattatgattatgaatcttcctgggaaacgtgggtcaatcatgtctatctccttgaaatctggcaccgctaggtttcaggaagccatttatggtgtgtgtaccagttaggcttagatgggacttcatttaacaggaagagcaaaataaaattagttttaagatggtagaagtttatttgtccctaacagaaaaggaattcataagtaggctgtacaggcctcctatgaccacttaactatgttatcatggctcatattttctgctttgtcattcttagcttgggctttccaaattcaagggttgagatgatgactagagttccacctat

SEQ ID NO: 201871 - DNA, 993 bp, Homo sapiens
aaacaattgagtaaaaaatgtgatttagagtttttaggcagtaacttgtcatcacagattttactttacaaacaagctaatccaatccatcttacttgtgtgaagagaaatttaagcattttttccgaaataatttagttaactagtaaatatatgaaaaaagtataactttcaaatatcacttccctagaaattgctctcatctgatgagttctccaaagcatatggaaaattcaggaaggggaagagaaaatccaaagagcaaagatactctcctgctgagattccccatcccaaaaatgccaaaagaaacctctctagtgaatttgctaactgtgaagaacaagctgggccccctgtggatccctgggtccttcaaacacttgggttaaaagaccttgacactatcgatgacacctcatcagctaactacagtgccctcgcatctcatcccagaagagtcgccagcacattttcccagtttccggatgatgcagttgattataaaaatatccccagagaggatatgccaattgactatagaggtgacagaacaacccccttgcacagcactgccactcatggagaagatttccacatcctttctcaactttcaaatcccccagtggggctgaaaactcttccttactatactgctcatgtgtcacccaacaagacagagatggcattttccacatccctgagccctcattgtaatgtgaaaactcattccttccaccagggacaagcctttgtgcgtcgagatgaggagggaggctggaagtttacctgggtccctaagcagtcttagtgacccctcttttatcacaaagcactgccacgaactctgtttacaaagacctctcttgcacttgaatttgactatgtggaacacagaagctgttgcttagactgtctcctgccactttaaatgtcactctcaattacccacttaaatctgcagggaatggcttccaagaatccataatgaaa

SEQ ID NO: 201872 - DNA, 605 bp, Homo sapiens
agttcaaaatgcaaaataaaataaaaaatacctcagcagtacatgaatgaatgaaagtgttgaattttaaaagtccatttatagtattactgatgataaatatggcaagtcttggaagccagatatacagaacaggagagaggggtagagaattcatagaatctaaaaatgcaagaaacaaacatataaaatagaagaaaaagagatgaatgagaatcctaatttctgggtacaaacatcccacagattattcagttcagaaaaccaagttctgaaatcttaactataaaggctaagatttagatgattactgtatctctcattccaactatgggtagcagggccatagaacctgctgtccttgacattatttaaaagaaatgatgcagggctgggcgtggtgactcacgcctgtaatctcagccctttggtaggccgaggcgggagaatcacttgagcccaaggagttcgagaccacctgggcaacaaagtgagaccctgtatctacaaaaaataaaataaataaaaagaattagccaggtggggtggcacatgtctgtagttccagctgctcagaagtctgagacaggaggattgtttgagcc

SEQ ID NO: 201873 - DNA, 454 bp, Homo sapiens
cgatcatggacagctctttttctgtgggccctatgtgtttcaccagggcccggaggatttgggtaggagttgagcaggactagtcagggtcaggttgaaatgaccgtcactaaaagtcccagattcttggtccatgagttgcagccgagtcaggacacaacaatcctgtgcttcaccattggaattttggacataactttagggctttccctcatcctcattaaattaaatcttgttgattgtaatcagccaaaaccatttgaacctcatttctggagagtgttatctatccctttcaactttctgtcatgcatcaaatgtataaagtgacttttttttctttttcatttaaaattttttttagagacaaagtcttactctgttacccaggctagagcacagtcatgcaatcatagctcactgcagccttgaactcccgggctcaagagatcct

SEQ ID NO: 201874 - DNA, 441 bp, Homo sapiens
ctaactttcttcttgagagttctttttacttacttgattccatgtttacttagatttctcccttctcattgaatacctatccatttattttgtggattctttccctgctctttttttggagactttgaattccctgtggttatttctcactctgtgactctatgacaatcagtgattacattcaccatggctttcattgttatctatataatggtaactcccagctttctctcttgagtttgaggtatctatatctatatccaatgaaatactaggcattctcttggttgtcttacaaatataccaacctcctttgtttactgtcttagttgtgacactaatattctctctttttattctttttttttttttgaatgtctgagtttgaaccttaagagtcaatcttgacgctgatcttggattactttaaccaagtctctc

SEQ ID NO: 201875 - DNA, 575 bp, Homo sapiens
ccttcttgtttaacaagttacttatttgcttctcatggcttcactaggtgcctagaatttcctttaaactcaggatttttctttatttccatgcttggggtccacaggccgctaataaaaggtgtccctactgtcttcataccatagcaatcttcttcccgtttcttgtcatataacccctaaaattttttgagtcttaaaagtgataagtgacattttgtatgctaatgagttgactgatggcttgggcctgctggatagcctcaggatgggggggcaggtagcaaaggaaataaccatgtgattataggattggaactttcagctccattcctttggacctccagagtggggagatggactgaaggttaagttgataaacaatgggcaataatgtaatcagtcatgactacataatgatgactccattcaacttgaaaggcctgggtccgggagcttctggggagctgaacgtgtggaggttcctgaaaggtgtcacacctagagtcatacatctcttccatctggctgttcacctgtatcttttgtaatattctttgtaataagtgggtaaa

SEQ ID NO: 201876 - DNA, 421 bp, Homo sapiens
gttgagctctgctgcttcttccctggggaatctttggtgaggcccagcacctctctgaacctcagtttttgcacctagaaaagggggctgatcaccacatctacctcattgtgttgctcagctgatgtcaacttttattctttacaaccaagacaccaaggcttaagtgcttctaagctgggcctgagggagttgggaaaggcttcttggaggggtattttgtgctgggacttaaaggctggaggaagacagaagacagaaagcaggaggtggttatgtcttgttcccacccctatcttggggcctgaagagagctttagtgactcctccaaagattgaggtccctccctgccaaatccccctctgcgagaaacacccaagaatgatcaataaaaaaaaataaataaattgaaaaaaaaaa

SEQ ID NO: 201877 - DNA, 461 bp, Homo sapiens
tcgccagcaagcttggtggccctaccagagacattccatcaaggatgaggcatggggaggactcatcctcggctgacctcccctgggcgcaaatgatgggcagtggttaacagccaatcacaactctacaacgcctatgaaggcgggtcaaaggccagtttgcttattatttcacagaaacattaaaactacaaacaggtagcatgtgtggcagggaattttacagataaatcatgttcttttgttgcagtaaatataatttcttttccaaaatagagggcactcagttcttactgagaacctatttcagaacaatggacaatggtcacaatttatgaatcccattgttttccaggaaaaaaaaaagagtattaattgtttggtcagagtttggggattcaagaatccccaaaaaggaatttaaacagggatctcctcaaacagacaaggacataaagact

SEQ ID NO: 201878 - DNA, 680 bp, Homo sapiens
caaactgtagcatttaacctcagtagaacgatacccagtttgtacttaagctgactgtttatcagacaagatttttttgttggcactgatagaaactcaagttagttctcctggtagaggcaaagtgagagttgctggagctagggcagcttgaggacctcaaagatgagaacagagctgaccattttggttaaataggactctttcatatttgcttagctttattttttttccctgcagtctttcttcatggtttttctagattcccattattccagctttcataaatggagagtcaaaggatgtttcctgtaatcttcagggaggaaaatcctgaaaaagactggtaaagtccaacttgcatctttgtcccttcttctttaatgggggatgaggtactgtggtgggcaccaatgggtagaaggaacagagttctaaaatggaagaaggaatgctggcaatggatatctactatgataattcaactaaagaggacaatagcaaaaaaaaaacataaaaaacaaaaaaaaacactttttgggccgctcttgggcccttaaaaaagtttttaaaaccatttctttgggggcggggggccccattgggtacgtgacatgggcacaaggtgtccctaagggaaactcggggcagcaacaggggctgggttttccccaataaac

SEQ ID NO: 201879 - DNA, 642 bp, Homo sapiens
caaactgtagcatttaacctcagtagaacgatacccagtttgtacttaagctgactgtttatcagacaagatttttttgttggcactgatagaaactcaagttagttctcctggtagaggcaaagtgagagttgctggagctagggcagcttgaggacctcaaagatgagaacagagctgaccattttggttaaataggactctttcatatttgcttagctttattttttttccctgcagtctttcttcatggtttttctagattcccattattccagctttcataaatggagagtcaaaggatgtttcctgtaatcttcagggaggaaaatcctgaaaaagactggtaaagtccaacttgcatctttgtcccttcttctttaatgggggatgaggtactgtggtgggcaccaatgggtagaaggaacagagttctaaaatggaagaaggaatgctggcaatggatatctactatgataattcaactaaagaggacaatagcaaaattaagttatatttaaaaaatacaggaggccaggtgtggtggctcatgcctgtaatcccagcatgctggattataagcttgagtcacagtgcctggccaacacctttattgaggacatacaataaatgtcacatatt

SEQ ID NO: 201880 - DNA, 413 bp, Homo sapiens
tactaatactaaattcgcggccgcgtcgatatacgaagtgggccactgccctccagacctaaggatgatagatctaccagcagcttgtattctgcacctggaaaagccacaggcactcaactgcagcccatgagcgcagccttggattctttaccctgcaaagccataggggcaggactgctcaaggcctggggagcccaccccttgtaccagtgtggcctggatgtggaacatgatgtcgaagattattttggaactttaagatttagtgacttccctactgggttttggagctgtgtggatcctgtagaccctttcttttggccaatttccccctttttgggatggaaacatttacccaatccctatacccccattgtatcttggaagtaaataatttgtttttgatttta

SEQ ID NO: 201881 - DNA, 1447 bp, Homo sapiens
actggtactgagaagtgagtcattgctgtagagatacctgaaaatgtggaagcagctttggaacttggtgacaggcagaagttggaagagtttgtagggctcagaagaagacagaaagatgagggaaagtttggaatttcttagggactggttaaatggttgtgaccaaaatgctgatagctaggacatgaacagaatgcacccaagcactttagcaaaggtcacacaatgttaacgccttagcaaagagcttggctgccttctgttcatgccctaggaatctgtggaagtttgaacttgagagtgatgatttagggtatctggcagaagaaatgtctaagcagcaaagtgatcaagaagtggtgtggctgcttctagccacttatattcagatgtgggagcaaagacaaaaggtagaacttatatttaaaagggaagcagagcaaaaaaagtttggaaaatttgcagcctggccatgtggcagagaaagaaaaaagctttttcagtagaggaattcaagcagactgtggaacaattacttgctagagatgtttgcaggattaaaggggagccaagtgctactatccaagacaatagggaaaaagccttgaaagcatttcaaagaacttcagagtggcttctcccatcacaggcccagaagcttaggaggagagaatagattcatggactgggcccagggccatggtaccttgcacagccttgggacactgctcaccacatcctagctgctcctgttcccactcttgccatggctcaaaggggcctacatacagcttggactgccactttggagaatgcaaacagtaaaccttggtagctttcatgtggtgttaagcctgcaggacacaaagtgcaagaatcgtggattcttggcagcctctgcctagatttcagaggacatatggaaaagtctgtttgtccaggcagaagcctgttacaggggtggagcccttacaaagaacctctactagggcagtatagaggggaaatgtggggttggaggctccaacagggtcaccgctggggcactgcctaatggaactatacgaagtgggccactgccctccagacctaaggatgatagatctaccagcagcttgtattctgcacctggaaaagccacaggcactcaactgcagcccatgagcgcagccttggattctttaccctgcaaagccataggggcaggactgctcaaggcctggggagcccaccccttgtaccagtgtggcctggatgtggaacatgatgtcgaagattattttggaactttaagatttagtgacttccctactgggttttggagctgtgtggatcctgtagaccctttcttttggccaatttccccctttttgggatggaaacatttacccaatccctatacccccattgtatcttggaagtaaataatttgtttttgatttta

SEQ ID NO: 201882 - DNA, 358 bp, Homo sapiens
tcccccgtctcttggcgctggatataagtgcccgccaccatacccggctaatttttgtatttttagtagagacagggtttcaccatgttagccaggatggtctcgatctcctgaccttgtgacccgcccgccttgtcctcccaagtgctgggattacaggcatgagccaccgcgcccggccgtagataatctttattattgtaaaaattatttgtatttcatggcaagtttgttgattctaaatctgggtgatttatatgtttattattccaattttctggcaataaaatattctattctaacaaaatcagtatgttaacataattttctaaaagatgaaagtgaaataaatatcttg

SEQ ID NO: 201883 - DNA, 505 bp, Homo sapiens
ggaggagaactgctcaactgggacttgggaggcagaggttgcagtgagtggagatcacgacactgcactccagcctgggctacagagtgagactctgtcttgaaaaacaaaacaaaacaaaaaaagaagtaaacaattagataatcagcctgggctacagagtgagactgtcttgaaaaacaaaacaaaacaaaaaaagaagtaaacaattagataatcaagatggccaggtgtggtggctcacacctttatcccagcacttcaggaggccaagatgggcagatcacttgaggtcaagagtttgagactggcctggccaacatggcgaaaccctgtctctattaaaaatacaaaaattagccaggcgtggtggcatatgcctgtagtcccagctactcaggaggctgaggcaggagaatcgcttgaacccaggaggaagaggttgcagtgagccgagatcgtaccactgcactccagcctgggcaacagagcaagactctgtctc

SEQ ID NO: 201884 - DNA, 786 bp, Homo sapiens
gtttgaaggcctggaattttcacatagcacttggtcgaaaatatcaagcctaaataggaagtcattttctgtgacacctctacatagctattacagatcctaagtcctagggcatcagctataaaaattggccagtcccaaagacacagtaagttctaacattctggtactatcatatttcaagtattttttctcactttttaaaaatgtttttctgaacaaaagtgaaacaatgccatttatcaaactgagatcattacaatcttcaacaagacaactaaaacagcttgatgttagatgggattctgtgacagtttgtatactgacaggtccttccagtctccctccacagtcccacaagcggaagtattctacctgattccagagttcattccaacatgcagtagaatgaggtgaatgaagaaccaagtgtgggttttgttttcacagtgcacttggtcaatctagtttctctgagtagtgggctgtattctaagaaaagctttcacgtagacgtcaaagtctgcaaaagagatgagttagccactttacaaaaacctgctctgctttacaaaagatgcacaccaggcttcctttacaagtgaactccaaggctgcttgtaaagtaccacccttcctgcagactttgtgggtcgtgtcacttggcctaaacaagtggcctaacatatgcatgctcacagctagtagcatccctcatgcgtccttgtcatactctggaaagaaaaaaactctgctatcttcagagaaaccatctattcatactta

SEQ ID NO: 201885 - DNA, 205 bp, Homo sapiens
agtgcattatcttattttatcctcagatcagctccataaaatagctaccattattacctctacatgtatatagatatatgtatctatctatctatctatctatctatatctacatacattggaagtctcaccagggttctaacttgtgctttcaaccaccatacatattttaaagagcgtaagaggagaaacaaccatttgtgtt

SEQ ID NO: 201886 - DNA, 539 bp, Homo sapiens
aaggaaatgcatattctcatctcatctaaagtgagtttacttaggctgagatgtcaataggtaggatatgacctgtagaagtaggaggagaggttccagtagagaaagtgggcaagaacatggtatataataggtgatgtcctgaggctgatggcactagagcatggtgaaggcagcagcctatgagggagaggtatgctcaagcagggcgtaaaggccatggaaagtcactggagagttttaagtagggaaatgacatgatctgccctgatccaattctgttacatggaaaatgaactggaggaagatctgagtggaaaccagggaaaactgaagatactgttgtggtagcccaggcaaaagatggtggtggcttggaataaggtggtaaaagtgaagatggagaatagaagacagattacaaaaacattctgcaagtggaagtgacaagacttactgaaagactggggaagaggagtagtaaaggagaagaacaaagatgattctcagaggtctatctttggtaaccctgcggatag

SEQ ID NO: 201887 - DNA, 409 bp, Homo sapiens
tgagtttaagctgattatgagatatctggaatatggttggatagacaatttggaagttgtttcatgtttgggtaagatgtaggaattattagtgtgtcggaattgattaaaggcagttgtagatggagttgttcactgaatacaaaatatggaaagagaaaagggtcaagtagagattcatcatgtcactcacattaaggagtaggaagaggaagaggaagagcccatggaagagaggcaaggaagaactactggtgcgaagtggtctttaaggaagccaacctgtgaagaggaagggccggagggctcaaaaggacatatgattaggtagagtcatttttttgttggcttgcttttagaaggaaaatgaaacatttgtatacagtaaaaagaacttgccgagacagaa

SEQ ID NO: 201888 - DNA, 186 bp, Homo sapiens
gtctgggaatataggtaggaggtaggtaaagctgtggtcatgttgagaagaaatgagagtgaattatggaaagggctcaaaatataggtatcaggagaggagcccgttactgtgactgagacagaatcagcagaaagttagaaggaccatgaaaggctgccaggtggaaaccaagggaagtgagac

SEQ ID NO: 201889 - DNA, 438 bp, Homo sapiens
gaaacggtacttggactactcatacagctagtctgttttcactttcagtaaagtattcaataaattatgtgagatattcaacactgtattataaaataggctttgtgttagttgattttgctcacctgaaggctagtgttaatgttctgcgcatattcaaggtaggctaaactaaactagggtgtttggtaagttaggtgtattaaatgcattttcccagcctgggcaacatagacttcatctcttttttaaaacaaacaaacaaacaaaataaaaaaaaaaactagctcgcataatggggcattcctgtagtctcagcagctacttgggaggctggggtgggaagatcgcttgagcctaggaggttgaggctgtagtaagccttgattgtgttactatactccagcttaggcatcagaacgagaccttgtctcaaaa

SEQ ID NO: 201890 - DNA, 1392 bp, Homo sapiens
gcccaagttaaagagccagtgtgtgcacttggaggcacgttctcagctctgacaggctctgactctggggcaggacccagccttaaatgaacttgagatgatttaatgggcagcatgtaatgggagcctacatctgacatcccaccccccactttgtactctgccatgtgtctggctctctggagtgagaaggagagaacgtttggccataggtccacgcaatggtatcgcttcacttgtgtgtaatgtaccacctcttacacaaaagccctgcctgtgtctccagagctcttggggaacaccctttctcaggacagtttgagtcccgaaaatgaacataccaggaatgccttaggtgtgaaggaagttatctgttcctcaaaacacaaaatattagccactaacatttcttgagggcttgctgtgtgccaagtactgtgtgtttaatgtttcctgtgatcctcacaacagactttgagatgggtattattgttgttatttccactttacaggagagaaaattgaggcttaggttaagaaacttacccaaagtcaaacaatttaattggtttgggaagaccaggaagactttaagttcctaagatcgtttgagattctgcatcagggaacacttgacagcaggtttatacaaagacagatttggtatctttggagggaatgagtttccagtcattgcaggtggtccagcagagagggccactctcctaatggggatgaggatgctgtgacagagctgtagcttcggatggcagggttcaactagacaggtttaaagtcccttcagcccgagtctccttgactccacagaattaatgtgagaagacagagggtcatactgtcctatggtgtgtggggggtacaggaagtatagggcacagagagggaggcaggaggtgttgaagacatggtgttgtcctgagcagctggttgaagctagttgcagctagcttcactttgccattgccctaatgcagtcttcatgtcttggtaagtctagaatgggcatccagtctctgcttcaacctctgagggatagagaggacactcacttctccaagataagaacaaggaccttatgagattgcttcagaaggcttcagaatgccatcaggcagctggactgttgaaaagcttccttggggccaggcacggtggctcgcgcctgtaatcccagcactttgggaggctgaggccggtggatcacgaggtgaggagattgagaccatcctggtcaacatggtgaaaccccgtctctactaaaaatacaaaaaattagctgggcatggtggcacacgcctgtagtcccagctactcgggaggctgaggcaggagaatcgcttgaacccggaaggcagaggttgcagtgagtcg

SEQ ID NO: 201891 - DNA, 350 bp, Homo sapiens
gaacaaggataacgacattttgaaaccctgagtcttccattccaaactctcctgtataaagatagtataacaaagcagaaaacatgggcatatcaataccagctgtattgatgtccattattatctctgccccatactcaggtgaggaagaaagcatttaaaaaatggacaccttgctgccaaaatggcacgatgaacaggataacaagtttcttgaaatatgaaatctgtatcagtacgatacttgtactcataaagatcagccatatctttctgcaatgtccgggcttccggtctagccaaactggcttgtagggaaagcttctttaatgctgaccttccctcatatt

SEQ ID NO: 201892 - DNA, 416 bp, Homo sapiens
cattttgtctgtcacacgcaccttgaagcagataccattggtcacaccccccaaacagcaattacctgtcttcttctggctgacaaaccccaatttttcccaggaactaagctccagagagtggtaaggaaagctgtcccactgcatagtccaagggagcaaatgctgagtaattcaacttgtaatggtaattgcattatatctgccagcaactggtttaagtggggacatgtgacacaatcctggccaatgggaaataaagggaacttgttagaagacttctaggaaaggtttttctctatgataaaaacagtgagaacaaaatgaataaaatacttaggaatacagctaaccatggaggtgaaagatctctacaatgagaatttaaaaacactgcttaaaaaaatgagagataa

SEQ ID NO: 201893 - DNA, 258 bp, Homo sapiens
ctttacaccaaaaaaattttatattagtcaggtgtgttggcacatacctgtagtcctagctaccccggaggctgagacgggaggattgcttgagcaagtctaggctgcagtgagctgtgatcacaccactgcactccagcctgggcaacacagcgagaccgtgtctcaaaaacaaacaaaaatttttaattaattttaaaataaaggccatcccatccaagcaaaaattggaaaatgtaatgttcaacaacatatcca

SEQ ID NO: 201894 - DNA, 894 bp, Homo sapiens
taaaattaagtgtttaagctttgtctgcagctgtttttgtgattctctgctgttcaccagcgatcctgatgtcacattggatgagagagctccagctgtatttttttgttgatagtgttaagattatagctttaaaaaattttgttttctaacataattaaggcctttatgctttgcctctaggttgattctaaaagtgtaacactactagaaaggatttatagtattttgattatggaaatattattcactatagaataactagtgcagttgaaaccatatgcacttttatgtttcaaaacccttattgctggaagaacattttggggttaagatccagtccttttcattttttacttttcttctattctcctgtatcagactcatctatttttgtttttcaagaacttttcacgtggaaaatgtggtaaacttttagagtctttgcatgtttaaaaatttctatattttgctctgtcaattcattgatagttgactgggtattcaaattgtttacctgaagaattttgagagcattttctggactgcttttaaataaatttcagatattattttatccttaaatactttagtatgtgtcttcaaaaaattaggacttggcggggcacgatggatgatgcttgtaatcctagcactttgggaggctgaggcaggtggactgcttgaacccatgagttcaaaaccagcctgggcaacatagtgaaaccttgtctctacaaaacattagctaggcatggtggtgcgcccatctagtcccagctacccaggaggctgaggtgggagggtcacctcagtccaggagattgaagctgcagtgagccaagatcatgccactacactccatcctgggtgacagaagtgagaccctgtctc

SEQ ID NO: 201895 - DNA, 530 bp, Homo sapiens
atgttctggaattagatgattatgatggttgcacagctctgtaaatattaaaataccattgaattgtacacttttaaatagtgaattttatggcaggtaaattatatctcaagtttgaaaaatgttataaatcaggagttggcaaacattttctataaagagccagagagtaaatattttaggttttgtgaaccatgcacagtctctattttattttttttctttcataacctttaaaaatgtaaacaccatcctgacttcactggccatacaaaaataggctaatggccagatttggcaaaggacacagtttgctgagttatagatgaatatcaaatctcagaaagttttcatgtaaaattataaaataaataaagcaagtgtaggtctttctttctttttttgagacggagtcttgctctgttgcccaggttggagtgcaatggcgtgatcttagctcactgcaacctctgcctgccgggttcaagtgattcttgtgccttaacctcttgagtagctgggattacagg

SEQ ID NO: 201896 - DNA, 456 bp, Homo sapiens
tatgtcaattatgacataatatatgcataatattgttagtcattactgtatgacttttacctaggaagtgaaaattctttggagagagagagagaggaaaaaatactgataaatgatggttatagttaagtaatcatgtgtggaaatgaacttgtattttagaaactcggggccgggcgcggtggctcacgcctgtaatcccagcactttgggaggccaaggcgggcggatcacgaggtcaggagatctagaccatcctggctaacacagagaaaccctgtctctactgaaggtacagaaaaattagccgggcgtggtagtggttgcctgtagtcccagctattcgggaggctgaggcgggaggatggcgtgaacccggaaggcagagcttgcagtgaccccagatcctgccactgcactccagcatgggtgacagagcgagactccgtctcaaaa

SEQ ID NO: 201897 - DNA, 557 bp, Homo sapiens
attgcactccaatgaaattgtttttaatcaagactgcagtgacctggatcttgccaaagctagtggtcagttcaatgtttgtatcttatttgacctctctcaccagcatttcacagtggccaactttactagttttgacctcttagttgttcattctcattttctatatgcttttgccagtttatctctactttcccactccttgaaaatttggaatgtccctcaggtgatttcatccaatttttggtttcaaataccatttatatgccgatgaggctcaaattcttatttctagtactgacttttttcccccttgcgctctagactcttgtaactccatgcctctccttggatgtctaatggatacctcaaaggcagcatgaacaaaggagggctatgaattactcttcctgttggtgacttcttcctctacctcccccaagtctttaccatctcagtaagtggcatcatcatccaccacttgcgcaggccagaaccccggattcttcctcctccttgatttctttttttcctcctcatctcatgttaagtctggt

SEQ ID NO: 201898 - DNA, 393 bp, Homo sapiens
aagacaagtcatatttttatctactgaattcatgctctaaaaattaaagtaaatatttaacataattatttaatatccataatattttgctgttaaaatttatattaaagatattaatattttccatcagtatttaagagctcagaattactgaaaagaagaaaccacaggaaacaggagactgttgttaattaaaccaagtgaagcatttttccctttttaacttccgagaaagtagataaattatacatatgtagacacacaaatattttaagagtcgttattctatcatagtaagcatcataactaaaatactaaagtagagaaagttcatgtgaaagtcatttgggaaggtaaattattcaatatctacttataaatattatatatcat

SEQ ID NO: 201899 - DNA, 243 bp, Homo sapiens
tttcatttgtcatatcactctggctacgaggtgagagaacatcttaatgggccagagtggatgtgtgaaaggcagtgagggagagatactaagatgaaacagacttcatgcatgtcactgaaatgcccagtcaggggcaaggggataaacaaacaaacaaacattcagttctaataattctacaccactatcatagacaatgcattctactataatattagtacagaatacaaatcacggagt

SEQ ID NO: 201900 - DNA, 638 bp, Homo sapiens
ggatttgagacattttgggtctacttgggactgtgtcctgagtctaacctattggctagataatgaactgtgtttgcaccaaacaccctaccccagtaccacaggtgaaccctatctaaatttttatacctttctaagtgtgagttttctctaaaaagcctcattgactggcctactatacaaaatcaagggacttatccatatataatcacagagataaccctgtgtgaaacatcccttcccattctaaaccacttgcaactgaaagaggtacagtgctcttaaaaatattaaaaactcttaggcatttttatttagcccaccagtatattcccttatcaaaacagacttttaaaaaattcatcctgatatccgttgcactgtacttgacacatatatttaacaattacttgattatgactgagtcaggagccttgagtttttgacccagtgtatccttgggcaagtaatttcacttgtcaaaaatacaacttgaaattcaaaaataaataatacaggagaagtgataattctaaatccagctcataaaccattttaacaatgtataaaaatgatttttttcaaaatacgttcaaaatatgttaaacgactccctgggaacctccctggtccctggc

SEQ ID NO: 201901 - DNA, 537 bp, Homo sapiens
tcgtttatgtaacagcatttgttgagcatctagtatgtgccaagctctacggatccgagacaaatcaaccataatgggcccttacagaacttgttagccaactggggacacagtcacctatcaatgacctcacagtgagaagtctaatcttgggaatgggggaaggagaatgaggggaaacttccccaagaaagggacctctgatgtgagaggttaggtttcccaaaaggaaacactgttattgcttgttctgatagaataaaagtcttataaaacattttagaaaattcagcaaaatatatttggtgaattttgctaattttttttcctgtttacctacactgacaaaaatatactttacagtacttggtttttgtttacaaatataaggattttaatattaatctatctacataaccttttaaatgattgtttaatgttccattgcatggatccctctttctttagccatttccctgttaataggtattttgtttgtttccagtttttgctctaataaatattgctaccacaaac

SEQ ID NO: 201902 - DNA, 469 bp, Homo sapiens
gcaatctcatctatcataggccctccccaactcaagcactaagtagttcctagatgggccaagcatgtcaagccttggtaaactatgtccttgtctcctaattcttaagttctatattattagaccaataataagaattattagaaattggggttccagttctatgacagtaaaacatcaaaattcaccataaagaaatgaaaataaaatgatatcgatttttgaaaatacatatacatatccaagtccttaatataaaatttaagttctgttttaaatgctccttttgggggatgtttttctgcatggaatgaactttctgaggcttcttaaaatatgtgcccagtgaagtttagactaaggatgctttttccttttcctggtaaatcttccagtcataggatagccttcttcatcgttccttggacctctgaactgcagttcagaattagtcatttatttcaagaag

SEQ ID NO: 201903 - DNA, 556 bp, Homo sapiens
cttactgatttgtttgagttcgctgtagattctggatattagtcccatgtcagatgtataaattgagaagatttttctcccactctgtgggttgtctgtttactaactgttccttttgccctgcaaaagctctttagtttaattaagtcccagctatttatctttgtttttattgcatttgcttttgggtctttgctcatgaaatccttgcctaagccaatgtctagaagggtttttccaatgttatcttctagaatttttacagtttcaggtcttagatttaagtccttaatccatcttgagttgttttttgtataaagtgagagatgaggatccagtttcattctcccacatgtggctagccaattatcccagcaccatttgttgaaaagggtgtcctttccccactttacatttttgttggctttgtaaagatcagttggctgttaagtatttgggttttatttctgggttctctattctgtttcaatggtctatatgcctatttttataccagtaccattctgtctcttttttttaattaaacaaaatttta

SEQ ID NO: 201904 - DNA, 445 bp, Homo sapiens
tactatatgaaatgaaattcccataggtattataccctactgcagtgagctgagtaatgcttcccgaaaaggtagccacatcctagtccctgaaacctgtaattgttaccttatatggcaaaaaagaactttgcagatgtgactgagttaagatgttgagatggagagattatcctggtggactctaaattcagtcacatgtatcatggagggaatatcatagaggagatgcaggcaacatgacctctgaggcagagattggaatgacatgaccacaaatcaaggcatgccagcagctaccagagactgcaagaggcaaggaatggattctttctagagctttcagaagagtggccctgtggacaccttgatttagacatcgtgaaactggttttggatttctggactttagaactgagaaagaataaatttctgttgttttaag

SEQ ID NO: 201905 - DNA, 483 bp, Homo sapiens
cctagccagccacatctgttctcctgaaacctccatggttactctgccctggctatggttactgagtgcaaggtagattctgagagctgagtttgtgtaggggttgtgcgatgcagctggccatgctctttttgtctccaggagctggcatttgccctctatatgcactttgtattgtagctccctttccacctaaaacctccctgcattctccccttttctcccttttctgcctttgctaaatacctgttctggtcagaccctgtgctaagagtatggggctacagagatataaataaaccttgtgccctggccctgaggaactcacagactaccagatggtgactgacatggaagttgaaaaataggctgggcgcagtgactctctcctgtaattccactttgggaggctgaggtaggaggatctcttgaggctaggaactcaagactagcctgggcaacatagcaagacctccatctcta

SEQ ID NO: 201906 - DNA, 519 bp, Homo sapiens
ctcatggctttgctcatcttccggcttcaggctctgacttcatctcaggatgggatcggtgtgtgtctgttttcatagatccactacatcagaagtatctttacatctctgtatctttacatcccaaggtcaaggccctggcaacctcagaggttcccatagcttcagtcttccccaaaccatgccacttcctcccatttctttgggtcaggaatctggcttttgttttccatatttctttttcccaagacattgggaggcatctggtgaacaacaccaataaaacagttctctccccacggtcatccaggtcacttctctaactcattcctgcacacacagcacacgtggaatttgcctgtttagtctatgttcttgacttgatcacagacgcctgtacaataaagccccttttcaacaaggtgctgcagaatgataatgctttccccaaaatctgaaactgatttgtatcattgaagtttttttctgtattaaaaataaagcaaaattaaaaataaa

SEQ ID NO: 201907 - DNA, 329 bp, Homo sapiens
catgtcttcatcatttattacctggattactgtaagaatctcctaaatagtgcctttatctctagtattacaccttctaaccaatctattaaatgagagtggtttttgttccaacagaagtctaattatattgtgtcactgcttaaaatccctccatgactccctattgccaaatccaaagaatagcatagaaggctttttaggctctgaaccttgccatctctccagtctcctctattgacgcatcaccatttaaatctgtgctcttctgaaccacttcaagcaaacttcttgaccatgtcctgcatcgtcttctttttttttttttt

SEQ ID NO: 201908 - DNA, 445 bp, Homo sapiens
agtaggatattattagacaaagactagaatattgaagaacctcaacttaaacatgaaagaaatatttcatttgcccttttcaccagcatgtcatctctgtcaatgttggttcctataaaagacttcagtaaatacatatttatactgattctttttttttttttttttttttacttagctgtcatattgtcttctcgaacccagatgtaaggacatgcttctttaagaagccatataggcccttctttggagattctcagattcatttgaagacctgagtctgttctttatctagaatggaaaggttggtgggtggtgaaccacacacgccctttgtactgatcaccttactctgtactgtgtggctgctccagaaatggcgagttcactcaccagttcattggtcagttgtagggttgttcactaaagaacattgaaaaattgg

SEQ ID NO: 201909 - DNA, 487 bp, Homo sapiens
atagtttatactaagcaataattaccggtgagctaattactttatagactttaaaaatgcagttatttttcatgatgcactgtccaaagagtaaaacaagcctcaaaagaaaggaaagaaggaagggagggacaaaaccctgagtattttatttccaatttgtatgctgtgatagaatattgaaacttacccaactatcaatacattcaagagaatcagtacgaaatagcacattttcactataagtaatatttaaatatatagtgggtttaagtatattaattatacccaaaagcataaaattggtatttcctaagaattgatcaaggatatctaaatacaagtcatgattagtatattttaaaccagtgtggttctttatgacgttctgttgtttttcaacctaattgtcagtgagataaatatagcatcatagaaaaagatgcattaaccaatatattcagtgacaagtataaacactcaaact

SEQ ID NO: 201910 - DNA, 524 bp, Homo sapiens
agggctccatagttatgagacaatttaaccttaatttcttccttaaaggccttgtctccaaatacaaccatattgggaattaacctatcaactttgatgggacccaattcagtccataacactttttaaatttaattcaactgtatttaattaatttattttttgagacagggtctttctctgttgcccatactggggtgcagtggcatgatcatagcccactacagccacaacttcccaggatcaagcgatcttcctgtctcagccttctgagtagctgggactaaaagcacacaccatcacagctggctatttttttttttttattgtaatttttgtaaggatgagctctcactatgttgcccaggcaggtctcaaactcctgggctcaagggatcctcctgcctcagcctctgaaagtgatgagattacaagcatgaaccacccatgcccagcctcataacactttttaagaggttgacattaaaggattaggcaaaagaatttccttgggaaatagttga

SEQ ID NO: 201911 - DNA, 467 bp, Homo sapiens
aaaagggataagatactgcagagaggctccagaacaggggccatgggagtcaacccggtgaagacaaagggttcgggtctgagagtcagtgggcctcaggggtaacctccaagagatggaaaggtccatcccacaggtcctggagactagaaggataaggttagcgcagaaaagagatagggccgggagcagtggctcacgcctgtaatcccagcactttgggaggccaagaagggcagatcatcagaggtcaggagttcaagaccagcctggccaacatggtgaaaccccgtctctacaaaaatacaaaaattagcagggcgcggtggcatgtgcctgtagtcccagctacttgggacgctgagggaggagaatcgcttgaacccgggaggcagagattgcagcgagctgagattgtgcccttgtactccagcctgggcaacaggacgagactccatctcaaaaga

SEQ ID NO: 201912 - DNA, 343 bp, Homo sapiens
acacaggtaaccacggctgtggaaaaaaaaaatccaccaacacatttctcccaggcacttttcattttgggctttcaaaagctagggctttaatataaacatcccacctctagaccaagcctgcagatctgcaaaaacaacgtctagacctcagagtaaagttatgagagaaatgctcacattagattacagtctcactgaattacaggtaactgctcaaacctgatctttattataatacagaaagcttcctcattacaaaacactttcaattcaaaggataagtccaacgttccatcattctgcccattttggagctaaaaaaaaaagattctaaatggta

SEQ ID NO: 201913 - DNA, 294 bp, Homo sapiens
catgagactaggaccagcttcactgaaatataatcttccttagccccaccttcagcaaactcattccaaaaggcccagagaagaaacttcaactatgccgagcgaagtctcaggtccaatgaggagaaacaagacagtgcagaagatgcctctctctgaacgaaggtctcctactggaagaacacagttcctccatggagacagtctcaagacctcttttggaacattttatattgcttgttttgatgcccagtttatggaattaaaaataaaacctctcactgaaatatgcaa

SEQ ID NO: 201914 - DNA, 295 bp, Homo sapiens
taaaaatgaaatcttgtcctcttctgggtccgactccttttgctcaacttagtattgtgaaatctatccatgtcgttgagtatgcttgtattcattcattttccttgctctgtagtattacactctataaatatatgacagtttattgatctattctaccactgatgacatttggggtagtttccagtttgagctatagtgaatagtgctactataaatattgttgtacatgtttacatatatcgtaagcttaaatattgagagtgctattgataaaagggaaatggacatctag

SEQ ID NO: 201915 - DNA, 471 bp, Homo sapiens
gtgactcactgcagagcttcatgtgtctgtaatatgcatgtttcactgcgtagaatgtcacgtgtccgtgtcttcatgcatgtctgtggtgtcttgctgtgtagaacttcacatctatgtggcatgcacgtcttgctgtagggcctcatgtgtgacatgtgtgtctcgcctggtagaacctcacgtgtgtgctgtgcgtctcaccgggtagaacctcacgtgtgtgctgtgtgtgtctcggcgggtagaacctcacgtgtgtgctgtgcgtgtctcgccgggtcgcagaggttggcagcaacgggggaagccgcgtggtggatcccaggagccccttgtgctgttctctgcttttgtgtagattcgacaagtttcaaaacggtggagggtgtttcaggtgctcaaagtcctggcttcagatactgctcttgactggggggaacagcccaggatcccccagacacaagaagg

SEQ ID NO: 201916 - DNA, 466 bp, Homo sapiens
tgtgtgtgccactcctgaccctcctcaccatgaccccaccagctgtccctctccactacttggccaaccctcacctctctctactcatcacagaaatggcatttctactctatagtctagtgtctttgcaccatttttcagaggcaacttgctcctgagaagtcactgaatagcatatttcttcttgttttcctacagatcaagtttggctttaaatactggtcagcagccaactgcctcctggaaatgacctgctcattgtctgcttgccagattcttgcctcaggcactcctgtctctgtgaattccacattgaggacactcattttctcagctttttcctgctcatcatgcaccactgtggtgtaaccagcttcctccaaacaatcagccaataaatccctctctttcatttctgtgtctcctcagtagagagacagccaaatcatacaaactaacaccaaga

SEQ ID NO: 201917 - DNA, 423 bp, Homo sapiens
gaagcacatacaagcaacgtgtgagacgtgatttctccctcatggcagcccatgagctacagtatcagacttgagagactgctggccgcggcggcgagtaccccacccaccagttccaggaaatgaccagccacaggaaacccccaccccaatgttgaacaacccttcttttcttgaaatctccccaaattaccgccaaccaaggatggccaaatgtacctgaagaccaattagaaagtctctccagcttccaaaattccacctaagcataatatttgcgaatcagagactgtctctgtatttcctctttttacgctgtgtaagaactctcctttaacacccctgaacacttgtccacaaaagtgacagctgatgggtttccttactatgtatttatgaataaacaggctgtgagttttgtct

SEQ ID NO: 201918 - DNA, 303 bp, Homo sapiens
tctttactctttcttttctgggttcttaatatttaaagtgggtttcttatagacagcgtgtactaatccagtgtgacagtgtctgcctgaatttatacatttggtccatttgcaattaatgtagttatcaatatgattgggtttaagtctaccctcaaactgtttgtcatatctaatttttcattcctttttcttttttctctgccttcttttggactgaggatttttttgttttgttttgttttgttttgttttttggtgttaaccaatgtttcattcctgaaataaattttacttggtcat

SEQ ID NO: 201919 - DNA, 461 bp, Homo sapiens
tgtatggaccccacgccgcaccgacggtcaaactgtgtgagtgtgtgtgtgagagagagagaaggaaagagagactgacagacacagttggggaaatggtagtgttagatttaagagagagatcaactatattccatgtatggactttacttggatactgattcaaactgtgcatgtatatgtgtatgtctgtgtgtgtgtgtgtgtgtgtgcatgcatgcgcgagagagagagaaggaaagagactgacagagttggggaaatggtggtgttatgtatttttttcaaaagtccttaacacttagaggtatataaggaaatatttctgggtgatctgatatctggggtttgtctcagaataattcagtaagggtggaagagacatggatgaagtataattgaaacaggattagctatgagttgatcatttttgaaccggcggtgcggcgtggggtaccgag

SEQ ID NO: 201920 - DNA, 446 bp, Homo sapiens
acgctgcacgagcgagcaacgtggtatgtgtgtgtgagagagagagaaggaaagagagactgacagacacagttggggaaatggtagtgttagatttaagagagagatcaactatattccatgtatggactttacttggatactgattcaaactgtgcatgtatatgtgtatgtctgtgtgtgtgtgtgtgtgtgtgcatgcatgcgcgagagagagagaaggaaagagactgacagagttggggaaatggtggtgttatgtatttttttcaaaagtccttaacacttagaggtatataaggaaatatttctgggtgatctgatatctggggtttgtctcagaataattcagtaagggtggaagagacatggatgaagtataattgaaacaggattagctatgagttgatcatttttgaaccggcggtgcggcgtggggtaccgag

SEQ ID NO: 201921 - DNA, 249 bp, Homo sapiens
gtccaacaacttccagcagatgctggagttttcccaactttgaaatgccaaacagggcttaaataaaaagaaataaatgtagcattttataagatttaatttccacaatactaagtttagcgacctataaggtcaagttaccacgtatctctctgaaggcatctaagtctacaacagaagggaagaaaatcgttatttaaaatgcgaacatgaaaaaccttattcttccaggcttctcctataaaaaca

SEQ ID NO: 201922 - DNA, 110 bp, Homo sapiens
tccaagaagcctccctggacttccgaatctaagtaggctagcccagtcacactctataatatggcccaattttattttgctcacagtgccctgcctaaactgttcattta

SEQ ID NO: 201923 - DNA, 815 bp, Homo sapiens
tctccctactgtatcctagctactcaggagacagaagcaggaggattgcttgaggccaggagttcaagagcagcctgggcaacatagcaagaccttgtctcttaaaaaataaatgaatagaaatgtaaagagtaacagtcaaagctatgtataaattacatctttcaaaagactgtcctctaccagccaaaccatgagtatttcttttattgttttcaacaaggtaacttactagagaaatattaacacaagtctactgactgaaaacaaatccctgtgagtatttccgtagcaagggacacaatgttaccccaatgcttcacatgcttccctacattttctaaatgctcttgttgtcctagacaatgagctaagaacaaaaatgacttggcacttcttgtccaaagtatctaggactaagctgagttcacacgcttgtctcccatgccacggccacctagaagccatgctagtgacgtagatgaaagtggtctggatccttgagtcacctcctgaaagggtagtctagggagcccaccaaacccagaggacttcgagaacctcagatttcagaggtttgttgttcctccaacatccctaacctatcctggcttatccattttctcaggaaaagtaatggctcacaccaataaagctgaaaatagtttttcagttataggaagctagaatgatattaatgtaagaaaacatgaacttcgaaaaaaaagtctggctgaagccacccaatctgtccagatttgcttcaaggtaaattacagcaggataagcaaatgaaaagaaaagggaaagctggc

SEQ ID NO: 201924 - DNA, 954 bp, Homo sapiens
gacgagcacttcatctttcaggtgtccagcaagaccatcacccagagggtgctgaagttctccgtctaccacgtggacaggcagaggaagcaccagctcctgggccaggtgctcttccccttgaagaatgagaccctagtgggggactgccggcgtgtcatctggagagacctggaggccgagagcctggagcccccctcggagtttggcgacctccagttctgcctcagctacaacgactacctgagccgcctgacggtggttgtgctgcgtgccaagggcctccggctccaggaggacagaggcattgtcagtgtgtttgtcaaagtgtctctgatgaaccacaacaagtttgtcaagtgcaagaagacttcagctgtgctgggctccatcaaccctgtgtacaatgagaccttcagcttcaaggccgatgccaccgagctggataccgctagcctcagcctgactgtggtgcagaacatggaaggggacaagcaggctactacagtggaactgtttctgtttcatctgacatccggatagatgccagccacccccacattccaaggtgagatttctgactagcagtgacttttctagggccgcttggaaaagttgataagtatccttttctgcaggacagagtagactggtatctctgactcatccctgaaaaatctaaatggcaagagactagctggctctctgctctgatggggaggaggttgttgtttgggctgttctctacagacatagtcagggcaaaaagcatacgcatgcttcccatggaccagagaaacctggcctgggttgtctcaaatcctgtccacaaggcaactccagaagaaagaagccctttacatttccataaaacactttagaatcagctagtcaatttccacaaaataaagtgctagaatttgattggatttaattgattatgtagaacaattt

SEQ ID NO: 201925 - DNA, 423 bp, Homo sapiens
cggagtagctgggactacagacacctgccaccacgccctgctaattttttgtattttcaagtagagacggggtttcactgtgttagccaggatggtctcgatctcctgacctcatgatctacccgcctcggcctcccaaagtgctgggattacaggcgtgagccaccacgcccggcccacttgcacattttcaaagtagtccgcaaagctgtagtttctaatagcttcatagctcacatgtaataggggttctctgtgtgtttatagagcaggctactacagtggaactgtttctgtttcatctgacatccggatagatgccagccacccccacattccaaggtgagatttctgactagcagtgacttttctagggccgcttggaaaagttgataagtatccttttctgcaggacagagtaga

SEQ ID NO: 201926 - DNA, 753 bp, Homo sapiens
gacgagcacttcatctttcaggtgtccagcaagaccatcacccagagggtgctgaagttctccgtctaccacgtggacaggcagaggaagcaccagctcctgggccaggtgctcttccccttgaagaatgagaccctagtgggggactgccggcgtgtcatctggagagacctggaggccgagagcctggagcccccctcggagtttggcgacctccagttctgcctcagctacaacgactacctgagccgcctgacggtggttgtgctgcgtgccaagggcctccggctccaggaggacagaggcattgtcagtgtgtttgtcaaagtgtctctgatgaaccacaacaagtttgtcaagtgcaagaagacttcagctgtgctgggctccatcaaccctgtgtacaatgagaccttcagcttcaaggccgatgccaccgagctggataccgctagcctcagcctgactgtggtgcagaacatggaaggggacaagcaggctactacagtggaactgtttctgtttcatctgacatccggatagatgccagccacccccacattccaagattccagttctttgatgaaagtctctattccacccatcaagtctgtgtctgataacaccaatatctgggtcattagtggctccgttttgttgtgtctgttttcccctccttcctgttttgtggtgtgtttgatcacttattgttgaatgctaaccattataataaattttagtggctccaggaaa

SEQ ID NO: 201927 - DNA, 542 bp, Homo sapiens
aaaaaaagtctggtacctttgtatatcatgagctgatgtgaatggtaatggcgccagcctcctggactaagattccaccagtttcccctgtgatgcaggccatcccccacccgcaccccagctgaaacagaactgaaactcagaaaacctagctatccctgcattaaaaaatatatttgcaagcatccagggattttatttccgtcctcaaaaaattgagagcctcaacatttattttgtgcagaggcagagaaagtacccccatagtctgtgggctgaccccaaaactgagtgtctgtggctatgactatttgataactgggctgctacacttgtaaggtttcatttctttatttccttcaaaatgaaacaaagataaacagtgagagtagtattttattgtttgaacaccagtttctccccttaacaatcctgtgttagtatgctattttcttgatgtgattttaaacctcagtgtgtacccggccagttctgtattccagaagctactgtctactgccaagagctattaatcaaaataa

SEQ ID NO: 201928 - DNA, 449 bp, Homo sapiens
aaatagcactatttttatacaaaaaaagcctaaggaatcttaaaaaaaaaaatttactggcactaagactgaattcagcaaagtcacaggacactgtcaaaacactaaaactatactgtctctatacacgagaatccagcaaagtcacaggacactgtcaacatagtaaactatactgtctctatacacgagaatccagcaaagtcacaggacactgtcaacatagtaaactatactgtgtctatacaataacagcaaatattggaaaggtgacagtcttcaaaattctactcaaattatcatcaataatacaaaattcttaggattaaatttatcaaaagataggcaagagctcctctaaaaaacatacgctagtaataactgtttgcttggtgagctgtgtggccagggttgtgaaatcagaagagacacccagccttctccaggtg

SEQ ID NO: 201929 - DNA, 781 bp, Homo sapiens
tcaggttggtctcgaactcctgacctcaggtgatccgcccgcctccgcctcccaaagcgctgggattaaatgcgtgagccaccgcgcctggccctagttttccttttgacatccttccgagcctctgtttcttgctagttaatcctaacagggtatcatggaggcttgtcacttgttcacgacttagcagtgattctcaacgtggagggaggtaaggggagtttatctgtaagggcaaatccaaattgagggagggtgctcttgattactttttttaaaaaagcacatttaggccaggcatagtggctcactcctgtaataccagctaccctggaggttgaggtgggaggattgcttgagcctgagaggtccaggctgcagtgagctgtgatctcgctattacagttgagcctgggtgacagagtgagaccctgtctcaaaaagaaaaaaagtatctattgaacatttactgtgtgctagacactgtgccaggcagtagggtgcagagtgaaactgaagaactcaagatctattggaggccaagtgcaagttgctcatgcctgtaatcctagcactttgggaggccaaggcagtcggatcccttgaggacaggagattgagaccagcctgggcaacatagggagacccccaccgctacaaaaaaactagccaggcgtgttggtgcatgcctgtagtcctagctacttgggaggctcaggcaggaggatcacttgagtctaggaagtcaaggctgcagtgagccatgattgtgccactgcac

SEQ ID NO: 201930 - DNA, 538 bp, Homo sapiens
ccctatctctactaaaaatagaaaaattggctgggtggtgggcacctgtaatcccagccactcgagaggctgaggcaggagaattgcttgaacctgggacgtggaggttgcagtgagccacgatcatgccactgcactccagcctgggcgacagagcaagactctggctcaaaaaaaaaaaaaaagctagaatggaaacgggcttccacctaaaaatgcagtgtcctttctcttctcctagaaccactaccaccctgatgagtcaagcctttccttagatcaaacctttacaaaaaccacttatcttggatatgaaaactccttctttggcctttctgtctcttagttggccaccttgacctctttttgccaggtcttcaccccaacccgcacctacctcagcaggggtcttatttcccagctgctgggagatgatgctgaaggtctgtggctgtgccccttgctcctggcacatggtgaggatcacacggtcagcttccctgtaacccaggtatcatgattaaccctagggagccac

SEQ ID NO: 201931 - DNA, 614 bp, Homo sapiens
ggattccacttgggattggtctggccttggtcatttgtggccgtcccttggactaagcagttataaaaacatggcagcgtttgcctgttggcgttggggaaagaacagtccccagagaggggaaagggcctgccaggcagtttcaggcaggtctctgtccgagtaatagagctggatggttctggacatccgtgggtctttaccgtgggaatctgtgagggccagcctgatgagcaccatgtgctgtgttgtgtgtggattggagaattcatggtgtccttggtggagcgtcagtagctttgattatattctccacaagctctggtttttggaatagacaaagaccatattggatacatcataattttttttttttttttttggttcatgggtttttatttgggcactgaaagaagataaggaaactaagttttaaagtgatttgagtgactgtgaaatgactttgactgaataggacataataaggcaattacattaaaattaaaattagacattagatgaaattattgagtggaacccagctaccattcattcaagaactagtctcctcaaactatttttttgttctttttaatcttcagaggaaagaaaca

SEQ ID NO: 201932 - DNA, 810 bp, Homo sapiens
gggagagtgaggccgcgggggctgggaagggaccggtgtatgggggacagcaggcgaaggtcactcgggaaccagcccagctctgaggctgcgggcaggtcggaaagggagcaggacggcgacccccgtggcctccagagctctgtgtacgagagccggcgggtcacagaccccgaacgccaggacctggacaatgcagagctgggaccagaagacccagaagaggagcttccccccgaggaggtggccggggaggagttcccggagaccctggatcccaaagaggcactttctgagttggagagagtcctggacaaggacttggaagaggacattcctgaaatcagccggctgtccatcagccagaagctccccagcaccaccatgaccaaagcaaggaagaggaggaggcggaggaggctcatggagctggcagagcccaagataaactggcaagtcctgaaagacaggaagggacgctgtggtaaggggtatgcctggatctccccatgtaagatgagcttgcacttctgtctctgctggccctctgtgtactggaccgagcggttccttgaggacaccaccctcaccatcacagtgcccgcggtgtcccgccgcgtggaggaactgtctcggcccaagagattctacctggaatattacaacaacaacaggacgactcctgtctggcccattcctcggtcctccctggaatacagagcgtcgagtcgcctgaaggaactggccgccccgaagattcgtgataacttctggagcatgcccatgtctgaggtgggtgccccgtgcccc

SEQ ID NO: 201933 - DNA, 872 bp, Homo sapiens
gcgagcagtggagctgcggttggtccaggccttcgtggtgccaaagtcctccctcagagacccctcgagggaagggagaggcgggtgggcagggtgagtgcagacaaaaggcgcttgagcaagacccacgcttctctgggctcccaaacgcatcggggcgggaaagcagctccaacttcaacgtggaattctcccaaagccggctgtccatcagccagaagctccccagcaccaccatgaccaaagcaaggaagaggaggaggcggaggaggctcatggagctggcagagcccaagataaactggcaagtcctgaaagacaggtgtcccaggtatccagggcagcccaaatggcagtccccagctcgcggatcctccagttgtcaaagccgaaggccccagccaccctcttggaagagtgggaccccgtgccaaaacccaagccacatgtgtcagaccataaccgcctccttcacttggccaggcccaaagctcagtcggacaagtgcgttcctgaccgagatcctcgctgggaggtgctggatgtcaccaagaaggtggtggccagcccccggatcatctccctggcaagcccaaagtgcgcaagggcctcaacgagggatacgacaggcgtccctcgcctctatgagcttgccacccccaaaagcatcaccagaaaagtgtgatcaacccaggctggcctctaagaactccgctcccagtaaacacctcaggcaccctaacctgtgtatgtgatattctgagcttttggctggagaagggagggcggtaaaggcaaagaaggttggagggcatattttcttttgctccacaaaaaaaacgggcctttgggggcggaaaaaggtgaaggcg

SEQ ID NO: 201934 - DNA, 355 bp, Homo sapiens
gatttggctttactacaggtgcataggttgtcttgttaatgactgcacggaaagatggagcagcaggcatcacctaagtgaactcagatattgattaagctgatacgcaaaacaaaacaaaaaaaagtaaaagagtaacatgctctttttaaagacagttgtgtgagctcataggctctggaatgttagaagaaatagagcacagtccaacccacacccctgcatttgttcaagctacctcctcggtgccgaaaaaaaaaaaattctatcattggagctctattcgttcgttttatccagtgatttcactttggagctcctctgggggagcacaaggggaacccacgggggatcc

SEQ ID NO: 201935 - DNA, 113 bp, Homo sapiens
ttacctaatgaaataaagaaaaatgtattatacttggtctctctctgatgcccaagttttctttgagtcagcatcccttgagaggcttaaatgttgaccagtgacatagctgg

SEQ ID NO: 201936 - DNA, 352 bp, Homo sapiens
cctctctctccacttgcacaaattcaaagctctaataacactagaccaccctccatttcttaaacatgcccaatccgaaattataacttgagaaccaaaaaataataattgtctgataatgtggcagtactcatgattaacaagtaaaaactatacaaaacaacagtctaaccagagttattctaataaataataaaaattattattcgtttaatatttacttttgaggagacagggcaaatggcaataatttttttaaaaaagaaatgtcaacttttatacatttgcattgagggaaatataaattttctgctgcataattcattcattcaatcattttcttcgatgctag

SEQ ID NO: 201937 - DNA, 446 bp, Homo sapiens
tgtaaattgtagatatattgaagtgatggaagcctcactcctgaagagacattgcataatatttggaatgatatggttgatgtattaagcagaagttacaaaaaggcataaaatctagtgtatgagtaaaaatcaaaagcaaaaacaaaaaaacttcccagtttatgaaaaactcgcaaagtaaaattcacttcattatagcaatgacttctccaaagatatattagctgccagaatgcgctgtgttcatgcttttctgctgaatttaaaatgcagatgcataattgtaaagttaaatatcatttattttttaatgtttatactttcatgctgccattttgttttatgttttttagagagtgtattttactgtcttttaagaatacaagaaatataccttgtcatgaaaataccagaaaaatacaaataaaagaagaaatttatat

SEQ ID NO: 201938 - DNA, 664 bp, Homo sapiens
ggggagaaaccatacaaatgcaatgtgtgtggaaaggattttgcgtatagctctgttcttcacactcatcagagagttcacactggagaaaaaccatataaatgtgaagtgtgtggaaagtgcttcagttacagttcatattttcacttacatcaaagagatcacatcagagagaaaccatataaatgtgatgagtgtggtaaaggcttcagccggaattcagatcttaatgttcacctcagagtccacacaagagagaggccctataagtgtaaggcatgtggtaagggcttcagtcgtaattcatacctccttgcccatcagagagtgcatatagatgagacacagtacacacattgtgagcgtggaaaggaccttctgactcatcaaagactacatgagcagagagaaacattataaatgtagtaagtcagggttcaattagtaaaacagaagccacactgtattccagatgatagaggcttactcagcctgtgggagggctaggggagcaaaagacagggacactgccatcgataatgtcagcctgcagcactgaagtgtgccaggcaaggactgtggatttcaagaacttctgtgaagctcccatcaactgctgtatgctacaatggcaaagaggttacttttgacaaatgggtggttt

SEQ ID NO: 201939 - DNA, 423 bp, Homo sapiens
cactatgctgaggttgaggaccagatacactatgctgaggctgaggatcagatacactatgctgaggaccagatacactatgctgaggctgaggatcagatacactatgttgaggttgaggatcagatacaccatgctgaggaggatcagatacatctccttcctgtcttcagggcaatgaatgaaggagaaggaaagtagttctcaggaggtttatgaatttttgttttcaaaaagctttactcataaataagtagattttaaaccaagaaatcatacactgctgaaaggagtatcagcaactttcaagaagggcaattaggtcgtatctatcaaaagacaaacgacaaatgcttatagctgtggcccagcttttctaattctgggaattatctcacagtaaatatagatgttattcattgc

SEQ ID NO: 201940 - DNA, 366 bp, Homo sapiens
gagggacagaaccaggatgcaatccccagccgcctggctccagactcgggttcccaaggtcccactacacttggtcactccaaggaggatcagatacatctccttcctgtcttcagggcaatgaatgaaggagaaggaaagtagttctcaggaggtttatgaatttttgttttcaaaaagctttactcataaataagtagattttaaaccaagaaatcatacactgctgaaaggagtatcagcaactttcaagaagggcaattaggtcgtatctatcaaaagacaaacgacaaatgcttatagctgtggcccagcttttctaattctgggaattatctcacagtaaatatagatgttattcattgc

SEQ ID NO: 201941 - DNA, 764 bp, Homo sapiens
ctgaggaccagatcacaccacctgagtctgaggaccagatacactatgctgaggatcagatacactatgctgaggttgaggaccagatacactatgctgaggctgaggaccagatacaccatgctgaggctgaggaccagatacaccatgctgaggctgaggaccagatacaccatgctgaggctgaggaccagatacaccatgctgaggctgaggatcagatacaccatgctgaggctgaggaccagatacaccatgctgaggctgaggatcacatacaccatgctgaggctgaggaccagatacaccatgctgaggctgaggaccagatacaccatgctgaggctgaggaccagatacaccatgctgaggttgaggaccagatacaccatgctgaggttgaggatcagatacactatgctgaggctgaggaccagatacactatgctgaggctgaggatcagatacaccatgctgaggttgaggatcagatacatctccttcctgtcttcagggcaatgaatgaaggagaaggaaagtagttctcaggaggtttatgaatttttgttttcaaaaagctttactcataaataagtagattttaaaccaagaaatcatacactgctgaaaggagtatcagcaactttcaagaagggcaattaggtcgtatctatcaaaagacaaacgacaaatgcttatagctgtggcccagcttttctaattctgggaattatctcacagtaaatatagatgttattcattgc

SEQ ID NO: 201942 - DNA, 217 bp, Homo sapiens
ttttagtatagatggagtttcaccatgttggccaggctggtctggaactcctgacttcaagttatctgcccgcctcagcttcccaaagtgctgggattacaggtgtgagccaccacttccagcctgtaccatcattttgatagtaaagaattccatatgtgtccatttatttacattagtgtatagctttatatttatatatgtttttatgatgctg

SEQ ID NO: 201943 - DNA, 230 bp, Homo sapiens
aaaaacctgtctcttctaaaatacaaaaaaaataaaaaagagagagagagaaaatattcgctgggcacggtgacacccccctgtagtctcagctatttgggaggttgaggtgggagaaatgcttgagcctgggaggcggaggttgcagtgagccgtgataatactactgcactttagcctggacaacagagtgagagaaaaagaaagggaaggggaggggaggggaggga

SEQ ID NO: 201944 - DNA, 401 bp, Homo sapiens
gctgacaaggtggagaacccagagagcctcagctctttcggcacaccaggaaagggacagcaggctaagctggcagatgtgagagtaaccctccctcggtcccacacttctgatgcactgaagtaaaggcagctgcctcttgctttctgtcttctcccatctgcccacctccttgaagatatgggacaggaagagcaggagacattcatctattttggcctgtttcttttcagtcatttattcattcatttcttttttttttaagataagagtctcatgagtcccttcaaacggttgagcctttaggagcctgcactctactttgtacctgggagggtacttaacagacacttggcttcatttgtgcatttgtctttcagctctgtgcagtgtgcctagaa

SEQ ID NO: 201945 - DNA, 748 bp, Homo sapiens
aaagaatgaccagacagagtatttgtaacatacaggacattctacaaaagagcttaggaaatgcctttgtccctgaaatgttttcaagtttatctcctcctttcatatctgctagttgcagtggagatggagggcagaaagacaataggagaggtacttatttggtaccttttggatgtaaatgtgaagaacataaagagatcaacttgggtgactgctaggtgtttgtttgttttcttttcatttaacctgaggctagacagtactatattatgataaagtaagatcaggttctgaagaggggaaggacagtgaatttcaggcaacagtgggacagaaccggttgagctgccctctaaacagtggtaaaggggaatggagaaaggtctgggctggagatttatgagctctgattcatatgttgaggtggaagctacaggtgtgtatgaaatcatccaagtacagcacgaagagggagatgagaaatctgcccagggagcaatcctgagaaactgcaaaatgtaaggcctttacaaggggagagatgcaaattaaacaacttaaaaggggccaggtgtggtggcttaagcctgtaatcccagcaccttgggacaccaaggcaggaggatagtttgaggccaggagctcaagaccagcctgggcaacatagcacaattccatctctacaaaatttttttaaaaattagctgggcataaaaaacaaactaacaaacaaaaaaacaaaaca

SEQ ID NO: 201946 - DNA, 374 bp, Homo sapiens
cctcctgagcctgggtcctcctgaacctggggtcctcctgagcctgggtcctcctgagcctgggccctcctaagtcaggatcctcctgagcctgggtcctcctgagcctgggtcctcctgaagctgagtcctcctgagtcagggtcctcctgagttggggtcctcctgagcctgggtcctcctaagcctgggaactcctaaacctgggtcatcctgagcctggtaactcctgagcctggggtcctcctgagcccggggccctcctgagtctggggtcctcctgagcctggggtcctcctgagcctgaggccctcctaagtcggggtcctcctgagcctgtgtcctcctgaacctgaggccctcctaagtcaggg

SEQ ID NO: 201947 - DNA, 347 bp, Homo sapiens
tccctttcttattcctgacaatcagtctcttctgaatcattatataaagtaggcttacatttgctggtaaagtcagttcagcatttcttgtagcaaccctctcctttttgcttaatggccttgtggtagattaaagatggccacaaattctttgacattcttcccatggagagacagggtctatgtcctcattctccgaatctgggcaggctctgtgactgccccaacgcactgaatatggcagaagtgattctatgtcaacctgcaactccaggccttatgaaatccacagctccctcttgctattgcttgaaatgcttgctcttgggagagccagccgccatgta

SEQ ID NO: 201948 - DNA, 408 bp, Homo sapiens
aaaaaaaaagaacacacaattgcttgatacacagagcaaaaggagtgttggttaatcagagtaaatgttggctccgcttgctgtattctgcattttctctagtgcacactggtataattagtccatacttattgaggaaactaagttctgattagcatgacgtgttcagggcaaaagaacaaattactttcactgcttaaggcatacagatctgcatgaatttgtttcaatgccagtgccagaagggaaaactaaagagggcaagagacaggggatagtagatagtcttttttttttttttctgagacagtcttgctctgtcaccaggctggagtgcagtggtgcaatctcggctcactgcaacctctgcctcccaggttcaagcggttctcctgcctcagcctcctg

SEQ ID NO: 201949 - DNA, 703 bp, Homo sapiens
agctatttagcacattctgctagtggctccgcaggatatatctgatttaaaaaataggaaccacaataataatagctgcttatgcttatggagcattgccatgtgctagataggcaccatcctcagcccttggcaggtctgagctcctttatttcttccaatcaacactatgaggcaggttctgtaaccccccttagggttaggccactcgggaaactgaagcacagagagtttaagtaacttcctggaggtccgacgcgtaacatgtggaggtgctgggattcaaaaccaggcaatgtgggtcccgggcactcttgaccagtgcctgtacttcttccaaggaatagagcaagggaggtcataccgaatatcacagtgtcacctaggaagcccaagggaggtattcccgttaatctgcagccaaggccgggcgcggtagctcatgcctgtaatcccagcactttgggaggccaaggcggatggatcatgaggtcaggagttcaagaccagcctggccgagatggtgaaaccccgtttctactaaaaatacaaaaattagccgggcgtggtggcggacgcctgtaatcccagctactcgggaggctgaggcagagaactgcttgaacctgggaggcagaggttgcagtgagctgtgatcatgccactgcactccagcctgggtgacagaacgagactccatctc

SEQ ID NO: 201950 - DNA, 1045 bp, Homo sapiens
ctctagtgatagcagtgtatatatatatgtatatatatatatatatatatatctcttctggggactgagtgactctagtgatggcagtatatatatatatactgtatatatatacagtatatgtatatatactgctatcactggagttacttagtcctcagaagaggcctgggaaagtagtagtgctattatcctcattagttcagttcagagaagacaacttgcccaaacataaacaaacagataagtactacaacgaagcctccttagatctactaggctccagaatcttcatgctgaagagaaactttgttattttgaggcaaatgagataccatccatgtgtatagttcttatacctttgcaagctgtttcacatatatttggattttattctcaccccatgaggtcagagtgccaggtttcactttcctctgttttgagctaagagggaaactaaggttcagagaggtaatggaaacttccacacgtcacagaactagttagtgacaaaagtccaaagttaactcagagctcttgggcccagttccctgtagcatgccaataagaccactaatccaggctcctgatctcttagattaaactgggcaagtctgtatctcaacttccccagtgagtaggagttcatttagcaaatatgcatcgagatgtgatgaatgaacagtgtgtcaggcatagtgccaggctttagtgtgatagtgacagataatacatagttgattctggctgggcacggtggctcacacctgtaatcccagcactttgggtggccgaggcgggcagatcacgaggtcaggagatcgagaccatcctggctaacaaggtgaaaccccgtctctactgaaaaaaaaaaaaaaaaaaaattagccgggcgtggtggtgggcgcctgtagtcacagctacttgagaggctgaggcaggagaactgcttgaacccgggaggtggaggttgcagtgagccgagatcgcgccactgcactccagcctgggcaacagagtgagattctttctcaaaaaaaaaaaa

SEQ ID NO: 201951 - DNA, 481 bp, Homo sapiens
aaaaacaaacaaacaaacaacagcaacaaaaacgaagatttggataattcatgtgtcttttgttttgatctcagaatttcctcattaacagatgtgaaataatttaccaagtttttcttcaaattgactaggcctgtataaaataacagaaatgccctttgcagtgaaagcactttgtattagggattgatcactcaattacattctggatgagaagaaaaaaaaaatcctattggtgtttttatgtgattacatttagggagaaaaagtttggaaagctaagaatcttttgtgggaagacaaaaagaaagagcttttaaggggcactttgaatacagagagtgactttagatagctagcaatgctgtttaaaagttacatcatggctttaagcaaaatcaacagcagtgaaacaaactgaacaagcagaaaaaaatataactcgaaacactgatgagtagtagtttttgaaagtgaattc

SEQ ID NO: 201952 - DNA, 326 bp, Homo sapiens
ctcttgatttgacccatttacatgtggagtatttactaggtatgatattccaggcatttattcaataagcaataggaaaatcattatacctgaatgggaataaaagcttattaagtgagattgttttactttattagcatactttgtatatagtttctttgatagcattttatagacattaaattatatgaactgtaggttttgcctaatggaagttgccacttaacaatattggcccctattttttattcactataatatatttttgagttacacattgactataatcctaggagtactttcttaattcttatgttataatactg

SEQ ID NO: 201953 - DNA, 1117 bp, Homo sapiens
  misc_feature (139)..(139): n is a, c, g, or t
gggaaggccaaaagcattgtggacaaagaaggtgtcccccggttctatatccgcatcctggctgacctagaggactatcttaatgagcttgggaagataaggaagggaagaagaagatgaacaagaacaatgccaaggntctgagcaccttgcgtcagaagatccgaaaatacaaccgtgatttcgagtcccatatcacaagctacaagcagaaccccgagcagtctgcggatgaagatgctgagaaaaatgaggaggattcagaaggctcttcagatgaggatgaggatgaggacggagtcagtgctgcaactttcttgaagaagaaatcagaagctccttctggggagagtcgcaagttcctcaaaaagatggatgatgaagatgaggactcagaagattccgaagatgatgaagactgggacacaggttccacatcttccgattccgactcagaggaggaagaagggaaacaaaccgcgctggcctcaagatttcttaaaaaggcacccaccacagatgaggacaagaaggcagccgagaagaaacgggaggacaaagctaagaagaagcacgacaggaaatccaagcgcctggatgaggaggaggaggacaatgaaggcggggagtgggaaagggtccggggcggagtgccgttggttaacggagaagccaaaaatgtttgccaagggaactgagatcacccatgctgttgttatcaagaaactgaatgagatcctacaggcacgaggcaagaagggaactgatcgtgctgcccagattgagctgctgcaactgctggttcagattgcagcggaaaacaacctgggagagggcgtcattgtccaagatcaagttcaatatcatcgcctctctctatgactacaaccccaacctgggcacactcaactggaaggccagacaatagcggcggacaaggccccaggaccgcaaacacggactccgctccaaacaaccggcaggagagtccccagagaaaggtcgagaacgaacaacacgcaaaaacaagagaaaacagagaaaacgcagacaaccgagcgaacacgacgacgaagaaaaacggaagagaaaaacaagaaagacatacacacaagac

SEQ ID NO: 201954 - DNA, 465 bp, Homo sapiens
caggtgtgagccattgcgcctggcctaatttttgtatttttagcaggggaggggtttcaccatgttggccaaaactggtctcaaactcctgacctcaagtgatctgcccacctcagcctccgagagtgctgggattataggcatgagccaccgcacctggccaccaaatcctgctcttataggaagctttccatccctgcttccttgcttgccccactctcccattttttagggccctaaacatagaaacatttattacattatattcaaagtaaaatcaacttagaattcagtaaatagaacaggacattgcttaagagactttggatataaaccaaaataagtcacaacaaaactgcaatcagcttttgattatctaggagcatttttgttgttgagaattgggagaaagacccttactcttacttcttagattcctctttgccttgcaggaacccagctcct

SEQ ID NO: 201955 - DNA, 246 bp, Homo sapiens
ccccacattgtcctatagatttaattcaatcccagtaaagaaaaaaaaaaatgccagcaagctttttttgaagaaattaacaagctgattttgaaatttatatggaaacacaaaggatccagactagtacaggaattttgaaaagaagaacagaattggaggacttgtactacttgatctcaagatttacaagcctataataatcaagtcaatgtagcattgacataaaggcatacatcagtggaa

SEQ ID NO: 201956 - DNA, 377 bp, Homo sapiens
ctggaatttcttggagcaaaaattccagtttaaatatcaggaaaattgtctagactaagagaatggaaacggactttgtgcaaccaacatcaggtacagaaaagagaccccaacaatcatcatgaacccaaacaggcctttctcctcactaagagaagagaacacacacaacccatgccttgttactctttgagaagatgtgccctgcctgtgatctagcagctagagacggaacatacaacctgttctcaatattcaaataattttttaaaggacatggtatcacactgagcaagtgaataatgcaattctgttgtagaagaatgaacggctgaaaagacctgagcaactcatgtccaaaacttgcagtttccaca

SEQ ID NO: 201957 - DNA, 109 bp, Homo sapiens
atcccagtatcttgatatccccaggaggctccaactaatgtcctatactctgtatggagtttgtgagtcattcttctctcagccacacacatacacacacagggaaaaa

SEQ ID NO: 201958 - DNA, 234 bp, Homo sapiens
tgagccgagattgcagcaccatgctccagcctggactatagagcaacactcggtataaaaaaaaaaaaaaaaaggataagcaaacaaattatgatgaaataattgccttataaaattgcagaaataggccaggcgtggtgactcatgcctgtaatcccagcaatttgggaggccgaggcaggcgcatcacctgaggtcgggagtttgagaccggtctggccaacatggtgaaac

SEQ ID NO: 201959 - DNA, 444 bp, Homo sapiens
gttaagaatcagtaggtgtgtgtaattgtgtatataccatgatcataagcataaaaatatgttattgcatctgggataaaactaggaggaaatataaaaacacatcaaaatattaacagtggttacctttgagtgtaaaaaatgagtgttagcttttttctgtatactttttttctatctatacttttctgcatttttttttctctgtacctttttttctatctatacttttctgcattgtttttcaaatgttccccagcaattgggcagcagaggaaggaatcggcaaaatgtatattttttaagtaattgccctatcaattaagcatttagctcctaaaataatggggaccaagaccttttttttgtttgtttgagacagagtgtcgctgtattgtgcccaggctggagtgcagtggtgcaatctcggctcactgcaacctc

SEQ ID NO: 201960 - DNA, 408 bp, Homo sapiens
aagagtgagactccatctcaaaaataaaaaagatggaagcatgtatttgtattttgagcatcaataactaggtaagagaagtgcatttttaaaaccaatgagttataaaaattcaaattagatatatatacatgactaaggggtaggggggtccagttgtaacaatggcaagttctaagagataaaatcctaaggtctttgtttttatttctatggacatcgctgtgtcttcttgactcttttataagtagcatgtttttaataatcagaatatatataaatctatttttgaagtaatataatgactagccttgtacatacaattttgcatacatcttgacttccttagaattagtacccaggtttaacttatttagttaaaagaataaatttttttgaaactttaca

SEQ ID NO: 201961 - DNA, 302 bp, Homo sapiens
cccactggtctaaatccaaacacttcatacattgcctggatcccatctttaacaacctttctaggggacttgcattatcccttctgtatcttaattttctccttccctactgaacattacacattggcattttaaatatattcaagtttctctagtctttaaaatactctctgagtctgaattcttctccagataccaatgtatttcttattccttttacagccttttcattctttacaaatttcttgagagcctggatgcagtgagccagtgagcctgggtgacagactgagaccctgtct

SEQ ID NO: 201962 - DNA, 481 bp, Homo sapiens
aaaaaaacacaaaaaagcagaattcctaaaaaaaacaaaataaataaatctttagggactcaaaaatatgcttttatcttcttaagtgcagttaaaagacaacttggaggaaagggcccaacaagcttgtttggcatatcttactttaaagaagtgatcataatctaccttcctctcatcattgtccacaagaagtaaaaataattatgtggctgtttggcaataaaagaggggtggttccttagagctcttttgggaattttcctgaagattatcacttcactctgtgtgtgtgtgtgtgtgtgtgtgtgtgtgtgtgtgtgtgtgtagaaggaaatatttagtagttacctttgagcagggtgcctggagatttttagttttggttgggaagaagactttttttaaaaatgagtgttttatatagaatagtgtcagatttagagaaaagttgcaaaaatcataccgagtgtccgtacat

SEQ ID NO: 201963 - DNA, 404 bp, Homo sapiens
atgtttttgggggggagggggtaaccaagatttcagggtagtaacttaggaatctaagaactatcttctactttaggaagagtgggattagttactccctttgtataggaggactttatgctcaaggaatgtgttgtggagaaaaacacttcttcacaaacaattcagtgacaagacctcaaaggtaatgcgtattgaggaaaacagtagtgggtgaaaattcccgcttagctgtaaaatgactctcttgccaggtttccgtgtttgtctcaactgaactctgggctgagtgtttaccagggagaagagatgtgaattaaacaaccttcctgtttagtgttacctgctttgtacaagaatgaagtgcaaagccaacttactttattaatccaagttctttttat

SEQ ID NO: 201964 - DNA, 409 bp, Homo sapiens
actgtgactggcttatttcacttagcataatttttcatgctgcatctgtgctgtagcaggtattgatgtggggtttttctcattagttcagctacatctgggttcttctctcatgaccaggaaaaattaagcacgcagacacattgaagggtgaggaggacagaatttattaagtgaaaggaaagctctcagtaaagagagtggtcctgcaaacaggtttccacctcacaattgaataccaggagcacatgagttgaagcagccaggctcctcccctgcataaggcatgaatttctggtggctccacctcatccccccagtgcatgtgggcctctggtctgctgcaggcatgtccaggcaagacaagtccaggttcccttatctgcacttaacatctggtgtaaacact

SEQ ID NO: 201965 - DNA, 263 bp, Homo sapiens
agctggctgccgaaggcctggcccaccgcaccgagaaggccaccgagggagccattcatgccgtggaagaagtggtgaaggaggtggtgggacacgccaaggagactggagagaaagccattgctgaagccataaagaaagcccaagagtcaggggacaaaaagatgaaggaaatcactgagacagtgaccaacacagtcacaaatgccatcacccatgcagcagagagtctggacaaacttggacagtgagtgcacctgcta

SEQ ID NO: 201966 - DNA, 145 bp, Homo sapiens
ccttgagcccaggagtttgagactagcctgggcaatctagtgagaccttgtctatatttagtaaaattgaagaaaagagaaaaagttttcttttcacatattttcttcctaatccacttctgtaaatggttggtaatatttactt

SEQ ID NO: 201967 - DNA, 569 bp, Homo sapiens
cttcccctcccaagacgccctgtctaaccctggctgtccccacagatctgtacatggaggaagacacaggaaggtttgcccttcaacaggcacaaaaagcaagctccagatttgctcaactcgaatcaaaagggctaaacacatccagatgtttgaacggttctggaagacgaggcagagccccctccactcccatggcctcccccgacagcagccttctccctactccctcggaaggccaggggaagacctgccaagacaaaatggctgttctcggggacggtgagatgactgcgaacgttcccagggaacatggcatcaggagcacaccagaaagagcagacccacagccagagaaagaagcgatgtttatccacttgtgagacatctggaaaatgaaagaggctacaagccatctttatcacatctctgtgcatacaaatacaccacggaaaattacagatccctctcatctaccaaatgagccataataaccccgcaggttttccccgagtcctttagacactccgccttacactgtttatcacgagggagacaagtggagaacc

SEQ ID NO: 201968 - DNA, 198 bp, Homo sapiens
tgatgttgggatgaggctgactcaaagctaggactgacaaaagttcttcattcttatgtccttggccggccagccacaggtcagtttccatccccaaaagattatctcactcagctcacaaacatccttagcctaacattccctagaaaatgagacggctttaggacaaggggtccaatagttacaactaacacaact

SEQ ID NO: 201969 - DNA, 330 bp, Homo sapiens
aaagttatacagtcacatttcaggacatatctatgtaaaaatgcttgatccattaattatctggagccctctctggcctgcaatttctattctagcccaatgtttctcaaagcaagcctggtctggtcagaatctctgggacagctggttaaaaatgtagattcccagcttattccaaattgtagcatcaaaagctctcaaggttgggccagaggatctatatttttatctatatggatctatataaatctatatagatctatcttttatatgccctcccttactgattcttatgtacatgaaagtctgagtagcgttattaactggttc

SEQ ID NO: 201970 - DNA, 411 bp, Homo sapiens
tataccgatcatccctagagatcacattcagctgctccccgctatggcctcagtgcacattcgcctttgtgtcctgcgaatcgttctatgggggtagattcctagaggtgggagcatccaaggacaggacacccaccctccgaaatggctgtccccattcctggcgcccccagctctgagtgacatggcctgtttttgcatgtccccaccagtgtgacgacaggaaatggagtcttggttctgtttgcatttgtttgattctctgtctatggccattacccgctttcccatctggaggttcaccttttccaaggcagttggttttcacaggaaacgcggggctctggccagaaatgcagcgcagatgagcgcgaggagcctgtgcaaacaattccacatgcaggaatttgg

SEQ ID NO: 201971 - DNA, 518 bp, Homo sapiens
actgtctctccactgaacttaatgctttaactttacctaaaactaaaaccactaaagtatcatctctctctatttttttgtcttttttgaaacagagtcttactctgtcacccaggctgggctagggcacagtggtgtgatcatggctcactgcagcctcaatctcccaggctcaagtgatcctcccacctcagccttccaaaaagctgggactgcaggcatgcaccaccacacccagctaatttttatattttttgtagagatagggttttgtcacgttgcccaggctggtctcaaaatcctgtgctcaagctatgcacatgcctcagccttccaaagtgctgggattacaggcgtgagcccctgtgtccagcctagacttctcagttgaggaagaaaatacaaagagagggaggaaagttgggttccgttgagtttgtgggatctgtgagataagttacatgtgagatatattgaattgaatgtatcagtctcattgcagatgatccttgaaaatg

SEQ ID NO: 201972 - DNA, 214 bp, Homo sapiens
cctcccatctcagcctcccaggtagctgagatcacagatacacaccaccacacccaggtaattttttttttaagtaaggacaaaatctcactatgttgtccgggttccaaataaattttaacagcttaattttaactattcaaaaactaagcaaatacctgaaaattatttcttctgaaaaacacatgctaaataaaaatctactatacttatg

SEQ ID NO: 201973 - DNA, 258 bp, Homo sapiens
tgattcagaagacctcgtattatattcatgtgacttagagctctcactattgatctagttttatgaacaatgtttactgtaaaatagaggcatgaaatggtaattaatagaccaactaatgaaactttttatataagtgagcttactttatgacaaaaagaaaaaacactaatgattgcatactgtgcagtctgtgtgtgcaatcattagtgtattttcttcttggcattcagtcaataatatgttgagcatctattc

SEQ ID NO: 201974 - DNA, 302 bp, Homo sapiens
ctcacagtcacacctcacagtcacgcctcacagtcacgcctcacagtcacacctcacagtcacacctcacagtccacacctcacagtcacgcctcacagtcacgcctcacagtcacacctcacattcacacctcacagtccacacctcacagtcacacctcacagtcacacctcacagtcacacctcacagtccacacctcacagtcacacctcacagtcacacctcacactcagggttgatacctcacagcccacaccccatggtcacatacctcacagtcccatctcacagtccatgcct

SEQ ID NO: 201975 - DNA, 160 bp, Homo sapiens
gcttttataaaatgtaaaatgagagagaatctagctcttttaggcaagaactttaattcaccactatatactgatgctgaaaatagtagtacatttattgaatatgcagagaaggtactcaagaaatgactgtcaaataaataaataaaatcattagcta

SEQ ID NO: 201976 - DNA, 401 bp, Homo sapiens
ccttcgatctaataatcctctcagacgatttaacaatatccccagcgagttggctttattgagggctgagttcctgagaaggaaggcagcgacacaaatagctcaagtgcatggagacagtcgctggccagtcttcccagcgctgacagctctgaaatacaattatcagtgtgatctgcttaagaattcatcatcagctcctgccttctgaagacttaaaaaaataccgagacatacaaagagaaagaggtgataagaaggcatcattttcctccagcctcataactgtaaattgaagaaaattattttctttgcctccagctcattggcatataggcagcattatattataatttcataagcataaatcctttgaataaatttcagaagaataactgaat

SEQ ID NO: 201977 - DNA, 591 bp, Homo sapiens
tagacctaacccagtagacctaaccactgaatcctccggaaggaattgtagcaggccccatgaatgaagagaacttttttgaatgggaggcattgatcatgggcccagaagacacctgctttgagtttggtgtttttcctgccatcctgagtttcccacttgattacccgttaggtctacctggctaacctagctgctcaaggatggccctgtctgcatgcttcctttcaaaagctagcatagaaaggagggcccaaggtgaggaaatttgtccaaagtcacccaatgagtcgcaggaagggctagaatctggttatctggaccgtcctagagcactttcacagtgacagccggctggaatcaagttttcatttagaaaaatggctagaagttagggcattgcctgcagccactgaaaagcagctttaggagcagatgtccacgtaatagaaggagatgggctagggcctgccacggaagccagcaagcgcgtgggagctgggggaggaaaggagcaaaaggcaagaacaggcagtatgtccgcggtgcccacagtgctgtgggtacaagcaaggggaaaagagcccatgg

SEQ ID NO: 201978 - DNA, 871 bp, Homo sapiens
tctctgcacttcctggggagcgtctggcccagcttggtacctcgcgtgttagcctgctgagagctgcagctccagcccagccgcggaccgccgggaagtcacccgctctgggggcagctgaatcttgacgttaccgccattgtttggagaaatcgagtgggtgtggaactgcggcgagcgagcccaaagtcatgctcagccggaaagtcgcatacaataatatgaagttgaactttcctcggcgcagaaaggcacaataataaaccctgagatccccggaatatcagaaggaaagtgctgttgatttgttcagctacttggaaacctcgcctctgctgagaaattaaagaagctagtgacggatttatcttggaaatacacatactggaaattgatcttaccaccatgagggaagatgcaccagccttctgggttctgtctcagaattgctatataggaggaaatgggcactttaaaaagtacaacttttgcctatgatatgcgatgtaagaagatggctaagaatgaaaatattttctatctagcaattacacttaaaactaaagtgattcataagactacaaaactggcttaggaaggaaggttggcggcggtgaagagggaagaggatgatctagtaatgggctcttccaaatcgcatctggtaggttcatagccatgagtcagccaccaatcgggggcgctgcccctgccacagcagcagcttctcccgccgctgcagccactgaggctcgtctgcacccggagggcagcagcagaaagcagcagcgagctcagtcacccgctagaccgagggacagttcgctgcgacagacaatcgcggccacccggtccccagtgggggccggca

SEQ ID NO: 201979 - DNA, 623 bp, Homo sapiens
tctctgcacttcctggggagcgtctggcccagcttggtacctcgcgtgttagcctgctgagagctgcagctccagcccagccgcggaccgccgggaagtcacccgctctgggggcagctgaatcttgacgttaccgccattgtttggagaaatcgagtgggtgtggaactgcggcgagcgagcccaaagtcatgctcagccggaaagtcgcatacaataatatgaagttgaactttcctcggcgcagaaaggcacaataataaaccctgagatccccggaatatcagaaggaaagtgctgttgatttgttcagctacttggaaacctcgcctctgctgagaacttaggaaggaaggttggcggcggtgaagagggaagaggatgatctagtaatgggctcttccaaatcgcatctggtaggttcatagccatgagtcagccaccaatcgggggcgctgcccctgccacagcagcagcttctcccgccgctgcagccactgaggctcgtctgcacccggagggcagcagcagaaagcagcagcgagctcagtcacccgctagaccgagggacagttcgctgcgacagacaatcgcggccacccggtccccagtgggggccggca

SEQ ID NO: 201980 - DNA, 769 bp, Homo sapiens
gccttggagctccagcagagggaggaggtggtgacagaacaaagggacaaacctaacgtttgggtcctgctgagcagccggctctccctggccaggggaggggaccttaaaggagcccgcaaggtggcaaagggaacagcacgtgcaaaggcacagaggcgagtggaaaagcgggctggggctggggctggagtagccgctgtgggaggacccgggctgagggccaggcactccaagcccttgctttccgatggtcctggccaaggcagcgccaggccacaccccggccccagtgtaggtgacctctccccacagcatccctcctgtagaggcccaggcagatccacagtgagcagaggagactcagggtgggaagagcctgtagggtcagacaggaaggggcttggccaggggtctgaagggttcagtgttagccagacagtgcacagtggtgtctctcactggggacaggactccctgcctgcatctgtcccctgccatctctgtgtgcaccccatcagccctacatcattgtccaacctgtaggcacatccatccatagcacccaggtgctggaatccacttacatttgtcctgaggttcccactgttcaccgagaactgtgtgtttcatcccatggttggctacgacaagccatccatttcacactgggctgttcctttacttttgctccctcgtgaccaaaatatacaaggtgttgctactggaagttgcgatttgctgtcctataagaaccccacacggattc

SEQ ID NO: 201981 - DNA, 438 bp, Homo sapiens
cgcatgacccagtaattgcactcctaggtatatacccaagagaaatgaaaacctatgtccacatgaggtcctgtacacaaatatttatagcagcacagcacaaaagccagaaagtagaaaccaccaaagtgtcaatcaactaacgaaaggaaaagtggccgggcgcggtggctcacgcctgtaatcccagcactttgggaggccgaggcgggcagatcaccaggtcaggcgttcgagacaagtctggccaacgcggtgaaaccccgtctctactaaaaatacaaaaattagctgggcgtggtggcgggcgcctgtagtcccagctcctcaggaggctgaggcaggagaatcgcttgaacccgggaggtggagtttgcagtgaggtgagatcgcgccactgcactgcagcctgggagacagaactagactccgtctcaa

SEQ ID NO: 201982 - DNA, 512 bp, Homo sapiens
aaccatgatttcagagatattgcttgggatcaaaataacttggatatttaagtttttaaaaagtagtcaatttaaagaaacatggtgagtaaacaataattcaggtggtacacagctttcatgaaaattgtgaaggtggtagatgatgcgtttgggggacagcaaatttgaacaggatagaataaacggttaaggggaggaagaccacctgttcaaccctttttcatgctaagagtaacttttaaatgtggctaggcattccaagccaatacttccagtccagttgttagggcttagttataaaaccagctagttgcccctgtacatttgagcaagcatggtggatcaagcacaaaggaggggagggatagcattaggagatatacctaatgctaaatgatgagttaatgggtgcagcacaccaacatggcacatgtatacatatgtaacaaacctgcacgttgtgcacatgtaccctaaaacttaaagtataataataataaaattaaaaa

SEQ ID NO: 201983 - DNA, 683 bp, Homo sapiens
ggggactggcagaccatctgggctaccaagctgaggctgtagaaatcatggcccaaggccaggtgtgagcctacacactgctgagggactgggctatccaagaagacagtggtgccacccacaaggtgctagagaatgccctggttgccatgggccaggaagatgtggtccaggtcctgggcccccaagctgagggctgttctgtggtgtgagtgctgtctccatagcctgcactctcggagactgctccggtgctcccctacccccatctcatatatctttccctttgtgggcttcctggggttgctgggctcagcctgctctgttctggggaagaaaaccgaagatccagccaccattcacttccccttatccacccatcccctccagaagagggcccaggatatggtggggagtgggcagtgaggagtggttctgccctttggatccctactccacctcctcttattaagcctcagctggttttgctacttttgtaacccatattaaaggtgattcggacttttccgctggctctatctggctccttgggcctgtgagacagttgagtgggtggctatgaggcagaggcccagaaaaggggtgggggtccctaggctgtgggagctcagctagcaccacctaggacagctagcagcaacacaggacatgcagcagccatc

SEQ ID NO: 201984 - DNA, 231 bp, Homo sapiens
aaatttagtacaagatgccatttatagaataattgtgatacccgttacaagtttaaatctccataataacttgataataatcttgtgatagataggtatagaaaggctgtacttacaaagtatactgctaattgttgataatcatccctactcattcctcctcacctcccacatggacaaaactaagagaaaaattgtgtattataaacactcagcaaataggtctttatt

SEQ ID NO: 201985 - DNA, 185 bp, Homo sapiens
gtttctgctctaggatggatgaatcaataacaggtgtgcagaggcttgaactagacctttccctaagggttgatcttgacctaggagcagggaggagaaggaatgtatcaatgtctattttgtctgttgtttatgctgacctttgggaattagggaatttgagaacaggaatcctggtcttttat

SEQ ID NO: 201986 - DNA, 678 bp, Homo sapiens
agctttctttacaaggtccaagtttattcttttctggaagattaattcagaagttagaaaatatacatatctctgataaccattttaacctcagaggtaccctgaaatgaagggagcctcgctttttgcagaaaaatatttaccaaaatgtatttcttttagaaagtatcaaatattgttttcgatatcaacttgtaagtgatcagcaatcagaatattcacaaacacttgcgctcagggttgaggtgttcagacaccattttatttcattacttttgtccattatgatggcacagaagtaaaacgacctcatccgtccttagtgatttgcattttgtggtgaagattatattttattaaaaataaacctgtcctattcacaactagtcacaatttactggctgctcaaccaaagcgcaccccagtggcccttccggaacctgccctctgtcattccgtgttgtcgttgagcagcatttcttgaaatgtggtgtgtgtcccattggcatcatagttatcttggggtgccccttaaggtggacatttcttagtctataccagagctgttgttaaggccctggaccttgcatttgatacaagtccaagataaatgtcatgtacgttttaaattctgagaactcactgcatgatagcactgaggtcagacggaggctttgg

SEQ ID NO: 201987 - DNA, 362 bp, Homo sapiens
ttaattcatcatcaggcacatcactcatcatcaggaaatgtaaatgaaacccacaatgttcccagcactttaggaagctaaggtgggaggatcacttgagcccaggagttggagaccagcctaggcagcataaccagaccctgactcaaaaaaacaaaaataaatttataaataaacccacaatgcaatactatttggcacccatcagaatgtctaaaactaaaaaaaggccaggcacagtggctcatacctgtaatcccagtactttgggaggccaaggtgggtggattgcttgagctcaggagttccagattagcctaggcaacagggcaaaaccccgtctctacaaaaaaattcgccag

SEQ ID NO: 201988 - DNA, 504 bp, Homo sapiens
tacagttttacagtcactgtctgaggcaggaattattattgccattttaccgaaggggaaactgagtctcagaaaggttaagcaatttgcccaaggtcacagtgctaggttaagtggtaagtctaaggcctttccaccagagaggactcctactataaggcatgtggatcttctcggttacaagtccaggaaaagtccaagatgttcgatttcccaaaaaacaagatcaggccgagcacagtggctcatgcctgtaatcccggcactttgggatgccaaggcgggaggatcacttgaggtcaggcgttcgagaccagtctggccaacatggtgaaaccccgtctctactaaaaaaatacaaaaattagctgggcatggtgatgcatgtctgtaatctcagctactcaggaggctgaggcgtaagaatcacttaaaaccaggaggcggaggttttcatcactgagccgggatcacaccactgcactcctgcctggatgacagagt

SEQ ID NO: 201989 - DNA, 297 bp, Homo sapiens
catttttcaaggcttcatcagctgcttagattaaggaaggataaaaacaagagaaagagcaagagaaattaagcaactcgtatgctttcttcccctaagaatcctgattaaaatccaaccacagaagacttgccagcaagttccaatatatggcgtgctttccatagcagatctggctagtggttacttggaggaaggtaacgtgacaacctatacaatattaactcatcctaaatgttgcttagtgaaagaaatataaatctctgagataggtgacacggggatttcatttggaac

SEQ ID NO: 201990 - DNA, 505 bp, Homo sapiens
atagagtataaaattaggtaacagattggaaccaataaaaacacacacgtgaaacaggaagagcaacagaaaattatcataatatggtatataattctaaaattatcagaatatgctatttttttttagcagggacaaagagtattgtaccccccctttttgggagacacagtcttgctgctgcccaggttagagtgcagttggtgccatcaaagctcactgcatccttggcctcccagactcaagcaaccttcccacctcagcctctcaagtagcggggactacaggcaggcgctaccacacccagctaatttttataatttttgtagagacgggtcttagcatgttgctgagactggtctcaaactcctgggcttaaatgacctgcccgtcttgacctcccaaagtgctgggattataggcattagccaccacacctggcctgcagcttttcaacagtccctcagtatgcgactatattttttgaagtgtaacaacttgactt

SEQ ID NO: 201991 - DNA, 377 bp, Homo sapiens
tctcctcctacaatccttgttgtcaaaagaatggctatgacaacatcaatgcctttatgccatttgcctggaagttcaaagccttcctggatgaagcccagtaggacacttggtaaggttcaaccaaaggaggacagatttttacaatgttctgccagccttggtgcatatgtcttttatgtcacttgacttataaatacaagtactgtttattagacattgttattagtaatgctggatttatttggtattctttcttccaacataaataaaagggcattagaatcttatctcatttatcctcataaaaaaggagagaagctatttgaacttctctttctgcttctggtgtttcctcctttcccactcactcagaa

SEQ ID NO: 201992 - DNA, 230 bp, Homo sapiens
atcgcgtgaacccggtaggcagaggttggagtgagccaagattgtgccattgcactccagcctgggcaacaagagcaagactccatctcaaaaaaaaaaaatcaacacacaaagcagcagcagggacaaccacatcttcactaagagctactgtgagttacagaccgaattgtctccccacaaattcatatgaagtcctaacctccagcacctccctcaaaatacaaccc

SEQ ID NO: 201993 - DNA, 408 bp, Homo sapiens
gtccagttcaatgtgctttgaagctatttagaagtgtctgttaagagaagggagtgacgaaattacacaaatacaaagtcagtgacgggtgaccttgggtaagttattcatctcctctgggctattttcatatttgtggaatgggaataagaacaaaaatatctgactgcactccagcctgggcgacagagtaagactctgtctcagaaaaaaaaaaaaaagaataaacatatttgtttcatacttacgtacagtcagtctaatataaggtgtttgtgtgtttctaaaaaggaccacagtcttctaaatttcacaataaaacccacagagcttacggggaaaatgggtttgggagaacaaagctcctgtcagtaacatataataaaaaagcaggaacctaatacaaac

SEQ ID NO: 201994 - DNA, 245 bp, Homo sapiens
aatgatgcgaaagacaagaagcttgtattgtgaagagaaagtacacacgtaagagagaagtgcaggcatgctcatgagaacaagtcacacacaaaggaattttctattctaatgtgctcctctcaattagggggtggaataatcatgaggttttctaggaaaaaaaggtggtgatttcttagaattggggtggcacctatttttatgggcatgctcggatctgttgtggtgctggtgggtgtgta

SEQ ID NO: 201995 - DNA, 588 bp, Homo sapiens
gtttatttagatgatgtcatgttattggacattttgattattaccaagtttgcgtataaaatttaaatgtaatgaacatcattgtacattaacctttatgcacatctggaattatttctttagaataaggttccagaattaaaattatttagtttggatgatgagagcatttattagagcatctgacaggtgatgctgaattttcctcaatacagttgtgcaaattgcattcccaccagtagtgtataaatgtgaatatccctccatatattcatcaaaacatggcctttctaattttgtaaatctctgctaatttaataggtaaaaatatacctttgttgctttaaaatttttatttctaatttacacacagtaaaattcactctttttagtatatggttctatgggttttgacaaatgcacagtcatgtatcttctacactagtaccatacagagaagttctgtcactttaataatttctcttggtggctctttttgtattcaaccccttaccccatactcaatctctggaaaccatcaatttattcttcatccctatggttttgccttttccagaaggtcatata

SEQ ID NO: 201996 - DNA, 237 bp, Homo sapiens
ctgctctatgtcatttcgcttacagttgtagtttctaagaacctgtggacgctgagtaggacgtactgtaccattcagcagtagaaatgaattagtgcgacagcttctttttatcaagaaggataaatctgagaaacatagtgttaagtgagaaaaagcaaaagagtacaattagcatcatacattttaataaaaatgaaagataaacaatactaaattatattgtctttagagata

SEQ ID NO: 201997 - DNA, 548 bp, Homo sapiens
cagattgtccttgaacttgcttttattaatatttatggtacaaatttccttctgtttcagtgatgatttcctcccaaacaggtttcttcaactgtcttttgtatttgaagtcaccgtatgtaaattttatgtttgctttggtatggtttgggtaacttccttgactttcttttctcatcttgtctgagacttgcttgaattatagttgaagactggttattggtcctactcatttctttgtactaaattaaatggtgtggtttatgtcacatttgcaaggacaaagaggagaaaaaagaatttgaacagagggtaagagtagtccttgtataactaccctggtaaccaatcagaaattaaattcattgaaagaatatctttagggtttgtactgttctcatttcacataaagccgtggagatttcttctgtccttgctgagatttattaacagtaggtaaggctctttgctttttccttgactttcattatagatctgatactctctccttccatctatttgcttttaaatttgcaagtactgtcatc

SEQ ID NO: 201998 - DNA, 451 bp, Homo sapiens
tctactaaaaatacaaatattagccgggcatggtagcacatgcctgtaattccagctactcgggaggctgaggcgggagaatcgcttgaacccaggaggcggaggtttcagtgagccgagattgcaccactgcactccagcctgggcaacagagtgagactccatctcaaaaaaacagaaaaaaaagtaacaaattgcctgtaagaaaaccaaagagcatctggcttcagacttctgctctatagcaccaaatgccaggaaacaatagagaattgtgagggggaaaagttgtgactttggaattttatacatattttatatgttaagatacataattttttagttatgataaccatccaggaaatatatgagctatgtaatagtcttacaaagataataagttgtacagcaacctacgaggcttgatttaaataaaacaatgtttgcttag

SEQ ID NO: 201999 - DNA, 390 bp, Homo sapiens
aggactccgggtcccttgtctaaaacgtttccaatcagatcatggtaaagacattaccaagtactcttaggacaagtttctgataactttaagatcaaaggactaggcttgctccgtggtgcacacctgtaatcccagctactcaggaggctgaggcaggagaatctcttgaacctgagaggcagaggttgcagtgagtcgagatcgtgccactgcactccagcctgggcgacagagggagactctgtctcaaaaagacaaaaagagagaagataaaaagtcaattgtttcatgattggaatcgtatacagcaatggaaataaccagttgtaatatgcaacagattaaatgaatctcacagacataaagctggacaaaagatgcaaatca

SEQ ID NO: 202000 - DNA, 449 bp, Homo sapiens
tgaatagttgtcagtctgcagagcccagggaatgttagaatgtaagggttttaacacaatttcaaaaaaaaaaaaaaaaatgacttgcaaactgtatatcaaagcaagcactgatgtatattcaatttgcagactacttttccagaaaatgtcatagtggatcttgtctagttccaatgtatctttatggtatcaatttatctacctagtgaaattctttccaaatatctttttaaatttttcatataactttttttcagggacttttagtagcagatgaatatcaatttaaacatttaaaatatagttgacccttgaattgcatgggaacactagtgtgcagattttcttccacctctgccacccctgagatagcaacatcaaccccttctttcccccctgctcctcagcctactgaacataaagacaaggaggatgaagagcaggag

SEQ ID NO: 202001 - DNA, 323 bp, Homo sapiens
agaactttaaaaaaatcataatacatgcaacagaatccatacattttatatctatgtatactaatagaaaaaaaattttaatacaaagagttcataccagatgaattagagaggttttagctatggcttctcttctcctagcaaaccccctgacccctgctaagagaccccccaaccccttaatacagtgtaggcgcctgactaaagctaggctaaccagtgtttccctgggatgcttgtaattgatacaaataggaagaccctcttgcctgttgggccacagaggtggaaggattgaatctggggttgccaggaggtcatga

SEQ ID NO: 202002 - DNA, 402 bp, Homo sapiens
acatttgctgagtcatgcgaataggttgcagttggccatggtgggagaattgacactatggaaattagcaagttctacatattagagcttctctcccctatccccaaccccagaactggttgttaaacatttaccaggacacctctgccataagctgagttgaaaaggtttggaagacattatattgtggggatagcccaatgtagatgctattggtacctcaccctgcatccctttacctagggagtgcacttatcccccaggtgctgtgagtgttggcagctaacaactcacaggcacccctttttctaggaattgtcctcagccaacaggagttgccgtggctggaatacctgggaggtaacgccctacacccaatagtggcccgtagcccatgattga

SEQ ID NO: 202003 - DNA, 828 bp, Homo sapiens
tgttaaagagaggagaaaaaggacaccaaaacacaagtatattgatggatgtgtcttttgaaaacagaatgaatcttagtgtgattttgtgtttttggagcctcagtgaaagaaaggggaacatgatgggtcgggtgaaatgaacagcccagtcttccaaatgtcagtgtacacccgagacatcagtggctgaaagctacagtcttaggttgacttgcggactttttttaaaatacaaagtcaagcccccgggagccatttcttcagtgggtcagtgcagactggctccttgctgggggtctgacgctcgctgggaccagtcctctgtttctgtggttctttatctgttcactgactgtttggcagttgaagacttgctccccaaggccctcagtctttgccacttcattcagagcacttaattaaaagagaaaaggaatgcagttctgatgcagttataactagtaaaaagaaccaataaaaatgactataaagtgcctgacaaatagaaaatgtttagtaataccaaggtactttatgggggaagggtttacctcttggcacaggatggcagctccacccccaccccccaaccccaggcctttccctccatgatgcccttggcagggagctcttgcccagccagaacaggtgagtgaaaagattctgctgtcttggagtcacctgacttcttactacaagaacatccttcagaagtgaaaatcacagacatgtaggtcttttgctggtgatgacagataacacaagagataaagaatactttggtgatgagagtaaaagggaaaatgaggaaaagacagtagaaaa

SEQ ID NO: 202004 - DNA, 521 bp, Homo sapiens
tataagttccttaaacagcaaagaaccagaaggctttgtcactgtcaatgggctagtccagagtagctccggccgacctctgcccctcgccctgaatcaggtcctccctccagatatacagggaagaccctgcacactcccgcctgtctataccctaactccttcactcccttctcttacagctcagccttccctgtcctttttcacattgcaacttaccctgccacgccctttcctgaaatgtttttctccactgcttatcacctgttatcacaggtgttagttccttattgtctctaaaaagtatacagaaatggcggagcacggtagctcatgcctgcaatcctagcactttgggaggccgaggcgggcagatcgcctgagctcaggagttcacgaccagcctggacaacacggtgaaacccagtctctactaaaatacaaaaaaaaaattagctgggtgtggctgcatgcgcctgtagtcccagctattgggaggctgaggcaggagaactgcttga

SEQ ID NO: 202005 - DNA, 679 bp, Homo sapiens
tataagttccttaaacagcaaagaaccagaaggctttgtcactgtcaatgggctagtccagagtagctccggccgacctctgcccctcgccctgaatcaggtcctccctccagatatacagggaagaccctgcacactcccgcctgtctataccctaactccttcactcccttctcttacagctcagccttccctgtcctttttcacattgcaacttaccctgccacgccctttcctgaaatgtttttctccactgcttatcacctgttatcacaggtgttagttccttattgtctctgcccactgaagacagcaagcttttctttgaaagggtgtctgctgcctgttgccaggaaagcacccagacagtaaacgattgggcgttgctctgtaccaataaaactttatttacaaaaacaagacgtgggccacatttggccagactgctcaccccagcattactaggtatgctacgagttattttttattcctagtcctatgctgcacataggaggtactcaagtagtatttacggtaggaactgggcacagtggctgaggctgcagtgagctgagatttcgtgcagcctgggagacagagcaagaccctgtctcaaaaaaaatttattaaaaattaaaactaaggccaggtgcggtggctcacgcctgtaatcccaatg

SEQ ID NO: 202006 - DNA, 291 bp, Homo sapiens
ctgaagtactgcatgcaggaaatgcaaattcataaccacaatatgagtcaacccaaaccaagatgaaatattgtccattccaagatgtcaccaaatggctgactggcatttggcaggaattgaactctagtagggagggtgggccatagtcctagtctgtattgctcatatgtcagccctctaccagtagtaggcttggtgagaaaaaaatctttgctgttgagcctatgcatagactccatctaagacaccatagatgctccatacacaagtccattgcttaagcactga

SEQ ID NO: 202007 - DNA, 407 bp, Homo sapiens
ctccacggcgcccagtcccatcgaccacccaacggctgaggagtgcgggcgcacggcgcgggactggcaggcagctccacctgcagccccggtgcgggatccactgggtgaagccagctgggctcctgagtctgctgatctgatttatcttcctatgtatctgatgaatggtttatccagggactggcaaaaggagaaaaacaagatgcagaggaatgagactgagagtaccacagtgtgaacagtttccccaaagtgcttcattttggctccagatgaagagatgggcaccaagagttgattgcccaactctacacagctaataaatggcagagcttaatcttaaacaacagatttaagtcctaaatcctgaatacagagtccaagtttttagctgctacatttga

SEQ ID NO: 202008 - DNA, 325 bp, Homo sapiens
cagtagttcattcctttttattgctgagtagaattccactgtggatatatatacacagtttgcttattcttctattgatggacacttgagtaattttcagtctgagacaatatgaagaaagctactctatacattaaggtacagatttttgtatggacatatgtttgcatttctcttgggtaaagtcaatatcaaagagtaggatttactgtgttatgtcgtatgtgtttaactttgtaagttatgtgccaaactattttccaaagtgtatcattctgcttttccaacagcaatggatgagagcttcaactgccccacacccttc

SEQ ID NO: 202009 - DNA, 736 bp, Homo sapiens
acattcaatgtcatcctccttcgctgataactcagctgccttgtgctgagagggcactccaccatgggccctgaacatgcctgcactctcttgctgagtaggccaatccataagactttcaggctcctgatactgagcaatgtctatagctactcacacagatataactaggccaaggcaactactgtaattacctgtaactgcttgctccctagagggagtggggattggctcatttgctgcttgctcaaaaagtgctaagcccttggcccaggattcctctcctgtaatgcaaaccactgcagatacatatgtcatctgggctcattgggttgccccattagaatttgagggcaagggaaaccattgcaaataggctgacacatgctatttgctgtgccatgaataataaattcctctgtctctgaccaaggagtgtcatgactattgccaggatccatgaaacaatgacagactaacatattagcttgcaattggccttcattgtccttgcagccttttctccacgtgctccacttttgcactcacccagtagtctcccaacctctggtcccctggtgcatggggctatctgactcttagtatttgcagagaagctaaggctgtgcaaaagctatagacatccaatctacagagctcttaattcgtgattcattctgcaaatatttactaaggacctatgccaggaactattctatatgatgcaaatgcaaca

SEQ ID NO: 202010 - DNA, 395 bp, Homo sapiens
tatcttatttctgtctctataaatctgactttctgagcattctatataaatggaaaaaaaaaaagttgtaatgttttgtgcctggcttctttcaacttagcatgtttcatgcaccttgcagcatttatcagtagttcagttcttttcattactgaacagcattccattatttgtatatatgacattttatctattcaccagctggacatttggattgtttccagtttctggctaacaaatgatgctatgaacacttgcattgaagtctctgaacgtagtaagctcttattcctcccgtagattcttaggcatggaattgctagaatttttttttttttttctaattttaagccattgcagtcagctggggctggaataatctggagggctgcctc

SEQ ID NO: 202011 - DNA, 489 bp, Homo sapiens
gagcggaaaggagtaacttctaacactaatgtataggacccaagtgtctctgaaaccttccactacttccgcagaactcacttgtgtccatttgttagtgtgactcggggtacatacactgtgtagaccactgggaaaatgtgagcaggttccagagaacacagggtttgccttcaaggaacttattgtccaggtgaagaaaaatgtgtatgtggcatgtcgtagtcagatgtctcacaggaggtggagtaagagggatgggttagcctccgagaccagttacttgccttcccatgcgttatctttgtatactcatctgttacaaggatgagaaaggttaatgtggttgaggatggaggaaatcagaactgctgacatcactcaatcttcctttatcgctgtgatttgtggatattcatgaagtagtagacattctttggtttcaaaaaagctagtaatttatttttcagtgcaccttatgtcctttag

SEQ ID NO: 202012 - DNA, 501 bp, Homo sapiens
caaagaccagcttctaggaacctaaattggtgaatttaggaattagccaattgctctttccttggcatggagttggtttgggcatttccccatattttatcttattttgttgtttgttttatgattatatatattttcttcctttcaaaacgacatttgtgagcagcatctgtgtcatctttttttaatgctgggcacacatgtgtacgcagcctgagtgtttggagttgagtgttttgtatgttggattgagagcacacagaagggctacggctggggagccatgatcagcagtggaggggcttcctgtgcttcaagaaaagcctcagtggtggaagacatgggatgtgtttttgatgaggatttcaggagttgaaacataagtgaaatagtatcctacaaaaggctttgaactattgataaattaattcaagatcttaccagtttataaggcagtcatataaagagatacaaattttggtatttttataagacaataat

SEQ ID NO: 202013 - DNA, 663 bp, Homo sapiens
aataactgcttttaaattttttatgtatttccttgtgctagtttaaacatatttaattaggagcatcctgtatatggttttacatcctgcttttttccacttaacaatatatctggaacattttctcatgtcatttaatgttctttgaaaatactattttaaatgactagctaggatttcttctattccaaaatgtaccaaataattatcctattgtttgagttttggtcttttctaattcctcactgtttatttaacatacattcatttcagcactttttcgtgtcaggaactgttctaggaatatagtggtcagtagggcagacaaagcccctaccctcaaagagctttcagaatgtaatgcaatgagccaggcgcagtggctctcctgtaatcccagcactttgggaggccgaggtgggcagatcacctgaggtcaggagttcgagaacagcctggccaacatggcaaaaccctgtctctactaaaaatacaaaaaaaattagacgggcatggtggcgtgtgcctgtagtcccagctactcgggaggctgaggcaggagaattgcttgaacctgggaggcggaggttgcagtgagccgagatcgtgccactgcactccagcttggaggacagagcaagactctgtctcagaaaaaaaaaa

SEQ ID NO: 202014 - DNA, 570 bp, Homo sapiens
gatacttggtactcttttattcaaagatgtaatgttataaatgataattagttcccaggctagtccacaaacggtaggtcagatatataacactctagtaaggaaagagcagcagacaccactggcaagaagctccttgttaacttttgtttttgagacagggcatgtgaggactcacaagtggacactcggaaataaacaagtaacagagtagctcaccccttatcttgctaagctaccagaagtttccaaaagtaattgcatattgccatgtgcaacaattgttatgtctgaatactcgaataatgagcatcatactatcttacggtgatttgcttggaagtttggatgactatttggaagaaaagtcatttctgttttgcaacagtaattcactctttccacaaagactgagcaactctaatactatctgccagcctctggggatgggtgaatattcttggggaactgacactccagccagtgctcagggcttgttttaatctgactctaaatgcagtcttccttccttgtgtgcactgcagagtggggctgcagagcagaaggggc

SEQ ID NO: 202015 - DNA, 298 bp, Homo sapiens
taacaaaggactgtgcacaaacttttgatatttgatgtgatagcaaatcaagcagaaaaggcagcctcaaaaacttatataaagtgataaaaggcttctctcatcccctaaaaaagaagaaaagggggttaaaggttaagcagaagataaaacagtcatttagatggtgaaatgtcactggtcaaaaatttgactttttcctttgtaatcctgcgttttttttttttttttttttttttttttttttttttataaaaaaaaatgcaatccccttttttgggcccacaaattttttcct

SEQ ID NO: 202016 - DNA, 341 bp, Homo sapiens
aaagctatagtgagctaaggttaatttatttattactgaagaaagaaaagtttttgggccaggtgtggtggctcaccctgtaatcccagcattttgggaggccaaggcaggtggatcacttgagtacaggaattgaaagttgagagtaagctatgattgcatcactgcactccagcttgggagacagacggaaaaagatgaaaaatggtattactgtgtagggcacttgccatgaatggagcttaggagactggaagttgctctgggtgagtcagtgagtgccatgtgaatgtaaaggcctaggaaactaatgtatactgctgtaggctgtttatttatta

SEQ ID NO: 202017 - DNA, 649 bp, Homo sapiens
aaaaatgagggtgtgtttgataaaaacagtatttgggaagggaggtggactgaatttttaaaaggtgactgcacagctgcaagtatagagtttgttcaaagaggtaagagttgggatcaaaaaatcagctgagtagcaaagagaccatggggcgtggggttattaaattggtctagacttttaaaggtgcaaaaagcaagagacagaagaaagactgtaatctggcaacaaacaaggctgctcctcggggaaggaacttgaagcagtggcaaggctagatgctaggctactgaaattttgtaaaggaagggggagctcagaagtcaagggaaaaacggttacagcttaagaatttgtttttatagcttaagaatgagttcattcaacaatgataataatacaggctgtctttgtgctggacactgttctaggtgctggagacagtgtagtaaacagaacaaagttcctgctcttgtgaaactttacctttcagtaaggaggcggacaaatgaagaaacaaacaaaaatgtaaggtcagaaagtgctgctgctgatcatttctaaagcttccaggcacatgtgtaggatacttagcattcagttctaaaatgcttccagaagtcttttgacatatgtggaaaagactatt

SEQ ID NO: 202018 - DNA, 143 bp, Homo sapiens
gctttgctgggagcctcgggaccccgggttgggggccgtggggcggcacctggcgagctggcgggtgggcggcgagccgaggcttcccggcctggcggcaactcgcccctctgccctcagccctcccggctccgctcccttcc

SEQ ID NO: 202019 - DNA, 285 bp, Homo sapiens
tcaggatggtcttgatctcctgacttcgtgatccgcccgcctcggcctcccaaagtgctgggattgcaggcatgagccaccgcgcccggcctcaactgccttttattagagggaaatacgtgttctggggcctcaaacatgaggttgtattgcaattgggtggtgatagcaagaatatcaaggatgaaagtagtgttttattgtcctaaaagtcttctcaaagtcatggtcccgtttgattctcatagctatccggtaagctaagtaaaacaggtgactgcctct

SEQ ID NO: 202020 - DNA, 445 bp, Homo sapiens
aaagtgctgggattacagacgtgagccaccatgcctggccgatcatgtgatttttattctctagcctgttgatgtaacggattgcattagctgatttttgaatattgaaccagtcttgcatacctgggataaatctctgttggtcatggcctataattctttttacatattgttgaactgtatttgctaatattttgttggtaatttttgcatctatgtgagatatattggtctatagtcgtcttgtaatgtctttgtcccgttttggcattagggtgacagtgacaaatgacttaggaagtattcctcctgcttctatcttctggaaaagattgcagaaaataggtattatttccccttaaatatctgctaaaattcaccagcgaactcatctgtgctgtgtgcttgcttcttgataaatgaatgctgtgactgcagttttgta

SEQ ID NO: 202021 - DNA, 398 bp, Homo sapiens
tgagctttgagtcctgttgatttttcttaagaaatcctagatagggtacaatttattagagaaggcttcctggcttccatgtaacagtgtggaaactgatggcagattgaactggagaacatggaaaaattacctcctaatagtgcagccaactcaaaagtaccttccccagcatttctgaagacaatgcaaaaatatgatgccttataggcagccatgcctcagaacattattgaaacacttgtttcttaaaaatttacatttgctttaatgttgaagtttttcttctcaaagtctactgtaaaaaattaatgagatgcagtcagatggttatccataaaaatgttcatttcattgtaatttataacacaaaaaagtgcaaaataagaaccaaatta

SEQ ID NO: 202022 - DNA, 512 bp, Homo sapiens
agcccgggtaggatgggcagcgctggactttttcaaccagtccttgtgcaattgttgcccagtgactgaaactgatgtggagaaagaggttggaactagtataggctggaaccatataacatgccaggccctggggagatggaggcggcaaagagacaagcctcagcctctaggggaagaggactgtagcatcctagcaccaccaagtatcagctggggtaccaaacctctcctagtctcaatattctcatctgtaggaggaaacaatatttgaacttcataggtttgctgtgaagacgaaatgagctcatgtaagtgtgctcagcagagtggccggcgcctggtggactcctgtattgaactgttgaagaataaatggaattttggggtgatggttgcccaacactgtggttgctttaaatactagtgagttgtacgtttggaaatggttaaaatggaggccaggcgcagtggctcacgtttaaatctttaatgcatcttgagttaatttt

SEQ ID NO: 202023 - DNA, 648 bp, Homo sapiens
  misc_feature (386)..(386): n is a, c, g, or t
  misc_feature (571)..(571): n is a, c, g, or t
tttggcattacaatttcattatgatatgttgagttgtggactttttgatgtgaccttcttgagattaaatatgtttcctgaaactgtttaatttcattagttttagataagtacattatctctttaaatattgcctcttttccaatattctccctttctccttctgaaattctcattagatatctgtaaactttctcattctaccctctacgactcttatcctctcatttttccatctctttacctctctggattgcattatgtatactttccttagatttatttcaggtcactaatcttctttaaagctaggtctaattggctgttaaatctgttaaatataatcattaaattttgactattataattttcatttctaaaatttntaacttggttctttgtcaactctgcttaatcatttaaagcatcatattcctttgttatttcctaagttcctttgttaattactttaagcatattaaacctagttataatctgtgtctattaatactgacacaggaatgctttggtttattatgcttcgcttcaatgcactttgcagacattgtantttttaaaaaaataaattgaagacatgtggcaacactgcatcaagcaaatctatcagcaccattttttccaaaagca

SEQ ID NO: 202024 - DNA, 457 bp, Homo sapiens
tcaggatgtaggcttaaggcaaagagttgttggcttgacacatgaagcaaaatctataaagctaaaaatgaataaattttacttcttcaaaattgtaattttacctatgaaagactctttaagcagatgaaaagacaaggtacagattgtaagaaaatatttgcaaaccagatattcattaactatctagaatatgtaaagaactcttaaaagtcaacaataaactaaacaaaatacaacaaaaaatccactggaaaaatggtcaaaagatatggaaagacatttcattgaaaaggacacacatatgacaaatacagataggcagagatgttcaacgtcattaatcattagggaattgcaaagtaaaccgacaatgacaaaatagtaagaagccaagccccgtactgggaaaaaaatatttgcaaaatatatatttgataaaggactgctattcaga

SEQ ID NO: 202025 - DNA, 430 bp, Homo sapiens
ttagacatttgaaacgagatacaaaacagaagtgtgatgataatattggaaaggaagacaaaattgttctaatttgcaggtaataaagaaccttgttagggatgagacctacgtgtgacctctgtgaacgtaacacaacagcttgagtggggtgataaagttggaaccaagaaaacaaaacccatattccaggagaagaagatgaaatattatcgatgaaaggatagtaattttcaagttaatttagtggtctaccattattccagccaaactttcttgagattttccccctaacttgacggattattccaaaagtcccatctgagggaaaaataggtaagaataattgaacagatttttttacagtggattttagaaggccagtcctgtcaatgtgtgaacgtctcccaactgttgtaattacaagtag

SEQ ID NO: 202026 - DNA, 286 bp, Homo sapiens
tcttccaagtgtactttcctttcctttcttgttttacagccttttaaagtaaacttccactcatgctctgaaacttgcctcggtctctttttctgcctttatgccccgcgtgaaattctttcttctgaggagtcaagaattgaggttgctgcagacatgtatagatttgctgctggtaactcagataccttacaccaataacagtacaaaacaaccttgctttccattgtgccgacaatgaacaacagtagtcaatgtagaatttagagtggctgtaggctgggca

SEQ ID NO: 202027 - DNA, 425 bp, Homo sapiens
ataagctgttgagaagaaaggagaattcagagaaaaagaactgtcagtgaggtcataataggaactgttacagtgaactaaatatggcctgggaaggactctgtacttctagacttgagtccctgtggacaaactgaaacctaacttaataggtagaaagactgaaaacctaacttaggagtatgcacctgtaactatagctgagtcctggccaatcccaacagccaaacttctgccactcacacactgctgagtgttcagctgtgttcaaataaggcaaaagctgagcactgtaaccagtccagttgtttctggaccacattgctgagaacggtaagggacccagttgcttctggacctcactcctcactcagatttctgtacatcacgttccctttattgtctataaatcttccaccatgtag

SEQ ID NO: 202028 - DNA, 122 bp, Homo sapiens
taggactctgggggaggctggggaaatgcagattaccatgatggggctgcccccgggggcagccagacccaggttttccagagatggtctcacagagggagattggcatgcaagaagtttac

SEQ ID NO: 202029 - DNA, 649 bp, Homo sapiens
aacaggcatttcaaatgtgacagggccagacccaaactcctgccctttccctctgcaatcttatttcactgccataaagccactccatcctcttaactgcccaggccaaaatcctcatagtcactcttgacactttatctcccattccatacctagaggaaaccccttcagttctaacttcatctagtgcctctggaaatctgaccgcttctcaacaatcaggtccactaagatcttgtttttctctgctgatcactgcagccaactgtacttccacttctgtcctcctacagtccctaaccacagagcaggcagagcactcctaaggaacaaagtcagactatggcacaggttgcaggaagtcagggaccccaaacagagggaccagctgaagccatggcagaagaacgtagattgtgaagatttcatagacatttattagttccccaaattaatacttttgtgatttcttatgtctgtctttactgcaatctctaaatataaattgtaaagatttcatggacacttatcacctccccaaatcaatacccttgtgctttcctatgcctgtctttactttaatctcttaatcctgtcagttgaggaggatgtatgtcacttcaggaccatgtgataattgccttaactg

SEQ ID NO: 202030 - DNA, 468 bp, Homo sapiens
cctctcatacattgcatttcctccctaagctgcacggggcaacaccgtgttaggtcccgcgcatctgctcctgggccacatccggctccgtctgtattgttcctgaattcagtttgctgtcctagaacaaggcagcaggaggggagaacagcttttcagtgtctttaattaggcaacaggaaaaaacaaagtctggctgaaaattactatttgaagcttggccgatgccaacacagcactcgctccctgcgttctggtaagtgatggccgttgatttcaaggacgtaccaaggggcgaaaagcaagagcaggaagtcacctcgctctggaaaagaagctggttttcatctgctgtatgtgctggtcccaaacatacccttttctctttttttagtattttttttcccaattaggaattcaatgtggaaaacataccctttttcttcaacaggcttttaatgttgggaa

SEQ ID NO: 202031 - DNA, 601 bp, Homo sapiens
caaaaggttgggagtgatcatggcccaccctgcaacctcttcttacatgggccaccctttcttaccacgtgactaaaatctgttagcatttatcttggaatcatgtggctccctgtgcacagtatcttggcagtgcactctttgaggatataatgaataacccctgttatatggtgagtttttgataattgtgttgttctgaactggtgaaggtaaatggcaccagttcctgatgatgctaaatacaggatgtgtgaaaaggccctttgactaagaattccaagtatcagctagataccagaattaaaataatagaggaggccgggtgcaatggctcatgtctgtaatcccagcactttgggaggctgaggtgggctgatcacctgaggtcaggagttcaagaccagcctagccaacatggtgaaaccccgtctctactaaaaatacaaaaattagccaggcatggttgcgggttcctgtaattcctgctactcaagaggctgaggcaggagaattgcttgaaccctggaggctgaggttgcagtaagctgagatcgcaccactgcactccagcctgggcaacagagtgagacaccgtctt

SEQ ID NO: 202032 - DNA, 106 bp, Homo sapiens
tgctgggattacaggcgtgagccaccacgcctggcctagtcttaaaggataggatagattcatcctcagagcagcattcagtctggagaacatctgacaagcaagt

SEQ ID NO: 202033 - DNA, 104 bp, Homo sapiens
agagcagggctgccaaggtggtacaaaattctagaaaaacagagccctcaaaacatgcatacgtatttccctcaaatgcttggcagacatctaaataccattta

SEQ ID NO: 202034 - DNA, 528 bp, Homo sapiens
tcagcagctgctactggcgtctcgtcctcttggctctgggtctggggcactggaaggtaaactccctgctgagttggaggcagcagcattgagtgggtggctgttttccagccaggatttacccagggctttatggcttgcaaagccttcctcacagggctttgtcaggcatttaatattcacaaaaatgtggccaggatcaaaattattattatggggaaactgaggccagactgtaaagtccacaggtcaggttctttgtggctcactcttgtatccctgggccttttgcactgattggcacatggcagatcctcaagaacattttccaggtggatgaggttcagaggggccatgcagcttggccagagggcacacagccagagaggcagggattctgttctgttctgtccaagtccccacctcttttatggagccaggctgttctgtgtctttgaagagagcctctgcccttcagaaagggtcctcacctttttcctttctgtaaattaagtcgtacgcatggtt

SEQ ID NO: 202035 - DNA, 292 bp, Homo sapiens
tccaagatcctctccttttctcactttataatctctccatcactcgtcttattggctcttgagtcaattattatctgcataaagatttgtgccaaattatattctccagtccagacctcttcactgagctataaattctgtttctgtctcctcttgaatgtttcagaagcacttgaaattcagcatatctaaaagggaactcatcatcttcaattctggtctgtttcagtgtttcctctctcagtgaatagtatccagttgtataagttacaaatcttaaagtcattcttca

SEQ ID NO: 202036 - DNA, 388 bp, Homo sapiens
tttggagaatgagtcttctaagttagcactcaggaaacacttctgactttttccttatctataatatgagagcctaaaaccaagatggacattccaaggtgatcagataataatcaaactgcttgctaaaatgagaatcaacatttttctgaggaagatagtagaatccaggactctacaatatattatctacaatgtccagtattcagttaaaaaatcactaggctttcaaagaaacaggaaaacataattgataatcaaagcaaaaagtactcaaaacaaactgagatggcccaagtattagacttggcagcaaaagactttaaatgagttattaaaactattgtcaaaggctggggcacggcggctcacgtctgtaatcccagca

SEQ ID NO: 202037 - DNA, 422 bp, Homo sapiens
acagaacagatataatatacaatgttggataacatgactcttaagcaaaggatatcatacaggtggaattatacaactccataaaaagtaataggtcataccaacaccagccacaagccaaacaggaattatgtacacatatctctaatgtggaaattaatgacacattcatacactgaataaatctaaaaaagaatcaagttctgccagaggcaaaggttgagagatgtgaaaagacagtgatataaaggcaaaattgttattccctagtaggaaccagaatacagatcatatctagcattcatgcacgtgcacaatacaaacacagaagaacaatacaaaaagcatctttatgcttttctatgaattgaaaagctccttaaaacaaatcccataattatttaggctagaatatttcacaa

SEQ ID NO: 202038 - DNA, 718 bp, Homo sapiens
agcgtgtgcagaacacttgcctcgtaggccagccgtaaggaaggatgtcccaggtgcaggcgaggttttgttcatgtgttcctggaggatttttccggtggcaagtgcttctccatcctccagcatctcaggcctgtgcaccagccttcctgtgcccgttgatggactgagaggaagatgagcccttaggatgcctgccatgctcagtgttaagggttttcaaaagaaatgcaggcagcatggtgcactacagactccagcctccctttgaagccaggttccagagcttcctccctttggcctggaacctcaacagcaggattgggatgaggatggaagtgtacagatatgcatatagtattgcttatccccagctgaaatcaatgttggcatgacatgttgcaaaaccaaactgacattgaacatgacttttttcagccctttaaatagctgttcatgtagaacttagttttttatggaagaccttgataatcctgtctttagttactttagaagttaacttcctgggtggacttgaattgagtcttattcatctttaaatttccagggtttagcaaagtacctgcttcagagtaggtgttaataaagctaatgcccttcaaatcaacaagaggatttcctgtgaggggtggtcctgttttctgacactcagatggctctgagtgtggcatctcagaaaaaagaaagaaagaaaaaa

SEQ ID NO: 202039 - DNA, 738 bp, Homo sapiens
agcgtgtgcagaacacttgcctcgtaggccagccgtaaggaaggatgtcccaggtgcaggcgaggttttgttcatgtgttcctggaggatttttccggtggcaagtgcttctccatcctccagcatctcaggcctgtgcaccagccttcctgtgcccgttgatggactgagaggaagatgagcccttaggatgcctgccatgctcagtgttaagggttttcaaaagaaatgcaggcagcatggtgcactacagactccagcctccctttgaagccaggttccagagcttcctccctttggcctggaacctcaacagcaggattgggatgaggatggaaggatgaaaaacgtgttttttttatccccccacataaaatttaaagttgggggattaatttgtttaaaaaacccaaagttgacatttaaaacatgatcttttttcaccctctttaaaaaaaggtttttaaacgaaaaacttaggttttttagtgaaaacccctaaaaaccccctgttctagaggtccctaaaaaaaggaacctctcgggggggggacttgaattgagtcttattcatctttaaatttccagggtttagcaaagtacctgcttcagagtaggtgttaataaagctaatgcccttcaaatcaacaagaggatttcctgtgaggggtggtcctgttttctgacactcagatggctctgagtgtggcatctcagaaaaaagaaagaaagaaaaaa

SEQ ID NO: 202040 - DNA, 477 bp, Homo sapiens
aaggcttgttttcaagtatttgtaccatttcctgcaatcttgttgaacattaacttattccacctgggaaaatgcagttgtttatcaaggagacccttcagccccacacgagacattcagagaaacttggttgctgtctttgctgtcaggaaagaggaagactacctagacatgttgctccagagcagaatttccagcagtagattgaaccttcggaggccgagtcccagcccagtgtaaactggtaaagagtgagccctcttcctacaatctggttattgctgctgtgtaaaaagtcctcttgatttttatgtatttatttcttatctgctgccttactaaatgttttaatgttgctaatcattttgatttctgcagatatatatcattattactaatattgtaactcattttattttctaatctgactgaatttttggatacatgttaaataataacaattttaaaataaagacc

SEQ ID NO: 202041 - DNA, 276 bp, Homo sapiens
caattcttttctgacactttctctttgtgtgtgtctgtgtgtatttgatattgcctgccattatttgattgattcattcattcattcaacagaggcttattgaaagtcttttgaggttgggcccagtgactcatggctataatcccagcactttgggaggcccgggcagtaggatcacttgaggcggggagctcaagactggcctgggtaacatagcaaaaccccatctctattgttttttaacaaaataatttttaaaaagtctcttgcatagag

SEQ ID NO: 202042 - DNA, 362 bp, Homo sapiens
taatcccagctcctcaggaggctgaggcaggaggatcacctgagcccaggaagtcaaggctgcagtgagttgtgattgtaccactgcacactagcctgggtaacagtgggagaccctgtttccaaaaaaacccaaaatccttatttgagataaatactgaaatatataatagaagaactgggttctcctacagtaaagctagaatttgcttcaaaataatcaggggagtgagaaaggaaatgggaaagggtatagataaaacaattttggccataagttgataactggagctggggatggatacagggggttcattatactcttctacttctgtatcttttgtatctatttcaaattttcca

SEQ ID NO: 202043 - DNA, 574 bp, Homo sapiens
aaaaaaaaaaaaaaacttggcaggaataagaatttccagccaagcacggtagcttatgcctgtaatgccagcacttgggaggctgaggtgggaggaacactagagtccaggagttagagaacagcctgggcaacatagtgagatcccatctctaaaaaaaaatttaaaaaattagcaaagcatggtggcgcatgcctgtagtcccagctacctgggaagctgaggtaggagaatcgcttaagtctgggaggtcatgtctgggtgaaagaatgagaccttgtctcaaagaatttctcagcactgtcgatggcaggattgcttttttagttattgtacaacacatttgtgatatccatacagacattcagttggcacattaaatattgttaacctttgaacagcataattatatatataatactgaaaatgcttttcagaaacatggtttttttttttcgagacaggctggagtacagtggtgcgtgatcatatagtttactgcagactctcaattcctggctcaagccttaggctcccaagtagctgggactacaggtgcacacgaccacacctg

SEQ ID NO: 202044 - DNA, 394 bp, Homo sapiens
atgtggctttttccttgagcagatcaacgatctacttccttctgaggcatgatattgagttagattttattccttaatgtcacaccaacacaaggggcaggtgagccaggcacaaactgaactgggagaagatgaacattttcctctcaataaatcacatgggggtaactgagagtggatgtcatttataaagttcaacactgtctcccatcttttggtatgctttaggttgaatgcttcagatgatgttttttggagttaaaagaaacattttatgtttaatgaacgaatgtatgttgctggttatggattttcaatttctagtatttatgtagccagttttcataatgtaatgttttagtgtcttatggaagtaaagtcttgaagacccatc

SEQ ID NO: 202045 - DNA, 658 bp, Homo sapiens
ctgaacatagtaggtgcctgcacatagtaggtgatttgtaactgagtagagaaccaaacccaacttggattctgaagaccagtctacatgagctctcatcctggggctgctgttcttgcagctactgtccttttgcatttctcttgctttcgttgctgcctgctcatacccatcctgatcttcccttcagcacttcctttttgaggcctgttttagtcaggagggactagatgcattgcagtaacaacttagcctcaaacttcagtagcttaccttagctacagtgtatggacgcatccaggaggctctgctccacatagtcactcaggcccccaggtttcaccatggccggggagaagacagctgcagccccacactcaggcctctgctcacacctcatgggccagatctggccacagggctccccctaactccacctccctgtagggtctgggaggggtagtgggggccatagatacttggcaagcaggtaatgcttcttctgtggtaacgggacccccccgcaatgtactgtcagtaaaagttcctgggacagcacagttccaacctgtgggtctttgtggttcacggtcatcagtggtcactggtgtatcagaggaggtcctctccctgacggaaaccttgtttcaagtaaaat

SEQ ID NO: 202046 - DNA, 529 bp, Homo sapiens
gacggagtctcgctctgtcacctaggctggagtgcagtggcgcgatctcagctcactgcaacctctgccacccaggttcaagcaattctcctgcctcagccttccaagtagctgggattacaggcgcccaccaccatgcccagctaatttttgtagttttagtagatacagggtttcaccgtcttggccaagctggtcttgaactcctgctcgtgatccacccatctcagcttcccaaagtgctgggattacaggcgtgagccaccatgcctggcctctagttactctttgtacattctttgggcaactaatcatgcattactctgtgcccatattttataattatttaactcttattattgctttcattatttaacttttctcatattttttgtattgtctgtaactatactgtaagctccatgaggaattgggtcacccaaagtgccagcatactgcttacatgttggacttcagaaaatatttataacaaaaagtttagttgaaaaatatcatgtaattcagtgtt

SEQ ID NO: 202047 - DNA, 393 bp, Homo sapiens
tttttgctcctttccttcaacaggaaaaatgtatgtttcctccaaaaccttgccacctgggaaaaggaacaatttgtatttagaaacaaaaatcaaatcaacaatataatttcttacattgaaatttataacctgagatcctaccagcttcccctactttatattactttaagttcatgcttatttcccaagttaaatttacttcaccaaagcggtcttttgttgttgttgggattcatccagcttaaggaaaaactttgaattactgtgtgcactgactgagaaggaatgcaataaacaggccatgttacttccaaatccttttcattgaagaaatagaaatttctgtaaaccctgggagaataccagaatgaagaatgggaagaaaggttg

SEQ ID NO: 202048 - DNA, 670 bp, Homo sapiens
gggtggactggggagaactgaggaggggaagcgcttttttgttgcttctctgtgttttctattttattttatttattttatttttagattttcagttcttatttcacccagggaaggagacctgggtatccaccccatgtcctccagagaacttccctggccccgctcggagtcttcctgggacgccacaggctcggagagcgctccgcaggtttctcccccggcgcctccaaatctttcgattcctactcgaattactccgtcagctgctggaagaggggcaaggggtatggcgagacgcgttggtacatggggcactggggggaagggaaagcctccctccttctcctagtaattcgagaatgttgcgtccgcctcctttcttttgctggcgctaggggctcggaccagcacctgccaggcataggtgtggccactggggcgaaacctggcaggctctggaaacagcgttttactgacaggaaagagaaactgttctttgtattcatcacccaccgcagacttcctcacgcccgggtcttaggcggggctgtcagatttcagtgtgtttctcttaattctagtactaaatttgtactgggcgctggcgaagggcctggctccgccacgcgcggccctctcgaactgcccgtgggtacggcgcgcgctg

SEQ ID NO: 202049 - DNA, 305 bp, Homo sapiens
cctgttggaatgtggaacagagaatttgattctctgaattttggatttggttgaaatgattacaagtagcttcccttcatagttgcatctgatgctggtggggagctagtaggggctaaacctcgagctggctttagttctcatttgccagaaatgactgaaatgaagaaagatttctgacttgccttttcagaagcaatgagtttctcagccaaatgagtggtttcttctttgataggaagagttaaaattaaggacatgccccaaagagagatgtatcaaggcattgcaacacggtctctcat

SEQ ID NO: 202050 - DNA, 265 bp, Homo sapiens
gctgtacccgtatctctcgaaaagggggggcacgagggacgagcttagctgagctgggaggagcagggtgagggtgggcgacccaggattccccctccccttcccaaataaagatgagggtaccaaaaataaaaaaatttttaaagataattgtttttttctctgtccctaatatctttatatgtatagcatgtctctcctgataaagctgtcctgtgagcatcttaactgtttccactgttttgcgagcgatacgggtgcgatc

SEQ ID NO: 202051 - DNA, 460 bp, Homo sapiens
ttattaggtcttctttattacttagctagttaggtaggtaatcagaaagaaaagttaaatgacttgcctagaatcccttgaccagtcaatattggaaccaacactagagctaagatctgattctagcgtctgttttttccactgtacatgttgcttatctattatcttagactgtattatttacttagcaccttgagaaggcagggtatagggggatgcagtatagggtggcttagtgcagtgtgagaaagaagggcagccctgagggatacagtgctagagatgagaaaattcaggacagttacttttatagacacctacctctatttggaattgtttgtcatgagtcagacatgtgaccttatgtacctaattgatgtatattaggtacataaccaaacttgtttcagattttagctttgccatggactggatatatgtctgtgggcaggttctcttt

SEQ ID NO: 202052 - DNA, 239 bp, Homo sapiens
ttactcttcctgtttacaggggtagcatgtgtggaagaaaatccgtatgtaagtgggcccacgcagttcaaacccttgttatccaaagatcaactgtactattatccttattttacagatgaggaaagtaaggcctagagcattaaaaggcttacttaaaagcaatgagggcagataacattgcaaactttgagtataacacatggtatatttattcttagcacaatcatgtattaatt

SEQ ID NO: 202053 - DNA, 133 bp, Homo sapiens
tggtaggattacaggcgtgagccactgtgcctggccttatttatagatatttgaatatatcatactgtgtcatgtctccatgacaagacatatgtttgtttttgttatttaaagacttgttactcagtatggg

SEQ ID NO: 202054 - DNA, 550 bp, Homo sapiens
ttcagtactggtgctaaatttaccaagatttaccatcttgcttagtgaacactaggtggtgctcttggtaagccaaacttctggctgagccaagccaagtggataaaagaaacttgcgacaactggaacactaattaccagttgattcatagataggaaagaacaagttatgatctcaagttctgtgaggggacacggcaggccaagaatgtgtgcttgttcaaacaaggactgatctacagaacactttagtctccctaaacctgttttcaagcatttcacctttcactctaaacatgtaacatagtagtctcctgcaagaaagaaactggtacccagacagggcaaaacaagatcatgctcaaccggctatctatctactagacaaggcaagacctgtacttttgtactgtttcttatagtactctaaactatgtctttttgcctctacctgagaggtctgaaagagccaacaggcagcttttggattcttggtgttaagtgaatgttagggctgggtattctcatgttccatggttatacacctttg

SEQ ID NO: 202055 - DNA, 492 bp, Homo sapiens
gaccattaggacctgcccttactgtcaagttggctgttgatagtttagttagggagagcaagaagagactagtacccttcagcatactaagcgttctgaggagataaatatgagggttatggtgacacctaacttagccaaaatggtagtggtatcaggagaagatcttggagcaggtgaagtctgtttgcactttgtgatgaatgggagttagacaaagtaaacaagatgaggaaaaagtgtttaagccaggggaacaggagtattttagtgcctgcctatttataacgaggaactcagcaacacttagtgaacatagttctttttaatttatgcattttgaagagagggattttacttttaaacttctgtgagctaattttttaagaactgccagtttcttaaaattaatctaccttatatttaacgtaatgtggaattgtatcaacaggagtgtggcatcatactcttcaagtctttgtcttattgtat

SEQ ID NO: 202056 - DNA, 664 bp, Homo sapiens
cagggtgacaaattcagatgtttctggggccaggtcaccaacggcaatgagtagcggggcctggtggggactgcgctgagcagtgggaagcacgtgccctgcctcaggggctcctcggtgcaagcacagactcagagtttccacagatttatctgcttctcaggcaaggggtcagcccagatttttatgtaaaacctaccagttttgtgtgtgtgtgtgtgttttgttgttgttgttgttgttttggagatggcgtcccactctcgtcatccaggctggagtgcaatggtgcaatcttggctcactgcaacctccacctcccggattcaagtgattctcctgcctcagcctcccaagtagctgggattacaggagctcgccaccatgcctggctaattttttgtattttcagtaaagacggggtttcaccatgttggccaggctggtctccaactcctgacctcaggtgatccacctgcctcggcctcccaaagtgctgggattacaggcatgagccaccacacccagccttcttcttcttcttctttttagagacagagtctcgctttgtcgcctaggctggggtgcagtggtgcagtcatggcttactacagcctcaaactcctgggcccaagcaatcctcccacctcagcttccctagtag

SEQ ID NO: 202057 - DNA, 351 bp, Homo sapiens
aatacatcccactacgatcaatcctgcatgaaagcctagggttttaatccacttaatttactggtcaacggatccctaccaacagctcatctgcagcctaatacggcctacgtggaattgttagtcatttttatttagtattttaaaaactgtgataaaaacacatacataatatttactatcttaaccattcctaagtgtgtatttcagtagtgttaagtatccattagtcatatgtaaaaacgcagttcgccagctcacaataatgagcagatgagaactgcctcatcaccccctggctgctgcaggtggagactactaatccctttcgctgttaggccagtcgctgag

SEQ ID NO: 202058 - DNA, 426 bp, Homo sapiens
taagcaaggctggtaataattatgtactgtcataacataatttcaccacctcagggtgtcatagttaacaattgatactcatttgtgcccacagatgcaaggatagttgaccagttctctgcctcttaaataatacatattttttgagtcataagacttgggtttcaagtggatcctataaagttgatctctttgtatgctacgtttagggaagtgagtgtttgtttttaaaaatctatttagttcatccatagactaaattgtttaagcaaaacaatatatcactatatattatatattaggtttgctattgagctctaaaaagcattcagaaagaatttttgagtgaagtaatatttggaagctgtcaaagttagtacattactgaaccgaaggattagcctagccaaatatgagctgctttgc

SEQ ID NO: 202059 - DNA, 453 bp, Homo sapiens
taaatcctaccagaggtagctactttttaacattttgatatatagccttctagactttttctcttcatgcatataacgtgaatatatgctgtctgtgcggctgctaaaacaaaataccttagactgggtaacttataagcaacagaaatttattgccctcaggggcttgaaagtccaaaatcaaggcttcagcagatttgctgtctcgtgagggctcattgctcatagatggtgcctgctatgtatccccacatggcagaagggacaaacagtctctgtcaggcatcttttataattgataagggctccaccctcataacctaatcaccttccaggttccccaccacctaatcccactgcactggggattaagtttcaacatatgaattttggggggacacattcagaccatatcatagacatagatattggtgtgtatatatgaataaatgg

SEQ ID NO: 202060 - DNA, 152 bp, Homo sapiens
gtcgaggtcccgatgttgctggctggagtgtatggcgggatctcagctcactgcaggagccatgtctgtgctcccatgatacatattgatctagtattgtgtcttatacagaagtagacttagaaatatttgctgaatgagccaggcatggt

SEQ ID NO: 202061 - DNA, 253 bp, Homo sapiens
tgagagaggagaagctgatgatagagggagccatctcctggggtcacctcaatgtttactaggaggccgcgagagtcacataccgatagtgttgaaaacaatgtctgtcctaaatgccccacagaattgtaatgggtataagtgcttcaaaaagcataaagggctacgtattggtgagattttatgattatgccaaggtagaaggaggggctctcactgaaagccccagtgctgcccaaacttcctaccaaat

SEQ ID NO: 202062 - DNA, 291 bp, Homo sapiens
agaaagaaaggtatgtgatgatggaagcagagagacatttgaagatactatgctgctggcttttaagatgaatgaaggggacgtaagccaaggaatacaagaaattcagctccagaagttgaaaaaaataaggcagtggatacctgctgactctggttaaaaccccatgaaggcattttaatttcttacttctagcattgtaagagaataagtttttcctattttaagccactaagtttgtggtaattgttacagcaacaataggaaataaatacaaatagttataaacgt

SEQ ID NO: 202063 - DNA, 826 bp, Homo sapiens
atcaaatgaaaaatcagatacaaactccccctcttttcactcctcaccaaatgtttccttagggtacagctggctgtgcttccaggggaagggaggccccaggttgggggatataaggagaggccaaagagtccagttccccctcccctggaagttccagccatttctcacctccccctccattctttgggccccagcaccaggaaatgcctttggtcccttggtgccagatacacaagacccacagttaccctcagactcatacactctcacatgcggtcactcacagtcacacgggcacagccacaccgcctcagactcagacacacttacacatattcatacactcacgcagtcacacacgcacacagcccctaccagggctcacagcaccgcctaaaagcaactcttcatcatggtctaagccccctctctcagggagctcttagccggggcagacccgcatctcatcactgttacaggcccccaactagccagagatcaagatcagcagggaaggcaggcataggggcacagagagagacagagaggcaggaaaggcaaaactggaaatgcacccacacagagagaccaggggaacaaagctgtgaagaaacacacagaggtatctctagtaagacagcaatagggacagaaaacggcacgtaagggaaactgagccaagcagggaaacagaaaataaggagcagtagacctgatgctgggattcttgagcagaggaaggaggggaagccacgtgtgttgtgggtgtgtctgtcaatgctggacacttaagagaaaggtcagtcccatgggctcttgaggt

SEQ ID NO: 202064 - DNA, 501 bp, Homo sapiens
ccaagtgactgccaaagtcagtagcaaactaaagactattccatgttgattttctaaataatggcttgaaaacagaggtcttccacatttattgcttcttagtcgtatgtgataaatttgtctcctaattttaattttgaatgatttttcccctttgacatttctaataaatttaaccatgggtagaccatcttttaaggtccctttcaattctcatttgggattttgaattttttaaatatatctccactttttaatataagcatgtatttgaggtgatatgatttatgcttttatttcttactcatccaacagatatttattgagcccatactgtccacctattactggagaactagaagtgaatatagggccatgagctccctgaaggagttcactgtctagtaggggagctgagatgtaaacagatggcaacagtatatgaggggtattttctcatcaccaacttctaaatctggttttgccctatttctacgctgc

SEQ ID NO: 202065 - DNA, 403 bp, Homo sapiens
aaccagtgagtcgaagaagttacttggtaccaggcaaaatgaatgaacacagattatcacatacatgagagtattttccagaggaaaaagggtgtattacaaacatgttttaaaaaaccttcaaatgaagaaaatcaagttggtgtcattcattaattcactcatctgtattgagcaactctgcatggtgaacacattgtgaacaagacagctgcattccctcttctcatgaagtagagagaataaacagtgaacaaataaataaggcaatttcagcttgtgtaaagtgaataaaaccaggccttgtgatagtgtggcatgagagctgggtagtggactactttaggtggggcagaccaggcacacctttctgaaagagtggaatttgtgctgagatctgaat

SEQ ID NO: 202066 - DNA, 347 bp, Homo sapiens
atcaacttgagatgtgtagaaaatagaatgacttgaaaagagatgagatggaactcaaggaatttagaaataaaagattaaaatagattagaattaaaaactatgctagaagcaacacaagagtaaataaatataaaagataatgctctaagaaaacaagctggaaaacaataaaatttttaaaatcagagaaaatgaaagaggtgtgagagaaaatacagatacagaagaaagataaagatgtaatataggccaggtgcgtggctcacacctgtaattccagcactttgggaggccaaggtggaaggatcacatgagtccaggagttcgagaccagcttaggcaac

SEQ ID NO: 202067 - DNA, 219 bp, Homo sapiens
gggtccaatttgttttagaaatactgtaatcaggccgggcacgtggctcggcctggtaatagaattctataaggaaaggtgctacaactatccagagagacctgggacctgtcctgcaggttaggtatctagttagatgctagtttctgagacaaggttcaaattcaacttttgtgtttcaccaaaatggtaacatattatttagttactttcttcact

SEQ ID NO: 202068 - DNA, 266 bp, Homo sapiens
gtaactgaatttggacaggcttttgatattttaagcccatttccatggatttttgttgtgttttgaagatagggtctcgctctgtcacccaggatggtttcttaatatatttactataattattcccttggaatactaatattaatactaagttaaattctttgaaaatccagccagtgtcagttatgctaaatgaaaacaaaacactttgtacaattttatatttaaaaagagaagctctacactctaggattagaagcagtgga

SEQ ID NO: 202069 - DNA, 325 bp, Homo sapiens
aatgttatgatttcaccattctcagaaaaattacagtcccctgcctccctgggtgtagtgtcgtgaagtagaaaagccttacataaatagtaaacatagaaattcttctggtgccctctggcagccagcaggagtgggtcttgtgactaatccacatggaaaggatagtgcctgtctttcctgttcccttgccataagaaccgtgaaatctctcctttccctgccactcgtttactcatcacctcctcccatcacttccttgtctctagactagagggacccacagttttaagagctacatcatatcatttgttgttttagaaga

SEQ ID NO: 202070 - DNA, 207 bp, Homo sapiens
gtaaaagaaagccttcaaattagatataactttttaagtctccggacgcaccgtttgtgcatagaaaggttgctgaggagatgttctcagccaggataggagctgattatatagatgaagcactagggactgagaagagccagggatggatccaggaagggtcatgcaggaggtggggaggggaccccgcttgctaccagcccaccg

SEQ ID NO: 202071 - DNA, 591 bp, Homo sapiens
catgggaaggatacgtttcctttgtgttacaccaacaatacatgtggttttgatgaggaataagcattccctccaggaagacaggtcagatgccaagactacttaaaagtgttcgcaatgtaatgaaaagtgggacggtaaagatactaaactctgggaggaaagatcctattatataatggtgcataggaaaaaaatgaaagtacgccaaaatgccaataagattatcattggttgatggatttatgggcagttttaattatcctctgtatacttttccttatattccaaatttttacaatgagctatggttactcagaaaacaaatgttatgaaaaaatacttagctctctcttttacccactcaatttcactaccctcttcctgcaacctggtaaaatagtcagtaaacccactgtatataactagaggtattttatacttctgcatggtgtagattctggctaaaatcgttttaaaagaataccaaatacatcgtagacacaaaaaaagaaagagagaagggcacagtagcattctatccatgtgattctgttgggcttatttcctttaaaagcatatgacttgaaa

SEQ ID NO: 202072 - DNA, 505 bp, Homo sapiens
tgaggtgtaaaacttcaaggttccaaacggtgttgtaattcgaagtaaaggcatcagtgtaggctatgtcgggatatcaaataagtgtttacatgacagatggttttcaattgtttgctttcaaccaagttgctggatcattgaaaataattttcgatgataggatctttatggcacttttagcatatgctttggaaggactttaaacaattatgggctgatcgtggtggcacggtggccccagcctgtaatcccagcactttgggaggccgaggcgagcagatcatctgaggtcaggacttagagaccagcctgatcaacatggcgacaccccgtctctactgataatacaaaacttagtcaggcgtggtggtgcgtgcctttaatcccagctacttgggaggctgagacaggagaattgcttgaacacaggaggtggaggttgcagtgagccaaaatcatgccattgcactccagcctaggcagcaagagtgaaactccatcc

SEQ ID NO: 202073 - DNA, 325 bp, Homo sapiens
gaggccccagcttgtttgcagcccccattgcctcttgaatggtggatatcctggctgccttgctcttttcccttccggctctttcttgttccttctttaacagaatatatcccttaaaccagtgcttcccaaacttcagtgtgcaaaagaatcagcccaggatcctgctaaactgccagcttctgaatccacaggtccaggatggggtctgggagtcttcattttaaacacacaccaggtgatggccactgctgcagctgctgagaagcaaggaccaaaacaggcagtttccaaatagtaaagtcacttctgttttgcaaactca

SEQ ID NO: 202074 - DNA, 252 bp, Homo sapiens
tgaattgttttggtacctttgtcaaaaatcaattaaccacaaataaactttacaacaaacaacccatccagttaaaaacaagagcggaggacttgagtagacatttctccaaagaagatatacaagtggccaacaagcatgaaaagatgcacaacgtcagtaatcataagagaaatgcaaatcaaaaccacaatgagacatcatcccacacccattgggaagccactataaaaacaacaacaacaacaaaaa

SEQ ID NO: 202075 - DNA, 379 bp, Homo sapiens
tgatctcccatttttctcattggtaaaatttagataatacctactgtgtggggttgcagtgaaatttttaagagtgatggagagaatcatcattcaatggatacccataatgtggcggattttgtcctaagtgctttcacatacttaattatatatggggtgcagcatagtataatcgctaagagcatggatactaaagccggatagtctggattcaaatctcagcaaattccatttgctaactatgtgacctttggtgaactcactaacttcctgaaatctcagtaccccaatctgtaaaatggagataatagtagaatctaccttattggattgttatggagaataaatgagttaatatttataaagtgaacataaa

SEQ ID NO: 202076 - DNA, 348 bp, Homo sapiens
atttcagttaaacattcaagagtcacaggcacagagtctacctctggtgattccttatttaagaagggaagagacggacctgccactttgtgctcatgcctagacctaccggtttctcacaagcagatcgatttaatgattactcgggcctggcctaaagaatctgctcagttttggtacaaacagcagaggcagctcccatgaaacaatattgctggtgttattagtcagtgtatgtattttttttgttttgttttttgagacaggctggagtgcagtggtacgatcataactcacttcagccttgatctccagggctcaggtgatcctcccacctcagcctcctga

SEQ ID NO: 202077 - DNA, 549 bp, Homo sapiens
ggtcattgccatggtgacaattaggctgggaaggcgcctcattaaggtgcggttttaacaaggccagtcgtttttaacctgacatccacgtgaaagagggatttttcaagttgcttccctttcttcctttgttgtatttcagatccatttctagacacttcctgttgaacaagacagaggagaattcctgggttgagtccccctgaaaaatcaacagggcaacaggtttcttctctgtggtactactctggcatctgaaaggaggcctggttggcagaggcttggagagggaggggagggttgaggtcatgaggtcagaggaggaggtgaggaaaggactcatgttgaattttattcaacatggaactggagaccttttctggtcggtggcagggacagtgtggatggcagtggggtcgggggtagtgtcaggcctgtttctcccaagttgaagggaggaggaagtcaggaggctcaagccctgtcttaattcagagcactttgaaaagtatctatttttttcttatttccataataatacacttattg

SEQ ID NO: 202078 - DNA, 282 bp, Homo sapiens
agtcattaagagttgattcattctttttttctttgcacgaaccgaaacgaccgttatgaaaatatttaaggaagacgaaggaacaaacggaatacacctgcagttttcatcattccctcccctcactcctcaagtaacctctgttgaactatttgagctagggttttagggaaaagaaaagtaaatgaaggtaagggaaagaaagaatgggaagaaaacataggaacagagaggatgaaagacaggtagataagaaagagcagatggaggaggtgagatgta

SEQ ID NO: 202079 - DNA, 471 bp, Homo sapiens
taaagccgcactccatgaacaggctgctgctgggaatttcagttggtgtagccatctaatgggcgtctgaggaaatgagttggactttgaaatgcatagatgtatgtatgtatttatatactttggcccagcaagtcattctgtgggactttatcacacgaaaaggcatgtaaagataatgtattcaccacctgggcacagtggctcatgcctgtaatcccagcactttgggaggccgaggcgggcggatcacgaggtcaggagatagagaccatcctggctaacacggtgaaaccccatctctgctaaaaatacaaaacattagctgggcaaggtggcagacgcctgcagttctagctactcgggagggtgaggcaggagaatggcatgaatctgtgaggcggagcttgcagtgagctgagatggcgccactgcactccagcctgggcaacagagcaagactctgtctca

SEQ ID NO: 202080 - DNA, 406 bp, Homo sapiens
tccttctccctgtgcatccttgattcacagattaagatgacagtagctgctacattaagtcacgtcactcaaaactactaagcattttctacatgaagaaaggctgtttttttaaaggtgtttaaacatgtttgtttttttaaaacttgagttgttgaataaaaagtaaacttcataaattcacattttaaaataattagaactacctcatagatgcacggtaccttctaggttgctaaagccctcttcgtgtctctgaggctgaaatacacacgaaccactgctttaagtgccctgtgagacaggccctgcttaccacagaagcacaagctcacacagcttcctggaaggcaaacttcaagtaccagaatcaagttctttcaagtgctgatgctggtgctcggtt

SEQ ID NO: 202081 - DNA, 318 bp, Homo sapiens
tttgcctcctctccccattccagcaataatcagtcaaaatagttaaaaagtttcggaattccagacgcatgttccaagggtaggctaggttcatccacatacaaggtactttgctctggtgctacccactggcttctaaactcttcagtttttctgtgaaagggcttgattagcatgtggctgggaggaaaacactgcctttctgagtcatccacttatgtcttttctagatttcatttatatgaaattctagaaaagacataatgggatgatagtgggttatgggttttcagggggtcaggagaggacaattaattg

SEQ ID NO: 202082 - DNA, 350 bp, Homo sapiens
aaaccaacaacagttaaaaaagacaaaaaaaaggcactacataatgataaagggctcaattcaataagaagacttattgattctaaatatatatgtacccaatacagaagcacccaggttcataaaacaagtacttcttattttattacctacaaagagacttagataagcacacaaccacaaaaaaatagttggggacttcaacaccacactgacagcattagatcatcgagggagaaaactaacaaagaaattctggacttacattcaacactggacaaattgggcttaaaagacatctacagaacactccacccatcaaccacagaatatacattcttctcatctgc

SEQ ID NO: 202083 - DNA, 688 bp, Homo sapiens
agatacagtgtttactctttgtctgctgtgaaaaagtctgttcccatctctaggtattttgtggttgatgttttatcactgtacttgttttcctttcactccactgcatgtaaattcttgcctcacagtgtaatattggcagagtaacttgaagttcaattcagtaaatatttattacccttgaagttcaattcaataaatatttattgaatcgagccattcaatatgctaactacagagatacagagctgagtaaagcataccttccccttaaggagatcatagtctctcagaggagacagacaaatgaacaaataaaccaatagtgcaaccacagaagtatgggtgaggtacacagtaagacaaagggaaacaccggtgtttccctttgtcttggcccttacaggcagtgctcccctctgcatggcacatctttcctgccccctttctttaccctggccaagttccactccacaccaggtgtcagctgcagaccttcataagcctcaccatcacctcgagctcctcatagtcccagcatttttctatgcattctcatttgtcaaatccctgtctctcctgctactgcgggctctctgagctcagtattcccatctatcttatcaagtgctacagggcttatggtgcagcagggatgccagagggataaaaatgcagccttcatctg

SEQ ID NO: 202084 - DNA, 575 bp, Homo sapiens
caattcatcactgtaatattgaagcctacatgcagctctgcagtgctgaaaagagcctttaaagctcatcacatctacaattttacaccaagcacaaaaggggaggtgacttacccaaaggcacacagaaacttaatgacagggtgagggcagagtgaggacagaactggtcttcttaaggcctgggccagcaatctaccaccccaaaccaaccatatccctgcagccactatgtttgtattcattgtgataaactatatctaagtattaggcaagcacaaatgtaaacataaatgatcaaatatagcagaatcttcttaaccagacttctcagagctgtatgttctagctgacttaatcttctggttaccagagattgatattgaaaaacgaacctcacaattatcatcaggaaaaagaaaacaagggaaacaacaaacaacaaatactagtcctgtccttagacacatgcagagagctgttttctttttggtaaatctgtgctataaagtagtggtggtatagtacaaatagtccagccctatcaataactgactagttgtgtgatattattc

SEQ ID NO: 202085 - DNA, 204 bp, Homo sapiens
tcaagacataaaaaaaaaccatgtctatcacctcagaaaattcccttgagcccttttctggtcagtccccaaccccagaaacaaccataatttttattcttttcattataaattacttttttcttttttttagaatgtcatgtaaatatatgtcatacacacttctgtatcttgctgcttttgcttagcgtaatgtgagatcta

SEQ ID NO: 202086 - DNA, 427 bp, Homo sapiens
gtaccattagcatgattaataccattggtggtgttttcatatcatgtcttgttcactgtccattataacaggagaagagactttgctccctaaacctggaagctctccagaaatggggaaaccctgggtcagaggaacctggcttcccatctctactctattatttcctgaccctgagcaactgccccacacctctggggctttagtcctagaggaagactaagggtctggctgttgcctattaggccttaaatttaaaataatgactggccaggaaaggtggctcacgtctgtaattacagtactttgggaggctgaggggaggaatactggagcccagagttcaagaccagcctggaaaacatagggagatcccatcttggaaaaatacgccggggcattgtggcttaggtctgtgatcccagca

SEQ ID NO: 202087 - DNA, 492 bp, Homo sapiens
aatttttggaatatcaaaagaatattacattttctaaattggtcagttgggttaaacacaacaatggagacacacacaaaagaagcaatacctgaggcttatagtcaacagttacccaatatggacactcagaaatcgttgcgttacttatttttaaccacatcctatcttctttaaatagtggtatctgagatttgagaaggcagtgagttgcagttcttcgagagcactgaattcctacagatatattcattttgtttgttttctcacttaccttttttattcttgttcatcaaagccatgacataacaggtccacagatcaggaaaacagctcattacataaagggggaaatcagattcacacactacctcgactttagcccaaacccagatggcagagtctcctccagggtgggaaagtagccataagcatccgtttcagtcactccacatgtgtattcacacgacctgcggggcgccccagaggcca

SEQ ID NO: 202088 - DNA, 2076 bp, Homo sapiens
gagacagagtcttgctctatcggccaggctggagtgcagtggcatgatctcggctcacggcaacctctgcctgttgggttcaagtgattctcttgcctcagcctcccaaagctgtatatccagctaatttttatatttttagtagagacggggtttcaccatgttggccaggctggttttgaactcctgacctcaggtgatccgcctgccttggcctcccaaatgttgggattacaggtgtgagccaccgtgcccggcctcaaaataaatcttttcagatactaattattattttgattgagttttttgtttgtttttttaattgctgcataacaactagactaagttttttaaacgtggggattactgggtcagaggcttgtgtgtttttaaagcttttaatgtcattttccatttttttccttcagtggaattgttctcattttcacttcatagagtagtttgttactattcttcactaaacgatggctaattcctttgtaataaatttggtcttccttgacatcttgctgtttacatctattacatttatatttctgtattataaattaccatgtgaaagacttctccaaattcttgaagctcctcttcagtctcacagcctttgctcatttaaatgtggcgttccccatcagccaactcactttcaggaagaacattttcagaggtcctcttggtcgtgtctctagtactgcagaatacattatagagctccctacccagaggagagatgtgtttcgtttgtgtctggaatcaaggtgactttccagtaatagatactacctttggcacttcatttctgtgaagttgctttttccttctagctgccttttttgcttttttttttgtccaagacaggtttaattttattttctgtttctctttttggggaagttcccaggtcatttaccatttattccactgtagctttatcttgcttagacttgttattgagtcaaaccaaaccaattatgataagggggtctttaaataaaggtgggaaagactgtagaatgagtaagggatataaatatagggttatcacttaagcaaatttttaagaaaccacagtgtatttggttttcacatctcttcatatttatagcatggtttcccttttattctgctgagtacttttttataatttaactttctggtttatttttttaaaaacatttattgaaatataatttacacaccaagctgttgacccacttaaattgtacaactcaaatggtttttagcataatcataaccatcaccatgaccactttaaaaacaacaaaaagccccataactattatcttagcagtcaactctgtttgtcttaaccctccccgcttcagtcctaggtaagtgttacccctaacgtgttttccctctagatttgactattctggatatttcatataaatggaatcttatactatgtggtcctttgtgactgacttctgtcacccagcataaagttttcaaggctcatctatgttgtgatataatagtatctgtgattcattttttattgttgaataatattccactgtatggatattctgtattttgttcattagttgataagatatttgagttctgatttacttttggattctcagaaatagttactcagaactttaaaattgttttacacttttatgggttttacagagttactaatttttgctttgggcagctaagtttgatgtttctgtgggatggacagtaagttggctttgaagctgagagatagatctaggctaaggccaatgattgggaatactgagcacatggatggtaactgaggccacaggagtcaataggattgcccagtgtgtgtgtaaagggtaagaaggaaaagggcttaggatagagtctggaagaatcacagtgtttaagtgtgatttgctccccactctctgttatggtttgctccatgaaatggtatctgtaacatttaaatgaatttactctttgttttacatagcagttcacttctagaaattttttcaataggtacaatggggaatcttaaggcttgggttggtgttcaaaacagcc

SEQ ID NO: 202089 - DNA, 540 bp, Homo sapiens
gctaaggccaatgattgggaatactgagcacatggatggtaactgaggccacaggagtcaataggattgcccagtgtgtgtgtaaagggtaagaaggaaaagggcttaggatagagtctggaagaatcacagtgtttaagtgtgatttgctccccactctctgttatggtttgctccatgaaatggtatctgtaacatttaaatgaatttactctttgttttacatagcagttcacttctagaaattttttctacagatagtctcacaattgggcaaatacttaacgttcattgcttgtattttcacagaatcagtctaaaaagggaagaaccctcccagatgttcaggacttttgatacctgttagtcacttgatttttttttttaatgaaaggaatatgtatactcattgcacaaataaatcataaacacaaggaaggataaagaaaataagataggccaggcacggtggcccacgcctgtagtcccagcactttgggaggctgaggcaggtggatcacgaggtcaggacttcgagac

SEQ ID NO: 202090 - DNA, 655 bp, Homo sapiens
ccctgaaggtgcacctgcagtcctcgccgataagaggcagcagttcggaagccggttcctgagagatccggcgcgcgtcttccaccacaatgcctgcaattgttccagacaagatgcagaaggctatcaacaggctgagcaggcttctgaaacctggcgggatgatgcttctgcgagattacggccgctatgacatggctcagcttcggtttaaaaaaggtcagtgtctatctggaaatttctacgtgagaggtgatggaaccagagtttacttcttcacacaagaggaactggacacgcttttcaccactgctggactggaaaaagttcagaacctggtggatcgccgactgcaggtgaaccgaggaaagcaactgacaatgtaccgggtttggattcagtgcaaatactgcaagccccttctgtccagcaccagctgagaggcacctgctgccaacacgatgcaagcccattgtgtttccgggcttttttaaaaaaaaaattgtagcactgggcgtggtgcatgcctgtaatcccagccactcaggaggctgaggcggggaggatccattgagcccagcagtccaacctgggcaaaatagtgagagaccctgtatcttgaaagtaataataaaaataaaaaatataatgagaa

SEQ ID NO: 202091 - DNA, 530 bp, Homo sapiens
cagtccttggccaagaggcagcaattgcccagccaccaaagtgaaagggaagggaagagaggaaaggagaagccactgtccaagggggaagggtgtgacctgcaggggcccctcgagtgattgtctcctattcccaacctgagcacttcccacgacactcttctgaaaattctggcaagaacaattcttagtgcggttgtagctgatgatcagaaaggggaaggggcttccctttgagccaggatcaaagcacaagcttcctgctttcccatccaaggaggcgccccaaagtttggcctgtgtgcagagacgctgtatcccctggggctcccaggagaggagagcagctgtggagtctacctagctgtgagctgcttctgggtggcaggcactgaggagacctggggtgtctcttgggggagcaacagagaagggaatcatttctagggcaggtcactaactgcagaatcagaaggctgaggccagctccctgattagctgtgctgtcttgaggcattcatcttcccgag

SEQ ID NO: 202092 - DNA, 1703 bp, Homo sapiens
gatgctgttaagttctgaaaagagaaacgggagcagtggaggaggcccggagagagatgcgaagcagagggcaggactgagccagaggggctgcagcagcttcagcatgaacagaaaactggtcaggcccagaaaaggtgcccgggggtccctacccccaggcttgttcccaggagtcatggctgggagtgccgcctgaggctgctgtacggaagcccccactccgtgaccctccgggttgagtctgaatcccaggacacctgagaatgtgtctctggcttgctgcccagaaggtctggggctgctggtgtgaggagggctgggagctgggatgggaggagccaggcgagccttttccggatcgaggcagattcaggaggggagggtcctctctgctgagcccctgctgctgtgacagggacagcacactcagactgtgtcactagtccctctgggaccccaggagtgcagacaaagacgtgctttggaacagagacacgggagatacgttttcagaggtctctaataaaaggggtgacttcagtggaaaccgctgcgcaggaggcaggactgggtggtagcaagcatggcctcctgactgcggcgagtaccaggggcacttggttccccagctgccaccgtgagacccccctgggaacccagaagggcctctgcacagcccccggcccgtgtgctgcctcccagtcttgtcaaccctgaccttggagttctagcgggcgtgctcgcctgtgtcctcagctgggggcgcatgagaagagacttctgtgatgtgttaatgaggggtcagtggttcccgccagaggggaaggccagggcctgcacccccatggggaaagaactgacaggcagcagtgaggcctgagcccagcccacccggtccgcaaagattcccgtcccaaacacgagggcacagagactgcgggtgctctgaagcctcctgtgctgaggaggtgagtggtcattgtgggaacggcatggccagccactcacaaacaaggggccacccaatccaggcaggcagggcaggtgagggggacatgtggctaggtcatgaaaaccagttattagggacagggagagaaggcgcagcctgtgcgaagtcaacagttcttctcagtgcgtttttgtcttgtttctgagatggagtcttgctctgttgcccagactggagtgcagtggcacgatcttggctcactgcaacctccgcctcccgagttcaagtgattctcctgcctcagcctcctgagtagctgggattacaggcatgtgccaccatacctggctaatttttgtatttttagtagagatgggatttctcccacgttggccacactggtctcgaactcctgacctcatgatccgcccgcctcagcctgccaaagtgctgggattacaggcgtgagccaccgcgccggcctcaatgcactctttaaagagaagggcagttagcgacagggtctcatgttgttgcctaggctggggtgccctggcacgatcatggctgactgcagccctgtgcgctcaagtgagcctctcacctcagcctcccagggtgctgggactgccaacatgagccactggactcggcagtgtaaactacttttttcatgctattgcatatgtattgttcattgataatatatagaaacataactgggttttgtgtatggattttgtgccct

SEQ ID NO: 202093 - DNA, 236 bp, Homo sapiens
cttgagactgtctcgctctgtcacccaggctagagtgcagtggcgcaatctcagcccactgcctccgcctcccgggttcaggcacctctcacctcagcctcccagggtgctgggactgccaacatgagccactggactcggcagtgtaaactacttttttcatgctattgcatatgtattgttcattgataatatatagaaacataactgggttttgtgtatggattttgtgccct

SEQ ID NO: 202094 - DNA, 603 bp, Homo sapiens
tgagattttatttatttattttttgtcagcttgatgttgggtgtttttttaagaattttcaattcttgcctcctcagaagaaaggatttgactgaggggcataaggcagaagaagaaacccaggcaagtttcagagcaggagtgaaattttattaaaaagcctcagaacagtaaggaaaggaaggaaagtaaagaaaagaaggaaaggtatgtgctttccttggttgataaaccaagtgtgcctggtgatttttaatgttactgaagatgtggcatgttaaaaaggcatctttctgctagcacagtggctcacatctgtaatcccatgattgtttttgttttaaatcttggccaggctggtctcgaactcctgggctccacagatcctcttgcctcagcctcccaaagtgctgggattactggcatgagccaccacaccagcggtgtaatcccagtgttttgggaggccagggtaggaggatcaattgaggccaggagtttaagaccagcctgggcaacagcgcaagacactgtctctacaaaaattagccaggcatggtggcctgtggttcaacctgagtgagaccatgactctaaaaatca

SEQ ID NO: 202095 - DNA, 341 bp, Homo sapiens
agccttggcacatttgccagaggaaccttcaagccaacctacacaattagttgctattgttatggggttgtaagttaagcagcaaaagacaaaacaaactttattgtaacaatttatataaagtatagtcttgaacttgttgtttctcaataatatcaaaagctttatttcaagaaattattgttgatgacatcttggaatattgtagaataatggcccttatgttctatgtagacacaacttaaaacagaattactggccctttttttttgtggaatcagccgcatgccctgtgtacttgctccatattgtctatccaatacaaaaaacacatacctgtc

SEQ ID NO: 202096 - DNA, 471 bp, Homo sapiens
ctactataaagacacatgcacatgtatgtttattgcagcactgttcacaatagcaaagacttaaagccaacccaaatgcctattttctggataaagaaaacgtggcacatacacaccatggagtactatgcagccataaaaaataatgagtttatgtcctttgcagggatatggatgaagctggaaccatccttctcagcaaaataaccaactttcgatcacagcatttctctttgttttattcacttattagatatacttgacttatgtaattaacttaagaggtaatattgttccttatgtaaatgtactagcataagatcaacctggatgtataaatttataaaatcagccactcttatttgtgttagaaagcttatgcatctaacttcaacactatttgttctctctttttggtattttagtcttcaaatgcgattatttttgtggatgattttatgagaaattatg

SEQ ID NO: 202097 - DNA, 352 bp, Homo sapiens
ttaatttcttatcacagagaaatgtttatttggccaaatgacctgagcctaatcagtggggatgccgaacagagccctgtattggaaggaacctagttatcaaggtaggaacagatgcagtggggaaggaggatgtttaatgccactccccgccactcccagcagtacactataatagatgtctgggaggaatctgagaagtcacttttaataatgcagataaggacataattaatgcccttatctgcaccagatctcccccaggaagacaacaggataactgggagggaagggttgtagatttggagtcacagctcttctatggatgcctgtgattaggatgcagctgctg

SEQ ID NO: 202098 - DNA, 412 bp, Homo sapiens
gatttctaattttttttttgccatggtttttgaaatttatttattttcatttttatttttattttttgccattgttgaggacacacacccatgacacagcctccggaggtcctgacgacatgtgtccaaggtggtcagggcgcagtttgaccttatacgttttagggagatatgagatattaatcaacataagtaagataaacattggtttggtctggaaaggtgggacaactcaaagctaggagggcacttccaggtcataggtagataagagacaaatggttgccttcttttgagtttctgatctcctcttcaaaggaggcaagcaaataggcatttatctcagtgagcagggtggtgactttgagtagagtgggaggcaaatttgcccctaagcagttctcagcttcac

SEQ ID NO: 202099 - DNA, 674 bp, Homo sapiens
atagaattctcatttggaatatatccaatgttcatttggtttctttcagttgcagcaaatcttactatgatttgaggtttttaaatactatgtttttcaggaagtcttttcggtggcattttctgataatgccagcctgataatccaaaaaaaagtctgttaaaaagcagatttgcctgtaatcattaccttttttctgagtttgtaatcagaccttgtcttgaatctgtaaatcctgtggagtctcaggtgattttcctgactttccctgcatgcatggaggcaggtagcagatggatgggcctttatgccccgtcatgtgtgggtgccctggcagaaccctgctgctgccctccgtcttccccacagcaagcctgtggccattacaacttgtgcttctctgtgcatgtacagcacagcatctgtagcaaaaggagtctgcaagtattttggagagtaagacctgcatggcttgtttccttctgccagagaacctagaacaggcaaagacatacatgtgtttttcctttggaggcatcaagctccttcctggacattgaactttataacaatctgtgggtgaatccgccctattcctggacttgcagagagggtctccctggccaccttccacattcacgtggtccaagtggcatgagaaaggatggaagcct

SEQ ID NO: 202100 - DNA, 412 bp, Homo sapiens
acacacacacacacacacacacacacacacacacacacacacacttgtaaaataaaaagacataaaaccttaagttccattgacttcatgttggctaatcactttagccactgcagctttaattaaaacaagattaaaagtaagagatgtatcagcccttttattttgttacaaaaaagttagggtttctttaccatctggcttaggaacactatcactgcgtatttagttaagccactttggaagatccttaatactgcatttgtatatttcaatttactctctctgaaaaccggaagcagttccactaacacaaagaagttcggtaaatataagttgcacctaggagcatccaaaattgctgggcctgagacagtggatttaaaatagcgttcactgaaaccctaaaggt

SEQ ID NO: 202101 - DNA, 465 bp, Homo sapiens
tgacccaactgtattaggaggatggggagataggaactatccatgtgtggggatatgtgtgtgtgagggagagtgtgtggacaccaaatcctcatatttcattgcaatatgatagatgcaatgcatttagactgaaactctcatatttacttctgagaagcagaggaagctgagcaaagtaaagaatcacagagacaagccatatttgtaggaagcactttgccctgcagaagagaagacatcattgtgaagagttccacagctgcttatcaaagaagatggagaagagtaaatgcaaaattcagagtcaggtaaatgcctgctaaataggtgggcacatggctctggggtccccctgcaagtatattcatcaaaatagctggtccaggaaaactcttcctcaaagatgagcaaccacacagacaacacaggtgagagtctatagaaaattaacagaagaggaaa

SEQ ID NO: 202102 - DNA, 411 bp, Homo sapiens
agtagagacggggtttcaccatgttggccaggatagtcttgatctcctgacttcgtgatccacctgcctcggcctctcaaagtgctgggattacaggcatgagccaccatgcccagccaaaaaaaatttttttaattaaaaatttaaaaagtggactcaatttattgcgatatttatttcaactcttgtctcctcaatatgaaaagtcttccagtgacatgtctctttagttttaaaatattttagattttttacctttaaaaaaagttaaaattctggttttcattgtgctaatgagatcatttttgttattattttatcctgtattaataattcaggtatttctttgcagcataaaaatcctatcctgtaagttccaagcagttacaaaaaaattactagaatatacat

SEQ ID NO: 202103 - DNA, 267 bp, Homo sapiens
agaccagcagcagcagcagcagcagcagcagcagcagcagcagcagcatcacctgggattttgaaagaaatgcagaatctcagcccttgacctagggaatcagagtctacattttcacaaggtctccaaatgatgcatctgccatggtgaggtttgagaagcctgacctagatagacacagggcggaagagaatgaccaagggtggggaaatgccagctctgggcttcatacaaggccaagcatggtttttgttgacaccttattta

SEQ ID NO: 202104 - DNA, 252 bp, Homo sapiens
ggcatgtacctctggtccagctacttgggaggctgagatgggagaatcgttacaaaaaaacttttttttgtagagatgggatctttgttgcccaagctggtcttgaactcctgggctcaagtgatcctcctgcctcagcctacggaagtgccaggattacaggcaggacccaccacacctggctcaactctcttagtatatagattctgtcttctcctagagaagacctgcactgctctctctggcatattg

SEQ ID NO: 202105 - DNA, 252 bp, Homo sapiens
cctgaagggaggctacaactggaataaaaataagaaagctttcaaggcctggtgcagtgactcacacctgtaatcctagcactttgggagtccaaggtgggggattgcttgagtccaggagtttgagaccagcctgggcaacatggagaaaccccatctctacaaaaaaaaaaaaaaaaatgcaaaaattaaccaggagtggtagcacatgcctgtagtcccagctacctggggagctgaggcaggaggatc

SEQ ID NO: 202106 - DNA, 379 bp, Homo sapiens
tatgtatgtgatggcacacttaaggactctatactccttaagtaccgggaaattcagaaattccagcattatcaaactactgtaagacagatccatgagagcctgcgtaggtatatgaatacacagagatacagaaaataatctaaaaaaggatccagattgactagctgctagaagggtcagagaactctattaagtaggtctctatcaagaaatatccagtgtaaactggtaataaatacatctagctagtgatactataaaaagagaggatgggcacagtggctcacaccggtaatcccaaatacagtgggaggttgaagcaggaggatcacttgaggccaggagtttgagaccagcctgggcaacacagtgagat

SEQ ID NO: 202107 - DNA, 567 bp, Homo sapiens
taaattaaaactctgccctgatttctaactccatggattagttttgcctctctttgaactttacataaacaaaaacgtagtgtatttcctgtgtctggcttcttgcactccaaaatatgtttttgagaattatttatgttaaatgtatcagtagttcatttttattgcatgacagtactggcagtatgtttatgtattcttctgttggtgttcatttaagttctttctttgggggaattagtatgaataattctgtgcacattcctatatgtctttgtgcacatgtacatgcatttctgttgggtatatatctaagaatggaatggccagatcatatactatacatatggacagctttagtagatactgctaaaaagtttttcaaagtggctgtaccagtttacacaccctgcaacggtttttgagttctacattctccccaaaattgatattgtcagtcttcttaacttgacccattccaggagatgtgtggtggtgtatcagtgtaattttggtagttatttccctctctggtatgagtcaacttctttcaaataaaggttttct

SEQ ID NO: 202108 - DNA, 382 bp, Homo sapiens
tatgtctccatcaacatgaaagtgtgtgtacacacatgcctgcacacacgcacatgtgttcacatgcaccgctggggaaaaatggccagctgaaaggtaccactcagggaccaacagagaacagatgaggtctgcttaaaaaagaagcttccttggagttatactcttcttggcaaggtgggtgttaaaaataataatgctgaggttgcaccaaatgtctttaatgttggagggaagatgagaaagaaagaaagaggaagaggagaggaaatgagggaagaagagagggaaaatgcaagataaaacataagaaaacttttcaccttggcaagccaaataaccagctttaatcaggtaaagggctttatactgtgtggagaaa

SEQ ID NO: 202109 - DNA, 125 bp, Homo sapiens
aggagagcctgtaacagagaaggaagcagtgagtaccacggctggaggtttgggtgggttacactgaaaggaggtaggaactaagcctaggaagcgtggatacgattcaggcgtgtggcatttga

SEQ ID NO: 202110 - DNA, 262 bp, Homo sapiens
ggcggtcctcactaaagagacaagctcagaaagaaaaattagatgtgaaaatatgcataaaagacaggattttttgtgctaccaattctggccttactggaccataaagttaattatagctttgaaagataaaaaaaaaaaaaaacaacaactttttcttctcagcccacaatctggcaccattaaatggcccaatataagagggactcggttttataattaggttgggagcctttttcttaaatgtactgcaccacaatct

SEQ ID NO: 202111 - DNA, 673 bp, Homo sapiens
ttcttttttgtccttgtaagagggtggttggaaccatttaattgatcaatgtagaacacatggtataatgagaatttaaatgttaaattgagaaaaacagttacaggaataaatatgggtccggaacaaaaatttaaataagtaaatcttgacaaagtaaaaataattttacaacaatttaaaaaacagtccatagaggacaaaagagagggagaagaaatgtaagcaaggttgaatgtctaatcatgtggacacaaacatactgagtctctcataactgtcttaccttttttctttcactcatagagaaatattacaaaacaaggatttcctcttgttcaatatagttctcttgaagaacagcaatttctttagttctctagttactttttctttttaaatttgagtaacattgatttttttgttattaaacctatttattactaaacaatgccagttttctttctgtctcttcatccattcatcttttcatctctcttttcgccttactacaatgcccaacacttatctccataaatattcatgaagagagacagccaggtgttcacagttaacactgaaagggaaatgcatgcactttctgctttgtcaaactactatgtactgctgattgctaagtaaaataaaatactttaaaaaataaaaacaatgg

SEQ ID NO: 202112 - DNA, 683 bp, Homo sapiens
ttggaaagatggacgagaaggtgttggggataaacagggatggaaagaatccaagaagagacacaagcaatgactccaattaatgacaaagtatattttcatttgttaatctagtgatagaaaattaagctgagtaaaagaggaggctattgcctctcaaatatacaccaatttctccacaagaaaattttgtcctggactgtccagggaaaagaatatttcaaattaagcacatcagtcagtattcagtgtcctctgcccagaacctaaaccaacaaaaacagcatgtaaatggccttattcattacaagccactataaaaagatacagagatagaccacctctcagggcactcctctaaaacaccatttggccaggatccttagtcttttagcattaaatgagagtttattggatttttgatgtgttacttttcatataccaaaatctcctagaaaacacaggacatataaatatatgatcatctacaaaaaaaagtcaataatataattaagctctaaggccttgaaatcatataactggatttcaatcctaataggtacaagccaacttacgaccacatgttaccagcactactttaccccactcatggataatcagctctagaacaccttgagagctatcctgatcaaatgagtgcatgtccagtgacaagaaccaca

SEQ ID NO: 202113 - DNA, 460 bp, Homo sapiens
gcactctcaaatttgatgatgagtagtttatagaaatattttgctttatcgttaggattaagcataattcatgtatatccagttacatgaaaattttaggtcagaattaactgttgcaacacaggtgaatcagtattctatagagatagctaaacttgaaacaaagtaaatagtgacaaaaactaactgtaatttataatttaaaaatgggaatagtaagtaggtctggattgaacaactcagctgcactgatgtacagtgatgttatttttcaaaattgtaggaatttcgcttgtcttcatatgcacattatcggtagtttagtacccttgagtggcaggtagatttctacgaatcacatgttagagaacctaagtgtactaagttctcatatgttctcagggtattgtacttagtttctctttaggaatatcaaatttaatatccctcagtaagtcac

SEQ ID NO: 202114 - DNA, 456 bp, Homo sapiens
tactatactacaagaaaaatcttcaaatcttcaatcttcattcttcatgggtgtgagtcttctctggtggagaagagagttctttgctaaattatattcctgtgttagccagccaagcacacacggagtacagctgtcccttgctattcatggcagattgatcccagacactgccacccccagccctgtgaacaccaaaacccatggatgctcaagtccttgatataaaatggtatggtatttgcacataacctacacacatcttcccatatactttaaatcatcactagattacttataatacctaatgcaatgtaaatgctatgtaagtagttgctacgctgtattgcttagggaataatgacaagaaaaaaaggctgtacaacttcagtacaaatgctatcattcatttttttatctgaatattatgatccatgaatacagagggctggctgt

SEQ ID NO: 202115 - DNA, 493 bp, Homo sapiens
tcagactttcagagagtggctcgctaaatagaatagaggaatttatagctcagatgaaatggcagatatttatagctcagatatggcagttcattccaattggataagaacaagatgttcctgttttgtggtaaggaaaacaggatgttcttgtttttgtggcttatctctggaggcaaagcttttaggatttcccgttagtcaaggcttttaggaggttcccgctattcatggtttatctttgaatgcaaagttattgggaatgaaagtcttttctagtgtatggtaagtgatttgtaggcagggttaggctaagggcaagatattttccttttctcctctctgtttgctgtgcccactttaatatagtttcctctagctcagaatctcctccacttcctaccatagctaccatacaaagtaaacgttatcatagattgttgctgtgggtttgttttactttactccaggctggagtgcagtggcgcaatct

SEQ ID NO: 202116 - DNA, 151 bp, Homo sapiens
aaatttatagagacagaaagtagaataatgttgacaggggctaagggaagcagaatgagaagttaatgtttaatgggtataagatttcagttttacaaaatgacaagagtttttggaaatgggtggtggggatgtttttcaccacattatg

SEQ ID NO: 202117 - DNA, 450 bp, Homo sapiens
ccgatttgtggtctggcaggcctggtgaggaaagagtgggccaaagaggccactaggaggcaggagctgggcctcaggaggctgccataaaacaggagctgggactcggaaggcagacatgaagcaaaagctggcctttggaaggctgatgaaagggagaagccgggcctggtgaggttgacttgagaaagtttggggcctggagagatccatgggaggcgggagccaaacttgtagacgctactggaaggcaggaggtgggcctgtaatcccagttacttgggaggctgaggatgggcatggacttcctatcgaggactttctggtgcgggattctcagggaagaggaggccggaggggctggggtccccaggactgcatgcgccaggcaggcggaggggaggccgagccaggagccgcaggcttctcaccgccagaccaacgccaccc

SEQ ID NO: 202118 - DNA, 610 bp, Homo sapiens
gttagaatataagcaccatagtccagggggagagtaatgaagcccttggctgtggctgtcccgtgaagtggaaaggaagtagtatcttcagaaggtatttggagtcatgaataagagaggacacaattaaaggtgactgtaagttttctagcccaaattgactagaggatctgttaagccaactgaggaacttaaaagaggtagcagaggaaaagaatacttttcattgtgcaaccccagtggagatgtccaatgttggcttggtgtgaggagaaggtcatgactagaggcttagatctggatcccttttacataaaggtattcattgtagctaagggagtggttaaaagcacatagaaaggatcatgttttaaagaacaatggaagaacagccaccagccgataagactgaaatggggtcttcgaatatataagaaaagaataaagaagaatgattcgaagagtattttcagggggcagtaacaattaaaaccatatacttttcttaggggaggtccccagacagcctaggattgaagaaacctgaattatagtatcttctgtaggcattcactccaggcattctttgcaacttttgacaaattactta

SEQ ID NO: 202119 - DNA, 279 bp, Homo sapiens
gttagaatataagcaccatagtccagggggagagtaatgaagcccttggctgtggctgtcccgtgaagtggaaaggaagtagtatcttcagaaggtatttggagtcatgaataagagaggacacaattaaaggtgactgtaagttttctagcccaaattgactagaggatctgttaagccaactgaggaacttaaaagaggtagcagaggatccgcatacttattcacttctcaacctcaatatctatatcccgattgtgcctgctgtgcggtgaagtc

SEQ ID NO: 202120 - DNA, 493 bp, Homo sapiens
agaaaactatcagggttaactcaaagaattgtttccatcaaagagatttttacaagcacttgaagagaaaagccaggcctaccatagttttagtcatgcagtggtggaacttagcaaaagacggacattgtatatctttaatttccttgctgtctccttccagtatactatagacctcggaaaaatcatggcagtggaatataccatacataaaggcatacatgtctttaaacatctagattttcttttgctataggaaattcattattcctttgaccgtcttagctcatcattgacatgcagtgctcatcgggctgagccacctgcatggtaatggggctgtcaagggaactgaaagcagcaatgatgatgggggcttcttgcattctaagatacatatgttgaatcatatgtcagatagcactttggtcctttatgtttgaaggggggggacagagcttgagttttatattccttttctgtgatgtaagtt

SEQ ID NO: 202121 - DNA, 771 bp, Homo sapiens
  misc_feature (758)..(758): n is a, c, g, or t
tttggacagggtctcgctctgtcacccaagctggagtgcagtggtgtgatctcagttcattgcagcctctgcctcccgggttcaagtgattcttgtgcctcagcatcccgagtagctgggactacaggcacgcaccaccacgcctggctgatttttgtatttttagtagggatgggattttgccctgttggccaggctggtctcgaactcctggcctcttgtgatccacctgcctcagcctcccagagtgctgggactacaggtgtgagccgctgcacctggcccccatctctaaaaatattaaaaagaaaaaaattagccaggcttggtggtgtgagtctgtaagtcctagctcctcaagaggctaaggtggaagcattgcttgagcccaggagtttgaggctatagtcagctattattgtgccactgcactccagcctgggcagcagagtgagaccccatctaaaaagaaaaagaaaaaagtctgtgtgatgaaatgggaagtatgcataaagcatatctactgcatgctgaagaaagatagtttactcaaggaaaagtagttgtgggtgtgagccactgcacctggcccccatctctaaaaatattaaaaagaaaaaaattagccaggcttggtggtgtgagtctgtaagtcctagctcctcaagaggctaaggtggaagcattgcttgagcccaggagtttgaggctatagtcagctattattgtgccactgcactccagcctgggcagcagantgagaccccatct

SEQ ID NO: 202122 - DNA, 561 bp, Homo sapiens
tctaaggaccttccctgcactaagtttgcaaattagtcacaacctggtttacgctggtgcagttatctgagtaagccgataatgctttgcatacatttcatttccttccactaaggagctgagagcggtttctcatgataagaaacttggcagtaaaagagtccactagacctcacattccctgaatatctcaaaagttggctttgctttcctaacaagagcaagccatttcttcaatttacacaatctcttcagaatccttctggaaaaatgaccaggttttacccacgatgtcaaaccagcaagaaggcgaaagacaacccgtgctcaagctgcctgatgaacgcgctgggctttgtctggcctaacctgtgaactccttcaagcaccgtcatgaacgccaccctctgcacggcgacagactgtcattcttcccgcaaacaaatttgcttcctgagcaatgatttttggtttaaagaactgttgacagtggttgtttgacagagacagaaggcagagacagaaatgggagcagttttggaaaagcaggaccaaaagaat

SEQ ID NO: 202123 - DNA, 324 bp, Homo sapiens
cgtaaaggagctaatataacatatctaacatatcattaaaatatgtttgtgggcttttaaaaagtgacagctgctcttcagagtgatagacaggtgtccacatttcagctttctttgtttgtcactgtgtgtgtttgttcttaccagtaatgcctgggaagggcggcaaacactgttgtgcttggatacgaaaaccaaggcctgattagcgtaagcgtttgttgaaaaagcattttctctgcacactaatctctacatatcctgtggggaaatcctttcaatcccgtacctgataaataaatctggcaagtgaataaacactct

SEQ ID NO: 202124 - DNA, 487 bp, Homo sapiens
cccatacagagtagctgggactacaggcgcccgccaccatgcctggctaattttgtttttgtatttttagcagagatgggtttcactgtgttagccaagatggtatccatctcctgatctcgtgatccacccgcctcggcctcccaaagtgctgggattacaggcgtgtggctctgcatttattaactgtggattaataactactctgtatgggggatctcgagatccccatacagagtatacagaatggcatcacataaatgagtctaaatatagataggcagcaagaggcacaataaatagcaacatttatagtacttccacaatcaaaataattctatgctatcacaggaaaagacagtcaatgacaccaaccagtgagtccagaagtcaaatagatgagaatttagtatttgatgtgtagaactttaaataagtgagcaggcacaggggtacttgcctgcagtcacagatactcaggaggctg

SEQ ID NO: 202125 - DNA, 625 bp, Homo sapiens
ataaaatctgaactatggtcaggcacagtggctacaccaaagtaatctcaccactttgggaggccaagacagaagtaaggagtattgcttgaggcctggagttcacgatcagcctgggcaacatgacaggaccatatctctacaaaaaaattttaaaatattagtcaggtgtggtagctcatgcctgtagtcccagctgcttgggaggctgaggcaggaggattgcttgagcccaggagttcaaggttacagtgagctatgatcacgccactgcattccatcctgggtaacagagcaaaaccttgtcactaaaaaaacaaaacaaaaaaaccctgaaactgataagtgagcagatggtgggtcaagttctaacaaactggccatatttttgcaaactcactcaaaatacagtcacggtctgtctatggtgtatgaacaaactgtggaatctaaaatgaaaggatctctggcccatagaaaggactctggataaactgaagctgtcaccaaacgtaggcctaaattcaatgcataggaactcagaggcagcatctacaaaagctgagggtgcacaggtttctaagtgggttctaagagggttctaagaggacccagtaatgcactg

SEQ ID NO: 202126 - DNA, 175 bp, Homo sapiens
ctgaattctccacaccactttgccttaatatctttcaacacttttatttattttatctgacaaatgtaaaatgttatatttgataccctttcttcaacatttttttggcctaattagatggtattggccattggtatcgaaccacatctttaataaagaatctgtgtttattgtt

SEQ ID NO: 202127 - DNA, 574 bp, Homo sapiens
acataagcagagactcagcagagagtctaagaaaggggttacaaggcagaatagaattaagggaaaatgatgtctcctgctctgaccatatctaacatatagtgccatcaccactctaaagggacagggaggagggagcaactacaaacaccctggctgtaagacagggttgctgtcaggggtcttcagtagagaagcagcaactgtacctgcagcccagcatggggacactattccatgacttcatcctcctcctccaaccctgaacaggagccagcagtcaagggagcccatcagtgcagcccagaggcagcctgtggagcacagagctaggtagagaggaggtgcagttctagtctgaggggggccaaaggagatgatccagcaaagcagctctccagcctcctctcctaaggcttagctgaaggaacctgaagattcaggtgggcaggacaaactgctcctgcaaccagctatttccgctgcctggtgcttcctcagacatatctattcacagatctacatgttactcatttcccaaactctacaataaaggcccagttctccttgaaat

SEQ ID NO: 202128 - DNA, 225 bp, Homo sapiens
gtaacgctctgtttaacattttgagaaactgccaggctgtttttcaaagcagctgcattattttacatttcctccaacaatgcataaggtcagcctcctttctgcttctattctcctcaggttctgtatttctctgctctgggctggaagcagccctaggctctaggaattccacaagacttttgtttaaataggtgggaaatgatccatttttctctgttcagc

SEQ ID NO: 202129 - DNA, 581 bp, Homo sapiens
tttcagaagtaaagtttgcaaatatttcctcccaaactgtaagttgtctatttactttgttgatgatttcttttgctgtgcagaagctgtgagtttaattaagccccatttatttatttttgtttttactgtatttgcttttggggacttaagtcacacattctttgcctaggtcaatctccggaagaatttttcataggttttcttctagaattttttatggtttcaggtcttacatttatgtctccaatccatcttgagttaattcttgcatttttaatagtgtttgttttgtacatatagatgctgttatttggtgcaaataaatatgtttctcatttatgctacacatgatctacttatcacgtttaatatctgaaatctacttagcctcaaattattattgttgcctctgtttacttttcgtgtcatttgatgattaagcttttcctcattcttattttttccagtttgctgtgtaattttattctaggtgagattttttgtaaggaacatctagttatatttcctaacccaatttgaaggcttttaaagctttaactgtatacattttatgccag

SEQ ID NO: 202130 - DNA, 195 bp, Homo sapiens
acctggcccaaaaaggtttttttttcaatttacttaaaggaggtcaagcattttaaggcataagagccgtttatttaaaacagtaaattcagtacatttattcctttcagatcaaaattaacatattccgtattagtaaaataaataatgctatctgctttttttttttttttttttgagaaggagttttgctcc

SEQ ID NO: 202131 - DNA, 547 bp, Homo sapiens
taatctcttaacacagacacaaacacacatccaacaaaaacctccatcttctgagcaaataaattgcaattgagagtacaactaggataaagactatttcattggcttcctgttcaggattttttttatagagtcttttacttgagcaaaaagtccctttatataccctcatgcactattgctctttcccactacccaacctgacttccatttttagtatcacactaagtttaagcaatatatcttaaatagacagaggtgctatattgcctaatttgtatataaaaacattaagagatattcatatgcactttctggtagaagtttttcggacctctttttctcacttgctatttttgaatatatgtaaccaattttttcttataaaaaatatctctacagaaaatgttgaaacgcaggtaaaaataagaaataatcatttgttatattactctttatataacctttgcatatacataactttttaccaaaataagattttatgtatactctttataaccttttctattcaatatatattacgaca

SEQ ID NO: 202132 - DNA, 579 bp, Homo sapiens
tgatttgttcccaaaaatatttgaccagaaaacagcctactatgtgctgggcacttttcatgccttggcttattccaaggcatacagtcacatgacagcagtgtctgaggaggaggtgaccccaaatgggaactggttggatagaaagaaagttctgatggaggttgaaggccagagatgaacttccccttgagtttgttttgtctggggttcagaaccagtggtaactgagagcctttgtaaatataagaatgagatgatttggctaaggctttttaagaagaattccagggccagatatggtggttcacacctataatccaagcactttggaaggccaagacaggaggatcacttgagcccaggagttcgagaccagcctaagcaacatagcgagaccttgcctctacaaaaaatcaaaaatttagctgggtgttgtggcgcacacctgtagtcccagctacttgggaggctgaggcaggaggattgcttaagtccaggtggtggaggctgcagtgagccatgatcatgctactgcactacagcctgggtgacagagcaagaccctgtctcaaaaaa

SEQ ID NO: 202133 - DNA, 329 bp, Homo sapiens
ttctgccaaggaacactgccaacaactgacacagagagcaggagagaatgcggggtgtctaatgtcccttccacccttacaaataatccccaaataattccattagacccaatgtggagaagacaggaccagcctacaggaagggtgtgtctgtgggcacattctctgagctgttacttctggcctggccatggtgtcttttattggtggattatactttttcctgttggagaagaaacaacagcaaacagggccactgaagaatatttttttttggatatggagtcttgctctgtcacccaggctggagtacagtggtgcgatctcgg

SEQ ID NO: 202134 - DNA, 167 bp, Homo sapiens
tccaaaatgtaatggaaatgaatgccttatgaaatccaaccctgaccttctcatcacacacccttcttaggagagcccacactagctaacgactccagaattctggatccaaaatgtaatggaaatgaatgccttatgaaatccaaccctgaccttctcatcaaaca

SEQ ID NO: 202135 - DNA, 395 bp, Homo sapiens
ttgaaaggttttaattagtatactgttagatgcagcacagatctaaaatgatgtctagtcgtttttcatgtaatttgatcaagacctttttgttttggataaaatgcaatgaagactgtgtggggaaaacagccaaagtattttaaaaatcttatggggcctccattctgactaagtactaaactaaatcagaatttccaactatcattcttcgtgtattaggaagaaaaagatctaaatcatttatcaaacctttaaaatacaaagagaaatggaaaaattaacaattgcttcaccccaggattttaagagactggattccatgtgtagattgtttctaaaagtaaatcctatcccctcaaaagataccataaaataaactattttaaaatacc

SEQ ID NO: 202136 - DNA, 322 bp, Homo sapiens
gtggtctcccttgcaacacattcaaagatctgtaggtcacattgattcttagttaaacctaacccacagctttgcatatgggactgctttaaaacagctgccctctgtgatccattaaaaataaaaaagccatttaacatggcaaattcatagtttcatagattttatcttgatgtcatctgaactttggaattataattcagcagatgttttaatactcttgtacattaaatcagatgtcaatgggatacagaaggaaccaagctgcaataaaacagcaaaggtatatacaataatatatgttgaggaccattctaattgt

SEQ ID NO: 202137 - DNA, 214 bp, Homo sapiens
gtctcaggatttcagaaatactaggtttggggatataaaagtaatctctacattaactacttgctatttatgcctgattatcacatagcacaatcataaaatatgcattttttgaattccaacatcattcattttttcagcaaacatgtactgaatgactgctgtgtgtcaggcactgggaatacaaagacactgagattggtccctcctgttg

SEQ ID NO: 202138 - DNA, 273 bp, Homo sapiens
tactggagtcaacaacttaaaatgaaacagtaaattataagggatgaatgcttacctacagactttcagaattaggtaaagcaaatctttaagcagtacaaagaatcaggtactcacaattatgtaattataaaccttacatacacatcaaatacctttacaatgtgatatatttgcacctatgtccagttctaggtgaggggagaaaatgactggtgtaatcacaagcactagagagatacagaaaaccatgctgtactcaaagagccactt

SEQ ID NO: 202139 - DNA, 319 bp, Homo sapiens
gaaagattgaaacagtgagtacagtatgctatcatctggataaaaaagaaagctggaggagaagtatatatttgtttgtaaacacataggataattgtagaaaaacccaagaaattgcctttttctttttgtagaaacagggtctcgccatgttgcccaggctggagtgcagtggtgctatcctaccttgccgcagcttcaatctcctgggctcaagcaaccctcctaccccagctaatttttgtattttattttattttttagagacggggtctcgctatgttgcccaggctggagtgcagtggctattcacaggcgc

SEQ ID NO: 202140 - DNA, 567 bp, Homo sapiens
catgtgcttcctggaacctcagaatataatctttttggcaataaggtgtttgcagatgtaattaattaactcaaaatgaggtcctactgaagtagagtgggccataaatacaaagtgattgttatctttataagaagacaagagaaacacacacagagaagaagttgtgaagacaaacacgtgaggagaatgctgagtaaaaatggaggcagagattgtattcttctacaagccaaggaatgccaagccttgctggcaactaccagaagctaggagagatcctctccaataatcttcagagagacatgaccctgctgatactttgatttcagacttgtggcctccagaaccacaaaaacaaatttctgttattttaaggcaagtttgtggtacttcattatagcagcccatggaaactaatgcaaacctcatttgtaaaatgattaataccaattcattcaaaagagctaatatgaggattaaatgaaataatatattacacataaagtactttgtcttgtctgtccagaaaaagtgctcaataaatgttaatttttttaaaatttg

SEQ ID NO: 202141 - DNA, 264 bp, Homo sapiens
cttcaggagggatgaaggctgtagggatgagcaaattggacaaagaccaaaatataagaacagtggtcactagagtagctcacacagacttatgatcgtggatccaatattcaaatccctgattttttagggtaagcatttatcctagattttacagatctgttctggtttactcctgctgctttgtttttgtttttgtttttgtttttttgagacggagtctcgctctgtcgcccaggctggaatgcactggcgccatctcac

SEQ ID NO: 202142 - DNA, 566 bp, Homo sapiens
aagcatccagtaattctgaatatgacgtgaacaacgtaaaaatagctcctgtatctctttgcccccacccttctccccaacaacacaaagggcagaagagagtgacacccctaacaaacagccccagcctcctacatctggaccagctgctgtgagccaacagggtattctaaattatactttaattaccataatttttcacaggtacctgaaaccagatcatgacgacggtgcaagaaatccccaaataggatgcacgaggtccaagttaaagctagtcttctaaacacacaccttttctcacatgccttttatttcatgtagcactttacagtctgcagagtgctttcatgggccttctctctcccacaggctctggattaagacaacatggttcaattccagcctccaaagtatcctgccctctccagagacccttcacctatcaccatttggtgcaatctgtaacagaaaaaaaaagaaaaagaaaaagaataggaaatgggggagaagggggtcttatcttatcccatgggttactaggaatgttaaggattaaatggaaa

SEQ ID NO: 202143 - DNA, 455 bp, Homo sapiens
aaatttaaaaaaattatttgttttgatgacaaagcaattatcattgaaacaagatgattttcaaatgaaaatacgaggttaatgcagtccagtcattagcagggaaaaaaagaataaatatttaaggtttttcttgttaggttgctttgcacattggagtagaaaatagttttgggcttggcgcgttggctcaggcctgtaatcccagcactttgggaggctgagggggacggatcacaaagtcaggagctctagaccagcctggccaagatggtgaaacaccgtctctactaaaaatacaaaaattactcaggcatgttggagagctccggtagtcccagctactcaggaggctgaggcaggagaatcgcttgaacccgggaggcgtacattttagtgagccgagatcccaccactgcactccagcctgggtgatggagagagactcagtctcc

SEQ ID NO: 202144 - DNA, 218 bp, Homo sapiens
tacatgaaaatgaaaaggagaaacactgcattcttgctgccaaaagaaatgtaaaaatatgaatgaaaatgattgctgggtgtgccttccatgagattccatttaaacaacattccccatttacttacatctctacaatctgatgggcttacatattgcaaaatgaaataaaagcacattttatgaggaaattaaaatgttatgaactgccctgggtg

SEQ ID NO: 202145 - DNA, 111 bp, Homo sapiens
gaggggtgttaaaatattcaactatgattgtgacattgtctgtttttcaatttagttctatccatttttgtttcatgtactgtggagccattattagatacatacacattt

SEQ ID NO: 202146 - DNA, 218 bp, Homo sapiens
cggtaatgtgcaagtgtctagtttcttgtcagcatcgggatgagctgtttgtagtgaagagcctgggcctggtgagcccccgggatgatgggtggggaccatctgtgctctcctggaaaggaaattgtggtttctttcttttcttttttctttcttcttcttttttttttttttttttttttttagtttatgggaaagggagacttgtgtctcaattg

SEQ ID NO: 202147 - DNA, 282 bp, Homo sapiens
ttattgtatgtagataaaccattaaatttaatgtatgtaatcatttaattcatcttttaaagcaaagaaactgctagtagatgtctttcttcactgatttcactggtagttttcatctctttcttatgttcctcatatatgctttcttattcctacctaatggatttatgattttttgaatctcctaaaattttattaaaaatactatatgttggctgggactacagctgtgagccactgcccagccgaatatatgtaggtcgactgcttggattacaagga

SEQ ID NO: 202148 - DNA, 304 bp, Homo sapiens
aggtcccccaaggaaaaccacagaacctaagctcatcttagctctaatgtctgtaaatattgggacagcaagtatttctttttttattttttgagatagggtttcgctctgtcgcccaagctggagtgcaggggtgcgaccttggctcgctgcaacctccgccttccgggttcaggcgattctcctgccgcagcctcccaagtagctgggactacaggtgtgcaccatcacacccagctaatttttgtgtttttagtagaggtgaggttttgctatgttggccaggctggtctcgagctcctgg

SEQ ID NO: 202149 - DNA, 271 bp, Homo sapiens
accaaacaccttacagaaacgtctgcttactattccatttacagaaactactcaatgcttgtgtaaataaaattattagctgggaggcatccctctgtcatttcatgtaataccagttattttctcaaggcccagcatccccttttaatcattcaatgtattatacaaaccagtgtatataaaaatacgaaacaaaacattaacgagactttggaaataaatctacatagcaatttccaacgactccctccccttgtgtttaagtttgact

SEQ ID NO: 202150 - DNA, 253 bp, Homo sapiens
agggaaggagagtgaagccaagctgcaagcccatcctgctcttagccattattccaggaagcattcaatcagtgtctactgtgcacgtagactgtgctgtttggcagtgaacgcagtttctgtcctgaatgagcttatctgctaaggtggggaagagagaaaataaattagtggacaaaccagcaattgcttaggttcagtatgtgattagagctttgaaggaaagcactagggacagtaagcagacttgggg

SEQ ID NO: 202151 - DNA, 358 bp, Homo sapiens
gattacaaagtgaagtcccacgatgggccatctgcaagctggggaaagagagaagacggaagtggctcaagtccaagtccaaatgcctgaaaactagggaaggccacagtgcctccctcagtctacggctgaaagagatggagttgatgtccaagggcaggaggaacagaagcaaacgtctctcatgggaagaagaaaaaaagccagaagactcagcaagcaaacttatcccaccttcttccatctgctttgttccagctgcactggctgccaattggatggtgcccacccacattgaagacgggtcttcctctccagtccaccactcacatgtcaatctcctctggcaacacaacac

SEQ ID NO: 202152 - DNA, 973 bp, Homo sapiens
ccgcctatccccttatctccaaccacacccaacccaaccctctctgcttggcaggccagcatcctccttgtcctaggaccaggggagctccattcagctccttcgcagctactctcctctatacagagaaccccatactctttgtcctttcctctttatctctccagatgttatcctttgaagctcagctagtctatggccagaccaccctgatcactcccgatctcatctgaagctcacctcaactccttccttctccaggtcacctttgtcaccttttttaatctgcatcgggaatggcaaacaggtttcgttttatgtaaaccaagtccatgccattgacaatggttgcatagagaattctattttatttatttattccagagtcttactctgtcacccaggctggagcgcactgccgcgatcatggctcactgtagcttctacctccagggctcaaacagtcctcctgcctcaatttctgagtagctgggactacacgcatgcacccccatgcccagctaattttgtttgctttttgtagagacaggtctcactatgttgcccaagctggtccccaactcctgggctccaaggatcctcccacttcggcctcccaaggtgctggggtggcaggtgtgagccaccgtgcctcgccttgcatggagaattctgaaagcctgcccatgttcaaaggaaaaagagtcctgtgatcatagtggtttttgccataggcaaaagaaggaaaagtgccagaatgaatgtgacatatttttcatccagattataataattatttagacctgtgatgtccagtacggaagtccctagccacacaatgggttatttcaaattccgatttaccacgacgaaaaactagggctggaccgccgctgcttcacgcctgtaatcccagcatcttgggaggcgaagacggtgggatcacggtcaggagtcaagaccgctggcatat

SEQ ID NO: 202153 - DNA, 328 bp, Homo sapiens
attcacagaccaagcaaaaaagcacatcttttccagaaaaaatcacagcagcctcaaaaacaacatacaagaccacaggaaccccagaagagtcagaaaaaactgaagattccagaacaacagttgcctcagacaagctcctgacaaaaactacaaaaaacatacaagagaccatatcagccaatgagctcacacaatctctagcagagcctacagaacatggaggaaggacagccaatgagaacaacacaccatccccagcagagcctacagaaaatagagaaaggacagccaatgagaacaccacactatccccagcagagcctac

SEQ ID NO: 202154 - DNA, 561 bp, Homo sapiens
tcaaaggctaataatattccctgaattggcatggatatggggactgaatagctataaatctgttattctactcagccactatatcctggaaaacagctttattcacattgacctgtaagggagtaaattgataaaatattactgaatagcaatcatactgcaatttggtaatatgtttcccaaatcttaagtatatgttgaagagtatttggctgaggaattatggctctaaaattttattctaaagaaatacttaaagtaattctattaatgtacaagattatatattaaatatatagggatactgattgcagcattgttaataaataaattgggagctgcttaaatgtccaacaacaggagattggtaaagtgcattatattgcagctacacaagttgatcctgtgcagctctgttatatgttcatgaggcccctgaattgatggcaacttgcacattgtggtcacacaaacagacgcagactgatgttttttcaccaaattgctgtaacaaaaattatgcctaagaatatattaagttcagaatgtactgagtagaaa

SEQ ID NO: 202155 - DNA, 440 bp, Homo sapiens
gatgggaggatcgcttgagcccaggagtttgagaccagtctgggcaacatggcaaaaccccgtctttgcaaaaaatacaaaagttagccaggtgtggtggcgcatgcctatagtcctagctattagggaggctgaggtcagaggatcacttgagcccaggagatcgaggctgcagagagcctagatcacaccaccaatctccaacctgggtaacagagcgagaccctgtctcaaaaaaaaaataaaaaaatcaataccactgtcttggtatactaattctaataattctaattctaatactaattctaataatagctataaaagtgctaagcacatttaatgaattctttcatttaatctgtatgttacacatcaggtatgtagtagcattcccactttacagataagaaagtttaggcttagacagttaaaaaaaaaaa

SEQ ID NO: 202156 - DNA, 654 bp, Homo sapiens
aagaaagttctggatgaagggaaatcacaccagatagaaattctgattcccaaaaagaaataaagaaataaagagcatttagaaatcattgggcaaattaaaatttgtttttaaaagtttgcttttatctttatttttttttcctctttttcttttttgagacaggtttttctctgtcatcttggctggagtgcagtggcacaatctcggctcactgcaacctctgaccctgggttcaagtgatcctcccacctcagccacccaagtagctgggaccacgggcatgcaccaacaggcctaggtatttttttttaagttttagtagagacagggtttaaccatgttggctaggctggtcttgaactcctgagctcaagcgatgcacctgtcttggtctcccaaagtcctgggattgcagacatgagccaccacgcctggccatcttacttcttttcttataaacaggtctctctatcccaaagcctgatgtgatttccttactggagcaagggaaagagtcctgcatggtttcaagggacgtaccaggaggatggtgcccaggtgagtaaggactgagcagatggggaaggcactgctgtttagaacccagcccatcagggaggcagcaccatataggtattggttgaggaatct

SEQ ID NO: 202157 - DNA, 305 bp, Homo sapiens
caatttgggcgttgtcagcatatatatggaatttaaatgaaggtggatgaaagcctatagagggtgataaggagttaaatacattttgacaactcatgccacaaataaaatgttctttagtacttgaaaagaaaatatcaggccgagtcatgtgtcagccaaatatggctgtgcccaggcgagttgagcaaaggcttcagtgagcccgggcatggctgaagacgacctggggaggcaccaaccagctgctgggagaagagcataaggctcaagatggaaaatcataaatctaatactatcaagga

SEQ ID NO: 202158 - DNA, 427 bp, Homo sapiens
ccccaaatggaatccaaacgcagtaattacttgatattttgagaaatgggttgggaaagtctggagcatgtggcacaacctagggagggttttgctatgttgataacctcagcaaaggtgactgggaagatgcacacagccagggaaagaaagcctcagggcaattaaaatctgcttaagcagaccactgaaagaaaaaagtgaccattaggccaagatatgaagttttagagatctttcatttaattcacagttttgcctgagacaggcccagattccttccttcctgggatatgagtcttctctttcttttccattttaatgcaatatcacttctgtcatatgtcagtagtaccagggattccattgggggggataactctagagacgaactaacaggcatgtcagcgtgcactgccgtcatctt

SEQ ID NO: 202159 - DNA, 323 bp, Homo sapiens
caggcagatcacttgagcttaggagttcaagagcagtctgggcaacgtggcgaaaccccatctctaccaaaaatccaaaaaattgtctgggtgtggtggcgtgcacctgtagtcccagctgttgggtggctgaggtgggaggatcggttgagcctgggaaatggaagttgcagtgagtagagatcatgccattgcactatagcgtgggtgacagagtgagactccatctctctcttttttttttcttaatttataaaaaaaggtgtttggatagttattttccttatatccagtgtaagaatcattacaaggtctggctgtgt

SEQ ID NO: 202160 - DNA, 589 bp, Homo sapiens
ggcatgtgaaaagagacacggtgcaaagagaaccacatagagcacagaagaggactactctcaatggtgtcacgttctgaagtggccctgcctgggctgggagcagtgaagtgtgcctctcatcagattaccacatgaatcacccagacaacccacagggacctttagcttaggacagcgtacagtaggttttccaactgtcatctcctgtgaataatttaagagtacacttaaatggaaatctttctatgaggtaatttgtacacacgaataatgaaagcttatctcaatatcaaaagtaaatactttgagccagatatttataattaaaaaaacaaaacaaccaaacggtattacccccaggaccacagcaaacacattccccatagtacattaaatccttcttcctttatccacctttccacccaccaaggaatgaaacaagtgattgtactctagaaagaagtcatggaaggcaaaacgcagctaattacctaatcagcgccggccccgttttcaggttgccctcaactaccactgctttaaaacttaaaagaaggaaaagcactgacttctcattaaaccctgg

SEQ ID NO: 202161 - DNA, 297 bp, Homo sapiens
tcttagatttccaccatgacaagggcccacacacttgatttcgaggtggtttttccaggggtgctgacaggtgtacctggaggatggcatggggactggtatggacagcctccatgggtaaaggggggccagagtctcctccatcctgtattcctgccattctcaccaggcttctgagctgaggagaaccttccttggcctggcagagctggccagggctgtggggagggcagggtagggcagttcctcctcccaaaggaaggcactcccttagctcctcttccttctaattctcag

SEQ ID NO: 202162 - DNA, 183 bp, Homo sapiens
gggacccctgtcttagaagattattctgacagcaatgtgcagagtggattataaggggacaagaatgtaaatgaggaaacaagtcaatccccttacaaggatccaagtgagaaatgatgatggcttcaaccaagttagcaatggagatggggaggaatggggcagatccaaatgagacaaaaa

SEQ ID NO: 202163 - DNA, 813 bp, Homo sapiens
ggaaggaggctgacagaggttggaagggattgtcagggagggacatcatgtaagcaagtactaacaacataacgtgacgagggcaccagttgctttccttctgtgggcggtgatggcatgttatactgtaggtactattgttgtaggatttctcacagttcgtttgccttgactaaatggtaactgcacacatactatactataaatggactcctctagtcctttaactccttgagggctgtgatagaccttatttaactttgtaccctctttgccagtggtcttaacatagtgcaggcacggtatgtgtttgaattgggtaaattacttttactgcctagtggtagctggtgtacacaggagagggccaccaactctggggacttgtccaaaatgacaattcacttgcagatctctgatgaaatttactttaaaaggatttctaaccttttttttaatctgtcggttattttttgaaaagaagtggggcttaactagtgctctaaggattttaacaagagattccgatttagaaatctgtccccccttttggtgaaattcttattttttttagagtcagaatcttcactgttgcccagttgtctccccgggacccaagccgtcttcccacctcagcctcccacagtactggaattacaggcgtgagccaccccacccagctggtgaaattattaaaattgtagtgaaaactctgcctccattgtgaaattggaaaaaaattagaaattttagaaaaaagtacgccctttggagctaggtagagttcacatccccacatttccattgagtagt

SEQ ID NO: 202164 - DNA, 473 bp, Homo sapiens
tcacgaatgtgtgttgagcatttccttggaggaagtagagtatagtggtaggacctcagaggtttgagtctagtcctgatgtggccacttctcatgtgaaattcagcaagttgcagtctttccctcagtacatctttcttcatctgtaaattaaaagtggggtttgttccctctatttaacaaacttctgattactcctgggtaatttgtcttattttaaaaatttttactggagcatatcaaatatatagtaaagacacatattctgagtgtagcacttggttaatattttgtaagtgaacatatctatgtgaccaccaccaagatgataatatagaacatttccagcatcccacaaaccattctgtgtcccccggtcattatcctcgcaaaggttactactcatctatcatcagagattggttttgcttgtttctgagatttataaaaataaaatcttataaactgtacta

SEQ ID NO: 202165 - DNA, 429 bp, Homo sapiens
  misc_feature (39)..(39): n is a, c, g, or t
  misc_feature (73)..(73): n is a, c, g, or t
  misc_feature (410)..(410): n is a, c, g, or t
tggtgccactaacaacatcagtaccaaatctgaagttgntgaaacatatgcactgcctgcaacgaagatcagncgtgtagagacacatgcaaagtaaaaaaggtaaaaatcatgtaatcctgaatttaaattggaagtatcaatataatctcatgaggtagtttattatgtgtgtatacacacacacatatacatatatacatattatattagttggctttggctgctataactaaataccatagactgggtggcttaaacaggagaaatttatttcaggagccaggtgtggtggctcacacttgtaatcccagtactttgggaagccaaggcaggatgatcgcttgaagccaggaatttgagaccagcctgggcgacagagcaagactccatctccaaaaaaaaaaaangcaccagccggggaatccc

SEQ ID NO: 202166 - DNA, 496 bp, Homo sapiens
ggttgcggtgagccgagattgtgccactgcactccagcctgggcaacagagcaagactctgcctcaaagcaaaaaaaaaaagaaaagaaaagaaaaaaggaatagcccagtattgtttgtttggggaggggcagggtgtggttccaccaactgtgggcaccagaatggtgctttctttgatactatgctaagaggaagaggtttgagagccaagagttctttatttggatattggtatgtttgacttgttcatcagtgagtatttattgatctctaattattgatctcaaaatactgtattagctactatggaattccgttttcaagttgcttatagtcttgaggagagataagatgtatatatatttaaaaggaagaaaacagtaagtgacatgaaaggcataatgacaaccacagagcagatgctcaaatatttatttgcctactaaatgtttgttctcatctatcgataaagtgcttaagaagttggcctgtt

SEQ ID NO: 202167 - DNA, 750 bp, Homo sapiens
agtatttcattgggattacagggaaaaaaaatctatatataactgaagagggaggagaaatacattccaagcttactttatttaaggaggtaaaagagaaagaatgtatgtggcttagggaaaccagtttagcaaaagcggtcagtcagtaatgagagaggttaggattggcctgcggatattaaatttggatactattctttctataatcttagagagccactgaaaatttttagggaaaaattaatttatgaagaccacagggcctgaagtaaagaatcaggtagcaatgcaaaagacatatgagtagggagattctggaggcagaaaggctgaatgaggcctctgttataattactgaagctcaaggcggcagaaacgggaagaaaggaatggatatttaaaaagcaaaaattttaaagtctacatctagttttgcaactacatagaacatgaggaagaaattagagatatttaggattctacagttacaagcatgggaaaacggtgtactactaatccaaggaagtctgataagtatggctttagacatgttgagtctgaagaggcaaagagaaataaatccaaatggaaactcagctaagaagcaattaagagacaaaccaaaacccaaaggccagtgtaggacagaaagactaaatagctgtctaagagataaagccaagaatggtggaaaaggcaagtcaaagagcagaggctagaagaatgcacctgcacttaagaaacaag

SEQ ID NO: 202168 - DNA, 614 bp, Homo sapiens
cagggtggggaatgttgcagagatgctgttgacttggggtatgctaagttaggtgtaactatagcaaacacgtgtagacttactgtgttccagacagtgttgtaagcacccttcatgggtaggtgtctctgttatctaaaattgggaactgaatagacttgagtagcaagaggtattaatgatttaaccatcacaacaacctcatgaagtaggtactattattatcatcaacttttaattttagagattaggaagctgagccatggaaaaaggaagtggcccaaggccatataaataagctgcagaggggatttgaacccggtcagccaggctccaggcacttagccactgcactgtactgcttcagtagagcatagaggtctgtgctcaggtctaggctagagctggaaccttctagagtcagtaaatattctgtacagcaccacaagactgacagtcatggctcaatcattgtcttcgcctgtaatcaagaaaggcctggttcctcaagggtggtgcttggagatagagtggttcaggttgtgtcagaagtggcctcggattctgcagtcccccgagctagagtgtgctatgtgttcagagtaggcttcaaa

SEQ ID NO: 202169 - DNA, 844 bp, Homo sapiens
ccccagggagttgtgtggctggccttacagcacggggatgagttcaccaaactgaaagctttccagagcccctagttccaggatttccatggaggcctcatcatggagacatgatcagttatgaactcagcctccagcccctctgccctttttggagggtgggggtggggccgaaaggtccaggcttctcatcgtggcttggtctttatgatgaccagccccctcccaaggccatccaggagcccaccaagaggtgcctcattagaacagaagactctcctgtcacctgggaagtccaagggatttaggagctctgtgtcaggcacccctatcgcccctgtcactcaggaaattaccagcgttctgagagctctgtgtcaggagccaggagcaggggccaagtgtgttcttctcattctatcggtgccacagccagggccgcggttgtgcagccgtgtggatcagctcagcccgtcctcacccagccgtgtgaggaggccgaggccacacaggtggatggccttcccttagagttactttccagagcctgggtgcttagccgctatgccccatgtttaatattcttgtgttccaatgtaacaactttaaaattacacaggataacactcttgataacattttaataaatgggtgtttttcttttcaagaaattttgacttgcacttcagatttcctttttaatattttcgttgagcggaaccttgctattccataagaggatgtgtccagtgttgtggaagatttcatgttttaaatcctttgtacagaaatcctgctcccaagtcacagataggctgacgggtcagagggcaagacgtgaccc

SEQ ID NO: 202170 - DNA, 533 bp, Homo sapiens
aaagacattaatttgttcattttctttccaaatcttgaacgatttgttctcttgttccatattgtaaggcaagttaacatttgcctcctatttgtaattgttccataatctcaagttttcattgaatgtttcattgaattcactatatgtttactcttggattttgacattttaattattaggaacatttgatcacatataatcttagtaatgttcaacaataccacactgctcacatttatgcagaatgctgacagaatgacaggcagtgggagccaagattatgtgccgcgtggctgattggtgcaggggaaggcagggtgttcccatgttataatgcagtgtctcttggttactgtgcagttccagacaatacatacctgctgttttagtcagagtttgttggttgcaaagaacagaagcccactcaaattaattaaaaaaaaatcaacagaaaaaccccccaaaccttaaaaatgtagaatctctcagctaatctatatggcactggtagacccatgagggactgtggc

SEQ ID NO: 202171 - DNA, 469 bp, Homo sapiens
agctgctttcacaggctggcattgagtgtctgtggctgcacatgatgcaagctgttgctgggtctaccatcctggggtctgaggacagtggccctcttctcacaactctactaggcaacgccccagtgtggactctgtgtggggctcccatcccacatttcccttccacactgacctagcagagattctccatgagggctctgcccctgcagcaaacttctgcctgagcatccaggcatttccatacatcttttgaaatctaggcagaggttcccaagcctcacttcttgatttctctgcacctgcagacccaacaccatgtgtaagccaccaaggcttggggcttcaccctctgaagcaaaggcctgagctgtacattggccgcttttggccatagctgagatgcagggcaccaagtaccaagactgcacaaagcagcaaggccctgggcccagcatatgcagccatt

SEQ ID NO: 202172 - DNA, 312 bp, Homo sapiens
aggaatccattcaaaagttttggtgttttgttttaagatgcaggtaccattcaaaagatagttaggaaggttgggataatgtacacttccaaatgaaaagacaggttatagtgatccgtggtcaatgcctgatttgtctataattgaactgtgtagcccatttttaaccataaaaaaagcttcctggtttcagccgggtgcggtggctcacgcctgtcatctcagcacttcgggaggctgaggcaggcgaatcatctgaggtcaggagttccagaccagcctggccaacatggcgaaaccctgtctctacta

SEQ ID NO: 202173 - DNA, 383 bp, Homo sapiens
aaaaaatatgagtcaaagaactgagttgggaaggcaatttcctttaaatctacgtttggtagcagccagactttttgcttgaaaaaagtctgcctaagtcttggcatatcttttgatgtgtatgtgttcatatctgtgtgttgcctgttttaattttgttttgttttaaattatggtaaatgatagaaagtttttttctttctttctctttctttttcttttctttctttttttttttttttttttttgagacagaatctcactttattgcccaggtttgagtgcaatggtgagatctcggctcactgcaacctccacctcctgtgttcaagcgattctcctgcctcagcctctcgagtagctgggatcacaggcacgcacca

SEQ ID NO: 202174 - DNA, 318 bp, Homo sapiens
tgtgaactcttctttctattatttgaagcaaaattttaaaaccatattaattaacccaacagttttgagcacatttttgaggggccaaatgcagtgcccgtttcagtgatataaaaatacataaggctttttcctcaagataatcataatctagtggcttaattattcatcctcacattttcttgtgatttaaaaaaaaatattagcatggatacaggtggtagagattttattctcctgtccattctcagcacagcttagatctacacatatacaacttagagcagtgcgacctggcacactccaacagtggtgggg

SEQ ID NO: 202175 - DNA, 230 bp, Homo sapiens
tgctgggattacaggcataagccactgctctcggccttgctggaactttttaaaggaattttggattcgactttttaaaagcttagaaggccagaagccaagccaaggatttgctgctcgactgtgcttgtaacacctgtatgaattcctgtcttctcgagatcccaaaataccatgaggttcctgagcctgttaaaaagtgacattctttacttgccacagatcaggaa

SEQ ID NO: 202176 - DNA, 358 bp, Homo sapiens
ttaatttttagtagagatgaggtctcactatgttgcctaggctggtcttaaattcctggcctcaagtgattcatccactttggcctcccaaaatgctagggttatagacgtgagccagagtttctgtggaattgcaatagaaatcattaacaaaaagataactagaaaaattcccccaaacatttggaaattaagcaacatctaaattacacataggtcaaaggagaaataagggaaattagaaaaacattttggaatgaatgaaagtgtaaacacagtctgttacatttgtggaatgcagctaaagcagtatatagagaggaatttgtacctgcaaaagtttttattagaaaagaga

SEQ ID NO: 202177 - DNA, 262 bp, Homo sapiens
cttgtcccaagtcaagatgatcacctggcttcctcatttcctttcccacacctgagggggcaccaagctctgtcactcaggttggcaaacacaagagtcatcttggatacccccgttggcccagggtgtgaggccttagctcatgagttggtttctctcctataatctgaatccatgctctgttgtcatttgttcgtaacattccagatggctccacactagtcccagccatcctgacagcttgcctatattacgggaatcg

SEQ ID NO: 202178 - DNA, 478 bp, Homo sapiens
aataactggcaaagatgagccatattacagcgcattgcattatctagttcaatgcctctttgtagtcttgttttcttcaacccacaaactcccgcctttcatgttcccccacctctactcaactcccctatccatgttttcttctcactccagttttggttgttcctatcatcgctccttactttgaggacagtgggggaggctgtcttcaaaagtaaggtaaaaaccacttttaatcaaaattaccattaaaagtcccttaaatttcacagaaggtataactctgcacggtaatcacagtatctacaaaaccatttatatgacattcaggatgatgctacttaaagatagtagagcttagagtggagcaactgacaattcagaaagaagacatcggctagctgaatcccttgcctttcttttttccttggaccaaaaaactcaagaaagataatctgcatgacaaaattattaaata

SEQ ID NO: 202179 - DNA, 717 bp, Homo sapiens
gcctggcaactgcctttattattaaaatcacagatcaccactaaatagcttgaagaaaacctgtcctcattagatgttgctagagttgattcaattaaggtacgacttgaatttaaaataatttacatacaagttaaaatttaataacaaaattttaatattagtagaataaggcatatttcatgaagaaaagaagcactttaaatctcacctcctaatacaaccattgataagactacaatattttccttctgtttatttttcctaagaacactttttttttttggagacagagtttcactttgttgcccaggctggagtgcaatggcacaatgtcagctcactgcaacctccgcctcccggattcaagcaattctcctgcctcagcctccagagtagctgagattataggcgtgtgccaccacacccaactaattttgtatttttagtagaaaatggggtttctccatgttgctcaggctggtctcaaactcctgaccagatgatctgcccacctcggcctcccaaagtgctgggattacaggcataagccaccatgccgggcctgtattttaatagctgtaggatggaaaaaaaataaggcaaaacacactaacaggcagagtaaaggaactacccaataattaatgggacaatcaccaagaaattgtaacaaatatacacttgcatacactcaacaacatggcctcaaaatac

SEQ ID NO: 202180 - DNA, 388 bp, Homo sapiens
aagagcagggatacattagtaaatggcgcttggacataaactaaacaacctcacagaatacatgcttcctcccaaaatgatacataatcccctagaagcaaaggaaacccttcggtcaacatgtgtgaatgattctgtatgccaggcacaggggatatatagtgggtggtgtttacttccattgtgccctgcacacagcagaaagttagtgactggaagactggaagctagaaccaggtctgtatccccgctcccatcaggttctcctggcccttcctgcctttgatggtgccaccactctacttcctctgttctgaacatttgttcatttttcaatagagagttgaagaggatgcaggatggcagagaaagggtgggcatggagaag

SEQ ID NO: 202181 - DNA, 1001 bp, Homo sapiens
tttttttgagacagagtctcgctctgtcacccaggctggagtgcaatggcgtggtctcggctcactgcaagctccacctccagggttcaaaggattctcctgtctcagcctctccagtagctgggactgcaggcgcccgccaccactctgggctaatttttgtatttttagtagagatggggtttctccatattggccatgctggtctcgaactcctgacctcgtgatctgcccgccttggcctcccaaagtgttgggattacaggtgtgagccaccgcgcctggccgaggggtgagtttttaaacgtaatttcttcttctctacttttcaggaaagagtttaacaattcacggttgcacagtagcgctagcggctttgcggtttggtcctcagacccggcagccgccactggtgatgagctgctaggaagcccctgtcggcaagctcgttggagcttgaatccactgtcacccctctgactcactggcaaaaaaaaaaaaaaagttgaagcagattgtccagcaaagttcttcattggtgggcttaatacggaaacaaataagaaagctcttgaagcagtatttggctaatatggacgaatagtggaagcactcttgatgaaagagcatgaaaccaacaaatcaagaggatttgcttttgtcacctttgaaagcccagcagatgctaaggatgcagccagagacatgaatggaaagtcattagatggaaaagccatcaaggtggaacaagccaccaaaccatcatttgaaagtggtagacgtggactgcctccacctccaagaagtagaggccctccaaaaggtcttagaggtggaagaggaagaagtggaggaaccaggagacctccctcatggagaagacacatggatgacagtggatactccatgaattttaacatgagttcttccaggggaccactcccagtaaaaagaagaccaccaccaagaagtgggggtcctcctcctaagagttctgcacc

SEQ ID NO: 202182 - DNA, 456 bp, Homo sapiens
agcaacacgtcttaaagcacactttcaagcaaccgtcctttttgaccaccaccactgaagttaccagatcatttacctttataccacccctccagcattttatctccatttctttctttctttcttttttttttttttttggagacatggtcttgctctgtcgcccaggctgaaatgcagtggcgtgatcatggttcactgcaacctcgacctcggggctcaaatgatcctcccaactcagtctcccaagtagctaggaccacaggcatgtgacataatgccctgctaatttttattttaagtagagatggggttttgctatgttgcccaggctggtcctgaattcctgggctcaagcaattcacccacctcagcctcccaaagtactgggattacaggcttgagccattgtgcccagcctaccaccattttaaagattctcctgtgaaaaaaaaa

SEQ ID NO: 202183 - DNA, 517 bp, Homo sapiens
acaaaaaattaaagtaaaagaaaaacaaaaccttctctttcctttctgcctcttcaacctctatccatccaccactgaaaaactctagtctaactgcctgcatgaagccctcacagaccacttcagcctaaactaatcccagtaaactgtaacctgtcatttcaacatacactattagcataacaacagacctcctagggcagtcattttagtcaatggtattttcacccaagaatagtaaatttttcataaggctaaattattcaacatgaaaaacccctttaatctgagatgatgccctttctcttacctgtttttgttttgtttcgttttgttttgtctttaagacagagtcgcagccagtcatggcactttgggagttcgagaccagcctgagtgacatagtgagacctcgactttactagaaatcaaaaatattacccacaaacggtggtgcacacctgtagtcatgttggtcaggctggtcttgaactccagacgttaagtgatcttccta

SEQ ID NO: 202184 - DNA, 744 bp, Homo sapiens
gaacagaaaaagaagaaatcttcctaaattcatttatgcagctagaatatgaccttgataacaaaaccaggaaagaaaatgtcgggtcagttttactcatggatctattaactaatccaataatactgaaaatatataaaaccaccacgctggattcttcccagaaatgtaaggatggttttaaattagagcatctattgttatcatttaccatctaaagtatggaaggagaaaaaccaaatatataatatcaataggtgcagagaaaatattccgtactaatcacaattcttaaggaagtaagaggagaaggagaagcagggggagaggataggagaggaggagaggaaaaaaggaaggaaattacagacccacatctaacataaacacagacgcaaaattgctgacaaaatattagcaaataaagcaatatataaaaaggacaattcaaatcaaccaagtgggactttgagtgagaaaaagtatttgacaaaattctcaacctagaaatacaaatttccccaatccaatgaaaagcatctacaaaacaccctgagttaatattttacttacttaatggtaaaatactaaatactttgccactaaaatcagaaacaaagccaggatgtctactctcatcactggtattcaacatgatactggaaatcctaattagtgcagtaaggcaagaaaagactggaaaagaagtaagactgtttctattaatgggcttcatgatattta

SEQ ID NO: 202185 - DNA, 290 bp, Homo sapiens
gatggctttttgaaggagagggcactgacatagggtttgacagaggaagatgcagaggatgattccccagaataaatgaagagtgggtgggaaacactgggtgtgactgaaacactgagggcggagtagtgtggccggcaagacaatttgaggtcacactgccaggtgacagcctaaaggcccaggatgtggccttacttcagttagccatggggagccatagcgagcagaactgactgattccaaaggcggcagcagctctactgtgcttggccagttcaggactgtgg

SEQ ID NO: 202186 - DNA, 352 bp, Homo sapiens
gcatgctgcacctaaattcgtcacagtaacatgattttcatgctggaaatgaacctgtgcatgtctcccaatttcctgactatggaggagtaaaatatatgttgctgcttatcagttttttaaatgaattacctttccataaccacttattttacttgaaagtgacacaaagtctataacatagtagatacggttacaatatgcctgttacattttatagtgacagctgtataacttttaaaaagtgaaatgtaaatgtgtcccttcaggtcaacttcttatagaaatgtttatggtataattttattcaaagagaaatatgagacagattttttggagtggacacacaatt

SEQ ID NO: 202187 - DNA, 464 bp, Homo sapiens
gtgtggaggaacagttattggacttggtcttgaataaggagtagcactatagttgcaaacttatgggccttgggctgaattcagcctgcagatatgtttaattcagccagcatatggttttacatttgttgaaatccattaccactatctaagaatgtggagactttgcttagaaatctggaattctaggctgggcatggtggctcacacctgtaatcccagcactttgggaggctgaggcgggcggatcacgaggtcaggagtttgagaccagcctggtccgcatggtgaaaccacagctctaccaaaaatacaaaaattagctgggcttggtggcacgcacctgtaattccagctactcaggaggctgaagtaggagaatcacttgaccccaggaggcagaggttgcagtgagccgagattgtgccactgcactctagcctgggcaacagagcaagactgtg

SEQ ID NO: 202188 - DNA, 568 bp, Homo sapiens
ttatgtgtcccacacattgtcagccacatagtaggcagtcagtatcaactactcaaaatgacaaatgacaaatgaccagaattttgtggcagactagtttagccatgaaaaatcatttaacacccgtgggcctcagttttcttgtgcctattcaataaagcgccgagtagatggtatctacagtcatttttcatctgtaaaccccaatgaatccccaaaattcagcctgagatgagctggactagttgccaaatctatagatatatttagcatggtgtgagatagggtttttagagagaaacagacacccactgtgaactcctttgcagaaaacgtctgaatagaggggaaagtagggatggtatctcaaacttacttcgtagtgattttaaattaggaaatttagcttcacattcttgtgataaatttcttttcaccttggtttctagaagattattcaaaacatctgtgagactatttgagaagtatacttttgaggaatttcccccaagttatccttacagattatattttgacaccaactgcaaatgtaatatcttttgctcaa

SEQ ID NO: 202189 - DNA, 394 bp, Homo sapiens
gaccaccactagcacctaggtatcgaggacccctagactgacctaccaacctgttctaacaccacgacactgaagaagactcccctcctgaggaaccctcaactgcagatccccttctgtgccccagttcagcaggaagtagctagaatgatcattgcccaacttctcaacagcacttgggctttcctgttgagagggggtactgaggcactaagtggctaagttagctagacttcctgggtcaacagggacttccctaaggggacattcctctaagccaaaatgagtcatagctgcaagctaagggattgaaacttcaaccaatcaaaggggactttctcctaagcaaaaatgagtcactgctgcaaactaagtgattgaaacttcacccaat

SEQ ID NO: 202190 - DNA, 413 bp, Homo sapiens
ctggtgattggaggagaaagcaagccatctattggtgaggcctcgaaaggtttttctgggggagaagagtagaaggagttgtaactatccctttgcttccttttttctacagcagaaacatgccagcgtctttttttaatggaagatcatctatgaaaatcagaaaatggaagaggaccttctacaatgctactcaaagccaggaaatatttttagcatagttaataacagatcgagggataagacagttgagaaattcattctcaaaagtataaaaggcgtgactgtgagaccggtatttccttccttcattcatttaaacaatatttactgagtgcctacagattactaaacactgctctaggaggtagggaaacatctatgaataaaacagttagaaatccctgtcaaaa

SEQ ID NO: 202191 - DNA, 413 bp, Homo sapiens
agtctcaatcctgaaaatggttgtttgttctgtgaagagtgtatgtgtgcacagttagctcaccatttggacaatcaacagaagaatctggcatgtgtggttcaccctgtggtgcttcctgaactctctttaagctcctacaaagtgtactccaggttgaatgacccggacttggagaattgttcttctgggaggtgtggcggatcccactgtgagaaagaacctgcaggaaggggccaaggcttcctgaaaggtacgtgaaaattgtctgtaattaagtggttgttggccgggcatggtggttcatgcctgtcatcccagcactttcagaagctgaggcgagtggatcacttgagcccaggagtttgagaccagcctgggcaacatggcgaaagcccatctcaaaaaaaaaa

SEQ ID NO: 202192 - DNA, 239 bp, Homo sapiens
atcgcagttcagagaggtagcttgctgactttgtccagagctcacttctactagactaaattctaaattatcagtgctaaagtgagaactcgaagggacctcagaaatctcctaatggagtgtttccctaaccaacctgataaactttctggggtatacattaaaaacacattcccaggacccactgcagacctactaaataagttataggagagaagtttagtattttaacaagagcc

SEQ ID NO: 202193 - DNA, 314 bp, Homo sapiens
acatctttttaaaaaagactcatctaatgcagaaaattataaagacatctttttaaaaaaagactcatctaatactggctgaaggaattacaaggcaactaaaggatacttttcagattggtcttaatggtttgctaatttcaagaatattatcagccagccgtggtggctcacatctgtaatcccaacactttgggagcgtgaagtgggaggatcacttgaactcaggaggtgaaggttgcagtaagctgagattgtgccactgcacccaagcctgggttaacagagcaagactccatcacaaaaaaaaaaaa

SEQ ID NO: 202194 - DNA, 411 bp, Homo sapiens
ctaaatgtggggaaaacgctatgtaacttgatctaattaaaaaagaacttttaagtattcacttaagattattctaaaaattaccctaaaatatgtaagctcagttaataatgggttagccaaaaaggatttctgtagaagaggttaaccaatcatattcaagacatcttactgttttacaaatccgaatgcgtgtaattccaagagaactcaatagagctagtttttgtattcctgggactaaaaaattatctaaaactccttgactctgggatgtcaagtttcttctggcctcttagggctgccaagatccctgttttccgtataaattgaagcccaaaactccttggtaaaccattctggaagggactgatacaggcttggaataatgtatattagcatggctgccac

SEQ ID NO: 202195 - DNA, 253 bp, Homo sapiens
atttgagtatcatttctagatatgtatggtagtatgaacaaaaggaaagggaagaacatgaatttggggcaggaaaagattattttgggttttcttagtaaatggaggactgtaaataagctgggataagattacagaagacctggaaagcagatgaggaagtttggcctgtatttttgtcaggaagattttgtttttggcagtttttgagtattatgattgaggatcaaggtggattaggaaaagttgttga

SEQ ID NO: 202196 - DNA, 288 bp, Homo sapiens
acgtattgtaaattatgtatcagattaaaataataggatgtttttgccagaaaggaccttaaagaaaatttagtttggccccttcattttacagatgacaatgaatccgaaaagtgacctgatttgctccaggacactcaacataggaaaggacaaacagtgggtagaatgagagatcttttagctgccagtttggggatttttttttttccacagcagaattttctttttttctgagacatacagaattacggtggactgtaaacttctttttatttatttattatt

SEQ ID NO: 202197 - DNA, 433 bp, Homo sapiens
gctgcggtgggcggatcactcaaggtcaggagttcaagaccagcctggccagcgtggcgaaaccccgtctctgctaaacgtataaaaattagctgggcgtggtggcgcgtgcctgtaatcccagctacttgggaggctggggcgcgagaatcgctggaacacggaggcagaggtggcaatgagctgagattgcaccactgcattctagcctgggcgacagagtgtgactctgtctcaaaacaaacaaaatacctgagataatatccactcacttattgagttgttttgataatgaagtgagaaatgcagatcattgtttaatattgtgcattttttagagacagggtcttaccccatcaccagattggagtccttccatttctttgctccaccagattctccatacatttctcagtgtaggtttcccagatca

SEQ ID NO: 202198 - DNA, 445 bp, Homo sapiens
cggtgtttcctttgtctgcagagatgcctttctggtatgggagcagaggtaagccaacccctgaacaataatgagcattcgtttcataaagagacaggttaacgctgggcgtggtggcgcgtgcctgtaatcccagctacttgggaggctggggcgcgagaatcgctggaacacggaggcagaggtggcaatgagctgagattgcaccactgcattctagcctgggcgacagagtgtgactctgtctcaaaacaaacaaaatacctgagataatatccactcacttattgagttgttttgataatgaagtgagaaatgcagatcattgtttaatattgtgcattttttagagacagggtcttaccccatcaccagattggagtccttccatttctttgctccaccagattctccatacatttctcagtgtaggtttcccagatca

SEQ ID NO: 202199 - DNA, 107 bp, Homo sapiens
ttcacctcagcggccgcgggcggaggggcgcacgcgcgcgcagtcccctcggagggcggtggggcgaacagcaacgcgcgtaccctagctcttggctgctgtgctga

SEQ ID NO: 202200 - DNA, 796 bp, Homo sapiens
tttgtatttttagtagagacggtttcaccatgttggccaggctggtcttgaactcgtgacctcaagtcatctgcccttcttggcctcccaaagtgctggaattacaggcatgagccactgcgcccggctgttagcaagcatttttgagttactgctctgtctctggtaccatgctcaactttctgggtacaggggtgaacaagaccctgttctgacatgatttccaacctccaaaggaccaagcgcttgaaatgataagcactgagaacctctcttaagggttaagggcaccacaaactgagataatgtaacaatgtagcaagtcattggtttaatgactttcacttttaagtcattatgacacacacctaggaggactgtgggaaccctgttcatggaggctgagggctcagagaagtaaagggacccttctagacacagcaatggagctgccattcagacccaggccttagtaccatggtcaagccccatgtgccaatggacttggtccttcctgggatccctggccaattacctgcctttggctcatgggtcagggtggatatctctgtcagcctgagccattcttctggttccaattgatgtgctacatgttggggacataaacggaactaaaatactgtcctgctgatctgattttcactgatcaggagtgaaagcagatgtgtaagtaaccgggggtgagataaaggctgtagagcaccaggccctgtgatggaccgaggaggagcttaaccccagagggatcaggaaaagcttcctggagccttcattt

SEQ ID NO: 202201 - DNA, 1187 bp, Homo sapiens
  misc_feature (14)..(14): n is a, c, g, or t
  misc_feature (29)..(29): n is a, c, g, or t
  misc_feature (82)..(82): n is a, c, g, or t
agcgggcaggcggngaccggtcagctgancctggtggcggaaaggctgcggccccgcgccagagggccggtggctcctccgnggcttctgaggacccgcagggagcgggcctcatcatttctgtctcctgtttctccacttccttctctattggttggtccactgatgtatggacttgcacatgatgaactgtgaacttctagccacatgtagtgcccttgggtacttggagggagacacttaccataaggaaccagattgcttagagagcgtgaaggatctgatccgctatttgaggcatgaggatgagacacgagatgtgcggcagcagctgggggcagcccagatcctacagagcgaccttctgcccatcctcacccagcaccaccaggacaagcctctctttgatgctgttatcagactgatggtgaacttgacacaaccagccttgctctgttatggcaatctgcctaaggagcccagctttcggcaccattttttgcaggtgctaacttatttgcaggcctacaaagaggcctttgccagtgagaaggcttttggagtcctcagtgaaaccttgtatgagctgctgcagctgggctgggaggaacggcaggaggaagacaacttgctgattgaacggatcctactgctggtcagaaatattctccatgtcccagctgaccttgatcaggagaagaagattgatgatgacgccagtgcccatgaccagctcctctgggcgattcacctcagcggcctggatgacctgctcctctttctggccagctcgtctgctgaggagcaatggagcctacatgtgctagagattgtctcccttatgtttcgtgaccagaaccccgagcagctggcgggagtagggcagggacgcttagctcaggagcggagtgcagattttgcagaactggaggtattgcgccagcgagagatggcagaaaagaagactcgagccctccagcgaggcaacaggcattctcgatttgggggctcctatattgtccaggggttgaaatccattggggagagggacctcatctttcacaaggctttaaactacgaaactaccgttccgattggaaagcagcgaaaaaggtgctaaagttgcaggcgccgaagctgccatcaggcgttgcctcatggagtctctaaaaattgtctatcggaac

SEQ ID NO: 202202 - DNA, 754 bp, Homo sapiens
acctgcgttctgaaaccagcgtctctggttacaaccaaagaggttgctcagtcacactcctgaaaggcaaaaggaggttggccagtaaaaaagatgtaaaccctagatgtagttcttagtgtggaagccacaggagaacttccaatgtggccacggggatcgccgaggcttttatgcaggtaactgagctgggtgaccagctgcctggttaacagttgggcagaagtgacctattgttgtgctctgtgctgtctacttacagctaccgcatagcaacatggtagagactgtgacgttttgctcggcatcaggtgaaggcattcgggagtaagtttcacaacagaagacaggctcagaagcagatcatccgagtcgggggagagaggcggcgactagtcaggctcccccgaatcccaggctgtgattattatctgcagcctgtgtcacccaggatgaaaggggatggaaaagccgtgcatacccttggtgacaaagccactcctgctcttaaaggctggagcaggacatctgacacaatcccaggtctccatggaggcaggggcatggccggcagctgtagaccacagcctccgggctctggcgtggaggaagaaaaggaaaccagcacagaattttttttttttttgagacggagtctggctctgtccccaggccgaggttgcaccattgtactccagcctgggcagcaagagcaaaactccatctcaaaataaataaatgaataataaataaa

SEQ ID NO: 202203 - DNA, 1714 bp, Homo sapiens
acctgcgttctgaaaccagcgtctctggttacaaccaaagaggttgctcagtcacactcctgaaaggcaaaaggaggttggccagtaaaaaagatgtaaaccctagatgtagttcttagtgtggaagccacaggagaacttccaatgtggccacggggatcgccgaggcttttatgcaggggagttcagcctacacccaggaatgcacaaggacagcttggagcttagaagcaagtggagttggttcatctctttcactggctcataattttgcaacggcggtttcatctctaccctgacaataccttttagttttcttacccactggggtcgagacttaattgaagacctcagacggacagcataacacggaacctgagaccttgatttgcggggacaggcttaaagtgtattctggagttggtgcccccaccccaggggccggctcagagggttcactttccagcctaacggcaggggaaccagaggctgccgacctggatctcaccttgatggaggtcttgtcaccttcctccttggctggagagacagactgtggatgctctcctgctggccacccaaaaacaacaaacagacaaacaaatatgaatgaggaaaacttgaagaggccccacgtgccagaggtgggacagcttgagatttggtgaggataattgcagtggctcaaaacccataaagaagtttaagtccatgagttcaccgtaatctgaaacaaaaacaaaaacaaaaacaaattgatcatctttggaggctaacaatcaattcattatctagagacagacagaggctcactagtggcacgatcttggctgattgcatcttccacctcctgggttcaagagattcttgtgccttagcttcctgagtagctaagattacagatcacaagcaatcaggctgatcccgcctgagccctgagctccctgggacccagcagcagctgtgcattggcacgtggtgccctgtgtctgatcagctgactcctcaggcaaaacctgcaccattttcaccagaattgcagatgtcctcagtgtcattacaaagttcctaagtcatgaccattctgtcctgtgaaccaggctggactaagctcccatttctttaagccatcctgtcccctgcagggacttccaaggtggagctgatgagcaatagttatgagtcattggaggagacatcccagaggcgccagctcccctctgccctaaactgaaattaagacctggtgctctgggtggggcccctggaaggggatgtgcaactcagaggggaccttctccacctccacccaggagaccccagagggaccatggcagagccggagccctctttttttttgttcgttttttattttattattattatactttaagttttagccctcttttaaaaaccaaatgaaaataagcaaaagaagccaatcgtctctgtgaaatgtccagaagagggaactctgtagagacagagaggatattattggctgccggaggctgggaatgggaaggtgaggggcctggggaggtgatggttaaaagattcttctttgtggtgatgaaattgtcttaaaatggactgtggtgatagttgtgcaacttggtgaatatataagttattgaattgtacactttaaatgggtgaattgtatggtgtgtgaaacatatctcaataaagctgttatttgaaaaataaataa

SEQ ID NO: 202204 - DNA, 282 bp, Homo sapiens
agagaaggtgacactttatggttaggggtaagctggaatatcaaagcaatgttaatcataattgtgatggttacttatcaaagtattgctgggttgattctagttgtttgtgtcctaactctggatcttttccttaatgtgacgaagtaactgaaacaacctggtgctacagccgctggagtgcagtggcgcaatctcagctaactgcaacctccacctcccaggtttaagcgattctcccgcctcagcctcctgagtagctgggattacaggcatgcacca

SEQ ID NO: 202205 - DNA, 303 bp, Homo sapiens
  misc_feature (149)..(149): n is a, c, g, or t
  misc_feature (185)..(185): n is a, c, g, or t
  misc_feature (188)..(188): n is a, c, g, or t
tgctaatctttagtaaactgccatgatgtctccaacttaaccactgtcatctaataagagattaccagaacactgagctaagagaacatggaaaactattttccttttttttttttatattttttttgaaaaaaaaaaaccccctttgnacccggggggggtgggaggggcccaatcccaacccnggnaaccccccccccccaatttaaaagagtttccttcgtggtacaccccccagattctgtgtggaccatcaaggacccaccccacacccccaatattatttttgtttttttattaaaa

SEQ ID NO: 202206 - DNA, 371 bp, Homo sapiens
taagcttaatagtggtagcatggttagagaaaggcctaagagaaaggcccttatttttcagatgtgcatactgaagtattgggaatgaaatgttacgtggtctgttaaaatgcttcaggaataaaacaagataaaccaaagatggcaaaatgttaatacctgttaatctatgtgatggggtagaggtattcatagtatttttctctttagttttctgtatgtataaaattcctcataatagaaatttaaaaaaacaaatccacatggtaggcagtaaaaagtaaacttccggccaggcatggtggctcatgcctgtaatctcagcactctgggaggccaaggcgggaggatggcttgagcccaggagttcg

SEQ ID NO: 202207 - DNA, 503 bp, Homo sapiens
attaaatcaaattttaaacatatttgggatataaaataagttttgacatatttttagctggaaggtttacacattcataaacacatatttatgaatatgtacagagagatgtagatctattcacacaaacacatatatacataaggtttctaaaatgtgatatttcccccctggattagaactattaaaaacatatatattttgtgtgcataaaagtcatgctgtttgcagctagagtcacattggcaacccacagaagaagtaatgttttttttctagagttgattgatggtttactgagtaaaagcacagagggttttggggaaaaaaagtcataaaacagaaaataaatatgaactactgtggtatttggcaaccttttatcaactctgctaagccaaaagggcagtctgccaaacctcaaatgtgattgcattgtatccagagtggataaaaatactgtagcaaaataaataagaaagaaatagtatcatcttgatatg

SEQ ID NO: 202208 - DNA, 311 bp, Homo sapiens
gctcttacttgtctttcaaatctcagcttaatgtcaccacttccctgaccacccagtctaaagcagccacccagccatgttccaataactcatcctcattaattatcgcataccacataattatttccgacagttacttgctttttgttttttttaattgctccctgcctccaatattataatgtagcttcctgagaatgggaaccctgactgtcttatttcattgctctttcactaggaccctagaacagggcctgacaaatagtagatgctcaacgatgttttttgaatgaatgaagcaaaagcagaac

SEQ ID NO: 202209 - DNA, 629 bp, Homo sapiens
gtcctctccctgaactatgcaaacaatggtaaacttagcaatgacaagctagaatcttccagagtttatttattaatttgcttctgctgttgtatattaggtatacaacttaggtgatgtgtgaaaaagcccattaactttagtgagccttcatatgctgacgacagatatattttatattggtccctgggggaatgttaatgtgagctattgtctatgtctaaaggaaaacaaccactcaggatattagctagtggatacaactgtgcttgcataaagtatcctaaacatccatgtccttcaactcagagtgaatgtggccattgataagtggcacctaggaaagtagagtcatttttttttaaatttgggttttaaattaaagtaacatatagtttaaaaggccaaatggtgctaaaagacttataaccaaaaccagccatctcctgtgaccctgccccctactctcagtttcaactgttttgggtattctaagtaatatgtatgtacttctctctgggttcattcatgttagacattatctgtgtactttttattttcttatgctttcccttcctctttctccctaatcccttcagaatagctatatcataaatttttattaaatc

SEQ ID NO: 202210 - DNA, 410 bp, Homo sapiens
caggtgaggaaactgagacctcatgagactaatatgacaaatgtcctacaatgaataagcagcagatttgaacccagatctgtccagctcaaaacacccaatctcttctgcaaatgagaaaatctgattcaccaaactgtaatacacttgcccctgtcttaaaattattgtcaggctacagaaaggaacctcgctactctggtgggaggtaggggtactcctggggagtggaagggtcgggaaggcttcacagaacaacgtttgtctgagcctcttgaaccagaatgtggtcccatcacaggctacaagtagagggaggggcaaggcaggcagaggggtcacccagagacatgggcacatgggtctggccaacatctctcagccacactggagttcctgcctcttatgtc

SEQ ID NO: 202211 - DNA, 371 bp, Homo sapiens
agttcatgtttagctctttaatcctaaaaatatttgttgttcatatttgggactataatatggaaactattcttattggagctttgaggtagagaactaattttattttatatttctctgaattgccaatagtctcagcattgtttattaaacagtttatttttctccattatttttttcatttcacttttgtcatatgccaagaactcatatttgaataggtttgttttggggggggtcctacttggttcagttcatctatttctgtgccaataatgtaaaattttatttctttcaggttcgtaataattattgatctacctgatagggcaagtcttatctacctattataatttctctgttacagattc

SEQ ID NO: 202212 - DNA, 204 bp, Homo sapiens
tcctgcttaacctgaacaaaatgtcatagttacctcctagcctgttgctagaccaaggagagtcacttgaataatgaacaagactggagggaaaccacatggataatttatcattacactatcatcacatacatggaactcatcaatgaagcttacgaaaaaaattgagtcatttgtggaaaagtgtaaagagaatataggaga

SEQ ID NO: 202213 - DNA, 157 bp, Homo sapiens
tgctgggattacaggcgtgagccactgtgcccggctgcatttctgtaattactaatggtgttgaatatcttctcatgtgattggtgggcatttgtgtatcttttctgaagaaatatttattcaagcccttttcaggcatccatatgttttatgatgc

SEQ ID NO: 202214 - DNA, 231 bp, Homo sapiens
tccctggtgtcccagttctacttttatatacctgcttgtcattaagaaagctctacttttcaagaatgctggaaagagcagctttcccccgctataaactcatagccaaccttcacttatatgagaacatgcagagcatagtttcatctcctttgaaatactgtaataagagttttagatgtatttgattcaacgtgcagaatgtttattttttgtgtgcgtgtatgtgtg

SEQ ID NO: 202215 - DNA, 545 bp, Homo sapiens
ttttttttgtagcgatgggcttttgccatgttgcccaggctggccttgaactcctggcctcaggcaatcttcttgcatcagcctcccaaagtgctgggattacaggtgtgtcctgctgtgcctggctcagtctttatgcctttgcacacacttcccctgcccaactccctctttattgtctgattacttcctcgtcttcctttaggagccagctcaggtatgacctgagaattaggtttcagaatcaccctttacccttcagtgttgatttactgctccagctttctgttcacataatactatgtgctttactcttactctcacactgttttgtagtcctgtcttcactagtcttttccattaaagactgagtttcatgaaggcagaaactgtctccctctctgtatccctagttcagtatgcccaataaatgtttgatgaatgaggccaggcacggtggcccacgcctgtaatcccagcactttggggggcagaggtgggcagatcacaaggtcaggagatcaagaccatcctggttaacatgg

SEQ ID NO: 202216 - DNA, 464 bp, Homo sapiens
gctcttatgagaacttagaacaaaacaagctgactgagtttgggggtttggaggagagttccctgaggaaatgacatttaaatagaaatccaaagggtgagttggagcttattaggcaagtacaggattaggggaggtgacttcttgtagatgggcaaaatggcatgtacaacagcactgtggcaatggggagcacaaggggagtggatgacactgggcctgaggggcaggctggcgtcatatatgaaggctttgtcacccatggtcaggggtttggccttgattgccaaagctatgggaagcctgtgaaaatgtgaagaagggatataacatcagcttgcttcaccaattgattcttctctgatttaacttatttgcacattttacacattttaattcaaaaatctaaaatataaaaagccatactgtgaaaaatatatttcccgtcccttccctccatccat

SEQ ID NO: 202217 - DNA, 347 bp, Homo sapiens
ctgtcacttcgggagaagattatttactactaagagtgatgaagtgctaataaagtaggcattaaaaggaaaggtgttggagcagagattagcttttgaaagagtggtaggagagtaaccacctagtggtagggagttttgaaaaatatttaccctctttttccaatgccccagggagtgagagaatgagcttcacccacttgagtgtggtatacttggcagagaaccagagctgttgaagaggaggttcagagaacattcagtgaagaggtcagggtgtggatagttttgtttataattctagcagattccatgcagcatgatggatgatgtgcatggcaggtctt

SEQ ID NO: 202218 - DNA, 366 bp, Homo sapiens
gccaatgtggaccaaatggggggatgggggatactcaaggaaaatttagggcaccatttcttgaaaaatgtagagtaaatagtgaacgcattataataacatcccagctggccctatgattgttattacaaagcattttgaagacagaaggaaatatgagtgaccacttctgagcttcccttgtcctctgtgagtcttaagaacaggagcaaatgtcatctcgcattagcttaaatttcttaatagagtttactttttaaaaagatattttaaaacaatacactcctttttcaaaacatcattattttcaaatcatgtagacatgtatcagaactctcttaaacagactgccatagacaggctgta

SEQ ID NO: 202219 - DNA, 446 bp, Homo sapiens
ggcgtggtggcagacacctgtagtcccagctactcaggaggctgaggcaggagaatggcgtgaacctgggaggcggagcttgcagtgagcctagattgcaccactgcactccagctgggcgaccgagtgagactccgtctcaaaaaaaaaaaaaagaaaagaaaagaaatcaatcccaggcatggagaactccaaagcccaggccttactgtactgctagtgacttttgattgaaacttcatttaatcctcgcaagcctgtgaggtaggtgtttattattcccattttatatgtggggaaagtgagagtaccagaatttctatcaaaatctgtcccaggtcaaatccgtgaatttaaacgccatgctaagctaattttcacagccactttctacttgcccttctgttttttagttttttgtggtggttgttgtgtgtgtgtatatg

SEQ ID NO: 202220 - DNA, 662 bp, Homo sapiens
ataagttcaaggaaaaaaacaatttgaaatacatgacagagactgttgtttgaatggtaatggtgagtgcagattgctgtggtgtttaaattcctttggctatatttaaaggaatttttgactattttattttaaaatgtcaacacttaatgtcctgggaatcttatcctttgtaacattttaaatgtataagaaatgagatgttatctttgaaatatgtgaaggggtttatgggcttttagcaatcttttatgggaggcagaaacaaaatttgaagagcgaaacagactgtggaagactgtgctaagggcaaggaatccacctgggctaggagaagtgatgtttggctgattgcattatataagaaaatgctggccaggcgcagtggctctcgcctgtaatcccagcacttcgggaggccgaggcgggcagatcacgaggtcaggacattgagaccatcctggccaacatggtgaaaccccgtctctactaaaaatacaaagattcgctggacgtggtggtgtgcgcttgtaatcctagctacttgggaggctgaggcaggagaatcgcttgaatctgggaggcggaaggtcgtagtgagccaagatcatgccactgcactccagcctgggagacagagtaagactccatctcaaaaaaaa

SEQ ID NO: 202221 - DNA, 530 bp, Homo sapiens
agtcagagcggctggccaaacgctgcctttgtcaccctcaacatcctcaacaaatgcttgtttgagtggctgatgtgcgagctgggagggctttgtttattccagatcgtgcattgaataaatacgtcttgagctaacacagtgccaggcagcgcggggcacagagaggctgaggggacaaggcatggctcggagtcagaacagtctctgtctgaaccctggccctgcctcctgacagctgtgagtcacgctttggtcaaacctttccccttttgtgcctcagtttccccctctataaaaaagaggacagaactgcaacctcgtaggagtgctgtcagcattaaatgaggtggagtgttctggggggctttgcgtggggctttcggagctggtttatggaatagcctggagtcttttgatttttcctccagtccctgcctgccagctgtgcaaggtcaaactactctccctgttctttgactcacagattttcctatcattttcattttcttttcttttttttttttgag

SEQ ID NO: 202222 - DNA, 392 bp, Homo sapiens
gcctcttgggcagtccctagacaactgattgtccctaggcatgcccaatgctggctgatcccatgttggacttgcacttctgctttttctgaccaccccaactccaggggccactcccatttccagggcctgtggtcatctccgaggagtctttaggagactgaaaacagacagcaggaggccgaggcattccctttcctgacctctccctccactccaccgagctcctgggatgactgccctgcaaagcctccctgagcacatggccccctggccgcatcaggactcctggaaggtcaggtcattcgtttttgggttaattctcaactgccttgctttgaataagtgtaaacttcagccagccagtgcaagcacagtgttttcaactgtcc

SEQ ID NO: 202223 - DNA, 468 bp, Homo sapiens
atgtaagtctccccatgtcatcggcctctattctttctaaaaacttttcaagggatgtatttagccttcctacaagagtattttgatttgtttttgaacaggtctttctgaacctgtcccacttttattgatgctttcgctgatgtttgtgaaaggcatctgggaagggcactagccagtcaggcttttaacacctgtctgtgggttcaacaaagaggaattaagcttcttctcaattgcagatgtcgtgttgtattctgggtcccataggagatcttgactgacccaggagtggtcccctccgggaagaaggacgctcagccaccagctgcccccaggtgttcgtccccaggggtagaactcacccactttatgagcaagtctttgtcaaggaaagaagacggcaattgaaattttcattgagctgttagcatttttttcagaaaaccattttgtcccagtgtgtgt

SEQ ID NO: 202224 - DNA, 454 bp, Homo sapiens
gaataaatggcttgagctgcttgaccgaggatacatattgttactttttgattatatgctaaataagggatagattacttgtgagttttccaggaatggggtgagcaattctcagaactgagggttcctcccctttttagaccatatagggtaacttcctgcattgccgtggcatttgtaaactgtcacggtgctggtgggagtgtcttttagcatgctaattcattataattagcatataatgagccatgaggacgatcaaaggtcactctcgccaccatcttggttttggtgggttttggccagcttctttactacaaactgttttatcagcaaggtctttatggcctgtatcctgtgccaacctcctgtctcatcctgtgaaaaagagtgccttaacctcctgggaatgcagcccagtaggtctcagccttattttacccaatctctattc

SEQ ID NO: 202225 - DNA, 590 bp, Homo sapiens
tctttcactcatattatgcttatccacattgtgctgtatataatgtttcacaatattactcaatttatggatataccatagtgtgtgtttatacattggactgttttcagtttttgttattatgtataatgcagctatgaacatttatgtaagagtacaatgtacattctcttggacaaataagagtggaatggctggataatgtactaggtatatgctaaatgttctaagaaactgccaaacaataatcaaagtggttgtaccattttatatgctcaccagcagtgtgtaagagtcccattgtttccatatccttgccaatacttgttatgggcagtcttttccattttgccatcctaataggtatatagtgctatctcattgtggtcttgaattgcatttccctaatgaataatcatgttgagcaccttttcatgtgtgatttttcatctgtatatcttttttggtgaattctgtttatatcttttgccaatttttaaaaattacatttttttcttgagtgtcgagttctttattctgtatacaagacctttatcggatatatggtatacaaatatttgcttccagtg

SEQ ID NO: 202226 - DNA, 399 bp, Homo sapiens
aatgtctgtctcattacgaaagccacactttagatgcacattcctgtagatgttatcgtttccattcctgagttaagtcttctctgtgtagattgctcacttcctactacagatgatgaattgccagaacaccaggcacataccacacagcttgtacagaactacagactcagaacagacagtttggggactgtgttcttctataattattcttcaacctgctggaggtgcctcgctgcacgttccatacccactagtccacccagggggttgctgcaggcagttcagggcaggagccccctgcacccttctagcattccctggccaccagccaaaaaccaggagttgatgcctcaggagtgacacgaccagtgggggacaggagtccgtggatacacg

SEQ ID NO: 202227 - DNA, 426 bp, Homo sapiens
ggatcctccccttccttccaccaaccccacttgggatgtcccaggctggtggtgaactcgttgggcaggtcagtactgtgtttataaagcgtgtcctcagcacaccctgcaaagtgcctggcaaaacataggcatgccacagatacttaaaaaaaatgtttttcctgcttacaaaagtaagtcatgttgatttaataatatcgagaaaacacagaaaagcatacacaaaaagtcactcttcgacttagacgtgattaatatttggtatttgtgtatatgcaaatatgcatgaaagaaaagctgagaaaacatactgcagagtgttttccacgctactaattcctctcctaagacatgatttttaaaaatcgattttatcaaggtctaaattgcatgcaataaaactcagacattttaaggcacata

SEQ ID NO: 202228 - DNA, 1757 bp, Homo sapiens
  misc_feature (850)..(850): n is a, c, g, or t
gatgataggagttaagagaggactatagaaaactgggtctctaagctgatgtgtcaagtcacactgtcctctgcttatcctaagcttaccttgctcaaatttcttttttttttctttttctttgtttttggtttttattttttcttaaatttcaaggatattccttcttttgtaaatgtcacagagtatcatggctctgtcgccgaggctggagtgcaatggtgcagtctcaggtcactgcaacccctgccttccaggttcaagcgattctcctccctcagcctcccaagtagctgggattacaggcacatgccatcatgcccggctaatttttgtatttttggtagagatggggtttcaccatgttggccaggctggtctggaactcctgacctcaggtgatttgcccacctcagcctcccaaagtgctgggattacaggtgtgagccaccgtgcccgtcccaaccaggcttcttaaatgaattctaagatagaaacaacaggagctgccaggactctcttaagggctgaacctaggactgtcacagtgacatttctgccatattctgctggtcacaaggcaagcccaaattcaaaaggagagaaatagacctcttagagtttcctaataaaaggtaatttcattaaaaatacaattcataaattagccctatgtttactactgtcttttcagctctttttttattccatgcattaattgattcgtcaccacttggattgtgccaccaatgtttctatgacatgatctaaaaaaaaaaaaaaaaaaaaaagggctcagtagttttcacttaaaagacaaagaggcccactgagctattacagatgttanttaggattcatttactttaatatggtagaaagaatgctatgataccactttagtgatgaacaaaataagcttaatcacatcctaggagctaagtattctgacattataatctcttctctcagagtcccatcacagcagtcttaggattcaagatctattcttgggaaacattatagaaccagtgtgtcatgtacatacaaatgagggaaaatataatggctttggtaatcctgtagttatctttcttgtcatatactctttttttcatttttaaaaattggggcaaaatttatataacataaagttaaccattctgaagtgtacaatttaatggcatttaatacattcacagtgttgtacgacttttttttttttgaggaaaagcatatttttaggataatgtcaaaacagattaataagatgctaataagatggccagacattcactcagaagtgttttttgttttgttttggtgaaatggtatgagagatatgttgccctacacttaggccactgcattcccgcttaagtgccaggattgtgtcagcaacaggatggcctaaacaatctcagtcttgtctcctgccagccccctaaatcttccagaattgcaagaataggccaggtgtggtggctcacacctgtaatcccaacactttggaaggccaaggcaggcggatcacttgaggccaggagtttgagaccagcctggccaacatggcaaacccccatctctactaaaaatacaaaaattagccaggcaggtgtggtggtgcatgccggtaatctcagtttcttgggaggttcgggtgggatgatcgcttgaacctgggaggcggaggctgcagtgagccgagatcacgccactgcactccagcctgggcgacagaatgaggctttttcttt

SEQ ID NO: 202229 - DNA, 548 bp, Homo sapiens
ggaaggaacattgcatcataggccttgctgagaaattggaatgaatgacagtatttgaataacgctttgctcagttctgtagtttcgattcgaaatgcagacttaaaaagtcgatgaacattcagacatttctctttaaacaagacttccccttctattctttagagttggaaattattctctgcttgggaatagttttcaatatgttccagacattataaatgacttcccttctatttccatgtatttcccatgttgattacagccaggctgatcagagtaaagcaccaggtgtcatagcatcctaatattatatgaatcatgcatttatccattcatctatgcatgtatccagggaaaacagatttttccccctactttatcggttctacagattcagattcctgtatatttaggtaacattccaaggggatagatgtgctcttataaaagactgcttacttcagcaagacagtttctaaaccctttacttttgagcccaattctccaggtattctcgggggcggtgggggctggagggaagcaaa

SEQ ID NO: 202230 - DNA, 635 bp, Homo sapiens
ttggcattgcagcccttgggggaaagggtaaataggaacagccccactggcaggccattttggcagttaccacacatctgagggccttgctagcccagcagtgccatgtctggtgtgcaggaaggcagtgccatgtaagatgacagcaacagggacccagcccaaacccaaccatcacaaggggtggctgagacatggaggattccagataatgagggctggggtggggggttcctggaagatggcccagacacaggaagagacacaagctcatacccccgcctgcatggatattcatatgtaaatgcatttttaaaactggtaaagggtacatcacaagttacattcttaaccattttttaaagtgcacagttcagtgccactaagcatagttacactaagcatattcacacagcatattcacactaagcgtattcacagcgtattcacactaagcatattcacaccgagcatattcacaccgagcatattcacactaagcgtattcacactaagcattttcacactgagcatattcacacaaagcatattcacacaaagcatattcacaccgagcatattacaagcatattcacaccaagcatattcacaccgagcatattcacaccaagcgt

SEQ ID NO: 202231 - DNA, 218 bp, Homo sapiens
agccatttggctctcccatgcctcagtttcttcttctgtaaagtgggtggcatgaaccggctgggctggccttcagcacactgtgcctggcacccggcagatggggaggaagagcaggagatgcggggaggcgcccactcaggcaccagctcatggggctggggagagggctcttctcttttgaattctggagccacttgctcctcagctgccagctc

SEQ ID NO: 202232 - DNA, 298 bp, Homo sapiens
gagctatttcacccttcgcctttgctgtgagcctctctgggtttatcctagctgaaatttgtcaagcttcttaaatttgtatgtccatttctttcttccaatttgagaaagttttgtccattattttttcaaataagctctgtcctcttcctttcttctctttctggaatttcctaaattggacctgtcctaaatcggacaccttgatgtgttccataaatcccttgagctctcttcattttttctctttgctcgtccagttcagtgatttcaaatgatcagttttctaaggtgtctg

SEQ ID NO: 202233 - DNA, 498 bp, Homo sapiens
aaaagaaagaactcatattccacaggtaccagtattcattatttggttaagatacagtttagcaagtggaatttgccgctagggtccaccctgtaagacacatcctttgtgagtaaatgacctggacctgcaaatgggagtgggatggttggggaggggacaggcgtgtggtggggtgatgcacccagccacattgaatgtagatggggccgggtgctgtggctgacacctgtaatcccagcactttgggaggccgaggcgggcggatcacctgaggtcaggagttcaagaccagcctggccaatgtggtgaaaccccgtttctactaaaaatacaagaattagctgggtgcagtggcgggcgcctgtaatcccagctattcaggaggctgagataggagcatcacttgaaccagggaggcagggtttgcagtgagctgagatcacaccattgcactccagcctgtgtggcaagagtgaaactccatttcaaaaaaaa

SEQ ID NO: 202234 - DNA, 340 bp, Homo sapiens
tcagtcacatgtatccttctagtctagagggaatgttttaggttgtctcatgagactgaattttgataagaaaatgtgaatgtgaagatccttgcaagggagaaaagttacaaaataagaagattttttagtttttctttttctttttaagcaaattcctctgcccattttgtgacagtgttttaagaccagatgggagtgtccctggatcctttcagctggtggcactgtatgagttttctattgctgctgtaacaaattacaacaaacttagaggcttgaaacaacaaaaatttattatctgatagtctggagattagaagtccaatatggtctcaat

SEQ ID NO: 202235 - DNA, 558 bp, Homo sapiens
cccagggttgcatcctcttcaacttcttgttcaacaatgaaagcacctgatgtttccaatgtaatactagatttcatccaactaaatcagagttaaaacatgatcataagtttttataaatatttccttacatgttttatgtacgtgcatgactaacaatattacagagtgctgcatatcagaagattgggtaggaattcaagctattcagtttatcacacaggtcaaatatagttcacctgctcatttccacagcaccagacagttatagaaaatgcaagtaaagtgaaatttaaatagagctggtctacagtatcctttgttgaatggatttagcaaccttctgcttttgggaaaaatctgtctatactaattttttatttcctataactctcttctgcatgtcatatggcattctttgtgaattccggcacatttggaaagcgaggctatgatccattataaccaaatcgctttgctactgctatgaacaaacacaggagaaaattaggataccaggtagttcagtaaagtaattcacactgcagatacctgtgt

SEQ ID NO: 202236 - DNA, 382 bp, Homo sapiens
tagctgtaactgtattacctgtaaaacaaacaaaataagtgaaagggagaagaagtgctttaaatgcaagaattcctaatatcttttttagtataaagataagcacatataaggaaaaagaagacaagaatattcattgatggatggatggatgattcagttggtttctacattagcaatgactcatgctgtaaaattggaatgtttagaaaataaatcctacaattgtaccagaaaagacaagaacataatatgatagagatccaagcatgccaaaaacatcattttcttttctttccatatatgacttttgagtgttctgaatactacccttgcgtttaatgatatagaaaaaggaaataaaacggtaatcacagtctgt

SEQ ID NO: 202237 - DNA, 629 bp, Homo sapiens
gaactgagtatgcatctaatcttcactggatcccttcttcttggcaaaggtgactgggaccgtgtctgtcttgcttataaccgtacccctagctgggtgctccatagagcaggtcctggtcatgcctgcgtggtccatctcctctgggattgatcgtggtgctggtagtgttgatgcaggtccccaggctcaggaaccaaagttggagagttagataaacagttctggctggtgtcagggaagaaatgagaagtgaagtttgggggtagagatgtagtttggccaattcatgggagggagggagttctgtgaaaagcactggaaagccaaagcattgttctctccgggctgggcgtggtggctcatgcctgtaatctcagcactttgggaagccaaggcaggtagatcacaaggtcaggagttcgagaccagactggccaatatggtaaaaccctgtctctactaaaagtacaaaaattagccgggtgtggtggcacgcgcctgtagccccagctactcgggaggctggggcaggagaattgcttgaacccaggaggcggaggttgcagtaagccaagattgcaccactgactccagcctgggtgatagagtgagactccgtctcaaaa

SEQ ID NO: 202238 - DNA, 310 bp, Homo sapiens
cacacatacacttacaactaacaactcacacagtatttggcacttctaaatgttctgtgtactaagaaaactagatatccaagtaaagatatatattaaagaggcagaaacagcattaatattagtaggagctctggtttgaagtagtttaggtttaaatcctcactatgccacttactagtggcatgaccttagttaggtaaattatataatctctctcggccttgagtttttcatctgtaaaataagaatatatctatgtacctctcagggtattttgagaattaaaattttaaatgggccaggcacg

SEQ ID NO: 202239 - DNA, 145 bp, Homo sapiens
gaatggcaaacataaagaagttatagcacttaattaatcatagtagcttaattggacatttaccaaattttttttggtaaatttcttattcagaatagtccaggaatcaactgcttacgtgcttaacttaacaaataactgtggg

SEQ ID NO: 202240 - DNA, 592 bp, Homo sapiens
atacgacctattaattttcaaagaatcactaagtatacaaaatgaaaacacattcagtaaatcccttatcaccatcgttatcctgatcatccatttctgtgcaacaaatcaccctagaccaaatggctgaagacagcagcagtcctttagtaagtctcccagtttctgtgggtcagggattcaggctgttcagcttctagtgtcatgccactgcgccagatggtcaggtcacctgggggctagtctgggctacctcacagcacaggggtctgaaggcagttggaatgcttacatggcacttaaagacttcaaccgttgagtattccagtgagcaagatagatgttgcatcaccttttctgaccttccctcacttctgcctcatttctgttggttataggtaaggcaaaaatccacccagattcaaggagagggcactggactctgtctgttggtagtgaagtggcaagattcttggacatgtggggcaggagatattgtcatgggcatctttggaaaaaacaatttgctatctatctacgctctggccacaacaacttacatctcttccatgtctaaaatatgctcttgagc

SEQ ID NO: 202241 - DNA, 244 bp, Homo sapiens
ttggagtggagtaaagcaatgaggaaatacctcgcggaggagtcaactttcttcttaactaaaacctgaatgaggaggagttttgagacgggtttttaaagacaggaaggatatattggcagagaaagtaagttgtttttagactttggtagaagaatgaatgggggaaaaattacgcagaagtgattgttggtttagattgcttggttagagtggatttcccagtgaacttgaaactctaagg

SEQ ID NO: 202242 - DNA, 369 bp, Homo sapiens
gtatttttagtacagacgggattttgtcacgttggccaggctggtctcgaactcctgacctcaggtgatcctcccgccttggcctcccaaagtgctgggattacaggcgtgaaccaccgcaaccagccagctttgtagattctttgtttgttttttgttcccgctttgtggtcttctggagttctgtcatgttgcccttttatttctttcttttccttatttgtataattgtttcataaaacttgtgagtttcatgtgtttttatgatagagtatcaccttttgttcccatgtttagaacttctttaaatatttctcataggaccaatcaagtggtgatgaattccctcatttgcttatctgggaaaca

SEQ ID NO: 202243 - DNA, 157 bp, Homo sapiens
gctgcaatttctccagatcttaaagagtaaaaaatggtgacctaacacctgcttagtagatatttgtgaaatgtgtttactttgttgctatatttgaaccactgcaaaatgctgaatattgattaactttttagtgtatgtaacacccgccatcacg

SEQ ID NO: 202244 - DNA, 344 bp, Homo sapiens
gccaggtgagtgcagctggagtcgggcacccagggccccgtgtccagcatgtctgtgcctgctggcgtgtgctgcgtctgtgcccatgtgacgtcccacagggctcccagcccgcctgtcctgtccgcatgatcaccctctgtctggcaggccccatggccgccctgtgactgtccgtccacgcacatgggctctgagccccatggccccacacggcccccgtcactgtgggtgtccgtgtctgtctccacctatcctgtctccaagacgggagcactcacagccccgacccctcctggtggcttgactgctgcctcatgctcaccctgcccctccacagggcc

SEQ ID NO: 202245 - DNA, 462 bp, Homo sapiens
aaaagttgatagcattttttagagtagtttattttatttaaggacatttcataagttccattaatttgaaaagctagagataattattttaaagatgagatagagaggttttgatttattcatgtctaaaaaaattatatggaaaaaaggtgagaattgaaaatatgaaccctggatttagattccattttattgtggaattaaatggaattaaagatatatttacttttcttgaaggttattcctgtaccacattgcttgagggcagtgccactgtatccgttttagaagtaccttagtatttggcagaggatatgctatttgcttatgatgattcgataaagcttttgtttcttaatttctttgccggggcattttgtgatgttgcagtgagacatggtatgaagtgtggcacagcatgtagttatagtcaagatgactggctaaattacatgatttctg

SEQ ID NO: 202246 - DNA, 468 bp, Homo sapiens
tcactacagttgccttgcagataaagcagacagatattctaagatccattccaagcttttctctagaatttggtatttttcaggtctgggcacttgaaatggagttaatttttcctttgaggtcattaattatgtttgataaagtcatcatattgtactttattcaactatgagtctttgctgaacttcacatttctttgataacttacaggaaacattaccatataatcttaagaggaaaagatggcatatatacatatatatttttttcctgaaaaagttaagattctaactggaatgtttaatatttctttaatatttatctaaacttcagtgttatttttaatatttataaatgattcctatatctgaacatggttttattttaggtatttatttctcaacgttgagttgctacatgaacttacaaataattttcccttctttaagaaaatgtaaaattttgcg

SEQ ID NO: 202247 - DNA, 374 bp, Homo sapiens
tgtatgtggcaagactgacagacaaaactaatggaacctggtacctagaagaggatgagaaggatccccgtgaaccctagagaagacaaggggatgtgaccgggcagaccctcagggggcacaagacacagattcaactggcatccaaaggggacagtctggaattttttttttttttttttttgggtttatgtttgttctttggggcatcaaatactgcacccaaatatgagccattcatcttaagacaactgctttggttataagaatcctgttctgatattcacaattaactctggacaacttaaaacttattagtgacactgctatctaataataaaatatttcatcataggccgaatacaatttttttt

SEQ ID NO: 202248 - DNA, 517 bp, Homo sapiens
tataagttatagcttgtagtactgtgtaaagataggcaccatgcttacaagatcagaattcagcttgaggctgtgtgagtttacgacaacactgtagtgtgccactgtacttctctaccttctgtatcgccgtatggaattactacacaaaattagcactaagaaacctaaatttccttacagtagaaataagcttatatgaataattctcttatagaaattaaactatctgctgcagttgtcagcagggtttaatttttagcataagctgaggccatcagtttcttagcagtcctattcttaaataatcatttctgtttaagagatcattttactgaacaatttcaaagcactaaatatcttcgagattgaaaaaataagcacctatagatggagcagaaactaaagaagaacaatttaaggaaaaagacagtccttaactatgcacgcatcctatgaattatccatgctttcagctggtttccttttactgcactgtctaaaactccatatttaa

SEQ ID NO: 202249 - DNA, 454 bp, Homo sapiens
cggagatgcgattttactctgatgcccagtttgaagtgcagcggctgctatgtcagctcactgcagcctcagcctcctgggctcaggcgatcctcctgcctcagcctcctgagtagctgggaccacaggtgcatgccaccacacctggctaattttttaaatattttgcagagacgaggtctcaccttgttgtccaggctggtcttgaactccaggactcaagtgatccatctacctcagcctcccaaaatgctgggattacaggtgtgagctaccccgcccagcccttggctaatttttgcaacatttttttgtagagacaaggtctggccttttcactcaggtgggtcttgaactcttggctttaaggcattctgcctcagcctcctacagtgctcggattacaggcttgagccactgtccccagcctggtgaagcatttgtttagagtctc

SEQ ID NO: 202250 - DNA, 540 bp, Homo sapiens
gccctcaaataaactggctattgcattataggcccatttgttgggggcagtctgttggtccacacctacttgcttaggcaggtgctctggtctcacccctgccccttggagtttaggtgcagcagcctctacattcctgttccaagcatgggaccaaggaggccggaacctgtcactggaagccaggtcaaagccatgagcagtggcccacggcttgttgggttcgtctgtatcattgaagctgcctgtctgcatgtatcctctggctcgcgtgctgttggctctgcagtacaatatgtaaccaataaagctccctcctttccatgtaaaaaacaaacaaaacaaagtgtgagttatcccatcagataggccatctagaccagcagaagtgatggctgagactgagaagaatctagaatgaatagtaaagggtggagattgtgagtattagttgtgactttacgacgactgcaccagttgggctacactgttcctgctaaccttcctcttatatattttgccagaactgtgaccaaacag

SEQ ID NO: 202251 - DNA, 495 bp, Homo sapiens
catgctgacaggttttctgagcaaggagggtaggggatgacatgagacagtttgctgatggggatggggttgggatgcggattaggtcggcacagcccctgctctggtgtgaccctcagctccagcagtcactggtgggatctacagtcaagttgcttcacctctctaagtttcagttttctcatctataaaattacagtacttaacctatacgtttgaggtaaagattaaatatgataaatgtatgggaaaaacaacttagcatattgcctgaaccatagaaaatatgagaaaacattgtggcttttgttgttcttatttttggcttaagtgaggtgtgaatgtttggaacaaccgccaagcaagtgagagagggagctaagaacaatagaaggtgttctgagaacccaattgggagatgaaacaataggctacagtgtcacagtcggcctggtggcatgtgttcctctaatagcattgggctgatcaggcgat

SEQ ID NO: 202252 - DNA, 618 bp, Homo sapiens
aaagaattttagggttaccaatggattgctggcattgcccaggatggtggccctcatgattacgaacactgtgatatcttccatcctcaaggaatccatggggatggctcccactcgcacaccttgttgagacctttattcaatgtttaaatctattaaaatccttcattcctggatctatatgtttgtcaaaagactatactgaaagctatatatcctaactgctggccaaaaaaaaaagtttttactcatattctttgaacaaattgaagaaaatagatcaagaaatctgccagagctggggatagtatgcataagttcagactagaatttctactgtgcctaaaggctggtagaagagccatagctcctagatctcggtaggacattatcactgatgtctcatttgattcctgggcaatgaaaaaatcatattcatggagtacaagcacctgctctctaggagcttacaatctcttttgggagataagaaaaatatacataaaattataacttaaaatgctgagaagtaaatgctaagtgcccataaatgtaacagaagctctcaagagtaagaaatatagtggttgttttctttttaagaacagataggcaggt

SEQ ID NO: 202253 - DNA, 409 bp, Homo sapiens
gtcaatgaagagattaagaaggaaattgaaaaaatttctggaaacaaatgattacagaaacaacataccaaaacctatgggatacaataaaagctgtactaagagggaaatttatagctataagtacctacatgagaaacaagaaaaacaccctagcaatgtattttaaagaattagaaaagcaagaataaaccaaacccaaattagtagaagaaaaagcaataatgaaagatcagggcagatacaagttaaactgaaaataaaacaacaaagatcaacaaaagaaaaagttgattttttgaaaagttaaacaaaattgacaaacctttagccagactaaggaaaaaaaaagaagacccaaataaagaaaatcagatatgaaaaaggagacattgcaactgacactgca

SEQ ID NO: 202254 - DNA, 826 bp, Homo sapiens
  misc_feature (19)..(19): n is a, c, g, or t
tctagaggactcccagtcnatcgaggacacgtgggtgtgagtggtcacctgaggtgcacacgtgagggtggatatcatgagggtggctgtcaagagggtggatgctggttcagggctggcatgaagaccctagtcaggagggagccaaggcgtccaaggaggccctcaggctgcaagtgttggtttggccccagtcttggtgatgacaggacctttgggaatctgaagcccggtgaccttgggctgtggggagctggcgggctttatctgcccagcgtctctgccccagttttgggcctgtctgtgatgctgggcacctgctgatgtgcgcagcttcattcattcctcctccactcacccacctgaccactgtgtggggcgcccctgctgtgggccaggctggttccagggtccatcagcaacagaaacaaaaatgcctcttggggagacacaaccagcaacaagagaacagcgaaggaggcgtaggacatgcggctgatatgggcttaggggaaacgcaggcaggagagggggctgcaagctcaggcgggagctttggggccaggaaggcctggctcagaggggacttgggtcagggtcacaacagggaggtgaagccactgacccggagctgctggagagcttccgggatggacagagtccgccccacgggtccctcctgccctccctcggtgcctgccctgggccgtggagatgactggggagctaggtttggctgggtgacagcaagggctggacagaaagtgcttcagacaaagccaaggataacagtccaaggacattaaggttaacaaaaaaaagaaag

SEQ ID NO: 202255 - DNA, 550 bp, Homo sapiens
taagagaattctagtattttaggaagagttgagtaaatttaaggatgtacttaatttgctcattttcctactagtgtgttaaaagttttcagctatcacatggaaacacaggaaacgtattgtcctgttgcataaacgaacagcttcactttagagctgtaacctcaatagttggcagtatgtttgcagaataaactcatagtgaaaaatattaatctgtaaatcatctattctttgaagaaatagggcttttaaaagttatatttggggctgggagtggtggcttgcacctgtaatcccagtgctttgggaggccatggtgggcggatcacctgaggccaagagttcgagaccagcctggccaacatggcgaaaccccatctctactaaaaatacaaaaattagctggatgtggtggtgcgcacctgtaatcccagctactcggtaggctaaggcacgagaatcacttgaacccaggaggcagaggttgcaatgagcagagattgtgccactgcactccagcctgggtgacagagctagactccatctc

SEQ ID NO: 202256 - DNA, 1038 bp, Homo sapiens
gtttgctaacacaaagaggttctctttgaggtgatgaaaatgttctagaattatgtaatagtggtagtttcaaaatattgtgaatatgctaaaagctattaaattgtacactttaaaatgattaaaaccgaggcaggcaagtcgtttgagcccaggagttcgagaccagcctaggtaacatggtgagacaccgtttctacaaaaaatacaaaaaaaaaactagccaggagtggtggtgtacgcctgtggtcccagctactcaagagactgaagtggaggctgagcccagaaagtcaacgctatagtgagccgtgatggtgccactgcacttcaacctgggagacaggctgggagacagggaccctgtctcaaaacaaacaaacaaacaaaaaatgattacaatgctgacaagttacttgggcgttttttgtttgttttttttgtttgtttgttttttaaagaaaaactgcagagctagtatgtaactaagccaggataagaaaccggggcggtctaacaccaaagcctaaatccacagctgtgctgccgagcatgaaaggagatagttatcaatctgaccagggaaagggagtggtcatcaaggtcatttgggcttggttataaaggtcagaatgactttgccaagtgaagaaattaacactgggcccactccaaacagaaaaaaatggtacatgcaaagctacagagaacctctcgtgtacgccatcttagtggttttggtggctggcatgacttaagcaggtactggtaagaaatgaagccagagataatggcagagctgttcccagaacaccttctgtgccatacaaagaaatcctacttttaagtatggcagaaacataaccaactatacagtcaaatttaaagattcaacaggtgattgagatttaaaagcaaaattaaaaaatcttatatcatgctgggggaaaaatattaaacttcatggagctatttataaggcttgtcaattcaccacaattcattttgtgtctgtactcccacacagtacccctcagg

SEQ ID NO: 202257 - DNA, 281 bp, Homo sapiens
tatggtggaagcgatgattatagcagttcacgtgacggatatggtggaagtcgagacagttactcaagcagccgaagtgatctctaatcaagtggtcgtggtcgggttggcagacaagaaagacggcttcccccttctatggaaatcctccacgtgattcccacggcaattcaggcggtggagcaccaagaggtggtggcagtggaggaagccgatctgatagagggggaggcagaagcagatactagaaacaaacaaaactttagaccaaaatcccagtt

SEQ ID NO: 202258 - DNA, 253 bp, Homo sapiens
ctgtgttgtacattctatgggttttgacagaagtgtaattatgtgtgtcgactattgtactgtgaaacagaatggtttcaatgccctaaaaatcccctgtgttccacctattcatccctcactttcccaaaacctctggcatccaccgaacttttcactgcctctgtagctttgctttttccggaatgtaatatactcagagtcatatggttatgtagtcttttcgtattgacatcttcacttagtactatgc

SEQ ID NO: 202259 - DNA, 423 bp, Homo sapiens
aaaagttggatgatctgactattcaatacttaacagtagtcctgtcaacacagtaggtgctcagagaatatacgttaaatgaactctggttgagttgatatttgtactcagcaaacactagaatgacgtagtggctccattctttaggtgtttagtctgggctctccttggggttctagactacttcagagttacttttctgtcatctccttggcccttgtattaatagccattggagtaaatatcagttcccaataactggccattttgactagtgagattttaatatataatagtaatgcctccagtatcatgattacatagttttccacataaattgatattccagatgccgaactttatgacacaattatgacaatattttttttgttataaacagtattggtcgaaaggtgttgaaaa

SEQ ID NO: 202260 - DNA, 460 bp, Homo sapiens
tagatcagtggaagctgtttcgtcagctcataaaaacgtgagagatctaaatttttataataaatcattttgctgagcaaacaatatgtgcggttattacagactttggaaaataaatgattttagaccaatgtcaggctgcagatactgatgtggttagttgagccttcagcatgaagagaatgaaaaatctttggaatactgttgacactcacaccatgaaaccacatgccatttaattcattactgcgcttccaagattacatttacagttgtggtattaacccctgggcatttttgtattacttattgcagacagtttgtcaggcaggattaattcagtggggggaggaggcagcagtttggagagaaagtggatgattaagactggggtggggctgggcgcgtcggttcacgcctgtcatcccagcactttgggaggccgaggcgggtggatcac

SEQ ID NO: 202261 - DNA, 324 bp, Homo sapiens
aaagtctcctgcctgacctcttcagacttacctacaatgctttccttcttcctatccctgggtcattgtgaataagttgcagtttcccagaaagtgcttgtttcaattctttcctcaaccccgtttgcccagatgatatctgtttcacctgttaagtcttagtctaaggtttagctctggtctttcccaattgtcctattctacatgttcttcctatcgtaggaccttttttttttttttttttttgtgagacagagtgtcactctgtcacccaggctggagtgtgcagtggcacagtctcacttcactgcaacctttgcctcc

SEQ ID NO: 202262 - DNA, 727 bp, Homo sapiens
attatctggtgatgaatgagcacctgtgtggcacggagccacggaattcgcggccgctgtagatccaggcccacatcgacagggacggctcattgtcctcgtaagagatgctaaaaaccttgtacctatggaccccaatggcctgtcagatccctacgtaaaactgaaactgattcccgatcccaaaagtgagagcaaacagaagaccaaaaccatcaaatgctccctcaaccctgagtggaatgagacatttagatttcagctgaaagaatcggacaaagacagaagactgtcagtagagatttgggattgggatttgaccagcaggaatgacttcatgggatctttgtcctttgggatttctgaacttcagaaagccagtgttgatggctgcgtcttaccgcttactgagccaggaggcaaggcgagtacttcaatgtgcctgctgccaccagaaggaagtgaggccaatgaagaactgcggcagaaatttgagagggacaagatcagtcagggaaccaaggtcccggacagaaaaagagcgaccaaacactgtctccaagattttggaccaacaactggcaacagagaccggatgaaactgaccgatttcactttcctaatggtgctggcggaaaggcagctctggcacaggtccatgcttcagaacgaaacaggcacagatgactctatgctgtcaacaatcctgcagcacgacgtggcgatc

SEQ ID NO: 202263 - DNA, 999 bp, Homo sapiens
ttgaacccaggaggcggaggctgcagtaagccgagcttgcgccactgcacttcagcctgggcgacagagtgagaccctgtctcaaaaaaaaaaaaaaagaaaaagaaaagaagcagctatgggtcctgggcaggccccgcttcaaactcctgacctttgtttggttttcctgcctcacacactcttgggccatggggcagtggcttctgccatagcctgaggtggttgggagagctgggctaaggcttcttggtgcagccctatcatcatgaggtggcggaaggttgccgtggcaggtggtaatgtgctgagcctcttcttggtgcaaagggtctatttctgtcactagcatcagattgaccttattttattttttttgcctagaaagatgtagaagacagctcagcaaaaagaagcctcagggccgagatagatctatccctcgttgtgccttgcttgcctcttctctttctcttctttttcctttcctccgcctcctttctttttgagccctacttaccctttcttctgcatcctcccccacccgccatcctttgtttttttcctcactgttgcccttcttgagaaattcttgtaatgctactgcagtgcgcagagcttgggattgaacctgttttctgtgtttttaaaggggacttgcagtaaaaagtagggcatctaaaatagggagactagacatcttgaaactgtcccctcttcttctccattcccaccccaagtcataaaggataaaatctaaactctggccttggccgcaaggctcatgcagtctggtgccatatcactttgctgccttttgtcagcagcatagtgcttaatacccactgtttccctgtgtttctgcccagtagaaggttccctggatgtgccaggctgtatcatgactttgttttgactacagatagtccctggtttacagtttgacttactgattttttgactttatgttggttacaaaagtgatatgcattcagtaga

SEQ ID NO: 202264 - DNA, 924 bp, Homo sapiens
cctgggtgacagaatgaaaccctgtctcaaaaaacaaacaaacaaaaaccaaacaaattataggaaaatcaacattttaaaccaaagaagagaaggagaaagaagggaagggaagccataaaagtgtctttttcaaatagatcatgggggaaaaaaaaaaaaagtatgacttggaatagagacagccttacaagcaggatctaaaactcagaatccatttttttaaattgtgataaatttgactatagaaaaatgtaaactttggatacaaaagtaccatatttaaagtaaataagctacaactattacatgacagagaaaatgtcctcaaacttctaaggaacttctaacaagtagaaaaaaaacacacacaaccccaaagcaaacaccaatagtcaataaatatatgaaagtgttcaatgttactcataataaaggcatacaaatcaaaccatgaaatgctatttttcattaatcacaactttgcaaaaattaaatgattagatctgatgtcaataaagatgtagagagatggaaggcaatttgataacttctgtcaagattttaagtagtcactaaaccaagttccagtactaggaatgaatttgtcctttaagtatggtacttaaggatgttgactgcagcattatttgaaatatcaaaaactgaaaatctaaaagtccatcaataaaatctagttaaatacattttcaatccatcaacagaattaattgctatgaagttgttttaaaaacctatacatatagaaatggaaaatgcctaagatatattacatgaaaaagataagatacagaatagcgttgcaaaggtagaagttcatttgcattttaaaaactgaaaaggagaaataatacatatgtgcacagaaacattctgggaagctactcaaaaaactattaatag

SEQ ID NO: 202265 - DNA, 436 bp, Homo sapiens
ctgtaagacctcctcattgcttcacatagagatcccagctcataacactgtggataagatttggcctctgcatcctcttcagtcccttcttctatcactccagctctcctccttcaagccatagagtgttcttctcatggttaatttcgcttcactgactcagtcttccttatatcaccacctgagttagtcctgctgttaaggttcttagagtccttttcactctgccaccactgtatttacctctttttattaattatatggtatgtgataatttgatgtttattaccttggttctcccccattattctttgagctactttcataactagcacctggcacaaagcccagaagagaataggtgctcaataaatatttgttaaagcctgaatgaatgattgaaaataaattataatatgtttgctataaaaagtaa

SEQ ID NO: 202266 - DNA, 534 bp, Homo sapiens
atagtactattaatgatgttcactcaacagtaatctgtcattcctaagcacggaaaatgttagaaagtaaattatatattgcagtgacctttcaaataagaaccacatggttcttttgacactaattttttatggaaaactctatatttcagcttaataacccacaacactcagaacgactaactctctagatttcagagaagtgtccaaagtcacataaacgtatacatgacaaatacagtagcaatgacactcagcaaacatccacaagatacaaagtgatgtaacaaaaaacagcaaacattcaacaggtctagcaccaattgctatgtgactaaattactatgttaggcaaagttgcatatgctgttcctccaagcctctttccctacctgtaaaactgggaggatggcaatcttataaataagttggatagattcaaatgtaccagattaagcaaaatacatcaacataaataataaaattaatcatctaacattttattgagcccttgcgttaaagaattacaatata

SEQ ID NO: 202267 - DNA, 636 bp, Homo sapiens
aacatgactaactttaattgccagaagtaaaagcttttattttacatgattacacttcattgtactagaatatatcacaatctctatttccttgagacaaacagtttccctaatatggtattataaaactgtttaaacatataaaaatgttgtgggaagtgcatatttatagtccaaccacttagattgtacaattatcattttgttatatttgctttactacatatctctcactctatccaccattctatccaattatcaactcaccgtttcttatttatgtcaaagtatatatttttcttacatacttaacatatgtagcattattgttcagtatttgtgtacagctcattttttttaagttactaaggttttttattaacacctcagagtagaggttatgaaaggaccctgaattgttctaggaattttcttcagtgagcatttgtgaagactcggggatcaaggttgggttaaactttgtgatgggtccattggcagtctagtcacaagcacctcctcgatccttaggtcccagcggaaaatgatgccagactcttaaactgccacaacgtagcctggaaagaactctacagtccagaaagagcctggaaagtggttttgtgagatgaaatt

SEQ ID NO: 202268 - DNA, 680 bp, Homo sapiens
taattaaaacaaatggccaataaagccaaacagacactgagtcttttgttggtgtaaattcctttacacatttcataatgtcttctatgatattggtttacttttgggaattgaaacctttacagaaaactatcagtttcactaagattttaccatgaaattatatattagatcatcttcatttatttaataaagtgttaaacacaaagttatttctaattttatttgggttttctatgttttaaaaattaagactgcgtattctttccccgacaaaatccagctctgggattcattaatgtattcgaatattttttggttttctatttacttttcaatatgatcttttttcatttaatatgatctatcattttatgatattccaatggcctcttttgggtataaggtggaatcacattcacaggtcagcctgagatccaccggctgatagccctgccctggggccagcagacccttggcctcctttcgactgcttggctccggttgcgagactgttggccacccaaacctctcctctcaagagccctattcttatctcacccttccacaaggcagtgagatctaaggcaggaaacccatcctggtctcatgaccatgagcagctcagaagccaattggcccaacatgtagatgggggagcagaaagaataaacatgggg

SEQ ID NO: 202269 - DNA, 1899 bp, Homo sapiens
aggattttcattttcatttatggcacccgttgtgtttgagaacatggaccaatttatggattagttttaaacccccagtctgtcacactcaatgaacaattctaagttggagagaatccatatgaaaggattagaatgtgccacagtggagcttacacatgactgtttcaactaaatattgcccagctgcctctcctgcagtattatttttttttttttgctacttagttaaattgctagtgtctctaatttcacacattgtcagagctttttttattttgtaaatatactgccacaataaatgtatgtgatgtttcatttattcaagatggggtctgataaactgtaggactaggagactaagaagagaagtcaattttgagtagaatgtgcatctttcaaataatattgctgggcccttctttggataccttgtttgactgtactcataaaatagccagagagtgactgttaagaccgtacacacttaatgggttttcaagaagatgggattgttttttcttggccatataatataaatgtataataaatttgctctctttgtaattaaaattaagagacagtagctcagctaggccttttaaatgtctatataacccaacaccaccataagtccagctcaattttttgtgacctgtttttctcatgggctagctcaaagattttttttttttaaggcagcagcaagatgaggttttaaaaaggctttgttagggcaattagacattttcatttttcaagctgattatagcatttatcacttacattgaaatttagtatttgcattttgcctctacgcttagaatgttacccaacaatatggtcaccacacaagttgattcacagggtgtgtttgcacatttctccagttttctgattaagataccctaataaatcctgcctcacagagttgcactcacttcagagccagggtgtctgtggtttctgcatgaagtcataacgcaattatgaaggagaattagattctgtcatcgtggtctcctgcagggagcacaaagttacttctaaagaatgttttcttaattctttacttgaaaataacctctgttcaagtagcataccagatgctcttagagaaatggagtcagtgactccccagacacaccatcaatcttgctctgaactttgtagccagcctgtgtttctcctgcagtctcctaccccgttgctgctccgggttttgccatttccagctgcagtaatcgtgtgtgtgacttgaacatgtgtttgctgttaaccattttagaatgtgttttttcttctcaacatccccctttcctccccttttgggtgcagttgatggatttcccatccccagaacggggaagcaagatgcactgtggattttccttcatttattttctagtactcacctaggagcagacgcctagcttcacttggtttaatttcatcttaaagctgacatgatgttgtgatgtaggaagacagtaaattggggtcactggttaatgctgatattatttttgatgactctaacccttaggtcttactccaccccccgcccttctatcatttgtacttaagtatttacctggtgaaaataaagcttatgccgggcacggtgcctcacgcctgtaatcccagcactttgggaggccaaggcagtggatcacctgaggtctggagtttgagaccagcctgaccaacatggggaagccccgtctccactaaaaatacaaaattagccaggcgtggtggcacatgccagtaatcccagctactcgggaggctgaggcaggagaatcgcttgaatgcaggaaccggaggttgcggtgagccaagatcacgccgttgctctccagcctgggcaacaagagcgaaactccatctcaaaaa

SEQ ID NO: 202270 - DNA, 320 bp, Homo sapiens
aaaggacaggttactgttactcagccctaccctcttgcagcccggagcctggctctgcgggttgctgatgagatggacctgaccctgggtcatgaggttggatacagcatcccccaggaggactgcacggggcccaacaccctgctcaggtgggggcctctgcaggccttacccgaatataattccccttattcagtagaatcaaacccattcctctggcatctcaccatacccgcccttcccaatcgaattcctgcagcccgggggatccactagttctagaagcggcgccatcgcggtggagcttcagcttttgttcc

SEQ ID NO: 202271 - DNA, 567 bp, Homo sapiens
ctcaattaaacacttcatagaatgtttagatattgctagtagcgccttaattcccatttatttatacataaacagcaaacattatttggtacaatgatccttccaactgtcattgtatcacagtatacactgcttaaaatgggatttatttaaaaacaaatctttagttcgcttgatgtaggcattaaactctcatcatacctatactctgcttttgtccatttcagctgacatctgctttagttctagtttgttctagttttggcagtagcattttggtgcagaggaggagttaattaaagttggttgagaaaaggcttaagcaataagaaattcttcgcaaaccactgattcatcagcaaaatgtcacctgctagtccataatgactggtgttcatccaacagacaactctgtggatttttttttttttggctttgtttgtttttgagacagggtctcgttctgttgcccaggctggagtgcagtggagtgatacagctcactgcagcctagaccacccacttcaattcaacaatgcaaacaatcctcccacttcagcttcccaa

SEQ ID NO: 202272 - DNA, 453 bp, Homo sapiens
aagtattaacagaaaggacatactgtgatctcacattcaaactacttcaaagataaggagatttattttgcccattacaattttctcccagagcaaataaccatttttattaaaatgctgtaagttcatccaggtaggatttgggtgaagataatttgggacaagccactgtgtactggtaatgaaaacagaaatgaattcaagcttctaatggaaaagtgacaagcaaataaattaatctccaggttattcaattttagaaagtgatataagatgtaagatataactaaaaactgaaaaggaaagttagaaagattattaaaaatgatgtcagtaaaagtctttaaccaagaccagatggttcatcccaagagtcatctttaattgtaaaaatcttcacatcttaagaagctacatgggaggctgcggagaggactggggtaccgagctcgg

SEQ ID NO: 202273 - DNA, 280 bp, Homo sapiens
tagcgctgagctttgttcgtttagtgggtataaagagaaatggcttctcccctatcaccatttcagaattgagagagaatattgtggtaatgaaatgttatatgggagcagctgaaaaaattcttctctgacttcaaggaggggaaatgtgtgtgaggatacatgtataggtgcgtctgcaagaaacagtgagcagcctgggggtcaggaaagccaggcttgtagaagtgggagaaggcagagccctgggaaaaaggcaggtgtggaagggtggtgtgga

SEQ ID NO: 202274 - DNA, 1165 bp, Homo sapiens
cactcttgttgcccagcctggagtgcaatggcgtgatctcagctcactgcaacctatgcctcctgagatcaagcgattctcctgcctcagcctccgagtagctgggattacaggcatgcgccaccacacccagctaattttgtatttttagtagaaacgggggtttctccatgttggtcaggctggtctcgaactcccgacctcaggtgatccacctgccttggcctcccaaagtgctgggattacagacgtgagccaccgcgcccgcccgcaggttagttttaacttacttataaggtaaggcttcaggtcagtttcatcactatccttgatatatacaaagttagttttgattcagttctcttcagataaagtaagaaaacttcaaatattacaaaaagtttaaagcaaatccaagcataaattaattttattaaatataatagaaataaatcactgtattttctttgaacagaattactaaagtaaaaaaatacaaattgatattattctttagcaatagaaaagaagcaacaattatgaccatatttccaatgatttagtatatattaactaactactggctatttggaaaacctgtttcaccataacaaaaatctgcactgtctattataaatttgttgttggacttaatataataataaatcatattattcctatgattactctataaagtgatatttgaaaatagtgttatacagcacaattattagatactttgaagactaagaaaaacacatgcacattgagggcaatatatttattgcctaccatttttctgagaggctgacagatttaccaatgtaaaattttgcgtgtatgtgtgtttggctggaagaggaactaccatgaagttatctaatgcttttgggttctctgttcttgttttgaactaggcaagaaagcagctgttcctgaaaataaccagagtgtacactttggtttagaatagtctgtcctttggaattaagccagcatgctcttattgactctacatgcttaataaaataatgaaaattattaagacattcctctgctcatgtgaagattagctataatagatatttttataattatcttgaatagcaaaaccaataactgttattcatttagtgaatttttagagaagaatataagcaaaaat

SEQ ID NO: 202275 - DNA, 1219 bp, Homo sapiens
cactcttgttgcccagcctggagtgcaatggcgtgatctcagctcactgcaacctatgcctcctgagatcaagcgattctcctgcctcagcctccgagtagctgggattacaggcatgcgccaccacacccagctaattttgtatttttagtagaaacgggggtttctccatgttggtcaggctggtctcgaactcccgacctcaggtgatccacctgccttggcctcccaaagtgctgggattacagacgtgagccaccgcgcccgcccgcaggttagttttaacttacttataaggtaaggcttcaggtcagtttcatcactatccttgatatatacaaagttagttttgattcagttctcttcagataaagtaagaaaacttcaaatattacaaaaagtttaaagcaaatccaagcataaattaattttattaaatataatagaaataaatcactgtattttctttgaacagaattactaaagtaaaaaaatacaaattgatattattctttagcaatagaaaagaagcaacaattatgaccatatttccaatgatttagtatatattaactaactactggctatttggaaaacctgtttcaccataacaaaaatctgcactgtctattataaatttgttgttggacttaatataataataaatcatattattcctatgattaacaataattcagattcattcctggtacagggatcagtaaatggaaaaaaattttctctataaagtgatatttgaaaatagtgttatacagcacaattattagatactttgaagactaagaaaaacacatgcacattgagggcaatatatttattgcctaccatttttctgagaggctgacagatttaccaatgtaaaattttgcgtgtatgtgtgtttggctggaagaggaactaccatgaagttatctaatgcttttgggttctctgttcttgttttgaactaggcaagaaagcagctgttcctgaaaataaccagagtgtacactttggtttagaatagtctgtcctttggaattaagccagcatgctcttattgactctacatgcttaataaaataatgaaaattattaagacattcctctgctcatgtgaagattagctataatagatatttttataattatcttgaatagcaaaaccaataactgttattcatttagtgaatttttagagaagaatataagcaaaaat

SEQ ID NO: 202276 - DNA, 434 bp, Homo sapiens
cttcagtatcccccaagtatgccctgcttatttctggtcccttctttccaactctgctatctgtttcctcctgacattcccaggttttacaacatgtcccacccatctcaaatctctaccaatgaaaattctatcgttatctcaatgcccattcaagtggtattgtctccagagcctttcatcattcatcattcatccagaaatgctctctcccacctctgagctgtataaagcagtcatttatcacattcccttggattgacagtgacttacatatacatgaccatgaatcttagtttaaccaagactgtcgagtttatattcatcctcttggggttattatgaagaccacctctcttcactctcaaacgtacacaaatttgaatactaaattatatggtcaccttttctctatataggattcacccccttcc

SEQ ID NO: 202277 - DNA, 274 bp, Homo sapiens
ccatggcaagtctttgaggacataagttatcttgagtcatcaatgactgcctattgggcagtagcaaggagtagggctggatttctattctggtctcttggtccctggtttctcttcccttcactacccatttaatcttttgaaatttccctttgcatttgtcactttcaggtactattgcttatgagataaaggccaaatttcacagtctctgaaagctctcccatgttgttccctctacctggaatacccacacatctcttcttcgcccaag

SEQ ID NO: 202278 - DNA, 685 bp, Homo sapiens
atttcttctccctgagtttgtcttccctttatttagaggtataggtgaatgctaattatatggcgacttctgaggttttccgttttcatttttaattttcttaagggcaaaggctgctgtaatctctacaataggcatctactctctaaaaataattcagtacactaaaaaatcttggaaatatcttttacatctcctgatcactcactcactacatcacatttgccattgagttatgtaattttgaattactttgtaattcaaactagcttttgaatctctccaggaagtctttcccactcttcatcttgactgcaaccattcttatcatccctcatctgaactattgccagaggctcctaagtttcctttccctgtctttatggtccctgacttcgaattcattgtccaaactgacactagagtaattggtttcaaattcagaggagaccaatcactatcctgcttccagtgattccctattaggagataaagtctaagcttcttaggaatgtgcaatcctcaaaatcctactcccacttgccactccagcttcatcttctctcgtttcccattccttccccactagactgttccctttcacaataatcatcattataatctgtaactgagaattgttgggtaatgtattcagcattctatttgtattatgatatttaagtct

SEQ ID NO: 202279 - DNA, 359 bp, Homo sapiens
tatactatggcagatgtcaacagagatggtatttaaactgcaccctaaggaataagatggaaaaaggatggagggcatttcaggaaaaggtaacatgagggtgtgagaaaacataaaatgttctgggaaaaaaaactactccagcatagcaaaagtgtagaatttcactacacacaaatgtagaaaagataagatacagagcagggaatcaagtcttgaaaaataaattggagatagagtataaaacttaaatgcatttggtctctatgttattgccaatgagagtcatatcagactctaaagaaacagagtaagacaattcatcaacccagtactttgtggctcttgttgctaccact

SEQ ID NO: 202280 - DNA, 431 bp, Homo sapiens
ttgaggtgatacatgtgctaattaccataatttgatcattatacattgtacacgcttatagaaatatcacactgtattccaaaaagatgtacaatcattgtgtcacctaaaaataaaaggggtaaaaatggaaagaaaatgcattaatatacagcctcttgatcgtggaaataatcagcagactaatgtaacaagactcagcaacagaagaattaattaggctgaaattgattaaagaaaagggggtaaaaatctgtctgggataattcaggtttcaattaaacttaagaagaaagaagaaaaatattcttttgttccattattgttttgacagcattatatggacttgtccacagaatgttaatcaaattagattttttttttttttaaagaaggaaggggtttattcggccgggggcattggcaaggct

SEQ ID NO: 202281 - DNA, 380 bp, Homo sapiens
tctgaggatccccaagccgtaatacagactcaggttattaaagatgggcaaggaccccaagatgaaggctactctgaggcttagaatgaagaatacttcctggatgtgcaaatgaagattcattgagaacagggacccagagcaaatgcttcctgaattcctattggaggaagtcagacagatgtttcccagggcactcttgtcttctgttggcccactgcatgttaacagccttccctttctgctcttgtccaccaagaatggccatcggtagtgccttgcctcttctgagtatcttacagaagatactcatcatctcccacttggagctggggatgacttgctgttccacatgttattgagtcctctaccatgtgctg

SEQ ID NO: 202282 - DNA, 427 bp, Homo sapiens
gtgctgggattacaagcgtgagtcactgcgcccagccaaacatgtaattttcattgccctcttctcctacatcattttaatagttattgctctgataaaacttttctctgggggtgctatggtctcaatgtttttgtctcctccaaattcatatgttgactgctaatctccaatgcaacaatatcaagaggggcagcctttgagaggtgatgaggtcacgagggctccgccttcatggatgggattatatccttgtaagaggcctgagagagacccctcaccctctccaccatgtgaggaggaaatgagacagtgccatctatgaagcagagaaacccttaccagacactgaatcggccggtgtcttaatctttgacatttcagcctccagtactgtgactaatacatttctgttgttcataaatta

SEQ ID NO: 202283 - DNA, 311 bp, Homo sapiens
atccttcacccactcctgtcgtcatatccacctttatacagcttggattccctaagccgtcattataatcactccttccaaatatactcactgtccttgcccctctctagctttgccaaatttcaaccctgatttatggttagatttttactaacccttcctcatgctgctgaagaaagttggaaaaaagaaaagaaagaaccaggttggctagttgtgctttgaaattcatgtctattacctaagggactttaatactacttagctcaaaaccattcactacttcattatcctagccaactatctcatac

SEQ ID NO: 202284 - DNA, 665 bp, Homo sapiens
tggatatatgtacagatatagtttttaaatggctctggattgactgtggacatttggagtaaaaacacttttagttatttattttttcagatggagtttcactcgttgcccaggcgggagtgcaatggtgcaatcttggctcaccgcaacctttgcctctcgggttcaagcaattcttctgcctcagactcctgactagctgggattacaggtgcctgacaccacgcccggccatctttttgtattttttagtaaagacggggtttcaccctgtttggccagactggtcttgaactcctgaccttaggtgatccaccccctcggtctccgaaagtgctgggattacaggcatgaggcatggtgctcggccataaaaaaaatttttatttcttatttagctttgcatagtggtttgcaggtacctaattaatatccacctagtgataaaaaaaatataggaaatggtgatgcaaaaaataaatttatctatctcaaaagactatcaaccttctaatttcagatcaccatgactttgtctattgtaggaagttttattgaagtttcttcgacaaggtagtaggcctactgaaggccccatgaacagacaaaaaatataaaaggcagcaagccagatggaaggtattagtaggtactattctccttgg

SEQ ID NO: 202285 - DNA, 495 bp, Homo sapiens
ggcttgagaacactctgtcggtggggtctggctgctttagtccctgaagccccagggtgcggacggtcattagcccctgaacctgtgtggccacatgcagttatgggatggtgtccccaaagatgcagatgtgtatgctttcattcaataatgtttttactgtcagaacaaaaggaaaaatttaacattttcatagaaaatgaggaagacctctatgaatactttcttagacccctggggccttcagactccagtgtgagagaaggttctgggcgattctgatgcatagccaggtttagaaaccagtgttataaaagctttagcagaagtggtgtgaattttgtgcaatgtgactttttcacatgctcaggaactttactcactatagcctgttaggacagtcccctcagtggaacctgcaccacaggcattgtagtccagacagttatcctctttcctgcctgggattagccccaccaccacagccttccccag

SEQ ID NO: 202286 - DNA, 640 bp, Homo sapiens
ggggtacacagcctcgacgtgagacattcttgccaaaagcaaacccgggtgaatcagagctggagaccttatttctcatttatgggaaattaaggggacagaggaataagtttatgaccccacaaggaaacagatccaggaaagggaacgttctgtaacacattggcctgcccattgccaaagaaaatgtctttgaaaagaaaaaaaaaaaggccaggcacagtggctcacgcctataatcccagcactttgggagaccaaggcaggtggatcacctggggtcaggagttcaagaccagtctggacaacatggtgaaaccctgtctctaataaaaatacaaaaattagctgggcatggtggtgtgtgcctgtagtcccagctactggggaggctgaggcaggagaatcgcttgaacctgggaggcggaggttgcagtgagctgagatcccgccactgcactccagcctgggccacaagagcgaaactccatctcaaaaaaaaaaagaaaggaaaaaaatctaggtgtggtagctcacacctgtaatcccagcactccgggaggcggaggcaggtaaatggctttagctcaggagttcaagaccagcctggacaacacagcaagacccgtctctacaaaaa

SEQ ID NO: 202287 - DNA, 608 bp, Homo sapiens
tatgttatccccaatggaatccgcacataatttatgctctactgacggtatagatgcttgttacatctagtcctacatacatacaaatgtaagaatagcatgcatcattcagtgttagaaaatgtttctcaggtgctatacgcaactgtggtgaataccaaagtgatttaagtacctcaggaatcagaattggaatgtgaaaagaacacgaatgctcagcataccaatatttcaattaggcaagagctaattgctttcatgctaaccacgtgtaaggatttggcaggcaattatgtttttttctttcttaagtgcttcctcctctggaatccttcctctaattggaacagtatctgctttgacatcagtggcatacaacccacaaactctcatgacctttgtatgcaggtgccttgtgtgttgggagcataggtcaagagatatcccttggtgagcagtgttgcacataagcgttggtgtttagggctttaggtcatgctgtgccagcacagggcatggggtcctgagagacgaaagcaccatttgcctgtaacaaagcaacataggtattggggtgcataaaatggattccattaggggggggatcc

SEQ ID NO: 202288 - DNA, 1096 bp, Homo sapiens
  misc_feature (898)..(898): n is a, c, g, or t
ccctcaccggaagctgcacgctctgggaagcgcagaggcgggggtgctgctcgcgctggggagcacgtgaggggacactcagggactgcccgcgcgaatggcttccaacgcatgcgccccaccccacatttcacagtcgccatgacgaccgggaggtccgcaacggctgcggggacaagtccgttgaggctgccaggttacatttagtaacactttttgaaaatgatcgtcatttctctcacctctcatctttggaacgggagatgacttttcgcactgaaatgggactttattattcatacttcaagaccattattgaagcaccttcgtttttggaaggactgtggatgattatgaatgacaggcttactgaatatcctcttataattaatgcaataaaacgcttccatctttatccagaggtaatcatagcctcctggtattgcacattcatgggaataatgaatttatttggactagaaactaagacctgctggaatgtcaccagaatagaacctcttaatgaagttcaaagctgtgaacggattgggagatcctgcttgcttttatgttggtgtaatctttattttaaatggactaatgatgggattgttcttcatgtatggagcatacctgagtgggactcaactgggaggtcttattacagtactgtgattctttttcaaccatggagaggcacccgtgtgatgtggacaccagctctccgtgaaaagttttcctatccttccctgtacttcagatgtgtttttcaccttgatctcaagaccttagcatggatcgaaggccctcatggacccggtttccaaggtggctaaaagctacctgacaaatgggcccagatgaatacttttaacccgatcaagccattcttaatttntcccagtaatgtgggggcatcatgtaacccagcgcagatttccgaagaaccactattgtaaccagaatttcgtacccgaagatgaacaggagtgtgggacatcctgcactttttcacatagtctcacctgctatcgaagggccgcacctaagacagctaacgtcacacgacggcggtataatcacataggtatgacgt

SEQ ID NO: 202289 - DNA, 1061 bp, Homo sapiens
ccctcaccggaagctgcacgctctgggaagcgcagaggcgggggtgctgctcgcgctggggagcacgtgaggggacactcagggactgcccgcgcgaatggcttccaacgcatgcgccccaccccacatttcacagtcgccatgacgaccgggaggtccgcaacggctgcggggacaagtccgttgaggctgccaggcgagtcaggtctctctggacctcgcctgactcggctgggctgtgcctgaaattgacccagctccaccatactccttgattatgagaaaacaaggagtaagctcaaagcggctgcaatcttccggccgcagccagtctaaggggcggcgcggggcctccctcgcccgggagccggaggtagaggaggaggtggaaaagtcggtcctaggcggcgggaaactgccaaggggcgcctggaggtcctccccggggaggatccaaagtctgaaagagcgaaaaggcttggagctagaggtggtggccaagacctttcttctcggccccttccagttcgtccgtaattccctggcgcagctccgggaaaaggtgcaggaactgcaggcgcggcggttctccagcagaaccactctcggcatcgctgtctttgtggcaattttacattggttacatttagtaacactttttgaaaatgatcgtcatttctctcacctctcatctttggaacgggagatgacttttcgcactgaaatgggactttattattcatacttcaagaccattattgaagcaccttcgtttttggaaggactgtggatgattatgaatgacaggcttactgaatatcctcttataattaatgcaataaaacgcttccatctttatccagaggtgagtcataatttgagacaaataatatttgtagagtgatcctctttgtcagataaaaatagtaagcacaatcttgttaagaaagggaggggacgtttcaggtttattaattgtgtgtatccttatagttgagtagaatatcataagttcctctcttaaaatttaaagaccccagaaactgttctctcatgaactc

SEQ ID NO: 202290 - DNA, 1539 bp, Homo sapiens
  misc_feature (1341)..(1341): n is a, c, g, or t
ccctcaccggaagctgcacgctctgggaagcgcagaggcgggggtgctgctcgcgctggggagcacgtgaggggacactcagggactgcccgcgcgaatggcttccaacgcatgcgccccaccccacatttcacagtcgccatgacgaccgggaggtccgcaacggctgcggggacaagtccgttgaggctgccaggcgagtcaggtctctctggacctcgcctgactcggctgggctgtgcctgaaattgacccagctccaccatactccttgattatgagaaaacaaggagtaagctcaaagcggctgcaatcttccggccgcagccagtctaaggggcggcgcggggcctccctcgcccgggagccggaggtagaggaggaggtggaaaagtcggtcctaggcggcgggaaactgccaaggggcgcctggaggtcctccccggggaggatccaaagtctgaaagagcgaaaaggcttggagctagaggtggtggccaagacctttcttctcggccccttccagttcgtccgtaattccctggcgcagctccgggaaaaggtgcaggaactgcaggcgcggcggttctccagcagaaccactctcggcatcgctgtctttgtggcaattttacattggttacatttagtaacactttttgaaaatgatcgtcatttctctcacctctcatctttggaacgggagatgacttttcgcactgaaatgggactttattattcatacttcaagaccattattgaagcaccttcgtttttggaaggactgtggatgattatgaatgacaggcttactgaatatcctcttataattaatgcaataaaacgcttccatctttatccagaggtaatcatagcctcctggtattgcacattcatgggaataatgaatttatttggactagaaactaagacctgctggaatgtcaccagaatagaacctcttaatgaagttcaaagctgtgaacggattgggagatcctgcttgcttttatgttggtgtaatctttattttaaatggactaatgatgggattgttcttcatgtatggagcatacctgagtgggactcaactgggaggtcttattacagtactgtgattctttttcaaccatggagaggcacccgtgtgatgtggacaccagctctccgtgaaaagttttcctatccttccctgtacttcagatgtgtttttcaccttgatctcaagaccttagcatggatcgaaggccctcatggacccggtttccaaggtggctaaaagctacctgacaaatgggcccagatgaatacttttaacccgatcaagccattcttaatttntcccagtaatgtgggggcatcatgtaacccagcgcagatttccgaagaaccactattgtaaccagaatttcgtacccgaagatgaacaggagtgtgggacatcctgcactttttcacatagtctcacctgctatcgaagggccgcacctaagacagctaacgtcacacgacggcggtataatcacataggtatgacgt

SEQ ID NO: 202291 - DNA, 423 bp, Homo sapiens
gcccccctgaggctccgtgttactgtggtctgcacggtcagagctgtccagccctctggaacccatggaagatgactcccttctgctgagtattcatgggaaagctgctttccttctagaagtaaagagataagtttgcagctgggcacagtggcacacgtctgtaatcccagcactttgggaagctgaggcaagcggatcacttcaggtcaggagctaaggccagcctggccaacttggtgaatccccatctctgctaaaaatacaaaaattagccaggtgtggtggcacgcacctgtaatctcatctactcaggaggctgaggcaagacaatcacttgaacccaagaggcagaggttgcagtgagccgagatctcgccactgcactccagcctgggtgacagagcaagactccatctccaa

SEQ ID NO: 202292 - DNA, 237 bp, Homo sapiens
  misc_feature (69)..(69): n is a, c, g, or t
gctgtctttcccttccagcctggaagtgttgcagaggtgtgcatcaccctttgaccaggccaacctganccgtcaagctgccagatggatacgaattcaagttccccaaccgcctcaacctggaggccatcaactacatggcagctgacggtgacttcaagatcaaatgtgtggcctttgactgaaatcagccagcccatggcccccaataaaggcagctgcctttgctccctttga

SEQ ID NO: 202293 - DNA, 1664 bp, Homo sapiens
tgctggtgcacatgtgagcaggcagatcttgccttctctgccctgccagtgtgcatgtgtgcatgtgccctgccctgccactgctgctggcatgagtgaactcagcctcctcctccccacaccatgccatcattgcagtcaaagccttggcaggcacagagtccaccagcctcaccttcaccagtgccttgcccctgcactaacactgctgctggagtgaaactaggcagggagaacagtggacttaccacaccctgagcagccacccttgcctgcaaaaactcagacagagggtgcacgcagaccagcacctgccagtctcccgctcccatgctaacaccactaccagcgggacagcatgcgaagttgccattgggcgtgaggggcccaccttcccatgtcatgctgcctccactgctgctgccaatgcccacatggaggctggcacctgggcaccccctagcaccctgccatagccaatgagcatgcaccctgctgcgctgccactgccactaccactggcacatgtgaatgaggacagattccactgccactgccctacaaaatgctttggctggcaccacccattggagtgttgtgaccagcagtcagggagcaccttggctgcacccagcacagtgggttcctaaccttgaggagccagagaacgaagttgggcctgataccaatcccctagggttagggtatgcagtctaggagttggaagcctagctttggctccctgaaattttccagaaatgaagccagtcatttgaactcatcttataacacaagcaaaccctcaaggtcatcaaataggatacaagagaaaaaaaaaccatcccaaggacagcaacttcaaagactgaaggaacatcagtctgcaaacatgagaaagacccagagcaagaactctgaaaacacaaaaaactagagtaccttctttctccagatgaccacactagctctccagccagggttctgaacccgcacatgtacccctaaacttaaaagatttttaaaaaagagattcagagaaggactgtagctgtggacccaagctcccttcaaagcactggcaggtcaatcgtttgcaacacagacagctgtatgtagagctctgtgatccacccaattattggctcatcaaggagtgtgccacatgccagatgctctgcagaacccaacagaggggttgctcctccatggaaacaacaagaagctttgatcaaagagcctgtattgactccttcagtgaaattcttgactgaaataatcaccttcttaaaatacacacatggtgaggtttgaagaggggaaattgccatccaggtaagaaaccttggccttgtcccaatttagtagtgctgaaggtgtgttcatttgaacatagatcatgtgctaggtactgggaggatacaggaatgagcatgggaataaactttacatagctcttgttcaagcaggaactttacaatctagttagaataaagaattatctgtgagtcctggttggacagtgtgtatcccagcactatctaggggtaaggatgccttcataccaacctcgtcatgactgtgctaagtggcaggtctgatttggttatagaactggatacatcagacagttttaactttatgctattaaatatttgaacatatca

SEQ ID NO: 202294 - DNA, 1672 bp, Homo sapiens
tgctggtgcacatgtgagcaggcagatcttgccttctctgccctgccagtgtgcatgtgtgcatgtgccctgccctgccactgctgctggcatgagtgaactcagcctcctcctccccacaccatgccatcattgcagtcaaagccttggcaggcacagagtccaccagcctcaccttcaccagtgccttgcccctgcactaacactgctgctggagtgaaactaggcagggagaacagtggacttaccacaccctgagcagccacccttgcctgcaaaaactcagacagagggtgcacgcagaccagcacctgccagtctcccgctcccatgctaacaccactaccagcgggacagcatgcgaagttgccattgggcgtgaggggcccaccttcccatgtcatgctgcctccactgctgctgccaatgcccacatggaggctggcacctgggcaccccctagcaccctgccatagccaatgagcatgcaccctgctgcgctgccactgccactaccactggcacatgtgaatgaggacagattccactgccactgccctacaaaatgctttggctggcaccacccattggagtgttgtgaccagcagtcagggagcaccttggctgcacccagcacagtgggttcctaaccttgaggagccagagaacgaagttgggcctgataccaatcccctagggttagggtatgcagtctaggagttggaagcctagctttggctccctgaaattttccagaaatgaagccagtcatttgaactcatcttataacacaagcaaaccctcaaggtcatcaaataggatacaagagaaaaaaaaaccatcccaaggacagcaacttcaaagactgaaggaacatcagtctgcaaacatgagaaagacccagagcaagaactctgaaaacacaaaaaactagagtaccttctttctccagatgaccacactagctctccagccagggttctgaacccgcacatgtacccctaaacttaaaagatttttaaaaaagagattcagagaaggactgtagctgtggacccaagctcccttcaaagcactggcaggtcaatcgtttgcaacacagacagctgtatgtagagctctgtgatccacccaattattggctcatcaaggagtgtgccacatgccagatgctctgcagaacccaacagaggggttgctcctccatggaaacaacaagaagctttgatcaaagagcctgtattgactccttcagtgaaattcttgactgaaataatcaccttcttaaaatacacacatggtgaggtttgaagaggggaaattgccatccaggtaagaaaccttggccttgtcccaatttagtagtgctgaaggtgtgttcatttgaacatagatcatgtgctaggtactgggaggatacaggaatgagcatgggaataaactttacatagctcttgccatcccggcagcacccactattttcagtctcctcccctatgtcctggtttggattgccctgtgcggatcctggtcctatcccgcagtaagtaatgccctgtcagtcccttgtagtgtgtgtcaatggtggcaggttggatttggttattttatatgatgtatatccagggtggggggagtgggcggttttcatttttcgtcaccatttcatgaa

SEQ ID NO: 202295 - DNA, 384 bp, Homo sapiens
aatgaggctgggtcaagctactttaagcaaagaggatttgcctgcttacctttgacatgcaacctgagatactctgaaaacagaaaaattgctgttctgcctctaccaagctgcccagaatggctggacttcaaataaagcagaaggggaattgggagaacaaacaagagaaagggtagtgaccgatggacttccttataagggaacagtccccagatacacctcattccctcaagcagtaatggacagacaacctaaccaatgggaagcttcacctgggtgctgtagggagatagctgctggtcccagcaaactgctctctagagacagaaagtatccatttggtatgtgtctcgctaaattcaaactaacacagattcctca

SEQ ID NO: 202296 - DNA, 1958 bp, Homo sapiens
  misc_feature (944)..(944): n is a, c, g, or t
agcatatgcccagtctttgtgttatgtttctcatggatgaaaagacagtataggccaggtgtggtggcttatgcctgtaatcccagcactttgggaggctgaggtgggcagatcacctgaggtcaggagttcgaggccagcctggcgaaaccgtgtctttactaaagtaatcccaactacttgggaggctaaggcatgagaaacacttgaaactgggaggtggaggttgcagtgagccgagatcacaccactgcactccagccaggggatagagcgagactctgtctcaaaaaaaaaaaaaaaaaaagggaaggattgattgatttactgagagaagtataaggaaacaaaatgccccaagacccttgtccggaaggaagggagggagggaaaggaaaggaaaggaaggaaaggagggagggagcgaaaagacagtaaagacagtatgaacatttactgagagaagtataattatcaggggaacccgcccccaatatttcaacggaggttctattttccataagtgttggccggctgagaaataaagagtacaaagagagaaattttacagcttggccaccaggggtgacatcacgtatcggtaggaccatgatgcccacccgaacctcaaaaccagcaagtttttattaaggatttcaaaaggggagggcgtgtatgaacagggagtaggtacaaagatcacatgcttcaaagggcaaaaagcagaacaaagatcacatgcttctgaggaaacaggacaagggcaaagcagaactcctgataagggtctatgttcagcggtgcatgtattgtcttgataaacatcttaaacaacaaaacacaggttcgagagcagagaaccggtctgaccaaaaatttaccaggatggagtttcccaatcctaataagcctgagggtactgcaggagaccagggcatatttcntcattatctcaaccacataagacagacactcccagtgcagccatttatagacctccccccaggaatgcattcttttcccagggtcttaatattaatataccttgctaggaaaagaatttagcgatatctctcctacttgcatgtctgtttataggctctctgcaagaagaaaaatatggctctttttgcctgaccctgcaggcagtcagaccttatggttgtcttcccttgttccctaaaaatcgctgttattctattctttttcaaggtgcactgatttcatattgttcaaacacacgttttacaatcaatttgtacagttaacacagttatcacagtggtcctgaggtgatgtacatcctcagcttacgaagataacagaattaagagattaaagtaagacaggcataagaaattataaaagtattatttgggaactgataaatgtccatgaaatcttcacaatttatgttcctctgccacggctccagccggtccctccatttggggtccctgacttcccgcaacatataaggaaacaaaatacccccagctccttaccccagacccttgtccagatagaaatttagacttattaatatattgaattgttcaagtgtccatatactaagaattacatcagcgatgtggaactatggataggcttccttgggttcctggctccacactataaccaccgccccccaccccttaaatttctgtatagcagacttaagagtgaatatcaccatatgcagttgttcatgtacttcttcccctttctcttctagctcttgacaaaattctcagggaaaactcttcagctctggatgtctccctttttgtggatcaaacacaaagggcatcattctaaaatatatacagaaccataaaagccccaaatagccaaagcaaccctgagcaaaaagaacaaggctggaagcatcacactaccagacttcaaaatttactacaaagctctaatacctaaaataacatggtactggcattaaa

SEQ ID NO: 202297 - DNA, 350 bp, Homo sapiens
cagtcaggttttaaaatgcatgtatctttggatacagcagtcccttgcacaaggatgttcatcatggcatcacttatttacaaactggaaacaatgaaaaatacctcttgataggaaattggtaaaataaattatgctacatccaacttagtgaataccctgcacccactgaaaacagtgaggtggaacagatgaacttatgtaatgagcgcccagacatctgactgttttgtttttagtgactgtctttggagagaaggactagatctgaatgaggaagatatatacacacatgcacttttttgaacccacagatgcagaatatattgtatggatgcacataacttttt

SEQ ID NO: 202298 - DNA, 712 bp, Homo sapiens
acgagatcatgcgtatggggttcacgctgggaggcagtgcccgggccccttctttcacagctggagttttggcagcctgtcctcgggttgttcagcctggtgaccctagccgcctgtgatttactaactgttttacaaatgtttcctcgctctgggaggtttgatacactcttcatcctcctcagctcaccagagtcactcagtctctgagccaaacctgcctttgtttacaacttttccggaaattttcacagagggagagaaactctccctcctctttcagtgttttatttttaagtcaacacttttctcaagtttatttgtgctaaaccaaattctcctacaaggtattgctctgtattcaaatgggaattgctgcatttctataaatagaatgaaggtcatgtgaacgagttcagaagattctagatatcacattttacgggacctttacatttagttcactattttttgaaaataatattctatgtatggatttgtcttttattcccacattcatatttgactgcgcattatgtgaaaaattgaatttgggaaacattgagtggaatattttataagctgaaatacccatgttaaaaataacaaaatgtgtggttgcttcatcattgtaactttcttaaaaacagaattataggccctttatataatattcctagaaaataatgtctcttaaaaacagtacagggta

SEQ ID NO: 202299 - DNA, 606 bp, Homo sapiens
tttttgggcattttgccactgtgtgctgaggtgttggcaggtttatgtcacagccagctaactgtttctagattttcctagagagctttttagtgatttaactcttttgccttgcctcggagtgtctgttgtagggatgaagttcacgtgcgttcgcttttagggaataaaatagtcattaatgctcaggcgagtacaggaacaaggagagttgatgttactttgtagtgaggacagtgcttcaagacagatgaatgacaactgggaatatttcctgccacgtgaaatgtgggaaataaagaatcaccatgaatccatcaggcccttagaagcttaaatgctgctgttgtctataaagtttagtcatatgcattcgtaactttattatgaattataggagaacagataaaaatagcaaagtagccttatcaactagatgtagtttcccctccaaagaatttattaataattttatttaaagaaaatcttttgtagtttttactacttaagcaactactttcttttaaagtggtcaggaaaagcaatcatacaaaataaagatatgggagaaatttaaacattgaaatattttggagtttgtatgcc

SEQ ID NO: 202300 - DNA, 829 bp, Homo sapiens
gtagtacataactggtttctctaaaacatatggtagttatagcaatatacactatttgaaaaagaaatggtggcctagctagcttatttcagttttcgccttactgaaaactcacagatgtagattcggccaagaaagctgaaagggcctttcaagtattctcctggcattctgagactaaaggtgtcatgatcaccctaagccatttggaaattgtcatggcaaattgtgcaggaaaaatggagacaatctaactgtatatgagaagaatgagtaataaactgtggcttagtcattcaatggaatactacatctagttcaactgaatgaaaataatctccatggatcaacttggacctcccaggccctggcgtgaaggtggcactgtgactagctcttgccgatggaatgggaggagtcagttagaaattttcatatggtcaaaatacccatggaatatatgagtggcagcagtaaacaatccttgaagttcttgcttgtttaacttgactgttggtgatgcccaatgaggccctgtctgctccaagcaaattacataaaaaagatgtgaataaaaactcatcaaatactaacagagactgtgtctaagatgccaattgaagactggaacagccatatgagtgtggggtattcctggaaacctgttctagtaggcactggagaagacacaggaacctctcaatacagaatagacacactttgcactcagtaataatgcactaattgacgaatatattgacggagtgttggtttgcttcacaatctgctggtaaacatattcatttttgggtgaatttcaggccttata

SEQ ID NO: 202301 - DNA, 421 bp, Homo sapiens
ctctttgcaattactctttccccttctgccctccttaccaacaccaagctgcaagtgtgtccaggttttaatcagcatgacaatcctacctgcactgcagcatcacccagcaaatgctcaagcctggaccgcttcccccactgtttcctctgtgaacatgcttccattcatcctgtctgatgtgctgtaacctctcagctgatgaacctgcccacccccatacatttgccgccaggtattcattgttttgtatactttccaactatcattttgacgatgcccgacgagggggaaagtctccatttgccagcctctacaaaattagaaaaatacttgtaaatgtcctttggagaatatcaccaagttttatgagaaagaagggctataaaaaataaaaagcagcggctaatagcattctaaa

SEQ ID NO: 202302 - DNA, 584 bp, Homo sapiens
caggcaggcgggaaggggaagggaaaaggggaagggaaagggaaagggagagggaagtagggaagggagggaggaagggaggaaggaaagaaggaaggaaggaggaggaaggaaggaaggaaggaacaatggtatgtttttgaagagcagtttcacagtaagtaccaaaattatttaaaaatccacttctaggtgatctactcaagagaaatgaagacatgtctacacaaaatcttgcaggcaaatgttcacagtaccataattcataaattagccaaaacatgaactctataatatccatctgatggatagataaaatatggtattattcatataatagaatactttcgccaataaaaatgaacaaactactgatacatgctacaacaagaaccaatctcacaattaagtaaaagaagccaaatgcaaaagtccatctatactatgaccccagtactataaaatgtccagaaaatacaaatctttgtttgttttgagacagtctctctctgttgcccaggttggaaggcagtggcgcgatctctgctcactgcaacctccgcctcccaggttcaagtgattct

SEQ ID NO: 202303 - DNA, 216 bp, Homo sapiens
ctggctcctgttttggccaagaatatgtggattagggtcacaggagggcgagattttaatttcacaaaaatatgtaaagggaagggggagaagggggagaaaaaaaagattacttgcagagagcatgagtaccaatgggaggcatgcttaggtgactaacgacacctctatcagaagaacaaactcgatctgcatcaagcattgagacagatgagg

SEQ ID NO: 202304 - DNA, 102 bp, Homo sapiens
tataatccctgactctagaaaatataacttagtggtttgaagcagacaataaaaaattgtcccattggctgggtgtggtgcctcatgcctgtaatcccaaca

SEQ ID NO: 202305 - DNA, 265 bp, Homo sapiens
ttttctcttatagccattcttgtgatttttacaaatgactgcaaattacgttactctagacaaaaaggggagtacaggagccaaatacagcctgtagacactttttgttttgccctcaaagtttctttttttaaaatctgtttttttggtggtggttattattattatttttttgagacagagtctcgctgtgtttcccaggctggagtgcagtagggtgatcttggctcactgcaacctccatctcctgggttcaagtgattct

SEQ ID NO: 202306 - DNA, 422 bp, Homo sapiens
aattacactgacaggaaactaaaaatgaaaccatgaagaaataaatcgtgataatgggggaaaatgacctaagccatgagaaccctcactccctaggccagtgattcaaatgcactgtggcacgagttagacgagacagctcaatgccatgcagcgtgctactggcaagtaccgttgttatcttttggaagtaaaagccttttgcttctgggagcttaggagcatgtaaaaaaaaaaaaaaaaaccttagtagcagaggcctgtaacatctgtacactgaaatccatttactgggctctttgaggaactatgggatagcttgcagggctgaggaggaaaggatgaaataaaacttttttcccttaggccgtgtgatgaggaaatggtggagaggacaagttctgtactctcggaaccagtgg

SEQ ID NO: 202307 - DNA, 199 bp, Homo sapiens
agttaaagaggcagggtgacgtaacacaagaaatgtgggctttggggtctcttaatttctctgaagtttcctgtggatgaaatgggcataacaacatccaccttagcagcttgttgtgaggattagagaggaagttacatacacacagcagctgctcagtcaaaggtggctccattcattttttttttttttttttgga

SEQ ID NO: 202308 - DNA, 197 bp, Homo sapiens
tggtgttgccagaagcttggaactgacgggtcagcagagaagaggcagaggccatgaccttggggtggtcagcagcactgggtgtccgccctccaggcctcatgcctgtgactgtgcagagaccgagctgaccaggacttgctggccagtgtggctgtcaggctggtgatatcggggtgtgctttccatgtgatgtt

SEQ ID NO: 202309 - DNA, 602 bp, Homo sapiens
gatacaaagcattttgctgagattactggcactatataaaccctgcactcccagggagcagtagaaatcttgagaatggatccattagagtgtaaggcagacgttaaagatggagaaaccaacttctaatgacagcttggagcatctggatctagtcccagactttttagttataataactgcaagaaaaaatctacatcctgaaagggttgaacccatcttgaaaatggcaaaatctccatcctggtgatcactggcaccatcactcccagtacagccatcactctatgggatcctgggcactgcttagcactaggaaggcgaatggctttaaattatgattcctgtcctcaagagataagtcacattgttgaaaacctgacatcaacgtacaaagattcataatcataaaaggtaactcttgtggccatgggtgcagtgtctgccatgcagaggagaagccgctggttgtagcagcaacactccagcttacctggagcaaagtgcataaaggaaaggccatgtgaggacacagcaagaaggcggccctctgcaacctgaccagcaagatctcaccagaaaccacccctgcttgcactgtg

SEQ ID NO: 202310 - DNA, 463 bp, Homo sapiens
ataccaaagagcagcatttgtcaataacaggattcaaaggacacatgtccagcctaagaggactccatcttgtagaaattctaaaactatttctattgagtgcataaaattgtctcttttaaattgaataaaaaaacagtaggccggacccagtggctcatgcctgtaatcccagcactttgggagactgaggcgggctgatcacttgagctcaggagttcgagaccagcctggccaaaatgatgaaaccccgtttctactaaaaattggctgggtgtggttgtgcacgcccctgtggtcccggctccatgggaggccgaggcaggagggtgtcgtgagtccaggaattcaaggctgcagtgagttgtgatagatcgcgccactgtacttcagcctgggtgacggcaagagcctgtctctgaaaagtttcatagaagaggttagtactagacaaagggaaaca

SEQ ID NO: 202311 - DNA, 304 bp, Homo sapiens
ttcactttctacaccctgcaagagggccctgtggggaagggaatacaacaggacttccaaagtgctggtaaggatctctttcttgatctgagagctagttacatggatgtgtttggcttgtgaaaatctatcaagctgtaaacttacatatacatttctgtatctttcatttacttcagtaaacagtttttaaatggattgctttaatggcagactagatgtggctaaagagagaattaataaaaagggagagattactgaagagattacccagagtgtgtcagagagaaaaaaaacgatggaa

SEQ ID NO: 202312 - DNA, 484 bp, Homo sapiens
tactactactaaattcgcggccgcgtcgacagaataagtactggcgaaccatctctgtggtcttgtttaaaaagggcaaaagttttagactgtactaaattttataacttactgttaaaagcaaaaatggccatgcaggttgacaccgttggtaatttataatagcttttgttcgatcccaactttccattttgttcagataaaaaaaaccatgaaattactgtgtttgaaatattttcttatggtttgtaatatttctgtaaatttattgtgatattttaaggttttcccccctttattttccgtagttgtattttaaaagattcggctctgtattatttgaatcagtctgccgagaatccatgtatatatttgaactaatatcatccttataacaggtacattttcaacttaagtttttactccattatgcacagtttgagataaataaatttttgaaatatggacactgaaaaaatataaa

SEQ ID NO: 202313 - DNA, 543 bp, Homo sapiens
ccaacaccactattggagagaaagtggagaatgtgtattagaagtactagtctttgaaggcaaaacagctgtatagagtgagcttaagtgctggatccctgtggttaggaagggacactaagcctccgggatgtgagagtcccatggaaggcagtaggcccaggataaagcaggtgtcagcacagaaagcccaccatcacccagaaaagggaagaaatacgctaccaccatcactctttctgccaatgacttctttgcacacctccaccctatctcctggctcagtctcccatgttctcatagctagggaggtctccattgtaatttgtatggggaggttaacctataggccattctgatgatcccagctccctttcactacaacccccgtctgcatcctttgctttgcagtaggatttgagagaggaaggatgaagatgtagccacaggatacatttaaacaggcacagagtttgaggggtgggggggaacaaaagcaaaacaataaaaccttcaccagtcattaaagaaatgaaaatgaac

SEQ ID NO: 202314 - DNA, 411 bp, Homo sapiens
agaaaaggtctgaaaagacagtgttttccagaaggttaacagtcatcaattcagaggattggaataggttgggggtataataaaaatggcttctagctttatgtttgaaatttttattgtgaggctgtgtttatgcattgtgtaattaaaaagaggtaaaattggccaggtgtggctgcacgcctgtaatcccagcactttgagaggcgggcggatcacttgaggccaggagttcaagactattctggccaacatagtgaaaccccatctctacaaaaaatacaaaacttagccaggcatggtggcatatgcctgtaatcctagctgcttgggaggctgaggcacaagaattgcgttgacccaggaggcggaggttgtagtgagctgagattccgccactgcactccagcc

SEQ ID NO: 202315 - DNA, 348 bp, Homo sapiens
aataattgaaaactaaaagcaaacttcctatattatctggtcaacttttcaggtaaaaacacttggtaaagtgtaaagaaagtgtgacaaacttaatattgttttagtgatttctccaaattaacatgaaccagtgaagttttactattgtcagaaacttgaaacaacccagatgttcctaaaaatctcatgtatggagtgggtaaataatattgcttatagtttcatagtaactgcttgactcagaaatagtcaggttgtaaatttcaaatcaatccctagaacctcactgcacaaaacaccaggtcaagaaaataattatgtttgaggtttacggtttaggatcca

SEQ ID NO: 202316 - DNA, 621 bp, Homo sapiens
tgtattaataaatattaaatctatctcatgcaattttccctcaaactatttttcatttggaatttccttatttttttttaactgcaccttttttgtttagacacacaaatactttggaatttcaaatttatagaaaagttgaaaagatagtgcaatgaaaacccatataccctttatccagatttatctaaatattatttaacattttgcctcatttattaattttttttccatatatatacacacacacacacacacacacacacaagcacataaaaataacaggagtggtagtggtaatgtcaatgtgttctaaacagggacatgtgtatttagagctttatatctctgagtgtagaatgaaaagttttaagaatatgtagatattattgcgtgtattttaagtagatatttttacataattagcaattataagtgtagacaatattaatttcaaatatgtacagtctgaaggtaaaataactatgagagttaaataactatctctatatatgtagaggctcgattattagatgaccctcagtttgatagtctttgtctagatacaatagacaagagcacagtggtatgcataagtgcagaagggtaacgtgatataga

SEQ ID NO: 202317 - DNA, 356 bp, Homo sapiens
aaaatcgcttgaactcgggaggcagaggttgcagtgagccaagatcgcaccattgcactccagcctgggcaacaagagtgaaactccttctcagtcttggttacctctggggcttgacgggccctgtcctgccccacctctctctacagcctctggccatttattttagctgcccctccccacacaccagcctctccaggcccctgcatcacagtcatctttctaaagcacagtacagctcagcctgttgaagaacctgccttggctcctcgttgcccagaaattcaatgtagacatccttggtaggcattcagggtcccttctggtctggcccaccctgccttccacgcccatct

SEQ ID NO: 202318 - DNA, 854 bp, Homo sapiens
tttttaagctttaaaattgtctgctttaaattgtcttcccattcagatatatcaaaacaatatataattatttacaatcttgctttcagatttgcttagaaaaagtattaagcaccaaaactgtaacaatgggggttgtttgtgtgttttggtagagatagtttccctatgttgctcatgctggtttcaaactcctggtcaaaactatcctctggtctcagcctcttaaagcgctgggattataggcatgagccacctcacctggccaaaaaatttgtgtatttttgatgtgtacattaactagagttaataattatgatattctttgcttattgatgtttagcactcagttttgtttttgtgttaatattttccttctgaagtatcacctctgtcgttatgtttaattattcattactttatagagttcagagatttcaccaaattaaaccacaaatcagtctaattttctgtctacttctgttgttgatgtagaatatattttactcagattttcccaagcactactatttgaccaactccatggtttatagcatgtcatatacattgacaggttctaccaacaagtgtattttatagcctctaccagaatagaagttctctcatcctctaaccaacctaattcctccagacccacgtcaaacattaggagttcctctcatgccaagatattttttaagttccttaacttttaaagtaccccagcacctctgattagtttcactatattaaaatttgactttatgtcaaatctctaataaaatttgactttgtcagatctctaataaaatttgactttgtgtcaaatcgctaatttcctcttccactgaaaa

SEQ ID NO: 202319 - DNA, 562 bp, Homo sapiens
ccttctcttcccaggcacagagctagactctagttcccaaccttgcagttatctgtggccacaagactgggctctgccaatgaagcctaaatgaatgacatgggcacttccaggctggcccacaaacacctctcacacatgactcgccattctagttcaccgcctgcttgctaaatgcagaggactccaaggttctggaggaggacagtccacaagatacaaggagctcaggtctcagtccccatatggaagacctactgccaaccagcaacattcgcactgatccctgacgagagaaaaataatggcttattttgttaagctattaaaatgtggaggtttggccaggcgctgtggctcatgtctgtaatctcagcactttgggaggccgaggtgggcagatcactgaggtcaagagttcgagaccagtctggccagcatggtgaaagcccatctctactaaaaatacaaaaattagctgggcgtggtggcacatgcatgtaattccagctactcaggaggctgagacaggagaattgcttgaacccaggaggtggaggtag

SEQ ID NO: 202320 - DNA, 632 bp, Homo sapiens
gagatacggctatctaagtagcgtcttccatttcaactaaaaaattttctcaggtgcaggcctgggacttacaactcatgattccagttccagcttccttaaggtgaaacacattcatattttaaaaccaaattggcatggatacttcaagaggtagtacattccctctcgttggagagacttgagcacaagctggttggctatttgtttatttttattatttttccatctccctctcctagtactggttggctatttagagggcatactatgatggggatttaagaactgctcagacggccagattagattacccaatcaaacactgacaggctttgattctagcttgttctccagtctgcaaatgtcggtacccataatgttctactctttaaatagaccatgcttttccttctcagggtctttccctatgctgtgtgccatgtgtatgtgtttttaaattttcctggaacatcaatacttcccacccctgtacatggctagtgtagacctttttttttaattgttcaaatgttaatttaaatgttttctgcttagagaggccatttctaatccgtctgtctatatagatacattatgttattctctatctctgaatctaatttttcccc

SEQ ID NO: 202321 - DNA, 195 bp, Homo sapiens
ccttcagcgtgagccttttccttgctggaacgtggtcgttggacactacgagcttgttttaaaagcacaggtctttggtgctaagaaggaaaagggagaaaatttgacttgtatatgtacgttattaaggagaaatgtcaggacaaggggctggtatactgggtagtgtgtgaaataaaaaagcctgcgactctt

SEQ ID NO: 202322 - DNA, 518 bp, Homo sapiens
cagctcttggaaggatgggctatctcattagtaccttacaacttccaatgcattgtcacatattggagttgggaccagggtgaggcaaaagaggcctttaagagtcatgcaagtacactggcctctgtcctgccacatgccttatctcacgtaatacccatctgacccttgtctggctatttagttggtttcggggtggagagagcaggggaggtaaggagcagagatgggagagaggacaagctggcagagactctttctctatgaaaagccttgcctgagtcactccttccctcacacttgcatgttactccatccaaacgaaaccagccccttttgtgacttcacaaaatctatactcacactccctgtcactgaactccaggtccagaaaactatgccccctgtgtttggctttaggccaatgtcgtgagatattccacacagacatgtgctgtatcttcttttaaatgttgtgacttttgaccccacaaatctagaatttgtcatctttcaaa

SEQ ID NO: 202323 - DNA, 146 bp, Homo sapiens
ccagctgactgagccccctctgaccaggccctcactgaccaggctccaagccactaaggccccacactgaccaggcccgtgatatattgtgtatgccccaccaaccagtttttcattgtttatgttccaacagatcaggccccact

SEQ ID NO: 202324 - DNA, 194 bp, Homo sapiens
ggtctggagttgggtgtgcctccctagccctatttaggccccatctccatgatcgatgctaggtaaatgtcttcttaagaaatagagccagcccctcaaatccagatctgggaaccaaaggcatgcacgctagaaggggcactccctgcttctctttctacatagcgttggagaggtattttcccactgtgtga

SEQ ID NO: 202325 - DNA, 600 bp, Homo sapiens
tcaattagccctgttgtttgtccatgattcatcaccctctttcatcctccttacccagcttagattccatggttcatcactataatcacacctataactcttttgtccatttcctattgtacttacctagcaaagttccatctgtaattaaacttgactctgaattactccaaaatccaactgaagcagcctaacatcacgggagaaagctgcacaactgtgcagactgatttcactttaagtctatgaccacagatttcaaatgggcacgtgatattgtctaatggattccaaggctacctgctttttccccaagacaactatcacaacccttccttttcttcctaaacctttcatactcctctgcttagtcatgctcagatggggaccttgtcttatgcatcactgaaaattgaagcaattaagcaagaactaatcaccttcccaccatcaacctaccttcacctgtaccgtttcttattacagcagaataaacacatctgttcaaacccctcaatcacgcgttagattctgcttcctctctcctaatctcagacattgcttctgcaattattcactgtttctcttttttcttttctt

SEQ ID NO: 202326 - DNA, 569 bp, Homo sapiens
ccagtccttcttcctgctaaagtcagggtttctgattttaatcaaaaccctagggccatcttaagcatgaccaaaaaagcaccttgcaagttgaaccttatctaattatgcaatgtgtataaacttgagacacataaatctcagtcattggagcaacttgtttttctaagatgctccggtccagtgaaagacgaaagcaaataagggagagattgatctcccagcacttttattgtcagtgctccacacgtcataaagttttggcttgttaaaggaaattccataaacaacttcagttagtaagagtgaagtaactgtgtgccttcctgagcccctgctaaattccctttccgcttgccattacaagagtatgattaagaaaatgccaacaggatatgcgagtgggtggaacagacttcagctggaagccatacagatgcttgatggatgagtagtgacagtgagatgatggccctatctccagagagaatcaagcagtttcatggatctctttctagtactcatttcagtaagatctgctgcgttgctgcatggttgttccgttttgg

SEQ ID NO: 202327 - DNA, 385 bp, Homo sapiens
gtgtatctcattgtctttcattttctaaaatgtaaagatgggaaacaaaatgtggccgatttattgtggcctgagcagtatctagggaaaaactgaagggaaggatagactatgagcttttttatgttttacgttacattattagagattatgtagagaatagaagggtgttttgatcaattttgataaaagtttgtacgaattaaaaagttctctttggtgtgatacttctcaaggtattaatatgctaatgtgcttgtgaatatcttagagaaggataaagtatagtaaactcttgacttatcaattatccctatggactacattttcattaacaaatattaatgaatgtgcctccatgagaagcattggactctgtttttta

SEQ ID NO: 202328 - DNA, 204 bp, Homo sapiens
aaggaatttccaagtatttgctggtggaaaaagagcagaggctacgacaagaatgatttagggttgtactttcagaagaattatctacgacagtaatataagtaatacatttatataagctttcaatcttaaaattctctagttaatatctgaagtctcccattcaatatataaatgagattttcaaaaaaacctagtaaacac

SEQ ID NO: 202329 - DNA, 103 bp, Homo sapiens
atgcttacttcaagaagaagaagctgcggaagcccagacaccaggaaggtgagatcttcgacacagaaaaagagaaatatgagattacggagcagcgcaagat

SEQ ID NO: 202330 - DNA, 245 bp, Homo sapiens
tgaggggctgagtcggtagcagagccaggattggaggcccgctactaggttttcggtccgtgctgccaacatggcactgggagggctgagggcctacagccggctgctgacatgtaagcaagctgtcagtgttgggaatgggaccctacacactggcctagctgcttgtgagtagacacccacgccatccccacccacaccatccccatgacaggatttggggccatcccccacccccagagcca

SEQ ID NO: 202331 - DNA, 685 bp, Homo sapiens
tgcgggaggaggtaaatagagacataggccaaaagaaacagtacagagagaggagacaaaagatagcacgcctaatctgcaaacatatctgaaaactaacatttcaagacctatggcaaagtgcctagcaactctattaagcatgtttatgcccactgtacagttgagaaaggtccacaaataatttgcccaaggacacacacaacaagtaaatgataaaccaatacgtgaagaaaagccatccatttgcaaagccttgacctcatctattcaccactcactccaggcacaaaccagcctggtggaagagcaggtgctctgctgactgggcttctggtcccaggattgtggccagagaagagtaaccatctgggcctattcctgaagcaaggacaaagtgctgagtgctatggccaacttctggtggtctgccatgctggacatatctcattcacttttacccaggagtgtgcaagtagaagcaggcagaacgcagcagaagagaaggtattacaaatacctgctggcttgactatgtgctctggaactggctctactgacctactgacactcaaccattcttggacaaataaaagccgggtttgtttttaatgtagcctatggtggggggagtataaagaatgattaaaattattattcaccttgcacattaacttctggctta

SEQ ID NO: 202332 - DNA, 522 bp, Homo sapiens
aaaatgctttgccatgaacatgtattaaaagctattgaagaatataatttgaaaaggaaggagattcttctgctgcattgtctggtgaatctgtctagaaatattcctatgtatatataaatttatgtatataatttaacccacaaataggatcacaaatctcagtggcttataaccactgagatttctttcttttttacacatgggccatgaggagtgctgatcatatgcagccatatcaccaactctactggctccacttggctcccaactgtctttccaggactagtagtgagcgggcagccactctctgtatcatgcatggcagagggcagaggctcagggaaggggagaaagctagaacacaaagacacatttaaaacttctgcatggccaggcgtggtgactcacacctgtaatctcagcatttttggaggctgaggcaggaggattgcttgagcccaggagttggagaccagcctaggcaatgtagtgagaccctgtctctataaaaaataaaat

SEQ ID NO: 202333 - DNA, 418 bp, Homo sapiens
aagtaagtatataaggaaaacagcaagttttggatgagcagagtctttgtaaagaaaggtagtgtaatatgacatttgaaaggaatgttagctgtagaccatggaattacccaaggctagtgtgagaaattggggcttttatataaaagaagtatagattcagtgaaagtttttgagcaaactagtggcatgataagaatcactaggattaactcatcagctaactctaacattaattaagattaggagattctgtaagaataaaatgattgactcacccaacatgtatttaataccaactatgtacaatgtactgctaagaattacagacttaagtaatagaataaaaattcttgtttcaaaacttgcaaaccattaagaagaaaaattagacatttcaaattaaaccatagaggaa

SEQ ID NO: 202334 - DNA, 609 bp, Homo sapiens
  misc_feature (415)..(415): n is a, c, g, or t
  misc_feature (436)..(436): n is a, c, g, or t
  misc_feature (469)..(469): n is a, c, g, or t
  misc_feature (473)..(473): n is a, c, g, or t
  misc_feature (508)..(508): n is a, c, g, or t
  misc_feature (523)..(523): n is a, c, g, or t
  misc_feature (525)..(525): n is a, c, g, or t
tgtgatggagctggctgtgtagtcatataactagagaaacaagagaattttgctgtttgtacacgtgctcccgtctactacttctctataatccactgccatggaatgagtgatttttcttagaagcagaggtggagccactgaggaagcacaggcgagccctccccagcacgtgctcactggtccccaacagaacaaccgctgccgcatccatgaggctcccattgtggtgggttgtgtcaccccacaatgtcactgttgctgagcccccatcgcctctgtgttgtggagcagttagagacacactgtggtgtctgagtggctctgtgtgaaggaccgttttctaggtgagaggcacatctcaacacagctgactgatcagactcagccgttttgcacaccctggtcagaatgnaacattccttgggaactcggnccgtgagaagcatccttcctgatcacctgactntagnaacatccttatcgcaccctcccgggcaaaggcccnacagcctgactgcangnacatccttgccatatcctgccgggcagcaagctctaccgcccacacccctccttctcgcagtctctaatcactagtgaattcgc

SEQ ID NO: 202335 - DNA, 652 bp, Homo sapiens
cagtttggaggtgaggttagcaattaaacgataactgaagatgatgggtgatttctggatctactagtacatagtgagctcttactgtgtcccgggcaccatgctaaactctgccttgctttgttgcagcaacactcgtgggtaggtattttcgttaccctgatgaggagacaggggcacagagggtttaagtaacatacttggtgacccggcacaggacagatgtggcagtcccaccctagggcctgcgctccaaaccttgatgccttctgggcgaagccagacgtcggcacgtttcccccgtctgccccagtgctcctagcgtgctttataattagaacagactgcagcgccagctaatgacttcctcatgagattaatattcagaaactcgggagaaaattgaagaacaagaaaggaaataggtagagaatgaggttgtttccactaaggcccaaagcactatttaaaaagtatgtttgagagccgacttcggctgcgttttggcaatcagaaggcttgcactgtacctctcctctgcttgtgcttcgggcattcagtaccggcccctgtcacgacctgtttgtggagggcagctgatcacatccctcctgtcaaagcataagcctgaaccagttcctcgacttctcag

SEQ ID NO: 202336 - DNA, 505 bp, Homo sapiens
tttaaatatgcaaacaatggtgccagtttctgtatctatgtgacaaaaatatatagagtttgtggtatcacttttacctgtttagagcactctttggaaaggcagggaaattactgtgaaggtattggtattccagaagtaagttcctggagtgtttgccttctaaggtgtgaggacgtggtttgtcacacccagttaactaacagatagacggtgtagtgagctgtccggaagacttagcaggttagcctagggaggaaggagaaaggggttctgggcacatggagggagggggagggaaaagagtttgtttgaatctgtcctagattggggtagctttttcggagggaggccttgtcgtgtggacctgctgcatataaagacaggagaattggacctgaggtgtggtgctagctaaagcgccacacagatctgggaatttaagaggagttcatttcctcaatcattaggaagaacttgaaagggtagcaaactgtggtcattt

SEQ ID NO: 202337 - DNA, 289 bp, Homo sapiens
aattagctagtcatggtggtgtgcacctgtagtcacagctgtttggtggggctgagtttggaggatcacttgagcctaggagttcaaggccgcagtgagctgtgatcatgccacttcactccaacctaggcaacagaaagagaccccgtctctttttctctctctcgctctctgtcaactctcattcacacatgcacacatacacacaaaatagaagtactgtcttcgctcaagatttattcttaccctgcaggagataatcagtgatggtcaaatcaacaacagtgat

SEQ ID NO: 202338 - DNA, 127 bp, Homo sapiens
aacctgtccttccccttctccctaaaaatcatgactcttaatgaggccagctaacaagctaaggattggttctaaggctcggcactgcatttacccacctccctgcttcgctgtgaaatgtaaccac

SEQ ID NO: 202339 - DNA, 430 bp, Homo sapiens
ctgaataatccataattataaaatgtaaaaatatacacttaacattatccaatgagaaatgtcttctaagcttcaaaaatttgaatatgaaattattttacaatgtagtatgcaaaatattaagactggaaagaatcttaaaagacacctaggaaaaattcctttccagagatacctttggtatatatgcaagttatacgggttctacacaagtaaaactctgctaacgagactgtattcatattcatctattaaaatatcaagttcactttgttcattctgaaaaaaacaaaaacaacactcttcaatagataatgcggaattttatcctttgtaatcgttgtagaggtcattccaatatcaattttaattcccactgaaagtaattgctctgacttttgaatttcctgatacttgtgtgtaaagtatc

SEQ ID NO: 202340 - DNA, 530 bp, Homo sapiens
gaggtggtggcaggaaagagggagacagcatgaggcctggagttgaagaaagtctcagccttggggtctaatcttttgacctatggagaaagacctgtgggcagatttataactgtcagttcagtctgtcctcataggtgcgcctgggagaggaactggaggaggtagcagggtcagagactgcaaggcagattcctccccacagcctgaatctgtcagaatcttctaagcagcagaatgcattttgggcaccatggcttcattggttacaacctctacctagtaagcagagtctggatttaaatcttgcttgtgtcaaatcttactagaaaaacctagttctctcttatgccctggggactctgatgttcctgctgcccttgcccatagggtatgccaaatcatggttagaaatcccttccatggcccctcgttggtctctaatccaatttttatgttggaaaacttgggttcttaagggcttggcatggtaggccttactctacctttgtgctagatgcccactccac

SEQ ID NO: 202341 - DNA, 278 bp, Homo sapiens
agctaataaagtttgcaagctcatttcggaggaggggattggagaggagaaatacctagttttgatttatattatcatttcttttatgcttcttttggaccattttaacttttccattttgaaaagtaaaagtatcaaagtttactatattttcttatatgatttttattgtcgtgtaattatttcaaaaattggaagtccataaatagctacgctatggttttgcccttttccccaaagcgtataaaaaaataaaatatatgtcagtcaaatgatta

SEQ ID NO: 202342 - DNA, 403 bp, Homo sapiens
ggaggttctttgttagctaatgaaataaaatcttccttcctcagtttagcaaagacaaaggcctggtggtgagaaatacttcaccgcccttcaaaaagttcatctcctccccactccaagcatatactttattctaatgagtgcaactaataattacctagcaagaaggagcatgtctaggattcttgaaagtcaggaagggtagttttaaagctcaccacaaaataatggaaaacattcagataaattacaaggcatcaactcataagagaatactaaccaaatgaagaaaagtactttttttttttttttttactatagattaaaattaaatataacttaattcacattataaagacaactctgaagaccatctggatatgataatggcctgtggtaaaga

SEQ ID NO: 202343 - DNA, 241 bp, Homo sapiens
gtagaaaaattatccattaataccagaacttggtggggcatatgtgggtaataaaggctaatagttttaaaatgaaggttataattaaggctgaaagtatcagaagtcctttgtcaataatgtaagacatgtaatcaacatcagtgatgtcaaacatgaagttgcaatgtacagggaaggtgttgacctaggactttgttagatatacttcatcaaatttgattaaattaagctattttaa

SEQ ID NO: 202344 - DNA, 807 bp, Homo sapiens
ctgtcctggccgcgcccctgtcccgccgcctcccgctcctcgcctggcggatgtaggttgttggcctgaggggagctacgtagccgaggtttgcgctgccgccgccaggcccggtccggttccagcctctgcccggacgctagccggcctggccatggctgaccgcgggtgcccgctggaggcggcgccgctgcctgccgaggtgcgggagagcctggctgagctggagctggagctgtcggaaggtgacatcactcaaaaaggatatgaaaagaaaagggcaaagctgcttgcacgttatataccgcttattcaaggaatagacccatctctgcaagcagagaatagaattcctgggccctcacaaaccacggcgctgcacccaagcagcagaagtctcggcccaccgcctcgagggatgagcgcttccggtcagatgtccacactgaagccgtgcaagcagcttttggccaaatacaaagagaggaagatgcctatgccttcgaagagacgttctgtccttgtgcattcgtctgtggaaacctacacccctccagacacgtcgtctgcctcagaagatgagggctctttacggcgacccgggcgactcacctccactccgctccagagccattccagcgtcgagccctggctcgaccgggtcattcagggctcgtccacctcatcctctgcatcctccacctcatctcacccgggagggagacccaccactgctcccagtgctgcagccacgccgggggccgccgctaccactgcactcgcaggcctcgaggcccacacccacat

SEQ ID NO: 202345 - DNA, 548 bp, Homo sapiens
ctgggtcctgagtctcgcaatacgtcacattgtcattgctgtaacaagtgtaaacagaaaagaacagagctcttacacattaatctccatttaacatagagtgtccatggggtatacagttatggacttggaactgtatccagcagagagcccagagaaatcaaacaatatgatcttggcttttaaggatttatacctttgctggaaaagacccaatttacccaccaaagttcaatgcctttcatttcttcagatcgtacatgtctgtaactaaaagctcccccttccttgagcagtcattacgtaccaggcactatactaagggctttctaggcagaggctctcacttctacaaccaccttgtacagtgcaaaccactactatcccattgcacagatgggcacatggaggcctaggggacaagcaacatgaccaggtcctacagctgccaagtgacagcgtgcagaccttgattcagggtgcatgtcattcccttgtgtctcttgcagcacttaccaccttctttctacccggcaatcaagctcgta

SEQ ID NO: 202346 - DNA, 798 bp, Homo sapiens
tcttttatacaggctagtcccctataggcatgtcatggtgattatttgcaatcctcctgactttcctaagaagagatcagacttagcagggttagtcctcatagcccgaggctggacaggaagagaactccatatcctatgtccaagaatatcatcaaatccttatgaagcaccagttgttgtgacgcaattttaaaagactggttcaaagtgcctgtctgagactaagcagatctgtgggtcgagccaatgccacacccattgtggtctttaagcttcttttccaaattaaaaaacaaaacaaaacaaaaaaaaacacctcttacacattaatctccatttaacatagagtgtccatggggtatacagttatggacttggaactgtatccagcagagagcccagagaaatcaaacaatatgatcttggcttttaaggatttatacctttgctggaaaagacccaatttacccaccaaagttcaatgcctttcatttcttcagatcgtacatgtctgtaactaaaagctcccccttccttgagcagtcattacgtaccaggcactatactaagggctttctaggcagaggctctcacttctacaaccaccttgtacagtgcaaaccactactatcccattgcacagatgggcacatggaggcctaggggacaagcaacatgaccaggtcctacagctgccaagtgacagcgtgcagaccttgattcagggtgcatgtcattcccttgtgtctcttgcagcacttaccaccttctttctacccggcaatcaagctcgta

SEQ ID NO: 202347 - DNA, 467 bp, Homo sapiens
cctctacagtttacatgcatgtaaagtaatgaataattggaagagaccgaattggtattccttttcagtgtcaaaggcctttgagggatgggggaacatcagtatttgttgtaaaagttgagtttatttgctggtttggtcaattactgctagacattttcccctaaaaggtccacccaccagtttagctgactgtcatatgtgtgtcacatggctcttgcaaaatgcttacaagttttgtaatagtgtggcttgaagctgaaatcttttgcactaaacagaaaccgtagtattttattagaatttcatgctttagaagttgagggtagtgttcttgtagtgacatttgctgtgttgacagtttaaaaaaaattttttttcaagggctccaaggacaaagttggttttgcacagttgaacggaggtgaacttgaggttcttaatttagtagttttcttggtaacaat

SEQ ID NO: 202348 - DNA, 366 bp, Homo sapiens
aaatttaaatatagacctaccatgtgatctggctattctactcctaagtacctaagagaaattaaagaggatatccacataatgacttgtacacaaatgtgcatagcacttttatttgtagtggttaaaaatgaaaacaattgaaatgtccatcaactaagtcaatggaaaagcaatctgtgattatcaatcacaatggaatatgcgttaacaataaaaagaaactatatatacagcaatatgagtgaattaaaaaaaaaatctttgctaagtaaaagaagcaagactgtccccctgaaaaaatagtacttactgtatgattccatttatataaaattctagaaaatacaaactaagccgggcata

SEQ ID NO: 202349 - DNA, 189 bp, Homo sapiens
gctggaaaactgctctgacttcactgaaggacctagcaatggtgaaacgagagcggagagattcacgggcggtgaaagacaaggagctccttcctggaggcgcactggcacctgcaggtgttagcaaggagttggggatcaggcaagaagatgaaggggcacggggcagaggaacaggcagtcacaggg

SEQ ID NO: 202350 - DNA, 413 bp, Homo sapiens
caccgagccgtgctggaaatgaaggtgaaccacaagggctataattatactttttcccatctgtgtgtgttgagaaatcaggataagaaatgcgtgctggatgatattatttcagtgctagaggatctcaggcaggctgccgtctccaataagacaacagccagggtgcaagtgaggtatcccaacactaaattaaaggtatgctccttctgcatgcttctgccaattaaagaggcagcacttcatttcttgccctaaacaagcaaagaaaatgcagaggtctcatccttaagactcagaagctaatgcttctttcatttctggggggaaaagatgggcaactgagtgaagaaaacaggcaatgaatggtatgactagatattaagaaattcaaggccaaacaaaacaaatac

SEQ ID NO: 202351 - DNA, 205 bp, Homo sapiens
aggaaggggaagcagtacattttcagggagagtcttgcctggctcatcatggagcccaggtgttggtacttacatggtaaagagggagcaagaaggaggcagggcaggcggccgaggtagggcaggcggccgaggtggagctggcagcctctggagataagccctgcatgtctttgctcttgatctaatacggaccctcaatcct

SEQ ID NO: 202352 - DNA, 599 bp, Homo sapiens
ctttatgtattatgaaacctagctctttgagatataaatgctgatttttttcccccagcaacaatgaccttggtggattctatcataatacttgttttgaagcatttctgtagtcagatgtagctgtcatttgtttatggcttctgagtttgtatcatagttagaaagtctttgttcgttctgcattatgaaaagaaaaatcagccacaggtttttcaaatgctttaatggttgccttcccagctttcttctttctctcctttcccttccttcctctcttcctcccgtttaaatactttatccatctggagtttattttcacgcaaggtatgaggtatgggtctgatcttatgaagtcgtgtgtggttcttgagtgccttctccgggcgccgtgtgcctcatccctctgttactcatcaccttctttgctgatgcagagtaggtgcttgatgtggaggaggaggtggaccctgctgccagaagcagtagcagctcatgtgctttgtattgttaggtgctttccatccattatttctaatcaacacagcctctcttcaagataagtagtatatagctcccattttacagatgacaaactt

SEQ ID NO: 202353 - DNA, 584 bp, Homo sapiens
agtatataccctcccttgtctcaatatctctgtgcagctacccccacattttgtttcttcccatttgaagcaaaactcctcaaaaattgtatatattcactatcttcattttctttccttctatgccaaacaggttttcctccttcaaagctactctcatcagggtcaccaaatacctctgcattgccaaatccagaggtcagttcacagacctcgccttacctgattgctcagaagcatttgacactgttctctttgctggttcttcctcatgttctcgacatctgagtgttggagacccccaaaatcagtcctaggactctttcttttccttctatatattccttttacgtgctttccttattctctttgtatataatttaatacctctactgggtaatttacaaagaaaacaaacttatttctcacagttctagaagctggaaagtccaagatcaaggcagcagcatgttcagacgtgtggtgagggctgccctctgcttcctagatggtgccttgatgctgttgtcctccagaggagaggaaatctgtaaattcacatagtggaagatacggaattatga

SEQ ID NO: 202354 - DNA, 405 bp, Homo sapiens
aaactaaccccagtgcgacccaacatagtgggatttgagatgttacagacatgaaatatgaacagaatgctaaaagaacataaaagaataagagctccttaaagattataaataaatggtgatgttaaagtaatagcaccattggacgaagctagggaatcaacacttgacagaaagatacatattttttttatacaaactacatatatttgagcaatcaagtagtagacatagagaattttctttttatggaagtactctaataagtaaagggctgatagaattatatcagcattttctagctcctggtgaattatgcattgggcatccatggctgccttagatcacaaaaataccaccagatatatgcctgtggatgaaagatcacaccaccacctgtgaaat

SEQ ID NO: 202355 - DNA, 383 bp, Homo sapiens
agggactaaaggcacatgccaccatgtctcacagcagcctctacccgctggattcaaggtatcctcctgcctcggcctcccaagtagctgggatcacaggcacgtaccaccaagcctggctaatttttttttggtagagacacggtctcactttattgcccaggctagtctagaacttctgggctcaagtgatcctccggctttggcctcccaaagtatttggattacaggtgtgagccactgagcacagcccctaatcatactttttaaatttatttttattattttttttgagacagagtctcgccctgtcacccaggctagagtgcagtggcacgatctcggctcactgcaagtcctgcctcccgggttcacgccattct

SEQ ID NO: 202356 - DNA, 474 bp, Homo sapiens
atttagccttaaaatagaagtaaatcctgccatatgtgacaacatgaatgaacctgaaggacattatgctaagtgaaagaagccaatcacataaaaacaaatggctgtatgatttcacttataagagatatctaaaatagccaaatacataaaataagagagtaggactgtagttgccagggataaagagaagagggcaatgagggattcgtcttcaatgggtatgaagtttcagttatgcaagacaaacatgttctagagatctactgtacaatattgtgcctacaattaatattgtgcacttaaaaacttaaaagggtagatatgttgacatgttaagtgtccttacaacagtgaaaaaaataatatatctgttataaacatttaaaaaacaaaaagtaaagtcataaaaagtttatatgaaaattcaaagcaattattttagtatttgaaaacagaataagactggaggaa

SEQ ID NO: 202357 - DNA, 203 bp, Homo sapiens
ggtagatagtgttggaattgaattgggggatacccagctgtgtccaccgcaaaattgcttgcttggttgttggtggagagaaagccccacaaacacttcttggtgaccacaggttacagaagtattttgtgttgtgagagtatagtaggaaagaagatttgtttttttgccgggcgcggtggctcacgcctgtaatcccagcc

SEQ ID NO: 202358 - DNA, 242 bp, Homo sapiens
atttccaggactgtggactcccacaaccagacctgatggctcacaaatctcaccctggagagattgctttcctcatactggggcagttcagaagtgccaggactgtggattcccacaagcagacctgacggctcacaaatcttaccctggggagatggtttccctcatactggggcagttcagaattgccaggactgtggattctcccaaagagacttgatggctcatgaatctcaccctgg

SEQ ID NO: 202359 - DNA, 429 bp, Homo sapiens
agcttgattatatggtagttgcatgtttagatatttatgatattgtcagactattttccggaatggctattcgattttatattcctaccagaaatgtagaagtaatcagtaatttttgttttttaagaattgttggttgggcgcagtggctcacagctataatcctagcacttttggaggctgaggcgggtggatcacttgaggtcaggagtttgagaccagcctaggcaacatggcaaggcaccattgctaccaaaaaaaatacaaaaattagccgggcatggtggcaggtgcttgtaatcccagctactcaggaggctgaggcatgagaattgcttgaacctgggaggcagaggttgcagtgagctgagatcacacagctgcactccgcctgtgtgagagagcgggactgtgtctcaaaaaaaaaaa

SEQ ID NO: 202360 - DNA, 173 bp, Homo sapiens
agggatttacactgagaaacctaggccaagtttcaaagactctggaaacctggatctcatgggacttagggttgcatttgcttccacttcttccccccacccccgcaccccagttagtgttctgtaagaaaaaagtgcaaaagaaaaaggaaggaaggaagaaaagaaagaaa

SEQ ID NO: 202361 - DNA, 500 bp, Homo sapiens
gaaaaacatctataaatgaggtaaagttgagtgattttcatttgtagttggataacaatacttcagtggcagcttctctttgttctcaattgcctggactagaaccaaaatctggcatccacatcttattactaactttataacgtggcaatgcctccctttcctgggtctcagcttcatcactgtaagcggagggaactacagagtaccttctaaccctaacatttcgtgacaataaccaagtacaccctaagcaaactgtaaatttgttgccaagtttgtggccttgatccccaatctattctttctgcatctgggtgaggaccctttcttcctcttaaaatttctcaagtcctttactcttctagtaataattcgagtgagctacctatcctttatgctttgttttcctcaaagcacatgaattatctcagttaatctttaaaataatatctggccctctagtgtgggacctgaggtacaaagagggtaatttactt

SEQ ID NO: 202362 - DNA, 133 bp, Homo sapiens
gttcctattcaatttctactccctcttaactaaaacagaaggagtcagaacactctgtagagaggacactatcttaatcctctggacaaaggacactgttgattaaatgcaaggtcttgactgaaggagatcc

SEQ ID NO: 202363 - DNA, 458 bp, Homo sapiens
ttatgaacacttctgatctcattaaggatctggccaaggactgtaattccaacttatctgatctccccaagggtcaacttcacgaattcatgccagtgtagtacaatctgaatggtgatcgaaaggcttccttctcagcctccaaaagcaatttccccatctgtcagctacctcaaattctgacataagagatgtatatacttagatatgtgactttggtattcaaaaaatccttattaatatgcttatactccgggtgcagagacttttacagatgaggaaactaaagctaattggttaagtaaattgtcctacatcacacagctcaagggcagagcagggacttaaacctaagatgcatgactccagaagcctttgctctttcttactatctcatattgaagaaatgagaaaggtacggaaaggtgaggctggaatgcattctaggtaaaacagga

SEQ ID NO: 202364 - DNA, 382 bp, Homo sapiens
aacaaacaaaaaaacccgaaaacttcccaaggaccccttttcttctctatataccttaaataatttcttaataactcctacagcaccagttcccgtgggaggcaggagcctaacgttggtgagaatgttgctccaaattgccaaactacctcctctcacaaaggtatgagaagttggcctggcgcaatgactcacagctataatcccagcattttgggaggccaaagcaggaggatcactttcattcaggagttcaagactagcctgggcaacatagcaagacctcgtctgtacaaaaatgaaaaatacaaaattagctgggcatggtgatgcgcccctgtagtcctagctacttgggatgctgagatggaaggattacctg

SEQ ID NO: 202365 - DNA, 302 bp, Homo sapiens
aacaaacaaaaaaacccgaaaacttcccaaggaccccttttcttctctatataccttaaataatttcttaataactcctacagcaccagttcccgtgggaggcaggagcctaacgttggtgagaatgttgctccaaattgccaaactacctcctctcacaaaggtatgagaagttggcctggcgcaatgactcacagctataatcccagcattttgggaggccaaagcaggaggatcactttcattcaggagttcaagcgatctgttcatcttgcccccgccccaaagtgctgagatcgcat

SEQ ID NO: 202366 - DNA, 196 bp, Homo sapiens
gctgggtggtctagaaagtgccccacacagaaatctgggttatcataggatctgccttgttcgtttctcttctttcatagataaaaatactgtgcttcctactgtccagtgtttgagcacagtagtttcatgtaatctgctgagttgtctagtgtttaaggcatcaggataaatgtttattatggccaaagcagaa

SEQ ID NO: 202367 - DNA, 462 bp, Homo sapiens
actttttaacaagtagagttgttctaccacagattcagctgcattgtaaggtagcgagttctctgtcactagaggtatgcattaagaactgaccatcacttgggaggtgttgcaaaggggacttaagctgtggcatccacagacccattccactctgaaagattcaatgattggttaatttttccgtacatctcccctcccaccaaccttccaggataggacatctacgtggtaaaatgtgattaattccctaaaatcaaaagaataaatagcctttctgcattttgtgatgtgacattatgttattttcccaattctcatgctctcagacctgttgggtttggtcagactcagttcatcttgcacaacaagcagcaaaagtatccacatacttgtaatggccttttgagtcccattggagggtgaggagggttggtaaagtagtaagtgagaggtgagatc

SEQ ID NO: 202368 - DNA, 294 bp, Homo sapiens
cactcagtagttttcttattacataaattatgattacagtttttactttttctttgatctaagaataatggaatcttttaataagttcagtttctaattgtaatacagtttaccagagaatatacactgtaaatggtttcatttttggaatgaattgagagtttccttgggatctaatactgattagtccttgtaaatactccattgatgcttgaaaagaacggtgtcttactttcatttttagaagacataagatagagtacaaataaatatgtagtttataatttatataaa

SEQ ID NO: 202369 - DNA, 325 bp, Homo sapiens
aattatattatatatatatataatataatatatatataatggtgtgctatgtgcatctgttcccagccacatgtgttggtggctggaaattggccatggtggaagtatttacacatggaagttggcaaagactacaaatcaaggcttgatttattgctttgttgattgtgtagagcagagatcagcaaagttttcctgtaaagtaagtgttttcagctttgtggaccaggcagtctcagttgtaactgctcaactctgcctgaaagcagcggtagacaatctgtaaatgactaggtgtgcctgtgttgcaataaaactttatcta

SEQ ID NO: 202370 - DNA, 205 bp, Homo sapiens
acagcataaactattgacatcctgaactttattatcattcctttatagggtttccacatttgtatgtatttgtaaacaaaatatagtcattttatgtttttgaaattcataagcatgaaataagcaatcaatacaatttgcaaagaagtttatatatgtgtacacatagagataattaacaacataattaatatatataattctc

SEQ ID NO: 202371 - DNA, 484 bp, Homo sapiens
aagacccaggagtatccaagactgcctatttcatcatctgttacgcatgcggcagagagtggagacccaggcagctggaggaacggccctgtgagaagagattgtatagtcctagaaaaagaccaactggaagaccacggcgtagcagaagccattccggcaatgagagattcaaacaccaaagtggatctttttcaagatctaaatccaaatcaagatcacggtccaagtcccagcccaagaaagaaatgaaggctaaatcacgttgcaggcctgcatctcataccaaaactagaggcatctctaaaaacagattccaaagcacattacaagtctggctcaagatatgaaaaggaatcaaggaaaaaaggaccacctagatccaaatctcagtcaagatcatagtctaggtctaggtcaaaatctagatcaaggtcttggactagtcctaagtccagtggcccctggtagtataaaccatgat

SEQ ID NO: 202372 - DNA, 402 bp, Homo sapiens
accgcaaggaaccttcccgacttaggggcggagcaggaagcgtcgccggggggcccacaagggtagcggcgaagatccgggtgacgctgcgaacggacgtgaagaatgtgcgagacccagggtcggcgccgctgcgtttcccggaaccacgcccagagcagccgcgtccctgcgcaaacccagggctgccttggaaaaggcgcaaccccaaccccgtggaattcgaggctgccctaccaggatcaatgcaaatgccacctccttttggaaaatcctggtttcctagctcccttcatggaattctgcttcttaaggcttacttagtaatagagacctctcagaagttggaagaggcccaggtccactctggcccccaccttttttaaaataaaaaatgcaatg

SEQ ID NO: 202373 - DNA, 597 bp, Homo sapiens
cagcgttttaaaatcggaaggttagtgagattataataacacatgctggaaatccacatggtttcatgagttcagtaaccttgagtaactttttccctggggaaatggtggaagccgtattgcctcgccaagtcttatagataggtcccaaagaatctgagcacacaaacatcagctgctcagatttccacaaaccttttcccagtggacccacagtaaagcaaaaaactatatctatgcaaaacacctaaaggaatgctatgttcgtggtctgaattttcttttacttataataatcctcaaaaaggccaggcactgtggctcacgcctgtaatcccagcactttgggaggctgaggcgggtggatcacttgaagccaggagttggagaccagcctggccaacatggtgaaaccccgcctctgctaataatacaaaaattagcaggtatggtggcgtgcacctgtaatcccagctactcaggaggctgaggcaggagaattgcttgaacctgggaggtggaggttgcagtaagctgagatcacaccattacattccagcccgggcaacagagcaagactccatctcaaaaaaaaaa

SEQ ID NO: 202374 - DNA, 481 bp, Homo sapiens
ggaactgaggcccattgttttcagctaggtggaggctgctaagtggtggttgctatgcgaagggtacttgctgtaaaacctgcatgctttttataaaagggaatggtttttcctgtccagccttcccctcctggactccctggacataagttccctgaataaagcttatgtcacgccgctgtctttgggtcttttcttcagtcctctagaggcagtgctctcctagcttgcaagcttgggaatccagcacaacaggtggccacagcaggggaaatgttaggacttcccttttccttctctttctttttccttggctagtttttgttgaagaaactgggattttgtttccttttcactgtttggattttgctgattgtatccccatggtattttaccatgccccttgagttttcatcttggtagttcagatttttttttttttttttttgagacagagtctgtcgcccaggcaggagcagtg

SEQ ID NO: 202375 - DNA, 515 bp, Homo sapiens
ccactatgtgctgtggatgggctgtggcttcactgggcacccccatctgctgcctctattgttccccatccccagccaagtgggtcttgttttccttcactgcaggcagaactcgagcctgtgctgtgccctgatgagtggctccccttcttcctgggccgttccatgggtgtgcctttgccacgctcaaccttcccaccccgacgcaacattgatccccaagtcagggtgggctcgggacccctcaactttcccctgtgcccctgtgcatttcatgggcaaatcaaaccttttcaaactctcgcctccacaggtccccaggggtggacactccaaggtccccgttgctcctgtcctctgccagccgcctcaccgcctaaatcagtggcccagcccaggccattaccacaaggctagctggcctcgatgtcagcacctacctttctgagggcgactttctgaggctccaggccccagcaggtgggatttctctttccatccgcaccccgacggca

SEQ ID NO: 202376 - DNA, 490 bp, Homo sapiens
gtttgagtgttttttgttttatttttgtcccccctgggaaaacatatttcagcatgtataagagggagaaaaaaagtttcattccttccagagaataacttatttagtccagtagggtagaattttaaaatgtcagttaaagtcttcaaagtgcttggggggatatcagattccagaggccaattgtagcaattgaaatttgcagaatcaattatgtaaatctgagacaaattagtattaaaattacacggagtatattttttaaatcacccaactttgtagattatacctattttgggcaggtatggaaaaattttgcagttaaatgattgcctaaagaaagtggtaaacaggtgaggaaagatggcctctgatctaggatagatccagaaccacaaagcatctgcaccacaaaaggtgttagactaccaagcagctcctggttttctgcatagtattagtagcacagcttaggatgagaatcctttct

SEQ ID NO: 202377 - DNA, 309 bp, Homo sapiens
tttcgttctttctggtgcagcttaactgatttgaagaagccgaagaagaaaatccagtagcacggttaagactttagccatggcatctgtatcataccaaaagccaacatctactactgtgggaaaacaaatgatttttacagggatttccagactctttcaaagttccatttacaagctaagtagctatcaccatcctcttttcataaaacggaaacagagcaaagtaggcatgctcatcatgtgggctgaataaagaagttaaaaaaataaaatgatctatgattccagatcataccaaggaactga

SEQ ID NO: 202378 - DNA, 538 bp, Homo sapiens
cttttcatgttatatccaaaaaactcattgccaaatccaaggtcacctggattttctcccttttcatattataggaattttatagtttcgcattttgcatttaggcctttgatccattttgacttaatttttgtgaaagatttaaagtcattctttttgtttgtagatgtccatttctagtctcatttgttgaaaagactatcttttatactctgttttgaattgcctttgctcctttgtcgaagatcaattgactgtgtatatgtgggtctatttctgagctctctattgtattcagttgatatgtcggttcttttgccaataccacacatgccattttgatgactgtagctttgtatagtaagtcttgaagttgagtagtgttaggccttcgactttcttcttcttcaatattgtttcggatattttgggtcttttgcctgttctaataaagaatttagaatcaccttgccgatatcctcaaaataacttgctgaaattttgattgggattgtcttaaaatgttaccacaaacata

SEQ ID NO: 202379 - DNA, 1709 bp, Homo sapiens
tttagtataatattgatgcaagaatggatgtatatatggaacaaaatagtcagaataggcctaaatataaatgtaaaagttggtaaattgtcatggaatttttagttaggagattgaaaaagaattagaatctagctggacacggtggcacgtgcctgtaactctcaactacttgggaggctgaggtaggaggatcactcaagcccaggagtcaagttcaacctgcgcaacacagcaagaccttgtcttcaaaagaactactaggtcctttgccaaagaaaattctaggcacattcaaatatatatatttttttaattcaaacttgggcctggcatggtgactctcacctgcaatttccagctctttgggatgccaaggcagaaggatcacttgaggccaggaatttgagaccagcctgggcagcagagagagacccacatctctacaaaaaataaaaattagccaggcatgatggtgggttgcctgtagccttaaggaggctgaagtaggaggatgacttgagcccaagaatttgaggctgcagtgagctgtgataatgccactgcgttccagcctgaatgacagcaagacatctgtctctaaaaataataaaataaataattcaaactgtattaaccatgtttttgtgtctatactgcctctgtattaatagaggattagtacattggggaaaggatttgcagtaaaactgccggggagtaatatccctgctagcaatctgataaaatttatcatgtgcattaaaaatattcataatccttaacctagtagtcgttcatttgttctgcttggtatctttcctacagaaatagacaaagaaaccaaaatttatatataaggttggtgcaaaagtaattgcgtttttggaccattaattttaaatcactgtaactagactcagacacatctttattaatcaaaataggaaccactgcaatcaacacatttttgccactgagaaataagtttgtttattcctgtagcctaaaaatctatgcttcaggattcgacaaactcttggaaaatattttctgcatcctgctggttgtggaagcaccttccctgtaaaaagttgtcagatgcttgaagtggtacctggttggcgagaggtcaggtgaacatggcgggtgagacgaaactctgtagtcaaatttgttcagcagcttcagaagttgaatgaattgtttattagaataattaattcttagttattaacaattgcaaaaactataggttaaaaataatctgaattccaaccccaggaatggtagaatttgtaattttatctgcttgtgcacatacttgtaatggagtatcatatactatttattgaaaatcttatttttgattcattttatcaaattaactccctctacccccaaaaacagcgtagtaccacttttgaattagatttgtgatcttacctagcaccttgaatttgtaagaatattaaaagaatagccaggtgtggtggctcacgcctgtaatcccagcactttgggaggccgaggcaggcggatcacgaggtcaggagatccagaccatcctggctaacacggcgaaaccccgtctctactaaaaatacaacaacaacaacaaaaaaaaaaaccgggcatagtggcaggcgcctgtaatcccagctactcgccactgcactccagcctgggcgacagcgagactccatcaa

SEQ ID NO: 202380 - DNA, 323 bp, Homo sapiens
ttggtctcccaaagtgctgggattacaggcgtgagccaccacacccggcccaggatcctcatttttaagaaggggataataagaatgactacctcagtcatattggggaagactgaactgatattttgtatgtatttctagagaaggactatatatgtatatatagactatatataggagactctacatagtcttatatatgtatatatagactatatataggagactctacatagtcttatatatgtatatatagactatatataggagactctacatagtcttatatatgtatatatatagtattcagcatggtctgcctg

SEQ ID NO: 202381 - DNA, 411 bp, Homo sapiens
taaaaaattaaaaatttaaaaaaagagaagaaagaaatggttactgaaattctactaaacaggtgcagaccatcccctctgtggatgaagagccaaccaagatttagtctctgtatatgggaagaaggaaataggaagcagttgtcaaaataatactgacactaagtaactgaatcaaatgagatgattctgctctaagaatcaaacctgacccagtaggttctaagaaagcaaatggctggccaggcatggtggctcatgcctgtaatcccagcactttgggaggctgaggcgggcaagtcacaaggtcaggagttcaagaccagcctgaccaacatggtgaaaccccatctctactaaaaatacaaaaaattagctgggcatgacggcaggcgtctgtaatcctagcta

SEQ ID NO: 202382 - DNA, 429 bp, Homo sapiens
gagaaattctctgcatctcttgtgcccttgggaaaaaagacctgtgtccgaatgctgtgattttgtgagttgtggtgttgccactgtcagagtaagagataaattaatggtcaaattacttctttcagaaagcacaaatataataaattttttacagagtgaagaatcactttgcaatagttctgagcagtttctattctggaagaaattagtacagaatttccaacagttgtatacattgactggggcttcattatttatttatttatttatttttgagacagagttgcaccttgtcgcccaggctggagagcagtggctctatctcggcttactgcagcctctgcctcctgggttcaagcagttctctgcctcagccttctgaataactgggattacaggcgcccgccaccacgcccagctaatttt

SEQ ID NO: 202383 - DNA, 472 bp, Homo sapiens
taatgatgctgagtatttattttctgccatcttctctctccagatctatggacataatttacacaggacccccgagggtaattaagccagcaattcttttgccagtaaaatgagaaaaaccagctctcagtaaattctgaattccactatggatgttgcagaaacagaactaaaaacagctgcagtttatctgtgctgccgaattgactgtaatttgctgctaccctcacccttaccacatagcaatcagtgtacagaagtgcagaattttaagatgatgaatgttttatttcttaaaataaacagtagcaatttagcaacatagttatgtattttacattttttatatagtaaaagtatattggaaacttcctcagtgtcaaaaatccttacatgcacttgtcaaaaatatcaagatgacaagctaatatggaattcagatttaaataatagacttctcagatacatccca

SEQ ID NO: 202384 - DNA, 407 bp, Homo sapiens
ctgtgagcaccctgcagccactgctgggcaaaacctgcccagtgggtagtgctcgtttttgctgcatgcaaagaggcaggcccaggaatggaatttgcttttagagactgctcagagtgacaacaggaaaaatgctctacctacagacctggcacctgcatggcgtggtctccctgcacatcatggcagattgttctgaaagctgaaaatctcccctactgtctaaaccctgggacttcatttatctcatgtgtcccaggacactacggggctgcctatgcaagtttacagcctaaagtgacacggtgggggacgacagagggtcacttgtgtcctagaaagtgtagtccaagggtatgattcagggataaacaggaaccccacaaaggcattcgtttgttcaagcc

SEQ ID NO: 202385 - DNA, 559 bp, Homo sapiens
atagaagataacctgatggccagaactccctgcatgcactgcagtgaggaataaggacaggagtgcacttcccctgatgtgctggggaccggggataaaggctgggctctatttcccgggatgcctcaggactgtcagaaaaagagacagaactaccatttcaatggcactctaggagcacaatattgaaaaattcatgttcttctcatcatttgctaaggcaacccatggagacaaaaattacattccccatcaaatcttgtggctaatgaagaaaaaataagatatcttcggctggctgtggtggttcacgcctgtaatcccagcactttgggaggccgaggtgggcagatcacttgaggcaggagtttgagaccagcctggccaatttggcaaaaccccgtctctactaaaattacaaaaattaaccgggtaaggtggtgggtgcctgtaactccagctactcggaaggctgaggcaggagaatcgcttgaacccaggaggaggaggttgtagtgagccaagatcacaccactgcatgacacagtgagactatccc

SEQ ID NO: 202386 - DNA, 1340 bp, Homo sapiens
  misc_feature (194)..(194): n is a, c, g, or t
  misc_feature (1087)..(1087): n is a, c, g, or t
  misc_feature (1108)..(1108): n is a, c, g, or t
  misc_feature (1119)..(1119): n is a, c, g, or t
  misc_feature (1134)..(1134): n is a, c, g, or t
  misc_feature (1149)..(1149): n is a, c, g, or t
aacagggaatatactgctgaaataatgtttgagtccttcaatgttccaggcttgtacattgctgtgcaggctgttcttgccttagctgcatcttggacctcaagacaagtaggagaacggacgttgaccggtacggtaatagacagtggagatggtgtcactcatgtcattcctgtggctgaagggtatgtgantggcagctgtattaaacacattccaatcgcaggacgagatataacatattttattcagcaactgctgagagaccgagaagtaggaatccctccagaacaatccttggaaactgctaaggcagtaaaggagcgctatagttatgtctgcccagatttagtaaaagaatttaacaagtatgatacagatgggtcaaaatggattaaacagtatactggaatcaatgctatctcaaagaaagagttttctatcgatgttggttatgagagattttgggacctgaaatcttttttcatccagagttgctaatccagactttacacaacctatctcagaagttgtagatgaagtaattcagaattgtcctattgatgtcagacgtcctctctacaagaatattgtcctctctggaggttcaaccatgttcagggactttggacgtcgcttgcaaagagatttgaaaagaactgtagatgcccggctgaaattaagtgaggaattgagtggtggtagattgaagccaaaacctattgatgtacaagtcattacacaccacatgcagcgatatgcagttggttggaggatcaatgctggcttccacgcctgagttctaccaagtatgccacaccaaaaaggattatgaagaaattggacctagcatttgtcgtcacaatccagtgtttggagtcatgtcgtaaaattggcttcatagttattggggttagggaggtggggaagagataatctttctgattacctgttttgtctggatggctggttttgaggttttaaacctgacttgaaatagtaacaccaaacatgattatacaggaatattttaataagtgtatcaccatgcagatgtagaagagagcgaaagtgattgtgtttttcnttagattgaatatttgaatcntatgtgtaaanaaaagaagtgggttntagttctttctgtgncctgatatttcgtcatatttatggaattatccaagattcgatgggattcaccagtgtgtagatagctctataatgctttgaattgtacacttctaagtgtgcagtgcaagagcttgttaatattgcatactttttatacttggaggaaaaacgtcccggaaaaatggcttggcgggaaaaaccatgaccag

SEQ ID NO: 202387 - DNA, 474 bp, Homo sapiens
cccattatcccattagctccatgaagacaggaaccgaattcgttttgttcattgatatctccccacacccagcacagtgctgtcaacccattaaggaaccagttccatgactgaataaatgatggagaaattaggcaggatgacccaatgaaaagccacctgaaacagtgggtgctaagtcctttcaaccaaagatctaagagtagttgctgggctcatcttgaaagcaagagttagaagcaggggacaattgttggttttcaggagtcccccttatccacggtttcactttccatggtttcagtaacccacggtcaacctgggtccaaaaacataattaaatggaaaattccagaaataatttataagttttaaattacttttcaatagtagccaatgccacatcaccacacctgtcattcacctcactccaacccatcatgtaggcatcttattatctttttttttttgagg

SEQ ID NO: 202388 - DNA, 168 bp, Homo sapiens
gcagtgcctggcccaggagctcgtggtctaccctgcattaccaggacaggtctttccaaaatttaggcctgaaatctttgggtgtgtgaagctctgacccccagattccctgctcggggacacctcctgcatctcccccttgagattgaccctggaaagtcaaagctg

SEQ ID NO: 202389 - DNA, 258 bp, Homo sapiens
aacaccccatgacaagcctgctctcgctagccaaaggactgaggagaggcggtctaccagaataaaaaaccttttaataatacctgccctattccagctaaacactgaacgaagaactgccccccgaccttagagtgtccgtggagcccagcagggcactgagtcatggtagtgggaaaaggtgttcaacaggctggcaccagattaaaaacgctcaagaaaaagaaaagtcaaataaattatggtacacacatacaa

SEQ ID NO: 202390 - DNA, 140 bp, Homo sapiens
atgaatacttggcatgaacttcattcactcaactttgtcgctgacacgcccgttgtactgacagaatcctggcttgaatggcgcttgctcagctgtgctttagacagacccttctggctgacctggtttaaacctggctt

SEQ ID NO: 202391 - DNA, 365 bp, Homo sapiens
tagtcctggcatagaacaaagggtagatgcctgtaaggactagggtggttgggaggacagaggagtgctggctcctgcagaatattgacagaccctgcatagagccccagacactggcgatgtaaactattggcctaagcacttggattcctttgctcctacaaaccagcccaccaggctagaaaccctttcatctatacttggccaattacagaagtattgattgagttcctgttgggtgcacagcattgaggacaatgagccctgcaaagcttacccttcaggagacacaggatacctaccttcagggagcttataatctgactatgtacaagctgtctataatggtagtttttagaagatat

SEQ ID NO: 202392 - DNA, 332 bp, Homo sapiens
aaaagtcaggggctctatggagaggtttgggttcaggagaggttctgtttcaaaacagaaatatgggctgggtgcagtggctcacgcctgtaatcccagcactttgaggtgggtggatcacctgaggtcaggagctcaagagcaacctgggcaacatggtggaacctcgtctttactaaaaatacaaaaattagctgggtgtggtggcatgtgcctgtaattccagctactcgggaggctgaggcaggagaatcgcttgcacccaggaggtagtagttgcagtgagctgagattgcaccactgcaccacagcctcggtgaacagagcaagat

SEQ ID NO: 202393 - DNA, 436 bp, Homo sapiens
tcccactgaggccagcaaagggattgctcctgcatattctcacagtaaacagtccccagttgaaggataaagagatcctttaacttcaaggtgagcctcactgtgttatatttcaggtgcctacgctgtctcacaggagcacctacactgtaatggccggcggcgtcttcctttctcaaacagtcaaattataatgagagcactttaatatattgggggaatatttagatattattttaatataattaaaagcaaattttcaaatgaaattcaatattcaactgctaaatagcaaaactatgtgctgtaatccagactttacagctgcataaagttgtcatcctattatcttttgctttgtttttccattaacgtgtaatttaatacaattttaatcttccttcatattaaaaagagagtccattactgccccact

SEQ ID NO: 202394 - DNA, 262 bp, Homo sapiens
agttgtcttgccaaggaaacaaaaatctctaaaggacatgcaagacacataggggatacattttcattgtacttatctttttgtgaaacagtagctttcggtctttcaagtgctcacaagcccactgttttcctggtttccggattagtgggctgtcttctggtggtactgccttgacctgagtataatgtgcacatggctttactccagcaagtttaactgataagcgtgtgttcaccagcagctcaaatggccttgtcca

SEQ ID NO: 202395 - DNA, 338 bp, Homo sapiens
gaagtttaagactagcctggacaacataccaagatgctgtctctgcaaaggaaaaatagccaggcatagtggcttgagccagtagttccatctactcgggaggctgaagtgggaggattgctcaaacccaggagtttaaggttgcagtgagctgtgatcaggccacactgcactccagcctgggtgacagagctagaccctatcccaagaaacaacaacaacaacaaaaagtttttataataaagagcttaatctccaaccccacccctcccctcttccgagattttggtgggtgagtctgaaagctccagccctcttggtcgtggtctttctggtaa

SEQ ID NO: 202396 - DNA, 670 bp, Homo sapiens
agttccttctctaaatttcaaaacaggtcaaacatacaagaaatcagaccaggctgggtgcggtgctcaaagagaatcctgcaggaagactgaatcccactcaattgcccatctgctgatggttactgactgctctgcagatggtaacaatgaggcgtaatgataaatatgcattgctctggagtcctatacaatcaaagcacttcacgtgagagtaaaaactaattaaacattgcagcaccacccactgaaggtagagttaaatctgtcaaattatatattctgagcagcactggtttataagaaagattcaccaagtttcctttatttttttgtccttaattataaaacctgttttcacctgacacttttccagcagtgtaacttttgccctggggcaaactgaggtggcgatgtctgtagtaactgccaagagagctgtttgtttctccccaggggtaggtcattagaaactgaaagtccagaaccaattttctccagctgctgcaggtgttttacttttagcattgtggggtggggatagcagatgcctgagaaactatagtgttttacataagtctgaaatcattggatctataacctcagttcttcaacaaaccttatgtcaatcaagagatcagaacacatctttctagaaagagaaaacaca

SEQ ID NO: 202397 - DNA, 639 bp, Homo sapiens
gtgagtaggaggggcagggtagaatgaagagagaagatttgacaaagggttatattgcatacatatataagacatccattcaaaacctatgaaataaatcaagaattacaaactcagaagcctatgggggtcagaaaaatgacagacacaagtgaagttgagcaggttcaggggaccatgaatgtttttcactttcctcttaacagttagcaaacacaccctgaaacaagagggcgaggtggggcagtccttattcagatccaacaattgctgccctgtgaaaatgagctcaggatcaccacatcttccaatttctaaagacaagtcagaaatcagaatttgcatatgaaaatgatgtcaactcatttagaaaattgtaaaacaccatgtggcaagttgtcataggcaaaaaataaaaacaaagaacaaacacaaaacgcataacccaacaactcacatttgcatctttggaggttgctagggcaacaaacgcattattgtgaaaatttataatcaagcatttacctcgcctttcctatatgaagcatattttaaagtaattaaatagttaatgagtgacaagtactctcttagaagagaatcacagttcataaacataggtgaaatgatggaaattga

SEQ ID NO: 202398 - DNA, 418 bp, Homo sapiens
gctgccaagcacgtgtatttttgtcttttactttcacaatagcacaggagtactggagaatgtggcgtggaccatagtttacattttcagtggaaaccaggaccagaggctgtgtgctcggggcccagatggggtgaggacaccaggtggtaggaagtcgggggacaaaggctgtgggcaagagcctcatcgatcctgcaccaggaggagccaggggaggctgccctgtcccacagagaggagaccgaggctcccggaggaggacaagtggcaggaaagaaaaccgcggtcttttctctcccagtcaggggggtggtgtgtttcccctccaccatctgggaggttgtctatactacgtgggatttgattacaaatatttcaaaatatttatgcctgaataaaaccctcctcttaacca

SEQ ID NO: 202399 - DNA, 642 bp, Homo sapiens
gacgctaagagatttcatcaagctactcgtaacagcacaccgtttaagacctgtgaattgtttattcagactgtggttgaccgtgggtaactgaaactgcagaaagcaagactgcagagctgtgtatctgccacactaacctctttttagaatgttacgacttgcttttgcccaaggcacccatttttcattcatttcaaaaacattttttcccataatccttctgtgtgccaaagaacaaacacaactcagtttgggactttaaatctatttatttgaccataatcttaaacacttttttgcttatattttcaaattaagcaggcaatttttttcttcctctataggttttttccaactcagttttagttaggtaagaacaaaagtgttccatcgccatccagtaaatggagcctgatctcttgaaaggagcaatatgctccttttctcttgccttacagacaagaaatgtgctattcttccaacactgaatatatttcctgacgttaaataagttcaataactagaccatgtaaaatgttttcctaataacttttgcctttcaaaagatacttaaaaaatgaaaaggcaaaaataggttgggtgaaaatattcatactatgtagatctttacaaaggatt

SEQ ID NO: 202400 - DNA, 484 bp, Homo sapiens
ccagttctcattctttaataagctggtcacattgtagatggcacttagaatgacagagggaattggagctgggtcagctccaatccacaaattgcaaataatttgccaagggaaatccctttcccttcggttctgccccaaatctacattttcttctatttagaaccaggagactcaggcagaatttattttaatgaagaaggccatgggctcctgggcctttcctcagcaagaactactgctgtttctctctggaagtcataagaaaagccgggagccgggtattgcatctccacaatgaagcaacagaaagacggggcctggggagctcagtccacactgtgctcgagcattagcatgcactagagaaccagaactaggctccagcgctcccatgcgaccttgggcaagtcctttgacctctcctgctttaaagtgggtacaagaatgcctgattcatttatctcacaaaatggttaaaaac

SEQ ID NO: 202401 - DNA, 399 bp, Homo sapiens
gaagggactccaggatcattgcaccagggatagtaccctatggcttagatgttacccttaatctaatcaactgatatcctgtaactactgttaaattttcttttgcatctatttcttccctcctcagtttgatcttctactagctggacttctttttttgagacatggtctcactttgtcacccaggctggagtgcagtgcatgataacagctcattgcagcctcaacctccctgggctcaggtgatccaccttagcctccccagtagctgggactacaggcgggagccactgtatccggcctttattttttaatattagtactttttaaacatttttttttaagtcaagatctccctatgttgcccatgctggcctcaaacactttcagactcggggt

SEQ ID NO: 202402 - DNA, 187 bp, Homo sapiens
attacaaatagtcatctaaaataaaaacgattcctttaacattttttttttgcttaataagagaatccattgtaaattcttattccaattattatttactgaattccaaactgcattttccgttagcatttaaatggataaagggagctgcctggaagatctagtttcgttgtgctcatttctatct

SEQ ID NO: 202403 - DNA, 775 bp, Homo sapiens
acacacctggccaacatggtgaaaccccatctctactaaaaaatacaaaaattagccgtgtgtagtggcacgcacctgtaatcccagctacttgggaggctgaagcagaagaattgcttgaacctgggaggtggaggttgcaatgagccaagatcatgccactgcaatccagcctgagcgacagagcaagactctgtcttgcggggggaaaaggtgggcatcagaagggttgcagcttgaggactactatggaatggtagaaggagagtcatccacaatcagagggaacattacactcgttgaggatgggtatggctcacaacacacgctgtaaactgaggtcattggcagataggtgtttgagatgtgtgtgttttatgtatcctgtgtagctgggtgaggctttccgtattcacctagtgtttctcatggatggagtcacatataagcaaacatgaacttctcattataatcaaattgttccctaatatttcagttgcactgaaataaattgatattttcaaaacaagtattctagcagaactactggcttttgacccaagttctcatggtataactcatgctagtaccaaatctgtagctctttgtctcacattgtaataacatagttggtttccagtaacctggtgaggaaagacatttcttttgggggtgcgggtgttgattgcatctggcatgtggcattctcagaataaagaggatcagttcagccatccaaaagcagcagaagtgaggtagcagttaggaccctgga

SEQ ID NO: 202404 - DNA, 941 bp, Homo sapiens
ccgacgctttttttttttaatatagggactaaaaattggtagcatagttttgtgcacattaaatggtaagaaatagataaatataggccgggcgtggtggctaacgcctgtaatcccagcactttgggaggccaaggtgggcggatcacgaggtcaggagatcaagaccatcctggctgacacagtgaaaccccatctctactaaaaaatacaaaaattagccgtgtgtagtggcacgcacctgtaatcccagctacttgggaggctgaagcagaagaattgcttgaacctgggaggtggaggttgcaatgagccaagatcatgccactgcaatccagcctgagcgacagagcaagactctgtcttgcggggggaaaaggtgggcatcagaagggttgcagcttgaggactactatggaatggtagaaggagagtcatccacaatcagagggaacattacactcgttgaggatgggtatggctcacaacacacgctgtaaactgaggtcattggcagataggtgtttgagatgtgtgtgttttatgtatcctgtgtagctgggtgaggctttccgtattcacctagtgtttctcatggatggagtcacatataagcaaacatgaacttctcattataatcaaattgttccctaatatttcagttgcactgaaataaattgatattttcaaaacaagtattctagcagaactactggcttttgacccaagttctcatggtataactcatgctagtaccaaatctgtagctctttgtctcacattgtaataacatagttggtttccagtaacctggtgaggaaagacatttcttttgggggtgcgggtgttgattgcatctggcatgtggcattctcagaataaagaggatcagttcagccatccaaaagcagcagaagtgaggtagcagttaggaccctgga

SEQ ID NO: 202405 - DNA, 574 bp, Homo sapiens
gaagaactgtttttccacccgtattgccactggtacctctcatgaacttgttatggacatgggagagacccggggagggactggacaggtttcttccatgaagtaggaagtagttcctaagtcccctgtgtacttctttccaggtagagagaggaatgtgggctctaaattacccttgtgcatggcacatatctagcagcttttgtctgctagcatacctctggaggtaaaataggtaggctcccagccagactgtaaggaagattttcatgttctcttttcaccacccacccactctttctttcaaggcacatttttaagaaagtggctgaagcttgcaatacttagtctttagttctaagtgactcaggaaagagtcttcaagaaaacagttggacagagtgccccaaagcctaagcagcgtgaggcaaagataggcaggtgcatgtggcgtcttagagaggggccagcacatcgtctcttctctggggtcttttcatcctacacttgtctttttgaagacagaggtgtggtgaatgaatgtcattacttacatctgggggagtgaccagag

SEQ ID NO: 202406 - DNA, 414 bp, Homo sapiens
atcagtggttaggtttaaatctgttacttttctattagtcccagctcttctttgtttccttctttggcactgaatttgtgtgtgtgtgtgtgtgtgtcagagagagagatactattaagatctacccatacgccgggtgcagtggctcacacctgtaatcccagcactttgggaggccagggcaggtggatcacgaggtgaagagatagagaccatcctggccaacatggtgaaactgcatctctactaaaaaaaaaaatcaaaagttacttgggtgtggtggcagatgcctgtagtcccagctacttgggaggctgaggcaggagaatcgcttgaacctggaggtggaggttgcagtgagctgagattgtaccactgtactccagcctggcgacagagcaagactgtgtctca

SEQ ID NO: 202407 - DNA, 234 bp, Homo sapiens
aaataaattaatggctgcccgagattggggtggtgaaatttgaaaggacaagatttccttctgggttaatggaaatattttgtaattatgtagtggtgatggttacacaatattgtctattcatatcctttgctttttttttttttttttggagacagggtctcactctgtcacccaggctgaagtgcatagacaagattatggctcactgcagcctcgacctctcctgatctc

SEQ ID NO: 202408 - DNA, 806 bp, Homo sapiens
tgaaataaacagcattgttgctcacacatagcctgttggtggtctcttcacacggatgggcatgaaatttggtgccgtgactcggatccgaagacctcccttgggagataaaatcccctgtcctcctgctctttgctccatgaaaaagatccacctacgacctcaagtcctcagacccaccagcccaaggaacatctcaccaattttaaatcagcaaaatgacatgaatgactgaaaaagcatgtggagcacaagactcaagaactaagtgaaaggactcacacttcctgatttcaagtaaagctacagcaatcaagacgtggcattgatgtaagaatagacacatcaatgaatgaaacagaatacatcttccagaaataaattcacacaaatatagtcaagaggttttttgtgtgctaaagtgtatataatatttaccattttaaccatttttaagtgcacagttcagaagcattaagaataaacaatgttgtataaccatcaccattatccagttccagaatttttcatcacctcacacagaaactctgtacctattatcaacaataaattttcattccccccttgccctcagtctctggtaaccactattgaactttctgtttctatgaatttgccccttctcagtgcctaatatgagtggaataatacaatatgggtcctttgtgcctagtttatttcacttactgtaatgttttcaaggttcatccatgttataatatggatcagaattttatttcttttcaagcatgaataatagtccatggtatgtctataccacattg

SEQ ID NO: 202409 - DNA, 471 bp, Homo sapiens
ggcagagaagttccaggtgaatctagggtgtggccatgtgagcaagctgctgaattatgtcgaaggcattggaattgaagtcaggaactgaggtcaaggcagagttcagaaccacctatgcgaaatgcacactcttgggccccagccaaacctactaagtttgaatctctgggggacggaccagaattccgtatttttacaagctccctgagtggttcctaggctccctaacacttgaaaactgctgtgctatgatgttgaatgagccatgcttgttggaattacctgatggcaggaatcaggcaggaagactaaaaacaggtgttgaaatccttagagagtctgggctgatcagtgtatgggactgatgaggaggggtggaaagaagtttgtacatgagtcaggaagagcaatggccttggcctggactattgctagtgcattcctttccaacctggagacaatgtagga

SEQ ID NO: 202410 - DNA, 704 bp, Homo sapiens
ctataatgcatgggtctgggttcaagctctccattctgtttccttgttccattgtctgcctttgtgtcagtaccaaactgtcctaattattgtggctttatagcaagcctaaatatcttatagagtatttgcttcaatcctgtgattattttaaaagatcttgaccattgatttccacataaatatttgaattaactggtcaaattccacacatacaccctactaaaagtttggtttatgattacattaaattagtctacaaattaggaggagattcagatctctgcagtactgatttttccaatccatgtaatactatgtatctggatttatttaattctttaaaattcatcaataatttttttttaatcttgcacatcatttatgtattcattactgagaacttgataatattttattaataacatgcaaaatgattttcattgatttattattggtacgtgtgctacagcattgctaaattcttgctaattcaaataatttaactattccttactgggtattttattgaaatatagtcttattatttttcttaaaatttgtataaatttttattttctcctcttgccttactacactgatggcagattccagcacagtgttcattgaaatccatattttctggttcccaatcttgtcaccaatctcaaaaggaaaactttcaaaattaaatatatttttgt

SEQ ID NO: 202411 - DNA, 424 bp, Homo sapiens
ccaccagcacttcctgcttcaccttgctcttagcaaatctttaccattaggttgatgcctcctttttgtctctgtggttccttaagcccaggttctcctctgctctactaaattattagagtgctgcctgtcttgaatgggggaattcccaaaaggattattctggcagtgtgggaaggcaggtagtggtttgtgcccaagggacctgtggaacataacagcatggtgctgctgaacagccactctgatgtggcatctcctttggctgagttacagagcagagtttccagggctggggatggtagtcctacctccctagtttgtctctgcttgtcctcacagatatttataccttcaggcagtcatgatgcttcctgtgtgttaaggcaggtacaggtctcttgcaagggaatccaagatgatg

SEQ ID NO: 202412 - DNA, 633 bp, Homo sapiens
gccttcggggcctccaagccctgggcagatgagtaaatacattaaaaaacaagtaaaggaagtccactttctctctatccctttcctgtggaggtcgcagtaatgattgtcccacagtgatgattgaaagtgcatgaaactggacaactgtccagtctaactgcctgtcagaagaggcatttacatcattaaatgggctgcccaccatgacactcgccaggccaggaatggagcatctccctgggtgtcacactgtgctggaggccctaagaggagaacctgcaggaataaaatgggtcttcccttgtaggcccaccagctgcctgaggaaacagaatccagtttccctttatggacttcagtgtacagtaaatcctgaatgttccagaaactcaaaggtttctggaaacctgtgactttaagcaaaatgatgtataagaaaccagttttaccctatgccaattgatgtaaaccagagttcagttcctaccatgtatttctgatcatgagaacatcaccaaacttttgaataaaggcccagaacacttctaatattaaacattgaaatatgagcgatgcatacatttaagaaagattctggctactaagtgggataaagaaagatcataaaaa

SEQ ID NO: 202413 - DNA, 497 bp, Homo sapiens
ttcaggttcatagatggcaccttctaattgtgtcctcacatggtgaagggaactagttagctctctggggtctcttttataagggcataaatcccaatcactagggctccaccctcctaatctagtgacctcccaaaggccctgtcttcaatgccaacactttgggggttaggatttccacctgttttcgggggacacaaacatttataccatagcagtcagtaacaaactctttttgttttgcagccaaaggtcagtcagttttatcttcttagcttagtataatctaagccctaaaaccatgaaatgcatgggaaaggtttttttttctctttttcaacttttattttagatttgaggggtgcatgtgcaggtttgttacctgggtatattgcgtgatgctgaggtttggggtatgaatgacctgttacccaggtactgagcatccgtacagaattcttttacttttgaagttagttttatcattgctcctctag

SEQ ID NO: 202414 - DNA, 398 bp, Homo sapiens
agaagtttgagcttaaatatacaaatttaagattcttatttactggggctataagttgcattcatcttaacacaaaaatcaatgtcagagaaaatacagtgatcttatgtccagtttatattttattatggggaagagggataaaacagtctcaatgttttgttaacatattcttcctttataatttagaaatgccatttttccttgagcacaaaacataggaatttcaaacatctaatatggactcctgtttatcagttagtaattttttttttttttttgggagagctgaggcagaattgcttgaacctgggaggcagaggttgcagtgagccgagatcacgccacagcactccagcctgggtgacagagcgagactccgtcccccccaccgtaga

SEQ ID NO: 202415 - DNA, 374 bp, Homo sapiens
attatgatgtttacagtctagccaggagagaagctgtacatagaaactttaaatccaagatagagattgaaaataaacaaaaatggctgagcacagtggctcacacctataatcccaacactttgggaagcagaggtgagaggactgcttgagaccaggagtttgggaccagcctgaccaacatagcgagaccccatctctgcaaaaagtttttaaaaaattagctggatgtggtggcgtacacatgtagtcctagctacttgggaggctgaggtgggaagatggcttgagcccaggaatttgaggctgtagggaactatgatcgtgtcactgcactccagcttgggagtgacagagcaaaaccctgtctctta

SEQ ID NO: 202416 - DNA, 387 bp, Homo sapiens
gagaatattttttatttccatgaagatggctttctcttatttttcttaaagtatgtctttctttttgtctttcattttgttactttgaataaaaaagaacagcttagaaatacatttctctgctataacaaagacagcagcaaaaacatgatgaatggcatctaacactggacatcattctaaggatacagaaggaaatgctgggactatggcaactagagcatttgcccaacctggaaagggattccctgtgcaacctcaatgagttttgccctaagaatgtgggcccaaggaagtcacatttttgacttttcaaaagaagtcagaaaccagatttttaagtctgaaatcttcagatggctggttttggaaatggaaaaatattgt

SEQ ID NO: 202417 - DNA, 471 bp, Homo sapiens
gaaaaccaatcagactagtgctctgtaagagcgattgcacactcagccacttcaaaaatcaatttactcttttccagtcatttccaagtgacccaggtgatgacttcctgtatcacaatcatagtgcaatgctgtccaagaccgtcagtgcgacagagggttgcaaaggtaaactgcctggaaaatcacttcaaaatagtaataagccttctgagggagttgtggacaaagtatatcaacttaatactaaaaagtataatgctctgatatttgttttacgaaactcaaaaaataaataaaataaaaagtgggatagtaatgttccaaataatgagctcttttcctctgaagagccttcccaccattttgcaaaatgttgcaacatccaagttctgccacaggtaagcaatggcttgtcaatgataagcagcttagacgacatgggcgtcaatctgaggtaggagaggaatg

SEQ ID NO: 202418 - DNA, 348 bp, Homo sapiens
tcgagtatttgtccattagcaactccaaggttttcagtagtatcggtacgaacgcagggctgagccccagctgtccttgacagggtgtgtctgccagcccctgcagggaagcaggactgaccaaaatcaaccccgggacccccctcctgctgccctgcagtcccggtgtctctgccaagtgctccggggaaaggactgtcaggcacagtgtcactgacagagtccgtggagttctgggggctgtcaaaagtcctgggcgtaactgacgggggcatgtcacccataaattctgcatcctctgcactgacactgttctgctgagttggcatgccattgaccagggcttct

SEQ ID NO: 202419 - DNA, 528 bp, Homo sapiens
gacgagttaactgtattttctttttgtactttaagttaaacctttctttctccctgtcttaaactacaagatttgaatacagctatatatgacctctgacagaacttatttcaactcccagcactaggcagctacagacacacagaaggaacagacaatcagaggaaaactacagacatgtaaaaagattttataaagtttataaagggatcaacttaagaatcaaagtaaatgaaagctatggcacattccttaactacaatgcaaaggttaagaaaagaaaaagggttgggtgtggcggctcacgcctgtaatcccagcactttgggaggctgaggcgggcggatcacaaggtcaggagatcgagaccatcctgactaaccatcctgactaacacggtgaaaccccatctctactaaaaatacaaaaaattcgctgggtgtggtggtgggtgcctgtagtcccagctactcgggaggctgaggcaggagaatggtgtgaacgcgggggggcggagcttgcagtgag

SEQ ID NO: 202420 - DNA, 354 bp, Homo sapiens
tcgatcagaggatccccgtcaatttctacacacaacagagaaattagggaaaaacctagagaaaacaaagaaacaaaggaaagaaggtgcttcaaggaaagagtggtcaatagtgatgaacacttctagaaagtcaagtcactgaaaagtgaacattatcaaacatgcagcttgtgagtcatgtaagtggaatgctgggtgcatcaaccaggctgcagtgggtacagggtttatttaggatggaggaggatgaaaatgttctaaaattgattttagtgatagttgcacaactctgaatatgttaaaaatcatttaattgtacactttaaataggcaaattgtgtagaaattgaa

SEQ ID NO: 202421 - DNA, 310 bp, Homo sapiens
cagaatcttagcttcatttggtcttttctgaacataaaaaaaaatcagctttcttattaaaaaatctctaaaatggtgataatcatggttaacctgtaacgtattgtaaaaattgaaggagaggatgttcattaatgcagcatgttgttaattggaaaacagtttaaaagtgtgatgtagccgcattgtttgagtctcagaaacaataattcccttctccagtctatgtgaaattatctcattttcttcactaatttgacaaaatatatttcattagtttatcacttggtgactgaaagtagatgcctta

SEQ ID NO: 202422 - DNA, 354 bp, Homo sapiens
cgaagatcacttcagggaatgcataagaaagttctgtaactattgaatattatccccatgagaggcagggggaggtctgtagggggaggtctgcagcagctccctgcagcaaaagtgagcagcttcgtcatctttgcaggctgccaagcaccgggcttgctgaccttctgaatctggccactggccacctgtagagcttcattcattccttcccactgctcctgctcagctgttttcccaaactctgtgagcccctgttccaggcacagtggacttgcctgaacacattgtgtttatctccttgcactagaaaatatttgctcttggtgaatcctaggccttggtgagtgtggg

SEQ ID NO: 202423 - DNA, 462 bp, Homo sapiens
atttatttggaagcatatgataaagtttaaagtacatcagtacccaaatccttaaaaatgcatccttttgataaaacatagggagagtctcctacagtcctctgttcctaatctcactattccaatttagaatcactgtgtttgttattgtaactattaatttttttctttttcttaaaacccaccttgaagggaataattattaatttatttaaaagcttagtcaagtcaatcttaaaaatatacgctaaattcaatgtgtgctctgagtgtcctggaggtgtttaaatcactatagtgatatgggctggctcgtataattatatacctagtttgggttctactattatgaagggtgtaaatcaataagttcagcactgttttaactcagatattcattctctatagcacttgaacccattttcagtaaaaaaataaaggaatttgtgtctttgccatgtt

SEQ ID NO: 202424 - DNA, 568 bp, Homo sapiens
tccctctcagtatatgttcatctgacttcatctctactataatctcattaccggaacttcatcggcctctttgctgcttcacaaacaataccgggatacttcctcttaaggcgttgtattggctctatacttctctgatggaccattatcgtcccaggtatcaccatggctaactcatggcaacttctcaaagaggagaccatcctgtttaaaaccaaaaacccaaactagggccacctgtaatcccaactactcgggaggctgaggcagaagaatcgcttcaacctgggaggcggaggttacggtgagccaagattgcaccattgcactccagcctgggtgacagaaactctgtctcaaaaaaaaaaaaaaaggtgcaggtaatttgtgttctttgacacccaacaaaaacaaatgcaaattctccatggatgaaactgtctaaacctaggtccctcagatttccacagattaaatcaggctccctgtcctcaaaatgttagcaatcacacaagtaaaccaccaaaagtttgagtcaccagaaccaaagtgtgagatttagacccat

SEQ ID NO: 202425 - DNA, 385 bp, Homo sapiens
gttgctacctgggtactggccttaaaaatgagttggaaaatgatctcttctttaattttatgaaaggggctgtgtaaaattattgttaaaagccttattcaaatgttgtgtagaattcaaaagcaaaaccatttaagcctaaagactttactgggggaaagattttaaattatgacttcaatctatttaatgattatagaataatttagattaattatcctttttgattgagtttttacagtttgtagttttctgtcgaacttctgaacataaagttgtttatagtgttccacaattacctttttaatggtttcaggatttgtattaatacagcctcttttattcctaatattggtcattcgtgtcttctaatttttttgtcatt

SEQ ID NO: 202426 - DNA, 388 bp, Homo sapiens
tattttatttcttcatttatttgaagatattaaaagagcataataaaaatatttatatgatatacattatagacagggagcactgcctctgatagagttgagaaccattgtactaagctactcatttcaaaagatgttaggtttgccaccaacaaatatatgcaagtcccaacagggcacataaatataggtaacagtctagtccctgtcctcaaagaggtcagagtctcataaaacaaagtaatctaccaggtactctccatagatgtttccaacgaatacttttagcaggagaatataagctttataggccacaccatttaaacctggccctgaaggatgaaaagctgaggaaaaaaagctttccagtcaaaagcagaatacaggc

SEQ ID NO: 202427 - DNA, 753 bp, Homo sapiens
actggctgctccgcaccattgccttgctttagtcctgctacagcagtagacaaagcgagtctgctttgagctttatggttttttgccaaagtccatactagatggcgcatgctctccaaacttggctttgtccatcaaggttcaagaaaacaatggtcagacatgttcctcttaacaaacagtatgtccccaaacagcaaaaatgcatacctagtcctttctgggtgaatttttaaatcttacataaatccatcaaccccatcctttttcctttgcctcttgggagaaattaatctagctttacattaattatgcatgttatcagatttcaagctccttgagagcaggtattttaattctataaagcctctacgtggccttggacatgggtaggtgcttaattacccaagatgctccttgaatacagatggtacacgacctacacagacttagatctttaccacttcccccctctccccaccctgacttgctcaatcctgaaggaactggagacgtctaagtgtctgaggttcacgcttccacacagaagcttgggtctgtgtgggagggaaaaaggaagccatctgtccgcaggccagaccaggccacaccctgctagcacccagaaccctttgtcccaggcccagccctgccattttactttccttgcatctggaaagcacagggaatatagtagtgacaaaagaaggaagggttgtttgagtttaagaatagtttactctaaaaaaaaaa

SEQ ID NO: 202428 - DNA, 571 bp, Homo sapiens
actggctgctccgcaccattgccttgctttagtcctgctacagcagtagacaaagcgagtctgctttgagctttatggttttttgccaaagtccatactagatggcgcatgctctccaaacttggctttgtccatcaaggttcaagaaaacaatggtcagacatgttcctcttaacaaacagtatgtccccaaacagcaaaaatgcatacctagtcctttctgggtgaatttttaaatcttacataaatccatcaaccccatcctttttcctttgcctcttgggagaaattaatctagctttacattaattatgcatgttatcagatttcaagctccttgagagcaggtattttaattctataaagcctctacgtggccttggacatgggtaggtgcttaattacccaagatgctccttgaatacagatggtacacgacctacacagacttagatctttaccacttcccccctctccccaccctgacttgctcaatctattttgtagtctcccttacccttaagaagtttcctttaatctctcccacgcttaagaagttccagtatgccgg

SEQ ID NO: 202429 - DNA, 681 bp, Homo sapiens
aattcttctaccactctctcctaaacctctccaatcaggatttcccttacagatccagccacagggcctcagagagtcacatgacctcccctgagctaaatcccagcactatttctcagtcttccttgggctggactcttaacagcatttgacacagttgatcacctgtccctgaagcttctcattcccttggcttcagaaactgcacgctcctggttctccctctagcctgaccagtagcaccttcccagttcctccttctctaccagactgcacatgggagagtaccagattcgtctcccaaactccacaaacacacacacacacacacacaccagattcgtctcccaaactccacacacacacacacacacgtgcgcacgcatatataccctttacacagctagagaaaactaaggcccagaaagaggaggtgacatgcctgatagagctggtatccaaacccagggccctgaactcgcggttgtcattgcatggtcctttacagctagtcaggcccatgtctggctttctgctcagaaccatcagctttctatagctgacttacatgtccctccagggggacagggaccagcccggtgactcaagattacacatataaagcctgtagcctggaggattcactaggccaggagagctcccctgcccgtatgactctgg

SEQ ID NO: 202430 - DNA, 385 bp, Homo sapiens
aattcttctaccactctctcctaaacctctccaatcaggatttcccttacagatccagccacagggcctcagagagtcacatgacctcccctgagctaaatcccagcactatttctcagtcttccttgggctggactcttaacagcatttgacacagttgatcacctgtccctgaagcttctcattcccttggcttcagaaactgcacgctcctggttctccctctagcctgaccagtagcaccttcccagttcctccttctctaccagactgcacatgggagagtaccagattcgtctcccaaactccacaaacacacacacacacacacacacacacacacacactcaaataccacatacttctctcaagccaagacctctaa

SEQ ID NO: 202431 - DNA, 252 bp, Homo sapiens
acacacacactgcctctctgactggtggccacctgtgtggcttgggagctaagaagccctgcttcagtctggctcctctttgcccttcctgtctgctcctggtgccaagtggctttttggagacatggatggacacctgatacctggcagtctgcatcgagacattgattttgttttttgagatgtgtgtgtatttatgtttcttctgcagctcagtgtatgtgtgtattccttcagactcaggatgtgtgt

SEQ ID NO: 202432 - DNA, 230 bp, Homo sapiens
ctatgttcatttaaaaaatatttttaattttttaaatttctgactcacaatgttcccattctatgttaattctgttttaaaatttttgaggactcttctatagcagctgcatcattttttaatttaactttattattaatttttttttttagtagttttactgggttgagttttttttttttctttagggttatttggttttgagatgtaggagttttttagtatatgtg

SEQ ID NO: 202433 - DNA, 487 bp, Homo sapiens
acctacacctgtctcttcttctgtgccccacaggtttggcggtcaactgcagtgaggtctctataccacagagtggtgagtccccaagtcccggtgaacttaggaaatgggcattatcctctggaagacgtttatagaggtgacttttttggtaagtccctgggactcctgttgacatgggaattactttcttccctcagttgttggcgtctcacatggccattcatcagctcaatacaaacaagtcttcacggaggtggagtttcctcctcacctgttgctaaaccaggcagcgtggattggcatattcactgacttcatggcacgaaggcctacaaaagcggaacaacttttcaccagtgcaaaaatgttccaaaagatactctctctgtccaatacacttgtaagtgcattctagaatataaaaaatagagagagataaatgttctgttgaaagataatctcccaaaatataagtttttatgta

SEQ ID NO: 202434 - DNA, 339 bp, Homo sapiens
  misc_feature (34)..(35): n is a, c, g, or t
tctatttcgtcactctcgacttttcccctacctnnccccaccacctggaccgtgagggtttggcggtcaactgcagtgaggtctctataccacagagtggtgagtccccaagtcccggtgaacttaggaaatgggcattatcctctggaagacgtttatagaggtgacttttttggtctactgtgtctgccattgaagttgaagacatacaaggagcacttgacaacttgagaactgcgttcaaggaaagtctttaacaattctcctcctcacctccacccctagtcctcaccttctccatctcggaaataggaggagtctgtttcactcattcacagg

SEQ ID NO: 202435 - DNA, 741 bp, Homo sapiens
  misc_feature (674)..(674): n is a, c, g, or t
  misc_feature (691)..(691): n is a, c, g, or t
ggcgcccggctccgctgggggcgggacggcgggcggcgggcggggccgtgtgcgcctgcgtggtgtctgtcccggccgcagccccacgccggctgcagctccgcgagccgagccggatctcgagcggggtacacgggctgaggcggcggcggcggccccgccccggggctccattgttaaggcggctgcggctctgtcggctgttcagctgcgctccagtcggcccaggcgccgcggcgaggagcgagcgctgcgaggtggcggcctgagcaatggaagagttaatagttgaacttcgtctctttcttgaactcctggaccatgaatatctaacctcaactgtcagggagaaaaaggcagtgataaccaacattctgctaagaatacagtcatccaaaggttttgatgtgaaggaccatgctcagaagcaggagaccgctaacagcctgccagcccctcctcagatgcccctgccggagatccctcagccctggctgcctcctgacagtgggcctccaccattgccaacattcctccctcccagaaggttattatgaggaagctgtgccgctgagccccggaaaagctccggaatacatcacatcaaattatgattctgatgcgatgagcagctcttatgagtcgtatgatgaagaggaggaggatgggaaggngaagaaaacccggcacnagtggccctccgaggaggcctccatggacctgtcaaggacgccaaatctg

SEQ ID NO: 202436 - DNA, 889 bp, Homo sapiens
atccttaattaaattaattttccccccccgctgtcccggccgcagccccacgccggctgcagctccgcgagccgagccggatctcgagcggggtacacgggctgaggcggcggcggcggccccgccccggggctccattgttaaggcggctgcggctctgtcggctgttcagctgcgctccagtcggcccaggcgccgcggcgaggagcgagcgctgcgaggtggcggcctgaggtgagacggcgcgactggcggcagggtctccggacccggcgggggtctctgccccgggcgtggaagctccgagcggggctccgcagggtccggggtccgtgcgcctgggctttgtctcggcctcgggtggtaccgggggctccgcgcctgctgcgacgccgcgtgggcccgcgcgggggtcccggtcgtcctgcgggtgggggccggtccccactgctccccagctccccgcgtctgcccggaggggactgcgtggacccgggcgctggctcctgcccggtgcccccgcggcgtggctggtccccgtgtgcgtcagagggggccctgcgaagacccactcgtggggcggggtccgggtcaccaagagtgggaggctccgccgccctcccccgtagcgagactgcttcgtccgacttaccgaggggactgcgcggaccctcggacgagggggtccgtgactctggatgggggctctttcttggccccgcatgacggcttcctgagtgttttgtcacctataggttgttgcgtggacccacgcgcgtgggtcccggccgccctgcgagtggggctctgcgccgccccgtggctcgtctgggtcgaccccgcctgggacgcgagtgtaatgggggtccgtgcgcggggggcgcggttg

SEQ ID NO: 202437 - DNA, 705 bp, Homo sapiens
  misc_feature (638)..(638): n is a, c, g, or t
  misc_feature (655)..(655): n is a, c, g, or t
atccttaattaaattaattttccccccccgctgtcccggccgcagccccacgccggctgcagctccgcgagccgagccggatctcgagcggggtacacgggctgaggcggcggcggcggccccgccccggggctccattgttaaggcggctgcggctctgtcggctgttcagctgcgctccagtcggcccaggcgccgcggcgaggagcgagcgctgcgaggtggcggcctgagcaatggaagagttaatagttgaacttcgtctctttcttgaactcctggaccatgaatatctaacctcaactgtcagggagaaaaaggcagtgataaccaacattctgctaagaatacagtcatccaaaggttttgatgtgaaggaccatgctcagaagcaggagaccgctaacagcctgccagcccctcctcagatgcccctgccggagatccctcagccctggctgcctcctgacagtgggcctccaccattgccaacattcctccctcccagaaggttattatgaggaagctgtgccgctgagccccggaaaagctccggaatacatcacatcaaattatgattctgatgcgatgagcagctcttatgagtcgtatgatgaagaggaggaggatgggaaggngaagaaaacccggcacnagtggccctccgaggaggcctccatggacctgtcaaggacgccaaatctg

SEQ ID NO: 202438 - DNA, 574 bp, Homo sapiens
atttgaggactcatttcagatagcaaaatacttcatgtccctctactctcccttactcgatggtgtacttttagtgtccacttggtggtagaggttgtgctagaacaaaaacaatgataattaacactgacagttgctgtggctgagggccatagctaagttacagatacagaagagatggctcagcgaagctgagaaattttactgctttcggagggtggaacttggattataatccaaagtctttgcagttagactccaaagtttgatgataaaaagctgttctgttcaggctgggcgcggtggctcatgcctgtaatcccagcactttgggaggccgaggcgggcggatcatgaggtcaggagatcgagaccatcttggctaacacggtgaaaccctgtctctactaaaaataaaaaaattagccaggcgtggtggcgggcacctgtagtcccagctactcggaaggctgaggcaggagaatggtgtggacctgggaggtggagcttgcagtgagccgagatcatgccactgcaccccagcctgggggacagagcaagactccatctcagg

SEQ ID NO: 202439 - DNA, 906 bp, Homo sapiens
tctcaaaaatgccatgcttttccctgatgggagcctcggcccacgtgtgccttctgcttgtggtcatggtcctctggctctttgcagtcatggtcctctggctctttgcatgtctgtgccttccctgacatccccattcccgttacttcctagcccaccaccctttatttcctttagctttatattgatctgaccttaaattgtttttatatttattggagtgtttattcttcatcagtaccatatgcaccccattaaggcatttacacttctgctttgttctcttctgtattcccagcacctaaattaatgcccagtatatagtaggcactcagcataaattcgttgaacaaaataaataagatatagagccactggagcacagaggacaggttctttctggtcgaaggcactaaggacagtttcaccgagaagattttgaggagagtcgagctaaaaatgaggaggattttgatagaaggatggaggggaatatgttccaggcaaagtgtgtatcttaaaagaaaagtgtgagaacaagaaaggaaacgaattaaggatatgatatgtgttagcaactttgcgtgttatcttatttatacccattttatgtgaattgaggctcagaaaaatgttagtcatcccaggtgctctgtaaataagtacttgaactaggatgcaaatccagattttcctgggaccgatgtctatgattttacctttagctatgccttcttctagtgaataatcaggtaaaatttgacaaaggctaaatatatgtaaatcaagtattggagaacaggtagggaaaacctcaaaaccaaaagccaaaagacatcctttagaaggaagaaagctgtttctgtttctccaatatttttaggagttagaatttttaatctctaa

SEQ ID NO: 202440 - DNA, 979 bp, Homo sapiens
  misc_feature (943)..(943): n is a, c, g, or t
  misc_feature (962)..(962): n is a, c, g, or t
  misc_feature (965)..(965): n is a, c, g, or t
aaacttaggctaggtacgaggcggggtgaatcggaggcgagaacgacccccggaccgaccaaagcccgcgcgccgctgcatcccgcgtccagcacctacgtcccgctgccgtcgccgccgccaccatgcccaagagaaaggctgaaggggatgctaagggagataaagcaaaggtgaaggacgaaccacagagaagatccgcgaggttgtctgctaaacctgctcctccaaagccagagcccaagcctaaaaaggcccctgcaaagaagggagagaaggtacccaaagggaaaaagggaaaagctgatgctggcaaggaggggaataaccctgcagaaaatggagatgccaaaacagaccaggcacagaaagctgaaggtgctggagatgccaagtgaagtgtgtgcatttttgataactgtgtacttctggtgactgtacagtttgaaatactattttttatcaagttttataaaaatgcagaattttgttttactttttttttttttttaaaagctatgttgttagcacacagaacacttcatggtggttttggggggaaggggcatatgtcactaatagaatgtctccaaagctggattgatgtggagaaaacacctttcccttctagtttggagagacttcctctgggctcccaggaggagggattccctgactttgacacacatggccaccttggcacaaaagccttgtggtatagaaaaacaaatttgtttttatgtcctcttctccctttccatctttcagcatagacttaactcccttaagcccagacatctgttgagacctgacccctagtcatgggttaccagtgtgtcaggcaatctggactttccagtgatgccactgagatggcacctgtcaaagagacgggtccacttctaatggggtctccgataattcgccttcattccttccgaancggtggtggaagtgtcccngtngtgagtcccttatc

SEQ ID NO: 202441 - DNA, 1024 bp, Homo sapiens
  misc_feature (867)..(867): n is a, c, g, or t
actctctaataaccaccgctacaggctgaaggggatgctaagggagataaagcaaaggtgaaggacgaaccacagagaagatccgcgaggttgtctgctaaacctgctcctccaaagccagagcccaagcctaaaaaggcccctgcaaagaagggagagaaggtacccaaagggaaaaagggaaaagctgatgctggcaaggaggggaataaccctgcagaaaatggagatgccaaaacagaccaggcacagaaagctgaaggtgctggagatgccaagtgaagtgtgtgcatttttgataactgtgtacttctggtgactgtacagtttgaaatactattttttatcaagttttataaaaatgcagaattttgttttactttttttttttttttaaaagctatgttgttagcacacagaacacttcatggtggttttggggggaaggggcatatgtcactaatagaatgtctccaaagctggattgatgtggagaaaacacctttcccttctagtttggagagacttcctctgggctcccaggaggagggattccctgactttgacacacatggccaccttggcacaaaagccttgtggtatagaaaaacaaatttgtttttatgtcctcttctccctttccatctttcagcatagacttaactcccttaagcccagacatctgttgagacctgacccctagtcatgggttaccagtgtgtcaggcaatctggactttccagtgatgccactgagatggcacctgtcaaaagagcagtggttccatttctagattgtggatcttcagataaattctgccattttcatttcacttcctgaaagtcagggtcggcttgtgaaagtgtnacccttggtatgggatgggcctcatctaaattccgtcaactccgagagaaccgggtaaaggcgcatggggccacaaagggggacatgtttgtaagggcctctctggacaaagggagatacagcgggtgggaacaaaagggggccgccgcacctagcg

SEQ ID NO: 202442 - DNA, 875 bp, Homo sapiens
tgggttttactagtgggcgttttccttcgaatgttgtcgggatagggctcgcaactgtgaaaggaagggagtttgaaagttgttgtatactgttaacgattgtctgcccatgtcctgcctgaaataccatgattgtttatggaaagtatctttaataaagctggatacagtttggcttggaatgctgcctctgatcttttcccacaagtggggtaacctggtttatccaagtctcttggaacagggtacgttctgctttgaggtactccatgtacagtctaatgatgatctttcactgatttatagtcagcttccaaaacacacagtgctaggtgcagttaggaaggattccaggagtagacttagctgatggtgaaaggctgggagtatggagtgatttctgtacttggttatgcagcattccctgcagtgtttgttttttgcatgactccgaatacatgaagtgtattaaatgcagatttttggtagatctgcggttttggctgggtagctgacaggagcctctctacttccatctgcatttgcaacttctataaaattagcaaattaatagactcatgtcagagagtgtctctgtgaatgtgtacacagttgtccatttgtaaggtagatgacactttgctcctaagtagacctgcaaacaaagacaatggggtctttcctgattcctttagtttggagatgcagagaaccccacgtttctctaagtgaaatggcaagaagttatttgttagaatatggaactggtaacaaattcatgtttgcaccttgaatttgctttcacagacctggctgtattgttggacaggaataaagtaaattggagactaattgctttgtccattcccttagtc

SEQ ID NO: 202443 - DNA, 1173 bp, Homo sapiens
  misc_feature (113)..(113): n is a, c, g, or t
  misc_feature (128)..(128): n is a, c, g, or t
  misc_feature (160)..(160): n is a, c, g, or t
  misc_feature (177)..(177): n is a, c, g, or t
  misc_feature (180)..(181): n is a, c, g, or t
  misc_feature (185)..(185): n is a, c, g, or t
  misc_feature (196)..(197): n is a, c, g, or t
  misc_feature (210)..(210): n is a, c, g, or t
  misc_feature (236)..(236): n is a, c, g, or t
  misc_feature (256)..(256): n is a, c, g, or t
ggaggacggggagaaatcgagcctctcgtgtaccgactcaagagtcaccgtcggcgcgtggctgtgatgccgcggtccagcgacctatgatcccgtgttccgtcgccggcgcnaatgcccaagagaanggctgaaggggatgctaagggagataaagcanaggtgaaggacgaaccnacnngagnaagatccgcgnnggttgtctgctanacctgctcctccaaagccagagcccngagcctaaaaaggcccctgncaaagaagggagagaaggtacccaaagggaaaaagggaaaagctgatgctggcaaggaggggaataaccctgcagaaaatggagatgccaaaacagaccaggcacagaaagctgaaggtgctggagatgccaagtgaagtgtgtgcatttttgataactgtgtacttctggtgactgtacagtttgaaatactattttttatcaagttttataaaaatgcagaattagtgatgacttgtagagatgattgtagaaaggcatagtggtagttaggacagaggagaaacaattacatgggtggtaatggggggaaggggggcatagtgtacacataatacgacgtgtcgtccaaagcatggataggcatgtggaagaaaacccatgtcccattctagactcgggagagactcccccatgggatacccaggagagaggcaatcccgtgagtttgaaagatattgggacaccatgggggaaaaagggctaggggattagagaagaccaatagggaaaaaggtgaatgtcatacgtataacgaattaagagattgaattaattccataagcgaaagaataagtggaacttgacccaagacatgggatcccagtggccagggcaagcgggaactccaagcaactgcacacggaaaagggaccggtaaaaagacgcgggggccagtcacgaaggggatcccgcaatatgtcgccgtaaagactcgcccacacaggcgtgaggtgacagaggtgaacagctcgtggtaagtgcacacctagagtcgcggagagcagacaacacgcgtcggaggatgggccacagaggaagaggagcaacatcgcagtccagtggactcaagaggcacaatcagagtcgccgtacaatcacagacaggaagcatagaacacacgagcgtgcacaga

SEQ ID NO: 202444 - DNA, 496 bp, Homo sapiens
ccacacaccccccttctcactccctccagaggaggtgagtttaaaccccgcccacgtgaccccagctgggccaatgaacggcggcgggaggtgaaatccggttctaaccggtccggggctcccagcgctataaaaactttataaaccccccggagcccgagcagtgtgaagaagaggcgagaacgacccccggaccgaccaaagcccgcgcgccgctgcatcccgcgtccagcacctacgtcccgctgccgtcgccgccgccaccatgcccaagagaaagaaggtacgtggcgcgagggccccaggcgccgggccaccactgccgccaccgccgccgccgcctccctggtgcagggagcgagaatcggcgccgagcaggagccagcgcagcctccccgcgcgggggctggagacggtgtcgggcagctcggggctaaccctgagcggctcggctgcccgcgggcgccagaggccatattggaggagcggcggccgc

SEQ ID NO: 202445 - DNA, 1997 bp, Homo sapiens
tggtactggtccggaatctctaggatcgggaggtgaaatccggttctaaccggtccggggctcccagcgctataaaaactttataaaccccccggagcccgagcagtgtgaagaagaggcgagaacgacccccggaccgaccaaagcccgcgcgccgctgcatcccgcgtccagcacctacgtcccgctgccgtcgccgccgccaccatgcccaagagaaaggctgaaggggatgctaagggagataaagcaaaggtgaaggacgaaccacagagaagatccgcgaggttgtctgctaaacctgctcctccaaagccagagcccaagcctaaaaaggcccctgcaaagaagggagagaaggtacccaaagggaaaaagggaaaagctgatgctggcaaggaggggaataaccctgcagaaaatggagatgccaaaacagaccaggcacagaaagctgaaggtgctggagatgccaagtgaagtgtgtgcatttttgataactgtgtacttctggtgactgtacagtttgaaatactattttttatcaagttttataaaaatgcagaattttgttttactttttttttttttttaaaagctatgttgttagcacacagaacacttcatggtggttttggggggaaggggcatatgtcactaatagaatgtctccaaagctggattgatgtggagaaaacacctttcccttctagtttggagagacttcctctgggctcccaggaggagggattccctgactttgacacacatggccaccttggcacaaaagccttgtggtatagaaaaacaaatttgtttttatgtcctcttctccctttccatctttcagcatagacttaactcccttaagcccagacatctgttgagacctgacccctagtcatgggttaccagtgtgtcaggcaatctggactttccagtgatgccactgagatggcacctgtcaaaagagcagtggttccatttctagattgtggatcttcagataaattctgccattttcatttcacttcctgaaagtcagggtcggcttgtgaaaagttgttaaacaacatgctaaatgtgaaatgtcaaccctcactctaaactttccctgttcagagcatcagatgaagacttcattgggttttatagtggctttctgatttttggtagtccattgaagaagggagtttgaaagttgttgtatactgttaacgattgtctgcccatgtcctgcctgaaataccatgattgtttatggaaagtatctttaataaagctggatacagtttggcttggaatgctgcctctgatcttttcccacaagtggggtaacctggtttatccaagtctcttggaacagggtacgttctgctttgaggtactccatgtacagtctaatgatgatctttcactgatttatagtcagcttccaaaacacacagtgctaggtgcagttaggaaggattccaggagtagacttagctgatggtgaaaggctgggagtatggagtgatttctgtacttggttatgcagcattccctgcagtgtttgttttttgcatgactccgaatacatgaagtgtattaaatgcagatttttggtagatctgcggttttggctgggtagctgacaggagcctctctacttccatctgcatttgcaacttctataaaattagcaaattaatagactcatgtcagagagtgtctctgtgaatgtgtacacagttgtccatttgtaaggtagatgacactttgctcctaagtagacctgcaaacaaagacaatggggtctttcctgattcctttagtttggagatgcagagaaccccacgtttctctaagtgaaatggcaagaagttatttgttagaatatggaactggtaacaaattcatgtttgcaccttgaatttgctttcacagacctggctgtattgttggacaggaataaagtaaattggagactaattgctttgtccattcccttagtc

SEQ ID NO: 202446 - DNA, 1222 bp, Homo sapiens
  misc_feature (1065)..(1065): n is a, c, g, or t
tggtactggtccggaatctctaggatcgggaggtgaaatccggttctaaccggtccggggctcccagcgctataaaaactttataaaccccccggagcccgagcagtgtgaagaagaggcgagaacgacccccggaccgaccaaagcccgcgcgccgctgcatcccgcgtccagcacctacgtcccgctgccgtcgccgccgccaccatgcccaagagaaaggctgaaggggatgctaagggagataaagcaaaggtgaaggacgaaccacagagaagatccgcgaggttgtctgctaaacctgctcctccaaagccagagcccaagcctaaaaaggcccctgcaaagaagggagagaaggtacccaaagggaaaaagggaaaagctgatgctggcaaggaggggaataaccctgcagaaaatggagatgccaaaacagaccaggcacagaaagctgaaggtgctggagatgccaagtgaagtgtgtgcatttttgataactgtgtacttctggtgactgtacagtttgaaatactattttttatcaagttttataaaaatgcagaattttgttttactttttttttttttttaaaagctatgttgttagcacacagaacacttcatggtggttttggggggaaggggcatatgtcactaatagaatgtctccaaagctggattgatgtggagaaaacacctttcccttctagtttggagagacttcctctgggctcccaggaggagggattccctgactttgacacacatggccaccttggcacaaaagccttgtggtatagaaaaacaaatttgtttttatgtcctcttctccctttccatctttcagcatagacttaactcccttaagcccagacatctgttgagacctgacccctagtcatgggttaccagtgtgtcaggcaatctggactttccagtgatgccactgagatggcacctgtcaaaagagcagtggttccatttctagattgtggatcttcagataaattctgccattttcatttcacttcctgaaagtcagggtcggcttgtgaaagtgtnacccttggtatgggatgggcctcatctaaattccgtcaactccgagagaaccgggtaaaggcgcatggggccacaaagggggacatgtttgtaagggcctctctggacaaagggagatacagcgggtgggaacaaaagggggccgccgcacctagcg

SEQ ID NO: 202447 - DNA, 1211 bp, Homo sapiens
aaacttaggctaggtacgaggcggggtgaatcggaggcgagaacgacccccggaccgaccaaagcccgcgcgccgctgcatcccgcgtccagcacctacgtcccgctgccgtcgccgccgccaccatgcccaagagaaaggctgaaggggatgctaagggagataaagcaaaggtgaaggacgaaccacagagaagatccgcgaggttgtctgctaaacctgctcctccaaagccagagcccaagcctaaaaaggcccctgcaaagaagggagagaaggtacccaaagggaaaaagggaaaagctgatgctggcaaggaggggaataaccctgcagaaaatggagatgccaaaacagaccaggcacagaaagctgaaggtgctggagatgccaagtgaagtgtgtgcatttttgataactgtgtacttctggtgactgtacagtttgaaatactattttttatcaagttttataaaaatgcagaattttgttttactttttttttttttttaaaagctatgttgttagcacacagaacacttcatggtggttttggggggaaggggcatatgtcactaatagaatgtctccaaagctggattgatgtggagaaaacacctttcccttctagtttggagagacttcctctgggctcccaggaggagggattccctgactttgacacacatggccaccttggcacaaaagccttgtggtatagaaaaacaaatttgtttttatgtcctcttctccctttccatctttcagcatagacttaactcccttaagcccagacatctgttgagacctgacccctagtcatgggttaccagtgtgtcaggcaatctggactttccagtgatgccactgagatggcacctgtcaaaagagcagtggttccatttctagattgtggatcttcagataaattctgccattttcatttcacttcctgaaagtcagggtcggcttgtgaaaagttgttaaacaacatgctaaatgtgaaatgtcaaccctcactctaaactttccctgttcagagcatcagatgaagacttcattgggttttatagtggctttctgatttttggtagtccattgaagaagggagtttgaaagttgttgtatactgttaacgattgtctgcccatgtcctgcctgaaataccatgattgtttatggaaagtatctttaataaagctggatacagt

SEQ ID NO: 202448 - DNA, 1207 bp, Homo sapiens
cggacgcgtgggtcgacccacgcgtccgagaggcgagaacgacccccggaccgaccaaagcccgcgcgccgctgcatcccgcgtccagcacctacgtcccgctgccgtcgccgccgccaccatgcccaagagaaaggctgaaggggatgctaagggagataaagcaaaggtgaaggacgaaccacagagaagatccgcgaggttgtctgctaaacctgctcctccaaagccagagcccaagcctaaaaaggcccctgcaaagaagggagagaaggtacccaaagggaaaaagggaaaagctgatgctggcaaggaggggaataaccctgcagaaaatggagatgccaaaacagaccaggcacagaaagctgaaggtgctggagatgccaagtgaagtgtgtgcatttttgataactgtgtacttctggtgactgtacagtttgaaatactattttttatcaagttttataaaaatgcagaattttgttttactttttttttttttttaaaagctatgttgttagcacacagaacacttcatggtggttttggggggaaggggcatatgtcactaatagaatgtctccaaagctggattgatgtggagaaaacacctttcccttctagtttggagagacttcctctgggctcccaggaggagggattccctgactttgacacacatggccaccttggcacaaaagccttgtggtatagaaaaacaaatttgtttttatgtcctcttctccctttccatctttcagcatagacttaactcccttaagcccagacatctgttgagacctgacccctagtcatgggttaccagtgtgtcaggcaatctggactttccagtgatgccactgagatggcacctgtcaaaagagcagtggttccatttctagattgtggatcttcagataaattctgccattttcatttcacttcctgaaagtcagggtcggcttgtgaaaagttgttaaacaacatgctaaatgtgaaatgtcaaccctcactctaaactttccctgttcagagcatcagatgaagacttcattgggttttatagtggctttctgatttttggtagtccattgaagaagggagtttgaaagttgttgtatactgttaacgattgtctgcccatgtcctgcctgaaataccatgattgtttatggaaagtatctttaataaagctggatacagt

SEQ ID NO: 202449 - DNA, 1946 bp, Homo sapiens
tggtactggtccggaatctctaggatcgggaggtgaaatccggttctaaccggtccggggctcccagcgctataaaaactttataaaccccccggagcccgagcagtgtgaagaagaggcgagaacgacccccggaccgaccaaagcccgcgcgccgctgcatcccgcgtccagcacctacgtcccgctgccgtcgccgccgccaccatgcccaagagaaaggctgaaggggatgctaagggagataaagcaaaggtgaaggacgaaccacagagaagatccgcgaggttgtctgctaaacctgctcctccaaagccagagcccaagcctaaaaaggcccctgcaaagaagggagagaaggtacccaaagggaaaaagggaaaagctgatgctggcaaggaggggaataaccctgcagaaaatggagatgccaaaacagaccaggcacagaaagctgaaggtgctggagatgccaagtgaagtgtgtgcatttttgataactgtgtacttctggtgactgtacagtttgaaatactattttttatcaagttttataaaaatgcagaattttgttttactttttttttttttttaaaagctatgttgttagcacacagaacacttcatggtggttttggggggaaggggcatatgtcactaatagaatgtctccaaagctggattgatgtggagaaaacacctttcccttctagtttggagagacttcctctgggctcccaggaggagggattccctgactttgacacacatggccaccttggcacaaaagccttgtggtatagaaaaacactcccttaagcccagacatctgttgagacctgacccctagtcatgggttaccagtgtgtcaggcaatctggactttccagtgatgccactgagatggcacctgtcaaaagagcagtggttccatttctagattgtggatcttcagataaattctgccattttcatttcacttcctgaaagtcagggtcggcttgtgaaaagttgttaaacaacatgctaaatgtgaaatgtcaaccctcactctaaactttccctgttcagagcatcagatgaagacttcattgggttttatagtggctttctgatttttggtagtccattgaagaagggagtttgaaagttgttgtatactgttaacgattgtctgcccatgtcctgcctgaaataccatgattgtttatggaaagtatctttaataaagctggatacagtttggcttggaatgctgcctctgatcttttcccacaagtggggtaacctggtttatccaagtctcttggaacagggtacgttctgctttgaggtactccatgtacagtctaatgatgatctttcactgatttatagtcagcttccaaaacacacagtgctaggtgcagttaggaaggattccaggagtagacttagctgatggtgaaaggctgggagtatggagtgatttctgtacttggttatgcagcattccctgcagtgtttgttttttgcatgactccgaatacatgaagtgtattaaatgcagatttttggtagatctgcggttttggctgggtagctgacaggagcctctctacttccatctgcatttgcaacttctataaaattagcaaattaatagactcatgtcagagagtgtctctgtgaatgtgtacacagttgtccatttgtaaggtagatgacactttgctcctaagtagacctgcaaacaaagacaatggggtctttcctgattcctttagtttggagatgcagagaaccccacgtttctctaagtgaaatggcaagaagttatttgttagaatatggaactggtaacaaattcatgtttgcaccttgaatttgctttcacagacctggctgtattgttggacaggaataaagtaaattggagactaattgctttgtccattcccttagtc

SEQ ID NO: 202450 - DNA, 1681 bp, Homo sapiens
  misc_feature (178)..(178): n is a, c, g, or t
tcccgctctcctcgggctcgccgcccccgccccgtgccccctcccccatcgcgagggccccttccctcccctccctgcgggcgggcaattcaaacccgaaagggcgggaaggcggcgctcggggttggcgggcgggggaaagcgctgccgccaaaaaaccgccgccgtgagggggtgncttgtgcggtatggccccgcccctcgcccacgttccccgcgcacgagacgcgcgctgtcgccgcccacgagttccccgggctgcgcgcgcctccctctcccgccctcgacggctgccatagcaacggcgctgggctccgcctccggagggggtttgtttgcgccatctgcagctgttgctcctgcctgtcgcggtggtgcgggctccgctgccctccccggctgcgctccggtccagccctcgcttctcggggtcggcgagccggagctcctgcgcgcgcttcgttcttatacgaacgtcgggctcactcatttatgtcctagaaaagttgtgtggacgactgctttaattttcatttttagcactctaaagtttgggaagtaattaagaaccacctcaaaatctgcagttttttgttcttgtttcttataggctgaaggggatgctaagggagataaagcaaaggtgaaggacgaaccacagagaagatccgcgaggttgtctgctaaacctgctcctccaaagccagagcccaagcctaaaaaggcccctgcaaagaagggagagaaggtacccaaagggaaaaagggaaaagctgatgctggcaaggaggggaataaccctgcagaaaatggagatgccaaaacagaccaggcacagaaagctgaaggtgctggagatgccaagtgaagtgtgtgcatttttgataactgtgtacttctggtgactgtacagtttgaaatactattttttatcaagttttataaaaatgcagaattttgttttactttttttttttttttaaaagctatgttgttagcacacagaacacttcatggtggttttggggggaaggggcatatgtcactaatagaatgtctccaaagctggattgatgtggagaaaacacctttcccttctagtttggagagacttcctctgggctcccaggaggagggattccctgactttgacacacatggccaccttggcacaaaagccttgtggtatagaaaaacaaatttgtttttatgtcctcttctccctttccatctttcagcatagacttaactcccttaagcccagacatctgttgagacctgacccctagtcatgggttaccagtgtgtcaggcaatctggactttccagtgatgccactgagatggcacctgtcaaaagagcagtggttccatttctagattgtggatcttcagataaattctgccattttcatttcacttcctgaaagtcagggtcggcttgtgaaaagttgttaaacaacatgctaaatgtgaaatgtcaaccctcactctaaactttccctgttcagagcatcagatgaagacttcattgggttttatagtggctttctgatttttggtagtccattgaagaagggagtttgaaagttgttgtatactgttaacgattgtctgcccatgtcctgcctgaaataccatgattgtttatggaaagtatctttaataaagctggatacagt

SEQ ID NO: 202451 - DNA, 1296 bp, Homo sapiens
tggtactggtccggaatctctaggatcgggaggtgaaatccggttctaaccggtccggggctcccagcgctataaaaactttataaaccccccggagcccgagcagtgtgaagaagaggcgagaacgacccccggaccgaccaaagcccgcgcgccgctgcatcccgcgtccagcacctacgtcccgctgccgtcgccgccgccaccatgcccaagagaaagaaggctgaaggggatgctaagggagataaagcaaaggtgaaggacgaaccacagagaagatccgcgaggttgtctgctaaacctgctcctccaaagccagagcccaagcctaaaaaggcccctgcaaagaagggagagaaggtacccaaagggaaaaagggaaaagctgatgctggcaaggaggggaataaccctgcagaaaatggagatgccaaaacagaccaggcacagaaagctgaaggtgctggagatgccaagtgaagtgtgtgcatttttgataactgtgtacttctggtgactgtacagtttgaaatactattttttatcaagttttataaaaatgcagaattttgttttactttttttttttttttaaaagctatgttgttagcacacagaacacttcatggtggttttggggggaaggggcatatgtcactaatagaatgtctccaaagctggattgatgtggagaaaacacctttcccttctagtttggagagacttcctctgggctcccaggaggagggattccctgactttgacacacatggccaccttggcacaaaagccttgtggtatagaaaaacaaatttgtttttatgtcctcttctccctttccatctttcagcatagacttaactcccttaagcccagacatctgttgagacctgacccctagtcatgggttaccagtgtgtcaggcaatctggactttccagtgatgccactgagatggcacctgtcaaaagagcagtggttccatttctagattgtggatcttcagataaattctgccattttcatttcacttcctgaaagtcagggtcggcttgtgaaaagttgttaaacaacatgctaaatgtgaaatgtcaaccctcactctaaactttccctgttcagagcatcagatgaagacttcattgggttttatagtggctttctgatttttggtagtccattgaagaagggagtttgaaagttgttgtatactgttaacgattgtctgcccatgtcctgcctgaaataccatgattgtttatggaaagtatctttaataaagctggatacagt

SEQ ID NO: 202452 - DNA, 1145 bp, Homo sapiens
aaacttaggctaggtacgaggcggggtgaatcggaggcgagaacgacccccggaccgaccaaagcccgcgcaaggctgaaggggatgctaagggagataaagcaaaggtgaaggacgaaccacagagaagatccgcgaggttgtctgctaaacctgctcctccaaagccagagcccaagcctaaaaaggcccctgcaaagaagggagagaaggtacccaaagggaaaaagggaaaagctgatgctggcaaggaggggaataaccctgcagaaaatggagatgccaaaacagaccaggcacagaaagctgaaggtgctggagatgccaagtgaagtgtgtgcatttttgataactgtgtacttctggtgactgtacagtttgaaatactattttttatcaagttttataaaaatgcagaattttgttttactttttttttttttttaaaagctatgttgttagcacacagaacacttcatggtggttttggggggaaggggcatatgtcactaatagaatgtctccaaagctggattgatgtggagaaaacacctttcccttctagtttggagagacttcctctgggctcccaggaggagggattccctgactttgacacacatggccaccttggcacaaaagccttgtggtatagaaaaacaaatttgtttttatgtcctcttctccctttccatctttcagcatagacttaactcccttaagcccagacatctgttgagacctgacccctagtcatgggttaccagtgtgtcaggcaatctggactttccagtgatgccactgagatggcacctgtcaaaagagcagtggttccatttctagattgtggatcttcagataaattctgccattttcatttcacttcctgaaagtcagggtcggcttgtgaaaagttgttaaacaacatgctaaatgtgaaatgtcaaccctcactctaaactttccctgttcagagcatcagatgaagacttcattgggttttatagtggctttctgatttttggtagtccattgaagaagggagtttgaaagttgttgtatactgttaacgattgtctgcccatgtcctgcctgaaataccatgattgtttatggaaagtatctttaataaagctggatacagt

SEQ ID NO: 202453 - DNA, 1095 bp, Homo sapiens
actctctaataaccaccgctacaggctgaaggggatgctaagggagataaagcaaaggtgaaggacgaaccacagagaagatccgcgaggttgtctgctaaacctgctcctccaaagccagagcccaagcctaaaaaggcccctgcaaagaagggagagaaggtacccaaagggaaaaagggaaaagctgatgctggcaaggaggggaataaccctgcagaaaatggagatgccaaaacagaccaggcacagaaagctgaaggtgctggagatgccaagtgaagtgtgtgcatttttgataactgtgtacttctggtgactgtacagtttgaaatactattttttatcaagttttataaaaatgcagaattttgttttactttttttttttttttaaaagctatgttgttagcacacagaacacttcatggtggttttggggggaaggggcatatgtcactaatagaatgtctccaaagctggattgatgtggagaaaacacctttcccttctagtttggagagacttcctctgggctcccaggaggagggattccctgactttgacacacatggccaccttggcacaaaagccttgtggtatagaaaaacaaatttgtttttatgtcctcttctccctttccatctttcagcatagacttaactcccttaagcccagacatctgttgagacctgacccctagtcatgggttaccagtgtgtcaggcaatctggactttccagtgatgccactgagatggcacctgtcaaaagagcagtggttccatttctagattgtggatcttcagataaattctgccattttcatttcacttcctgaaagtcagggtcggcttgtgaaaagttgttaaacaacatgctaaatgtgaaatgtcaaccctcactctaaactttccctgttcagagcatcagatgaagacttcattgggttttatagtggctttctgatttttggtagtccattgaagaagggagtttgaaagttgttgtatactgttaacgattgtctgcccatgtcctgcctgaaataccatgattgtttatggaaagtatctttaataaagctggatacagt

SEQ ID NO: 202454 - DNA, 1821 bp, Homo sapiens
tcccgctctcctcgggctcgccgcccccgccccgtgccccctcccccatcgcgagggccccttccctcccctccctgcgggcgggcaattcaaacccgaaagggcgggaaggcggcgctcggggttggcgggcgggggaaagcgctgccgccaaaaaaccgccccctcgcccacgttccccgcgcacgagacgcgcgctgtcgccgcccacgagttccccgggctgcgcgcgcctccctctcccgccctcgacggctgccatagcaacggcgctgggctccgcctccggagggggtttgtttgcgccatctgcagctgttgctcctgcctgtcgcggtggtgcgggctccgctgccctccccggctgcgctccggtccagccctcgcttctcggggtcggcgagccggagctcctgcgcgcgcttcgttcttatacgaacgtcgggctcactcatttatgtcctagaaaagttgtgtggacgactgctttaattttcatttttagcactctaaagtttgggaagtaattaagaaccacctcaaaatctgcagttttttgttcttgtttcttataggctgaaggggatgctaagggagataaagcaaaggtgaaggacgaagtaagtcattctctcttcaagggtcaaagccttggactagcagaggccactggactcggtgattaaccgtaacctgtgtcctgaatttacactcctataatctagagcaaattgataccaaactttcaaagcgacttacctgtcctatttctaactttctcgttgtctttaatagccacagagaagatccgcgaggttgtctgctaaacctgctcctccaaagccagagcccaagcctaaaaaggcccctgcaaagaagggagagaaggtacccaaagggaaaaagggaaaagctgatgctggcaaggaggggaataaccctgcagaaaatggagatgccaaaacagaccaggcacagaaagctgaaggtgctggagatgccaagtgaagtgtgtgcatttttgataactgtgtacttctggtgactgtacagtttgaaatactattttttatcaagttttataaaaatgcagaattttgttttactttttttttttttttaaaagctatgttgttagcacacagaacacttcatggtggttttggggggaaggggcatatgtcactaatagaatgtctccaaagctggattgatgtggagaaaacacctttcccttctagtttggagagacttcctctgggctcccaggaggagggattccctgactttgacacacatggccaccttggcacaaaagccttgtggtatagaaaaacaaatttgtttttatgtcctcttctccctttccatctttcagcatagacttaactcccttaagcccagacatctgttgagacctgacccctagtcatgggttaccagtgtgtcaggcaatctggactttccagtgatgccactgagatggcacctgtcaaaagagcagtggttccatttctagattgtggatcttcagataaattctgccattttcatttcacttcctgaaagtcagggtcggcttgtgaaaagttgttaaacaacatgctaaatgtgaaatgtcaaccctcactctaaactttccctgttcagagcatcagatgaagacttcattgggttttatagtggctttctgatttttggtagtccattgaagaagggagtttgaaagttgttgtatactgttaacgattgtctgcccatgtcctgcctgaaataccatgattgtttatggaaagtatctttaataaagctggatacagt

SEQ ID NO: 202455 - DNA, 1386 bp, Homo sapiens
aaacttaggctaggtacgaggcggggtgaatcggaggcgagaacgacccccggaccgaccaaagcccgcgcgccgctgcatcccgcgtccagcacctacgtcccgctgccgtcgccgccgccaccatgcccaagagaaaggctgaaggggatgctaagggagataaagcaaaggtgaaggacgaagtaagtcattctctcttcaagggtcaaagccttggactagcagaggccactggactcggtgattaaccgtaacctgtgtcctgaatttacactcctataatctagagcaaattgataccaaactttcaaagcgacttacctgtcctatttctaactttctcgttgtctttaatagccacagagaagatccgcgaggttgtctgctaaacctgctcctccaaagccagagcccaagcctaaaaaggcccctgcaaagaagggagagaaggtacccaaagggaaaaagggaaaagctgatgctggcaaggaggggaataaccctgcagaaaatggagatgccaaaacagaccaggcacagaaagctgaaggtgctggagatgccaagtgaagtgtgtgcatttttgataactgtgtacttctggtgactgtacagtttgaaatactattttttatcaagttttataaaaatgcagaattttgttttactttttttttttttttaaaagctatgttgttagcacacagaacacttcatggtggttttggggggaaggggcatatgtcactaatagaatgtctccaaagctggattgatgtggagaaaacacctttcccttctagtttggagagacttcctctgggctcccaggaggagggattccctgactttgacacacatggccaccttggcacaaaagccttgtggtatagaaaaacaaatttgtttttatgtcctcttctccctttccatctttcagcatagacttaactcccttaagcccagacatctgttgagacctgacccctagtcatgggttaccagtgtgtcaggcaatctggactttccagtgatgccactgagatggcacctgtcaaaagagcagtggttccatttctagattgtggatcttcagataaattctgccattttcatttcacttcctgaaagtcagggtcggcttgtgaaaagttgttaaacaacatgctaaatgtgaaatgtcaaccctcactctaaactttccctgttcagagcatcagatgaagacttcattgggttttatagtggctttctgatttttggtagtccattgaagaagggagtttgaaagttgttgtatactgttaacgattgtctgcccatgtcctgcctgaaataccatgattgtttatggaaagtatctttaataaagctggatacagt

SEQ ID NO: 202456 - DNA, 1272 bp, Homo sapiens
aaacttaggctaggtacgaggcggggtgaatcggaggcgagaacgacccccggaccgaccaaagcccgcgcgccgctgcatcccgcgtccagcacctacgtcccgctgccgtcgccgccgccaccatgcccaagagaaagaaggctgaaggggatgctaagggagataaagcaaaggtgaaggacgaagtaagtcattctctcttcaagggtcaaagccttggactagcagaggccactggactcgccacagagaagatccgcgaggttgtctgctaaacctgctcctccaaagccagagcccaagcctaaaaaggcccctgcaaagaagggagagaaggtacccaaagggaaaaagggaaaagctgatgctggcaaggaggggaataaccctgcagaaaatggagatgccaaaacagaccaggcacagaaagctgaaggtgctggagatgccaagtgaagtgtgtgcatttttgataactgtgtacttctggtgactgtacagtttgaaatactattttttatcaagttttataaaaatgcagaattttgttttactttttttttttttttaaaagctatgttgttagcacacagaacacttcatggtggttttggggggaaggggcatatgtcactaatagaatgtctccaaagctggattgatgtggagaaaacacctttcccttctagtttggagagacttcctctgggctcccaggaggagggattccctgactttgacacacatggccaccttggcacaaaagccttgtggtatagaaaaacaaatttgtttttatgtcctcttctccctttccatctttcagcatagacttaactcccttaagcccagacatctgttgagacctgacccctagtcatgggttaccagtgtgtcaggcaatctggactttccagtgatgccactgagatggcacctgtcaaaagagcagtggttccatttctagattgtggatcttcagataaattctgccattttcatttcacttcctgaaagtcagggtcggcttgtgaaaagttgttaaacaacatgctaaatgtgaaatgtcaaccctcactctaaactttccctgttcagagcatcagatgaagacttcattgggttttatagtggctttctgatttttggtagtccattgaagaagggagtttgaaagttgttgtatactgttaacgattgtctgcccatgtcctgcctgaaataccatgattgtttatggaaagtatctttaataaagctggatacagt

SEQ ID NO: 202457 - DNA, 1169 bp, Homo sapiens
aaacttaggctaggtacgaggcggggtgaatcggaggcgagaacgacccccggaccgaccaaagcccgcgcgccgctgcatcccgcgtccagcacctacgtcccgctgccgtcgccgccgccaccatgcccaagagaaagaagccacagagaagatccgcgaggttgtctgctaaacctgctcctccaaagccagagcccaagcctaaaaaggcccctgcaaagaagggagagaaggtacccaaagggaaaaagggaaaagctgatgctggcaaggaggggaataaccctgcagaaaatggagatgccaaaacagaccaggcacagaaagctgaaggtgctggagatgccaagtgaagtgtgtgcatttttgataactgtgtacttctggtgactgtacagtttgaaatactattttttatcaagttttataaaaatgcagaattttgttttactttttttttttttttaaaagctatgttgttagcacacagaacacttcatggtggttttggggggaaggggcatatgtcactaatagaatgtctccaaagctggattgatgtggagaaaacacctttcccttctagtttggagagacttcctctgggctcccaggaggagggattccctgactttgacacacatggccaccttggcacaaaagccttgtggtatagaaaaacaaatttgtttttatgtcctcttctccctttccatctttcagcatagacttaactcccttaagcccagacatctgttgagacctgacccctagtcatgggttaccagtgtgtcaggcaatctggactttccagtgatgccactgagatggcacctgtcaaaagagcagtggttccatttctagattgtggatcttcagataaattctgccattttcatttcacttcctgaaagtcagggtcggcttgtgaaaagttgttaaacaacatgctaaatgtgaaatgtcaaccctcactctaaactttccctgttcagagcatcagatgaagacttcattgggttttatagtggctttctgatttttggtagtccattgaagaagggagtttgaaagttgttgtatactgttaacgattgtctgcccatgtcctgcctgaaataccatgattgtttatggaaagtatctttaataaagctggatacagt

SEQ ID NO: 202458 - DNA, 1738 bp, Homo sapiens
aaacttaggctaggtacgaggcggggtgaatcggaggcgagaacgacccccggaccgaccaaagcccgcgcgccgctgcatcccgcgtccagcacctacgtcccgctgccgtcgccgccgccaccatgcccaagagaaaggctgaaggggatgctaagggagataaagcaaaggtgaaggacgaagtaagtcattctctcttcaagggtcaaagccttggactagcagaggccactggactcggtgattaaccgtaacctgtgtcctgaatttacactcctataatctagagcaaattgataccaaactttcaaagcgacttacctgtcctatttctaactttctcgttgtctttaatagccacagagaagatccgcgaggttgtctgctgtaagtgtatgcttttgaattttcgtgcttgtccctgaaactaaaaaacatcaaaaaacaattccctttgcttccatgaattatggttagtgcctggttttgaatcattgcctctacttgggactcttgcccctttgggttttgctggttctgaaattctgatgcctgtagccaaagtgggacatttgagtgggcttctggaaatccaacattctagaagaaagccaaccacaaaaacttttgaggaggaggagaaacttctctacccttggtacttttggttggttgtgggtggttttcttcagtccattgtactgatgttcactttttcctctcttcctgccaaaaaaagaaacctgctcctccaaagccagagcccaagcctaaaaaggcccctgcaaagaagggagagaaggtacccaaagggaaaaagggaaaagctgatgctggcaaggaggggaataaccctgcagaaaatggagatgccaaaacagaccaggcacagaaagctgaaggtgctggagatgccaagtgaagtgtgtgcatttttgataactgtgtacttctggtgactgtacagtttgaaatactattttttatcaagttttataaaaatgcagaattttgttttactttttttttttttttaaaagctatgttgttagcacacagaacacttcatggtggttttggggggaaggggcatatgtcactaatagaatgtctccaaagctggattgatgtggagaaaacacctttcccttctagtttggagagacttcctctgggctcccaggaggagggattccctgactttgacacacatggccaccttggcacaaaagccttgtggtatagaaaaacaaatttgtttttatgtcctcttctccctttccatctttcagcatagacttaactcccttaagcccagacatctgttgagacctgacccctagtcatgggttaccagtgtgtcaggcaatctggactttccagtgatgccactgagatggcacctgtcaaaagagcagtggttccatttctagattgtggatcttcagataaattctgccattttcatttcacttcctgaaagtcagggtcggcttgtgaaaagttgttaaacaacatgctaaatgtgaaatgtcaaccctcactctaaactttccctgttcagagcatcagatgaagacttcattgggttttatagtggctttctgatttttggtagtccattgaagaagggagtttgaaagttgttgtatactgttaacgattgtctgcccatgtcctgcctgaaataccatgattgtttatggaaagtatctttaataaagctggatacagt

SEQ ID NO: 202459 - DNA, 1299 bp, Homo sapiens
aaacttaggctaggtacgaggcggggtgaatcggaggcgagaacgacccccggaccgaccaaagcccgcgcgccgctgcatcccgcgtccagcacctacgtcccgctgccgtcgccgccgccaccatgcccaagagaaagaaggctgaaggggatgctaagggagataaagcaaaggtgaaggacgaaccacagagaagatccgcgaggttgtctgctgtaagtgtatgcttttgaattttcgtgcttgtccctgaaactaaaaaacatcaaaaaacaattccctttgcttccatgaattatgaaacctgctcctccaaagccagagcccaagcctaaaaaggcccctgcaaagaagggagagaaggtacccaaagggaaaaagggaaaagctgatgctggcaaggaggggaataaccctgcagaaaatggagatgccaaaacagaccaggcacagaaagctgaaggtgctggagatgccaagtgaagtgtgtgcatttttgataactgtgtacttctggtgactgtacagtttgaaatactattttttatcaagttttataaaaatgcagaattttgttttactttttttttttttttaaaagctatgttgttagcacacagaacacttcatggtggttttggggggaaggggcatatgtcactaatagaatgtctccaaagctggattgatgtggagaaaacacctttcccttctagtttggagagacttcctctgggctcccaggaggagggattccctgactttgacacacatggccaccttggcacaaaagccttgtggtatagaaaaacaaatttgtttttatgtcctcttctccctttccatctttcagcatagacttaactcccttaagcccagacatctgttgagacctgacccctagtcatgggttaccagtgtgtcaggcaatctggactttccagtgatgccactgagatggcacctgtcaaaagagcagtggttccatttctagattgtggatcttcagataaattctgccattttcatttcacttcctgaaagtcagggtcggcttgtgaaaagttgttaaacaacatgctaaatgtgaaatgtcaaccctcactctaaactttccctgttcagagcatcagatgaagacttcattgggttttatagtggctttctgatttttggtagtccattgaagaagggagtttgaaagttgttgtatactgttaacgattgtctgcccatgtcctgcctgaaataccatgattgtttatggaaagtatctttaataaagctggatacagt

SEQ ID NO: 202460 - DNA, 1186 bp, Homo sapiens
cggacgcgtgggtcgacccacgcgtccgaggctgaaggggatgctaagggagataaagcaaaggtgaaggacgaaccacagagaagatccgcgaggttgtctgctgtaagtgtatgcttttgaattttcgtgcttgtccctgaaactaaaaaacatcaaaaaacaattccctttgcttccatgaattatgaaacctgctcctccaaagccagagcccaagcctaaaaaggcccctgcaaagaagggagagaaggtacccaaagggaaaaagggaaaagctgatgctggcaaggaggggaataaccctgcagaaaatggagatgccaaaacagaccaggcacagaaagctgaaggtgctggagatgccaagtgaagtgtgtgcatttttgataactgtgtacttctggtgactgtacagtttgaaatactattttttatcaagttttataaaaatgcagaattttgttttactttttttttttttttaaaagctatgttgttagcacacagaacacttcatggtggttttggggggaaggggcatatgtcactaatagaatgtctccaaagctggattgatgtggagaaaacacctttcccttctagtttggagagacttcctctgggctcccaggaggagggattccctgactttgacacacatggccaccttggcacaaaagccttgtggtatagaaaaacaaatttgtttttatgtcctcttctccctttccatctttcagcatagacttaactcccttaagcccagacatctgttgagacctgacccctagtcatgggttaccagtgtgtcaggcaatctggactttccagtgatgccactgagatggcacctgtcaaaagagcagtggttccatttctagattgtggatcttcagataaattctgccattttcatttcacttcctgaaagtcagggtcggcttgtgaaaagttgttaaacaacatgctaaatgtgaaatgtcaaccctcactctaaactttccctgttcagagcatcagatgaagacttcattgggttttatagtggctttctgatttttggtagtccattgaagaagggagtttgaaagttgttgtatactgttaacgattgtctgcccatgtcctgcctgaaataccatgattgtttatggaaagtatctttaataaagctggatacagt

SEQ ID NO: 202461 - DNA, 1170 bp, Homo sapiens
tggtactggtccggaatctctaggatcgggaggtgaaatccggttctaaccggtccggggctcccagcgctataaaaactttataaaccccccggagcccgagcagtgtgaagaagaggcgagaacgacccccggaccgaccaaagcccgcgcgccgctgcatcccgcgtccagcacctacgtcccgctgccgtcgccgccgccaccatgcccaagagaaagaagaagggagagaaggtacccaaagggaaaaagggaaaagctgatgctggcaaggaggggaataaccctgcagaaaatggagatgccaaaacagaccaggcacagaaagctgaaggtgctggagatgccaagtgaagtgtgtgcatttttgataactgtgtacttctggtgactgtacagtttgaaatactattttttatcaagttttataaaaatgcagaattttgttttactttttttttttttttaaaagctatgttgttagcacacagaacacttcatggtggttttggggggaaggggcatatgtcactaatagaatgtctccaaagctggattgatgtggagaaaacacctttcccttctagtttggagagacttcctctgggctcccaggaggagggattccctgactttgacacacatggccaccttggcacaaaagccttgtggtatagaaaaacaaatttgtttttatgtcctcttctccctttccatctttcagcatagacttaactcccttaagcccagacatctgttgagacctgacccctagtcatgggttaccagtgtgtcaggcaatctggactttccagtgatgccactgagatggcacctgtcaaaagagcagtggttccatttctagattgtggatcttcagataaattctgccattttcatttcacttcctgaaagtcagggtcggcttgtgaaaagttgttaaacaacatgctaaatgtgaaatgtcaaccctcactctaaactttccctgttcagagcatcagatgaagacttcattgggttttatagtggctttctgatttttggtagtccattgaagaagggagtttgaaagttgttgtatactgttaacgattgtctgcccatgtcctgcctgaaataccatgattgtttatggaaagtatctttaataaagctggatacagt

SEQ ID NO: 202462 - DNA, 1190 bp, Homo sapiens
aaacttaggctaggtacgaggcggggtgaatcggaggcgagaacgacccccggaccgaccaaagcccgcgcgccgctgcatcccgcgtccagcacctacgtcccgctgccgtcgccgccgccaccatgcccaagagaaaggctgaaggggatgctaagggagataaagcaaaggtgaaggacgaaccacagagaagatccgcgaggttgtctgctaaacctgctcctccaaaggcccctgcaaagaagggagagaaggtacccaaagggaaaaagggaaaagctgatgctggcaaggaggggaataaccctgcagaaaatggagatgccaaaacagaccaggcacagaaagctgaaggtgctggagatgccaagtgaagtgtgtgcatttttgataactgtgtacttctggtgactgtacagtttgaaatactattttttatcaagttttataaaaatgcagaattttgttttactttttttttttttttaaaagctatgttgttagcacacagaacacttcatggtggttttggggggaaggggcatatgtcactaatagaatgtctccaaagctggattgatgtggagaaaacacctttcccttctagtttggagagacttcctctgggctcccaggaggagggattccctgactttgacacacatggccaccttggcacaaaagccttgtggtatagaaaaacaaatttgtttttatgtcctcttctccctttccatctttcagcatagacttaactcccttaagcccagacatctgttgagacctgacccctagtcatgggttaccagtgtgtcaggcaatctggactttccagtgatgccactgagatggcacctgtcaaaagagcagtggttccatttctagattgtggatcttcagataaattctgccattttcatttcacttcctgaaagtcagggtcggcttgtgaaaagttgttaaacaacatgctaaatgtgaaatgtcaaccctcactctaaactttccctgttcagagcatcagatgaagacttcattgggttttatagtggctttctgatttttggtagtccattgaagaagggagtttgaaagttgttgtatactgttaacgattgtctgcccatgtcctgcctgaaataccatgattgtttatggaaagtatctttaataaagctggatacagt

SEQ ID NO: 202463 - DNA, 1253 bp, Homo sapiens
agagagagagagagagagagagagagagcaagaattctgttgttagtttataggaaaatctgcatttaaatattaaataccccagggtttaaactaatttattcttctgttacttaggaaattctaagtactaaagattatagcaaattacagataatttagcctagttttgatcagttgttcttgtcaaatgggtgagggtttgtgttttatcttgagtaaacaatcctaccttgtgcagaactttgcagaccataccttggtaatacgaaatggggagaaacagttctattttttcccctttttcaaagggagagaaggtacccaaagggaaaaagggaaaagctgatgctggcaaggaggggaataaccctgcagaaaatggagatgccaaaacagaccaggcacagaaagctgaaggtgctggagatgccaagtgaagtgtgtgcatttttgataactgtgtacttctggtgactgtacagtttgaaatactattttttatcaagttttataaaaatgcagaattttgttttactttttttttttttttaaaagctatgttgttagcacacagaacacttcatggtggttttggggggaaggggcatatgtcactaatagaatgtctccaaagctggattgatgtggagaaaacacctttcccttctagtttggagagacttcctctgggctcccaggaggagggattccctgactttgacacacatggccaccttggcacaaaagccttgtggtatagaaaaacaaatttgtttttatgtcctcttctccctttccatctttcagcatagacttaactcccttaagcccagacatctgttgagacctgacccctagtcatgggttaccagtgtgtcaggcaatctggactttccagtgatgccactgagatggcacctgtcaaaagagcagtggttccatttctagattgtggatcttcagataaattctgccattttcatttcacttcctgaaagtcagggtcggcttgtgaaaagttgttaaacaacatgctaaatgtgaaatgtcaaccctcactctaaactttccctgttcagagcatcagatgaagacttcattgggttttatagtggctttctgatttttggtagtccattgaagaagggagtttgaaagttgttgtatactgttaacgattgtctgcccatgtcctgcctgaaataccatgattgtttatggaaagtatctttaataaagctggatacagt

SEQ ID NO: 202464 - DNA, 661 bp, Homo sapiens
tggtactggtccggaatctctaggatcgggaggtgaaatccggttctaaccggtccggggctcccagcgctataaaaactttataaaccccccggagcccgagcagtgtgaagaagaggcgagaacgacccccggaccgaccaaagcccgcgcgccgctgcatcccgcgtccagcacctacgtcccgctgccgtcgccgccgccaccatgcccaagagaaaggctgaaggggatgctaagggagataaagcaaaggtgaaggacgaaccacagagaagatccgcgaggttgtctgctaaacctgctcctccaaagccagagcccaagcctaaaaaggcccctgcaaagaagggagagaaggtacccaaagggaaaaagggaaaagctgatgctggcaaggaggggaataaccctgcagaaaatggagatgccaaaacagaccaggcacagaaagctgaaggtgctggagatgccaagtgaagtgtgtgcatttttgataactgtgtacttctggtgactgtacagtttgaaatactattttttatcaagttttataaaaatgcagaattttgttttactttttttttttttttaaaagctatgttgttagcacacagaacggtggtgtcgggggggggggccgggggctcgggggggggga

SEQ ID NO: 202465 - DNA, 1264 bp, Homo sapiens
tggtactggtccggaatctctaggatcgggaggtgaaatccggttctaaccggtccggggctcccagcgctataaaaactttataaaccccccggagcccgagcagtgtgaagaagaggcgagaacgacccccggaccgaccaaagcccgcgcgccgctgcatcccgcgtccagcacctacgtcccgctgccgtcgccgccgccaccatgcccaagagaaaggctgaaggggatgctaagggagataaagcaaaggtgaaggacgaaccacagagaagatccgcgaggttgtctgctaaacctgctcctccaaagccagagcccaagcctaaaaaggcccctgcaaagaagggagagaaggtacccaaagggaaaaagggaaaagctgatgctggcaaggaggggaataaccctgcagaaaatggagatgccaaaacagaccagcaagtgaagtgtgtgcatttttgataactgtgtacttctggtgactgtacagtttgaaatactattttttatcaagttttataaaaatgcagaattttgttttactttttttttttttttaaaagctatgttgttagcacacagaacacttcatggtggttttggggggaaggggcatatgtcactaatagaatgtctccaaagctggattgatgtggagaaaacacctttcccttctagtttggagagacttcctctgggctcccaggaggagggattccctgactttgacacacatggccaccttggcacaaaagccttgtggtatagaaaaacaaatttgtttttatgtcctcttctccctttccatctttcagcatagacttaactcccttaagcccagacatctgttgagacctgacccctagtcatgggttaccagtgtgtcaggcaatctggactttccagtgatgccactgagatggcacctgtcaaaagagcagtggttccatttctagattgtggatcttcagataaattctgccattttcatttcacttcctgaaagtcagggtcggcttgtgaaaagttgttaaacaacatgctaaatgtgaaatgtcaaccctcactctaaactttccctgttcagagcatcagatgaagacttcattgggttttatagtggctttctgatttttggtagtccattgaagaagggagtttgaaagttgttgtatactgttaacgattgtctgcccatgtcctgcctgaaataccatgattgtttatggaaagtatctttaataaagctggatacagt

SEQ ID NO: 202466 - DNA, 960 bp, Homo sapiens
aaacttaggctaggtacgaggcggggtgaatcggaggcgagaacgacccccggaccgaccaaagcccgcgcgccgctgcatcccgcgtccagcacctacgtcccgctgccgtcgccgccgccaccatgcccaagagaaagcaagtgaagtgtgtgcatttttgataactgtgtacttctggtgactgtacagtttgaaatactattttttatcaagttttataaaaatgcagaattttgttttactttttttttttttttaaaagctatgttgttagcacacagaacacttcatggtggttttggggggaaggggcatatgtcactaatagaatgtctccaaagctggattgatgtggagaaaacacctttcccttctagtttggagagacttcctctgggctcccaggaggagggattccctgactttgacacacatggccaccttggcacaaaagccttgtggtatagaaaaacaaatttgtttttatgtcctcttctccctttccatctttcagcatagacttaactcccttaagcccagacatctgttgagacctgacccctagtcatgggttaccagtgtgtcaggcaatctggactttccagtgatgccactgagatggcacctgtcaaaagagcagtggttccatttctagattgtggatcttcagataaattctgccattttcatttcacttcctgaaagtcagggtcggcttgtgaaaagttgttaaacaacatgctaaatgtgaaatgtcaaccctcactctaaactttccctgttcagagcatcagatgaagacttcattgggttttatagtggctttctgatttttggtagtccattgaagaagggagtttgaaagttgttgtatactgttaacgattgtctgcccatgtcctgcctgaaataccatgattgtttatggaaagtatctttaataaagctggatacagt

SEQ ID NO: 202467 - DNA, 774 bp, Homo sapiens
tggtactggtccggaatctctaggatcgggaggtgaaatccggttctaaccggtccggggctcccagcgctataaaaactttataaaccccccggagcccgagcagtgtgaagaagaggcgagaacgacccccggaccgaccaaagcccgcgcgccgctgcatcccgcgtccagcacctacgtcccgctgccgtcgccgccgccaccatgcccaagagaaagaaggctgaaggggatgctaagggagataaagcaaaggtgaaggacgaaccacagagaagatccgcgaggttgtctgctaaacctgctcctccaaagccagagcccaagcctaaaaaggcccctgcaaagaagggagagaaggtacccaaagggaaaaagggaaaagctgatgctggcaaggaggggaataaccctgcagaaaatggagatgccaaaacagaccaggcacagaaagctgaaggtgctggagatgccaagtgaagtgtgtgcatttttgataactgtgtacttctggtgactgtacagtttgaaatactattttttatcaagttttataaaaatgcagaattttgttttactttttttttttttttaaaagctatgttgttagcacacagaacacttcatggtggttttggggggaaggggcatatgtcactaatagaatgtctccaaagctggattgatgtggagaaaacacctttctttggtctctgggtcccacagaggtaccttacttgtccatgtcccttggcgcctgtctccccttgc

SEQ ID NO: 202468 - DNA, 1262 bp, Homo sapiens
  misc_feature (143)..(143): n is a, c, g, or t
  misc_feature (158)..(158): n is a, c, g, or t
  misc_feature (190)..(190): n is a, c, g, or t
  misc_feature (207)..(207): n is a, c, g, or t
  misc_feature (210)..(211): n is a, c, g, or t
  misc_feature (215)..(215): n is a, c, g, or t
  misc_feature (226)..(227): n is a, c, g, or t
  misc_feature (240)..(240): n is a, c, g, or t
  misc_feature (266)..(266): n is a, c, g, or t
  misc_feature (286)..(286): n is a, c, g, or t
  misc_feature (419)..(419): n is a, c, g, or t
  misc_feature (932)..(932): n is a, c, g, or t
aaacttaggctaggtacgaggcggggtgaatcggaggcgagaacgacccccggaccgaccaaagcccgcgcgccgctgcatcccgcgtccagcacctacgtcccgctgccgtcgccgccgccaccatgcccaagagaaaggcnaatgcccaagagaanggctgaaggggatgctaagggagataaagcanaggtgaaggacgaaccnacnngagnaagatccgcgnnggttgtctgctanacctgctcctccaaagccagagcccngagcctaaaaaggcccctgncaaagacctgggagaataaggtacccaacacgggatatgatcgtggaacaatgctgaattgctgtgtcaaggacggtggaactaaacgccgtgtcacgaaagaatgcgagactgctctaaaatcatgacccangtgcatcatgacacatgcctgaatgcgtcgtcctgcttaggagtgaccaagtgtggaagtctgtggtgtcacttctctcaggactgaagcttgtgctcaacttcctgtggtgatcctcgttacagatttctcgaaaaatcatgctacttcttgttatattccaccggtgtctttaatcccaacacatgtcccaggaaactatctatgtcttgtaacgttctcttgtctaaggtctctctctctctttccatataaagtcatcttcgagtctcgagtttaaagacaatctcctagaaatattcacttttttccaatggagccatggcataaggttcgcgttgagcgcgtaataagcgtggcgcacattcccgatgtggtccatccataacccatttaagaacgccgcgtccttctccccactataggttttggaacccatttgggggatcccgccttctgcgccagaattaaaaggttaacccccttttgctgccctccggcattgtcaacttnggtaccttaacggggccggtccccaatggggcgtagttgcgccacttgcttttggggggggggcgttcccccacccccgttgtgtcccgtggtcccgttgtgggaccctccctcacgctgtgtgcaaaagtttgttctgaaaagggcctcccacactttttttgctttccaaacccctccttatgggcgcacacagcggatatatagggaacctcttccttagtgtccgtgtggctcctttctccagattgggatttcctccccactggagtcttgtggcgcgttttgggtgcattgttgttttgggcccccccctgtttaaattacccc

SEQ ID NO: 202469 - DNA, 438 bp, Homo sapiens
tggtactggtccggaatctctaggatcgggaggtgaaatccggttctaaccggtccggggctcccagcgctataaaaactttataaaccccccggagcccgagcagtgtgaagaagaggcgagaacgacccccggaccgaccaaagcccgcgcgccgctgcatcccgcgtccagcacctacgtcccgctgccgtcgccgccgccaccatgcccaagagaaagaaggtacgtggcgcgagggccccaggcgccgggccaccactgccgccaccgccgccgccgcctccctggtgcagggagcgagaatcggcgccgagcaggagccagcgcagcctccccgcgcgggggctggagacggtgtcgggcagctcggggctaaccctgagcggctcggctgcccgcgggcgccagaggccatattggaggagcggcggccgc

SEQ ID NO: 202470 - DNA, 434 bp, Homo sapiens
ttgtatcactccaaatgtaccatttggtccagtgtgcttgtggctttcctgttaacttaaatcctggattcttgaaatctctactgtcagctgaagggcattgtgttttatactacatgaagttttcaagctaggagtaacctcaggtctcttattctggtgttcttcctacctcaattttacagtgaggcccagaggagaggtgacttagcaaagttacctagtaagtcattctcagaagaaatactgagtctcagtacctgaaacctgaactttggcctgggagcaaagtgatgctgtaggtggaatgtgaacacagatagttttgaaatctacgcattgcattaatttgtctgttttcttttaggcacagaaagctgaaggtgctggagatgccaagtgaagtgtgtgcatttttgataactgtgtacttc

SEQ ID NO: 202471 - DNA, 434 bp, Homo sapiens
gactgtccttagtgccttaacttaattagcataatggtgcctccattaatggaggttataaactgtgtggatagcttacctcgtccgtgtcattcataacgttggtttcctgatcaagaattctgttgttagtttataggaaaatctgcatttaaatattaaataccccagggtttaaactaatttattcttctgttacttaggaaattctaagtactaaagattatagcaaattacagataatttagcctagttttgatcagttgttcttgtcaaatgggtgagggtttgtgttttatcttgagtaaacaatcctaccttgtgcagaactttgcagaccataccttggtaatacgaaatggggagaaacagttctattttttcccctttttcaaagggagagaaggtacccaaagggaaaaagggaaaagctg

SEQ ID NO: 202472 - DNA, 570 bp, Homo sapiens
acccacgcgtcgcggacgcgtggggaggcgagaacgacccccggaccgaccaaagcccgcgcgccgctgcatcccgcgtccagcacctacgtcccgctgccgtcgccgccgccaccatgcccaagagaaaggctgaaggggatgctaagggagataaagcaaaggtgaaggacgaaccacagagaagatccgcgaggttgtctgctaaacctgctcctccaaagccagagcccaagcctaaaaaggcccctgcaaagaagggagagaaggtacccaaagggaaaaagggaaaagctgatgctggcaaggaggggaataaccctgcagaaaatggagatgccaaaacagaccaggcacagaaagctgaaggtgctggagatgccaagtgaagtgtgtgcatttttgataactgtgtacttctggtgactgtacagtttgaaatactattttttatcaagttttataaaaatgcagaattttgttttactttttttttttttttaaaagctatgttgttagcacacagaacggtggtgtcgggggggggggccgggggctcgggggggggga

SEQ ID NO: 202473 - DNA, 1293 bp, Homo sapiens
tggtactggtccggaatctctaggatcgggaggtgaaatccggttctaaccggtccggggctcccagcgctataaaaactttataaaccccccggagcccgagcagtgtgaagaagaggcgagaacgacccccggaccgaccaaagcccgcgcgccgctgcatcccgcgtccagcacctacgtcccgctgccgtcgccgccgccaccatgcccaagagaaaggctgaaggggatgctaagggagataaagcaaaggtgaaggacgaaccacagagaagatccgcgaggttgtctgctaaacctgctcctccaaagccagagcccaagcctaaaaaggcccctgcaaagaagggagagaaggtacccaaagggaaaaagggaaaagctgatgctggcaaggaggggaataaccctgcagaaaatggagatgccaaaacagaccaggcacagaaagctgaaggtgctggagatgccaagtgaagtgtgtgcatttttgataactgtgtacttctggtgactgtacagtttgaaatactattttttatcaagttttataaaaatgcagaattttgttttactttttttttttttttaaaagctatgttgttagcacacagaacacttcatggtggttttggggggaaggggcatatgtcactaatagaatgtctccaaagctggattgatgtggagaaaacacctttcccttctagtttggagagacttcctctgggctcccaggaggagggattccctgactttgacacacatggccaccttggcacaaaagccttgtggtatagaaaaacaaatttgtttttatgtcctcttctccctttccatctttcagcatagacttaactcccttaagcccagacatctgttgagacctgacccctagtcatgggttaccagtgtgtcaggcaatctggactttccagtgatgccactgagatggcacctgtcaaaagagcagtggttccatttctagattgtggatcttcagataaattctgccattttcatttcacttcctgaaagtcagggtcggcttgtgaaaagttgttaaacaacatgctaaatgtgaaatgtcaaccctcactctaaactttccctgttcagagcatcagatgaagacttcattgggttttatagtggctttctgatttttggtagtccattgaagaagggagtttgaaagttgttgtatactgttaacgattgtctgcccatgtcctgcctgaaataccatgattgtttatggaaagtatctttaataaagctggatacagt

SEQ ID NO: 202474 - DNA, 1327 bp, Homo sapiens
tggtactggtccggaatctctaggatcgggaggtgaaatccggttctaaccggtccggggctcccagcgctataaaaactttataaaccccccggagcccgagcagtgtgaagaagaggcgagaacgacccccggaccgaccaaagcccgcgcgccgctgcatcccgcgtccagcacctacgtcccgctgccgtcgccgccgccaccatgcccaagagaaaggctgaaggggatgctaagggagataaagcaaaggtgaaggacgaaccacagagaagatccgcgaggttgtctgctaaacctgctcctccaaagccagagcccaagcctaaaaaggcccctgcaaagaagggagagaaggtacccaaagggaaaaagggaaaagctgatgctggcaaggaggggaataaccctgcagaaaatggagatgccaaaacagaccaggcacagaaagctgaaggtgctggagatgccaagtgaagtgtgtgcatttttgataactgtgtacttctggtgactgtacagtttgaaatactattttttatcaagttttataaaaatgcagaattttgttttactttttttttttttttaaaagctatgttgttagcacacagaacacttcatggtggttttggggggaaggggcatatgtcactaatagaatgtctccaaagctggattgatgtggagaaaacacctttcccttctagtttggagagacttcctctgggctcccaggaggagggattccctgactttgacacacatggccaccttggcacaaaagccttgtggtatagaaaaacaaatttgtttttatgtcctcttctccctttccatctttcagcatagacttaactcccttaagcccagacatctgttgagacctgacccctagtcatgggttaccagtgtgtcaggcaatctggactttccagtgatgccactgagatggcacctgtcaaaagagcagtggttccatttctagattgtggatcttcagataaattctgccattttcatttcacttcctgaaagtcagggtcggcttgtgaaaagttgttaaacaacatgctaaatgtgaaatgtcaaccctcactctaaactttccctgttcagagcatcagatgaagacttcattgggttttatagtggctttctgatttttggtagtccattgaagaagggagtttgaaagttgttgtatactgttaacgattgtctgcccatgtcctgcctgaaataccatgattgtttatggaaagtatctttaataaagctggatacagtgtgccgtctgcgaacacacaacacacaaaacaac

SEQ ID NO: 202475 - DNA, 1061 bp, Homo sapiens
  misc_feature (1025)..(1025): n is a, c, g, or t
  misc_feature (1044)..(1044): n is a, c, g, or t
  misc_feature (1047)..(1047): n is a, c, g, or t
tggtactggtccggaatctctaggatcgggaggtgaaatccggttctaaccggtccggggctcccagcgctataaaaactttataaaccccccggagcccgagcagtgtgaagaagaggcgagaacgacccccggaccgaccaaagcccgcgcgccgctgcatcccgcgtccagcacctacgtcccgctgccgtcgccgccgccaccatgcccaagagaaaggctgaaggggatgctaagggagataaagcaaaggtgaaggacgaaccacagagaagatccgcgaggttgtctgctaaacctgctcctccaaagccagagcccaagcctaaaaaggcccctgcaaagaagggagagaaggtacccaaagggaaaaagggaaaagctgatgctggcaaggaggggaataaccctgcagaaaatggagatgccaaaacagaccaggcacagaaagctgaaggtgctggagatgccaagtgaagtgtgtgcatttttgataactgtgtacttctggtgactgtacagtttgaaatactattttttatcaagttttataaaaatgcagaattttgttttactttttttttttttttaaaagctatgttgttagcacacagaacacttcatggtggttttggggggaaggggcatatgtcactaatagaatgtctccaaagctggattgatgtggagaaaacacctttcccttctagtttggagagacttcctctgggctcccaggaggagggattccctgactttgacacacatggccaccttggcacaaaagccttgtggtatagaaaaacaaatttgtttttatgtcctcttctccctttccatctttcagcatagacttaactcccttaagcccagacatctgttgagacctgacccctagtcatgggttaccagtgtgtcaggcaatctggactttccagtgatgccactgagatggcacctgtcaaagagacgggtccacttctaatggggtctccgataattcgccttcattccttccgaancggtggtggaagtgtcccngtngtgagtcccttatc

SEQ ID NO: 202476 - DNA, 1227 bp, Homo sapiens
  misc_feature (19)..(19): n is a, c, g, or t
  misc_feature (22)..(22): n is a, c, g, or t
ttttttgaccgttcttctnctnctcctatgctgcgagaagacgacagaaaaggcgagaacgacccccggaccgaccaaagcccgcgcgccgctgcatcccgcgtccagcacctacgtcccgctgccgtcgccgccgccaccatgcccaagagaaaggctgaaggggatgctaagggagataaagcaaaggtgaaggacgaaccacagagaagatccgcgaggttgtctgctaaacctgctcctccaaagccagagcccaagcctaaaaaggcccctgcaaagaagggagagaaggtacccaaagggaaaaagggaaaagctgatgctggcaaggaggggaataaccctgcagaaaatggagatgccaaaacagaccaggcacagaaagctgaaggtgctggagatgccaagtgaagtgtgtgcatttttgataactgtgtacttctggtgactgtacagtttgaaatactattttttatcaagttttataaaaatgcagaattttgttttactttttttttttttttaaaagctatgttgttagcacacagaacacttcatggtggttttggggggaaggggcatatgtcactaatagaatgtctccaaagctggattgatgtggagaaaacacctttcccttctagtttggagagacttcctctgggctcccaggaggagggattccctgactttgacacacatggccaccttggcacaaaagccttgtggtatagaaaaacaaatttgtttttatgtcctcttctccctttccatctttcagcatagacttaactcccttaagcccagacatctgttgagacctgacccctagtcatgggttaccagtgtgtcaggcaatctggactttccagtgatgccactgagatggcacctgtcaaaagagcagtggttccatttctagattgtggatcttcagataaattctgccattttcatttcacttcctgaaagtcagggtcggcttgtgaaaagttgttaaacaacatgctaaatgtgaaatgtcaaccctcactctaaactttccctgttcagagcatcagatgaagacttcattgggttttatagtggctttctgatttttggtagtccattgaagaagggagtttgaaagttgttgtatactgttaacgattgtctgcccatgtcctgcctgaaataccatgattgtttatggaaagtatctttaataaagctggatacagt

SEQ ID NO: 202477 - DNA, 933 bp, Homo sapiens
tggtactggtccggaatctctaggatcgggaggtgaaatccggttctaaccggtccggggctcccagcgctataaaaactttataaaccccccggagcccgagcagtgtgaagaagaggcgagaacgacccccggaccgaccaaagcccgcgcgccgctgcatcccgcgtccagcacctacgtcccgctgccgtcgccgccgccaccatgcccaagagaaaggctgaaggggatgctaagggagataaagcaaaggtgaaggacgaaccacagagaagatccgcgaggttgtctgctaaacctgctcctccaaagccagagcccaagcctaaaaaggcccctgcaaagaagggagagaaggtacccaaagggaaaaagggaaaagctgatgctggcaaggaggggaataaccctgcagaaaatggagatgccaaaacagaccaggcacagaaagctgaaggtgctggagatgccaagtgaagtgtgtgcatttttgataactgtgtacttctggtgactgtacagtttgaaatactattttttatcaagttttataaaaatgcagaattttgttttactttttttttttttttaaaagctatgttgttagcacacagaacacttcatggtggttttggggggaaggggcatatgtcactaatagaatgtctccaaagctggattgatgtggagaaaacacctttcccttctagtttggagagacttcctctgggctcccaggaggagggattccctgactttgacacacatggccaccttggcacaaaagccttgtggtatagaaaaacaaatttgtttttatgtcctcttctccctttccatctttcagcatagacttatccttagccaaatctgtgggacctgccctaattctggtacagtggtcggatggctccgtgtgctgatgcctgt

SEQ ID NO: 202478 - DNA, 1881 bp, Homo sapiens
aacctacgtaggtatgacctggggtgttaacttggcagaggggtgacaagaaggcgagaacgacccccggaccgaccaaagcccgcgcgccgctgcatcccgcgtccagcacctacgtcccgctgccgtcgccgccgccaccatgcccaagagaaaggctgaaggggatgctaagggagataaagcaaaggtgaaggacgaaccacagagaagatccgcgaggttgtctgctaaacctgctcctccaaagccagagcccaagcctaaaaaggcccctgcaaagaagggagagaaggtacccaaagggaaaaagggaaaagctgatgctggcaaggaggggaataaccctgcagaaaatggagatgccaaaacagaccaggcacagaaagctgaaggtgctggagatgccaagtgaagtgtgtgcatttttgataactgtgtacttctggtgactgtacagtttgaaatactattttttatcaagttttataaaaatgcagaattttgttttactttttttttttttttaaaagctatgttgttagcacacagaacacttcatggtggttttggggggaaggggcatatgtcactaatagaatgtctccaaagctggattgatgtggagaaaacacctttcccttctagtttggagagacttcctctgggctcccaggaggagggattccctgactttgacacacatggccaccttggcacaaaagccttgtggtatagaaaaacactcccttaagcccagacatctgttgagacctgacccctagtcatgggttaccagtgtgtcaggcaatctggactttccagtgatgccactgagatggcacctgtcaaaagagcagtggttccatttctagattgtggatcttcagataaattctgccattttcatttcacttcctgaaagtcagggtcggcttgtgaaaagttgttaaacaacatgctaaatgtgaaatgtcaaccctcactctaaactttccctgttcagagcatcagatgaagacttcattgggttttatagtggctttctgatttttggtagtccattgaagaagggagtttgaaagttgttgtatactgttaacgattgtctgcccatgtcctgcctgaaataccatgattgtttatggaaagtatctttaataaagctggatacagtttggcttggaatgctgcctctgatcttttcccacaagtggggtaacctggtttatccaagtctcttggaacagggtacgttctgctttgaggtactccatgtacagtctaatgatgatctttcactgatttatagtcagcttccaaaacacacagtgctaggtgcagttaggaaggattccaggagtagacttagctgatggtgaaaggctgggagtatggagtgatttctgtacttggttatgcagcattccctgcagtgtttgttttttgcatgactccgaatacatgaagtgtattaaatgcagatttttggtagatctgcggttttggctgggtagctgacaggagcctctctacttccatctgcatttgcaacttctataaaattagcaaattaatagactcatgtcagagagtgtctctgtgaatgtgtacacagttgtccatttgtaaggtagatgacactttgctcctaagtagacctgcaaacaaagacaatggggtctttcctgattcctttagtttggagatgcagagaaccccacgtttctctaagtgaaatggcaagaagttatttgttagaatatggaactggtaacaaattcatgtttgcaccttgaatttgctttcacagacctggctgtattgttggacaggaataaagtaaattggagactaattgctttgtccattcccttagtc

SEQ ID NO: 202479 - DNA, 1646 bp, Homo sapiens
tcccgctctcctcgggctcgccgcccccgccccgtgccccctcccccatcgcgagggccccttccctcccctccctgcgggcgggcaattcaaacccgaaagggcgggaaggcggcgctcggggttggcgggcgggggaaagcgctgccgccaaaaaaccgccccctcgcccacgttccccgcgcacgagacgcgcgctgtcgccgcccacgagttccccgggctgcgcgcgcctccctctcccgccctcgacggctgccatagcaacggcgctgggctccgcctccggagggggtttgtttgcgccatctgcagctgttgctcctgcctgtcgcggtggtgcgggctccgctgccctccccggctgcgctccggtccagccctcgcttctcggggtcggcgagccggagctcctgcgcgcgcttcgttcttatacgaacgtcgggctcactcatttatgtcctagaaaagttgtgtggacgactgctttaattttcatttttagcactctaaagtttgggaagtaattaagaaccacctcaaaatctgcagttttttgttcttgtttcttataggctgaaggggatgctaagggagataaagcaaaggtgaaggacgaaccacagagaagatccgcgaggttgtctgctaaacctgctcctccaaagccagagcccaagcctaaaaaggcccctgcaaagaagggagagaaggtacccaaagggaaaaagggaaaagctgatgctggcaaggaggggaataaccctgcagaaaatggagatgccaaaacagaccaggcacagaaagctgaaggtgctggagatgccaagtgaagtgtgtgcatttttgataactgtgtacttctggtgactgtacagtttgaaatactattttttatcaagttttataaaaatgcagaattttgttttactttttttttttttttaaaagctatgttgttagcacacagaacacttcatggtggttttggggggaaggggcatatgtcactaatagaatgtctccaaagctggattgatgtggagaaaacacctttcccttctagtttggagagacttcctctgggctcccaggaggagggattccctgactttgacacacatggccaccttggcacaaaagccttgtggtatagaaaaacaaatttgtttttatgtcctcttctccctttccatctttcagcatagacttaactcccttaagcccagacatctgttgagacctgacccctagtcatgggttaccagtgtgtcaggcaatctggactttccagtgatgccactgagatggcacctgtcaaaagagcagtggttccatttctagattgtggatcttcagataaattctgccattttcatttcacttcctgaaagtcagggtcggcttgtgaaaagttgttaaacaacatgctaaatgtgaaatgtcaaccctcactctaaactttccctgttcagagcatcagatgaagacttcattgggttttatagtggctttctgatttttggtagtccattgaagaagggagtttgaaagttgttgtatactgttaacgattgtctgcccatgtcctgcctgaaataccatgattgtttatggaaagtatctttaataaagctggatacagt

SEQ ID NO: 202480 - DNA, 2173 bp, Homo sapiens
tcccgctctcctcgggctcgccgcccccgccccgtgccccctcccccatcgcgagggccccttccctcccctccctgcgggcgggcaattcaaacccgaaagggcgggaaggcggcgctcggggttggcgggcgggggaaagcgctgccgccaaaaaaccgccccctcgcccacgttccccgcgcacgagacgcgcgctgtcgccgcccacgagttccccgggctgcgcgcgcctccctctcccgccctcgacggctgccatagcaacggcgctgggctccgcctccggagggggtttgtttgcgccatctgcagctgttgctcctgcctgtcgcggtggtgcgggctccgctgccctccccggctgcgctccggtccagccctcgcttctcggggtcggcgagccggagctcctgcgcgcgcttcgttcttatacgaacgtcgggctcactcatttatgtcctagaaaagttgtgtggacgactgctttaattttcatttttagcactctaaagtttgggaagtaattaagaaccacctcaaaatctgcagttttttgttcttgtttcttataggctgaaggggatgctaagggagataaagcaaaggtgaaggacgaagtaagtcattctctcttcaagggtcaaagccttggactagcagaggccactggactcggtgattaaccgtaacctgtgtcctgaatttacactcctataatctagagcaaattgataccaaactttcaaagcgacttacctgtcctatttctaactttctcgttgtctttaatagccacagagaagatccgcgaggttgtctgctgtaagtgtatgcttttgaattttcgtgcttgtccctgaaactaaaaaacatcaaaaaacaattccctttgcttccatgaattatggttagtgcctggttttgaatcattgcctctacttgggactcttgcccctttgggttttgctggttctgaaattctgatgcctgtagccaaagtgggacatttgagtgggcttctggaaatccaacattctagaagaaagccaaccacaaaaacttttgaggaggaggagaaacttctctacccttggtacttttggttggttgtgggtggttttcttcagtccattgtactgatgttcactttttcctctcttcctgccaaaaaaagaaacctgctcctccaaagccagagcccaagcctaaaaaggcccctgcaaagaagggagagaaggtacccaaagggaaaaagggaaaagctgatgctggcaaggaggggaataaccctgcagaaaatggagatgccaaaacagaccaggcacagaaagctgaaggtgctggagatgccaagtgaagtgtgtgcatttttgataactgtgtacttctggtgactgtacagtttgaaatactattttttatcaagttttataaaaatgcagaattttgttttactttttttttttttttaaaagctatgttgttagcacacagaacacttcatggtggttttggggggaaggggcatatgtcactaatagaatgtctccaaagctggattgatgtggagaaaacacctttcccttctagtttggagagacttcctctgggctcccaggaggagggattccctgactttgacacacatggccaccttggcacaaaagccttgtggtatagaaaaacaaatttgtttttatgtcctcttctccctttccatctttcagcatagacttaactcccttaagcccagacatctgttgagacctgacccctagtcatgggttaccagtgtgtcaggcaatctggactttccagtgatgccactgagatggcacctgtcaaaagagcagtggttccatttctagattgtggatcttcagataaattctgccattttcatttcacttcctgaaagtcagggtcggcttgtgaaaagttgttaaacaacatgctaaatgtgaaatgtcaaccctcactctaaactttccctgttcagagcatcagatgaagacttcattgggttttatagtggctttctgatttttggtagtccattgaagaagggagtttgaaagttgttgtatactgttaacgattgtctgcccatgtcctgcctgaaataccatgattgtttatggaaagtatctttaataaagctggatacagt

SEQ ID NO: 202481 - DNA, 1652 bp, Homo sapiens
tggtactggtccggaatctctaggatcgggaggtgaaatccggttctaaccggtccggggctcccagcgctataaaaactttataaaccccccggagcccgagcagtgtgaagaagaggcgagaacgacccccggaccgaccaaagcccgcgcgccgctgcatcccgcgtccagcacctacgtcccgctgccgtcgccgccgccaccatgcccaagagaaaggctgaaggggatgctaagggagataaagcaaaggtgaaggacgaaccacagagaagatccgcgaggttgtctgctaaacctgctcctccaaagccagagcccaagcctaaaaaggcccctgcaaagaagggagagaaggtacccaaagggaaaaagggaaaagctgatgctggcgaggagggattccctgactttgacacacatggccaccttggcacaaaagccttgtggtatagaaaaacaaatttgtttttatgtcctcttctccctttccatctttcagcatagacttaactcccttaagcccagacatctgttgagacctgacccctagtcatgggttaccagtgtgtcaggcaatctggactttccagtgatgccactgagatggcacctgtcaaaagagcagtggttccatttctagattgtggatcttcagataaattctgccattttcatttcacttcctgaaagtcagggtcggcttgtgaaaagttgttaaacaacatgctaaatgtgaaatgtcaaccctcactctaaactttccctgttcagagcatcagatgaagacttcattgggttttatagtggctttctgatttttggtagtccattgaagaagggagtttgaaagttgttgtatactgttaacgattgtctgcccatgtcctgcctgaaataccatgattgtttatggaaagtatctttaataaagctggatacagtttggcttggaatgctgcctctgatcttttcccacaagtggggtaacctggtttatccaagtctcttggaacagggtacgttctgctttgaggtactccatgtacagtctaatgatgatctttcactgatttatagtcagcttccaaaacacacagtgctaggtgcagttaggaaggattccaggagtagacttagctgatggtgaaaggctgggagtatggagtgatttctgtacttggttatgcagcattccctgcagtgtttgttttttgcatgactccgaatacatgaagtgtattaaatgcagatttttggtagatctgcggttttggctgggtagctgacaggagcctctctacttccatctgcatttgcaacttctataaaattagcaaattaatagactcatgtcagagagtgtctctgtgaatgtgtacacagttgtccatttgtaaggtagatgacactttgctcctaagtagacctgcaaacaaagacaatggggtctttcctgattcctttagtttggagatgcagagaaccccacgtttctctaagtgaaatggcaagaagttatttgttagaatatggaactggtaacaaattcatgtttgcaccttgaatttgctttcacagacctggctgtattgttggacaggaataaagtaaattggagactaattgctttgtccattcccttagtc

SEQ ID NO: 202482 - DNA, 782 bp, Homo sapiens
aaacttaggctaggtacgaggcggggtgaatcggaggcgagaacgacccccggaccgaccaaagcccgcgcgccgctgcatcccgcgtccagcacctacgtcccgctgccgtcgccgccgccaccatgcccaagagaaagaaggctgaaggggatgctaagggagataaagcaaaggtgaaggacgaaccacagagaagatccgcgaggttgtctgctaaacctgctcctccaaagccagagcccaagcctaaaaaggcccctgcaaagaagggagagaaggtacccaaagggaaaaagggaaaagctgatgctggcaaggaggggaataaccctgcagaaaatggagatgccaaaacagaccaggcacagaaagctgaaggtgctggagatgccaagtgaagtgtgtgcatttttgataactgtgtacttctggtgactgtacagtttgaaatactattttttatcaagttttataaaaatgcagaattttgttttactttttttttttttttaaaagctatgttgttagcacacagaacaaaaaaaaaaaaaaaaaaaaaaaaaaaaaaaaaaaaaaaaaaaaaaaaacggggggattttagggggggggggaaaaaggggtataaaagggccagtggcaaaggtttccgccccaattttggaaaaggggacaaaggcaagaacccccagaggggacgcaaaatcggaaaaacgcgttacgctcaaaagtacgcaaaaaacaccgtacgaaacaagagggcaaaagcagaaaggtaacaa

SEQ ID NO: 202483 - DNA, 371 bp, Homo sapiens
  misc_feature (2)..(2): n is a, c, g, or t
  misc_feature (4)..(4): n is a, c, g, or t
cncngccgccgacgctgcgagagacgacgaagggcctgagatctgcagtgaagtggatcaatgatgaaactagccaaatctgagcatcagaagtctccgtctacctgatgcatgatctctacagttctgagaagcaaaactataaaacaatgtaaaacaataagggcatatgtctggtgtgtgtgtgtgtgtgtgtgtgtgtgtgtgtacgcacatgtgtttataaagataacagctgtaggaatgaatgagattgagggtgggggggtgcgtatgtatgtctatgaaagcctaatcatttctgggcaatgatgaaaaggttttactactgatctttgtaactatgatggtttctacacttgacctgagct

SEQ ID NO: 202484 - DNA, 429 bp, Homo sapiens
gctctctctgttgctccctgtcaaacaaagaggctgtgggatgaccatgaaaataacaacagcagcaacagtaggaatagctgctgtttcccaagcacgtgctgatatgcgctcactcaatccttacagctctgcaaggtaggcggactgaggcatctcacacagggcacacaaccaacaaaggccagattgacaccccggctgttggtgccagaatccactctcagctgctctagctggtgtgggagggtggaaggattaaaacaaaacaaaacaaaacaaaaaaaacaactgtagaagtgctcctgacagctgccaacactagtacgtgtctaggggatggaagaaaaaagctctcttctgtctgccaatgacctcctggatattttcctctttccttgtgaggttattccatgtactaaaaaaaaa

SEQ ID NO: 202485 - DNA, 502 bp, Homo sapiens
gatggaaagggcactggtttgggagttggagaacctgggttaaattcccactctgcctttggtgtccatgtgaaccttgggcagtcattgaacttgtcttggttttgtcatctgcaaaatgagaataatgcctattttacagagtggctgtggggattaaataaaagcatgcgtatagaggcgtccagcttgttcctagaccaggataggagcttggcaagaaatcggtcagacatgagtccctaaaaaattaaaatcaggtccccaaggaagagcatcctccaggctgaaagccggggatacaggagagtggtgtgggaagggggtggtcagggaaggggagttggtgtatcgaggtggatgagctgctgcctgcaggagctcagagaacaagcttccccatgcctcagtttgctctgggttagctcagcagcagcactcaatattccacagaagcaagggggaagccagattaaataaatgtcattttggactcaaagat

SEQ ID NO: 202486 - DNA, 241 bp, Homo sapiens
tagaggcaggtgaatccatttaaccgggaaggtggaggttgcggtgagctgagaacgtgccattgcactccagtctgtgcaacagagcagggatcttgtctcaaaaaacaagggaaaaaaaaggcacagacaaaagtctgcctctcacctctgacctccagctatgcagttcccttctggggaggtaatttctttcttggttcactttgtttgttttttttttttctctaattgtctcggt

SEQ ID NO: 202487 - DNA, 338 bp, Homo sapiens
caggttcaggggattctcccgcctcagcctccggagtagctgggactacaggcacgcgccaccacacccagctaattttttgtatttttagtagagacggggtttcacccatgttggccagtctagtctcaaactcctgacctcaggcgatccgcccgcctcggcctcccaaagtgctgggattacaggtgtgagccactgcatctggcccatttcaattacttttgcaccaacctaacgtatggtttaggtttctgtgaacctctgatgacaaaagtttcttcaactggtcaatacgtaaccttgttaataagatgctttatttaatacgtttcttc

SEQ ID NO: 202488 - DNA, 408 bp, Homo sapiens
cccgaagctcatgtgctcttctccattctcatctctgagagccctggctgtgccctgctcagttggcaattgaatatgtccaccctattctctggttgttcttgtgtacaaactgagcttctccaaagacagtatgacctcctggagggcagagccccttttttcttctcttgtctccatcaaaattcctagcagagggtcagttttacaccaactctttggtaaatgcttctggcctaattaactaatgaactggcagcatcttccatactgaactacctccctccacctaagaggaagcagagaattttaaactaaggagctgaagcaaacagaaaaacttgaacattccagctcatcaagatcatctctgaattcccagcattttggatgagtaagttggtaggt

SEQ ID NO: 202489 - DNA, 417 bp, Homo sapiens
tataggaaactgctagaaaatatgcattactctcgacatgaataccacccaaaaatccgagatggcaagtatacaaggcatagcaaatatggtgatataatgcgcctgttttgtgaaaagtaatcttgaatccatcttgacactaaatattgcatgtgacaaaatcaagtgaactactgcgcagatagctttgattagtagattcaaacagttcctactttagaacaaattatttgaaaacccaatcaattttaatattccagatatgttattatttatctgagacccagcttgttgcccaggctggagtgtggtgggacaatcatagctcactgtggccttgaactcctgggctcaagcgatcctcccacctcagcctcctcagtagctgggacaacaggtgtgcaccaccatgcc

SEQ ID NO: 202490 - DNA, 308 bp, Homo sapiens
tgggcagcctaccagtaagcccatgcagggcattctttatttcgcttaaagtgtttttaatctctagcatttcttttgcttctttcttagaatagccatctctctgtttaaatcacccatctattcctgaaaggtgtctcctttttccatcataatccttaaccagagttgttttaaattttcagtctgataatttcaacatccctaccacatctgtgtctggttctgatccttgctctgtttttcaaactgcattatttttttttttttttttgccatagtctgtcttgtatttttttgaaaaccac

SEQ ID NO: 202491 - DNA, 958 bp, Homo sapiens
cttgaactcctgagctcaggcagtccacctgccttggcctcccagagtggtgggattacagcagtgagccactgagcccagcagatgacaattctttatgaagaagaaattgagtatcctgtttaaggcactcaagaaaagaaaatgtgagtaaagcattttttgttccagcaaaaccgacttttcagatgaaaaacacacaaacttctcagtgagctgtaacttaggaagtattgttctcatgagcccttccttaggaatggagtggagaaagatctttagacaactggatgactgtagatcaacctgcaactgatgatgggcatgaaacagttattttttaaacctagactgcatgagtgttaagggagagagcatggcatagccatgtgcttagacattgtagattatggttgtaactgttatgcagttctgttaatctcatccatccattttgtattttcatttctagagattccatttgagtcctttttatatcttctgtttcactccttataacattcatgctttccttctattagtatagggagcatttctgtaagagagcttttaatgtccttgtctgtgaattctgtaatctctgatcacttctagatccatctctgttgattgattctgtcatttctattgattgattgccctagttatgggggcatggttgtatgcctgctaatttttgattgaatgctaggcattaattttatcttctgtgcaggattttatttttttaaagagccttagttttcttctgccatacatgtaagttacatggggtcagtttgatcttttcaaagcttgattctgaggtttgttaggctgatccacacaggctttactcttgggctcatttatccatacaacgaaggcaatactgttctcaggactccacctgatgcttggtgtatgagaagatctttctgtccttgtttgtggaaac

SEQ ID NO: 202492 - DNA, 404 bp, Homo sapiens
cagcaggcagggaaaccctgtcaccaggttaaggcttaagtcagagcattttgccaaattcaacacgtccaagcctcccacttgtcccccaagaaaatttctcagggattcacatctttcccagtcaccccctggccagtgaggaagcaccgtgcatcgagaagagcatagctttgagtcgtctatgtggagctggttccatctgagctctgcctcttcctggctgtgtctttttgagtcagttgcttaaaatctctgagcctgattcatccataaaatgagggtgatgagaggattcagtgagagactgtacataaaccacctcctgtaatgtgtcgggggcgtgggtccttgtacatagtaacttctactgttaaattgctactgtggtgttattttcccta

SEQ ID NO: 202493 - DNA, 648 bp, Homo sapiens
gaaggtcaatctctcgtttttcaggtgagaaaactgcctgggaatctaagtggcttgtacaggtgacaagcgcaccatctcttcttatgatcatcccgcccggctccacacacattctaaactgtcagaggtttatgagttgcagacatttgggaggaaagtacatgatatccttagtagccacagcaggtactccaaaatcattggaaggaatgaataaataatgaaactttggcacagttcgctgggtaatcacaagatctcacacaagccatcaacacagaaagatctaatcatgcacatcacagccctggttcccagaggacaactttagtttccatccatacgtttaaacacgtcgaaagcaaaaacaaacaaaacgctatttaagctaatgtctcccagaacaacaccatgaccttaaaccgaaacacaaacgtaggaaagaacaaccaagcagccaaaggacacgttgtcaacagagactgcaatccccctagttccccaaaccactctgtcccggaattcaaagcacctccatgcaaaccgctccctaagcgagagctgccttgtgaagtgagcttggagcattcaactcaagcgttattagtgatgctgagattgcacagcatggatcttcaaatccat

SEQ ID NO: 202494 - DNA, 288 bp, Homo sapiens
ctcctggcaaatggcttcctgaagacatcaaagatgagtaccaaggtactaactacttaggaataaactggtaatcccatttttccttcggcattttcttcctttagtttttctctttttattctttttttttttttgagggaggggcattcttcaaaaggaggaaaatgaactatgtataatgtattactgagcatctcacaaggatttcaaagctactttctaagagattgtttatttttattttttattttttttgagacagagtctctctctgtcacctaggct

SEQ ID NO: 202495 - DNA, 519 bp, Homo sapiens
acaataaaaaacacactaaaaaggcacattccctttttttcttttttaatggggatacaacccaattaatatggataggtgcagattatgtttctccaccaagcaaaacctagcgagcagctttcagtggccgttagaattttcacttatttccaaagggaattcaacaatagaggtattgcattactgagtaatgaatacatcaaagctggtgaacaataaattgcagcttttactctgagtgagaacaaaatataaagcaccaatttaaaaaataatcaaatgactacaatttacttttttgctttgtttacagatttgaaaaactttaattcagctctattaagcacctttatgataacatgtatcaaaagtgccattcttaaaatgtacatcaatgcagggagtgtttccagttccctaaagagtaaacaccgtattttcttctgtacacttatcctgaatgtgatcagagtatacctgcttcctatataatattgttcctagggatacccgcct

SEQ ID NO: 202496 - DNA, 363 bp, Homo sapiens
aaggccagtttctccaaaagatgtggaaacttctgatctcacccagggacttcaacagaataccaaaaaggggtgtctttgtttcctccaaatggagtatttactttgagctggtaaaatgaattaatgaaaagaaaggacaccttcagcttctggggaaggagtgataagtaaaatcagaggaggggattccttcttaccctgactccccaaaatcaaggggaggatggaggatggtgagagagggaggatcccacagggtattcaaaaatagaccctgctagaaaacaggctgctcttttctgggattaaaagttgcctcaatactgtaaggcccatgtatatgcaagcagttgggagtta

SEQ ID NO: 202497 - DNA, 438 bp, Homo sapiens
gctctgtgcatgcctactgcacccaccaactttgcaaattacagggtagttgccactttagcttttgagtttcccaaacaagttttttatctgccctctatgggaacacccatggaatctgaagaggcctttataaataaacaaagcaagagacatctgtatccaagatgtggcatggagagcataaaaacagccagagtctgagaatatcagttgagatcatagagtgatgagatggacccttaggaaacatgcccttgccccacatcagctaaacacagcagcacaacaatcaacatgagtttcgtgacatcccttctctccttagaagcctacagtggctcctaatatcacttagttaaaggcaaattcagcacactatataatctgaccccttttatccctctaaccactttttcttgaacatgccaagaacac

SEQ ID NO: 202498 - DNA, 3336 bp, Homo sapiens
  misc_feature (1959)..(1959): n is a, c, g, or t
  misc_feature (2086)..(2086): n is a, c, g, or t
  misc_feature (2705)..(2705): n is a, c, g, or t
  misc_feature (2929)..(2929): n is a, c, g, or t
  misc_feature (2984)..(2984): n is a, c, g, or t
  misc_feature (3099)..(3100): n is a, c, g, or t
gcctgcctgcacccaggtgattaaaaagctttattgctcacacaaagcctgtttggtggtctcttcacagggacacgcatgaaatttggtgccatgactcggatcaggggacctcccttgggagatcaatcccctgtcctcctgctctttgctcagtgagaaagatccacctatgacctcaggtcctcagaccaaccagcccaaggaacatcccaccaattttaaacccgatgccgtcactgccaccaggagccctgtactatcagccatggtcaaccccaccgtgttctttgacatcgcagtcacggcgagcccttgggtcacgtctcctttgagctgtttgcagacaagattccaaaaacagcagaaaactttcatgctctgagcactggagaggaaggatttggttataagggttcctgctttcacataattattccaggatttatgtgtcagggtggtgacttcatatgccataatggcactggtggcaagtccatctatggggagaaatttgatgatgagaacttcatcctaaggcatacacgtcctggcatcttgtccatggcaaatgctggatccaatacaaacggttcccagtttttcatctgcactgacaagactgagtggtggatggcaagcatgtggtctttggcaaggtgaaagaaggcatgaatattgtggaggccacggagcgctttgggtccaggaatggcaagaccaggaagaagatcaccattgctgactgtggacaactctaataagtttgacttgtgttttatcttaaccaccagaccattccttctgtagctcaggacagcaccctccaccccatttgctcgcagtatcctagaatctttgtgctctcgctgcagttcccttccatgcctagctggactgcagagttgagttaaagtttatgattatgaaataaaaactaaataacaacaaaaaattgtttataaccaatgcttgatcccatattcctaggaaaacaattaaagcttcaggtatatttggtcttctggtcagccatttaaacattttataaagggatttcattccattgttattttccatgcatgttttctggttgtagaaaagctttcccatgcaagagggctgatgttataacagtagattattatgctacagtgtattttcaccagattaaaaaaaaaagctttttatggtttgaatctgctggaaacatcagagaaagactgtccttgccatctacactataacaaaacttcaggaccttgaactttgggttcataatctcacaactgagaagggcccctccatgctcttggagctgtgcacccactggaatgcttaaggtaaaactaactagggaaatttctcccaagaagaagatgacatcattgatgtgaacagcttttcccaagttcacagattaagacttctactatcatgaaactcttatttttgaatattttttcttgcttatgccttctacgaacaatagaagtggaaaaggggtctgttatgtgcacttatggggaacatttttatttgtgaaggagtttgcagccagccttatacatggataaaggcccaatgtatgtaagaaactttaatggtagatgtgttagctcataatcaatcaaaaacaaaaaattgattcactccacataacccacatcgtgggttaaagagaacattgccagaagtccttcactcttctgaaagggcatcatttgttaggtcctttttccatggtttaaagtaaaagaagcaatgattagaaatgtatccctcatgataggttccatagcaaattctactctaaaggctacagactctaaattctcttgtgaaagttataatagaattggctaaacagcgaagtatctgtgcagctgctggcacttgtggcctatacagaaatacatcaaatgaagactatagaaattcagtggtaggagactgacnaagaaattgattagtcaagtctctctctgttgcccaggctgaagtgcagtggcgtgatcttggctcactgcaacctccgactcccaggttcaagcaatcctcctgccttggcctcccaagtagctgngattacaggtgcacgtgaccacacccagccaatttttgtattttagtagagatggggtttcaccacgttggccaggctcatcttgaactcctgacctcaagtgagccacctcacccagccgtgagtaaactgtatctagctcattcttagatccatttgattttaggaggtttggtttatggggaccttgggtaaggagtatactcccaaattcttggtattatcctcctaatagccataataatggtctccctgacgagctgtatgctctcaaaggttttaaatgcttgcatgagccatctctagaatgtcatatggtctctcttcaactggaataacaggagctcaaagaaatatgcaaccatgaggacaccataacctataaatgacatgctgagaccagaaacccaaaatgatggtaactgagagtggcactgaggccctaggttttggtcacactctcacctaagtgaaaacctgatcaaaaagggaatttttttcaacaaaattctgggaggccgttgttttggactgatctcatgcactaggccccaacaaaccaaacaaaaccaaaatggggccactcatgccaagactttaaggaaacacatagattctngaaaagactaggttttgttttttcttctgcaaatcactacaacaaacatttctgacagtataggtatccaccccctaaagtttccattaaatcttttaaccaaattcatttcctctcacctagagaccatcaagcttcagatgatcatgtaacaaaggttccagccagttccaagtgaagacaccacccctggacatcaagaagctacccttcctccactaganagagcagggtgagagttccatgatccccaataggtagggactatgccccaagccngcatgaagcagttacagaaaaaagaccatcggtccctctgcctcccataaagatttatggggatcacatctcttgaaggggcagatgaggcaggaaaatagggtctgaagtgtgnngatcgattcacacttcagctataacaggaaatatcctctccatagggtgtatgactatgtaacttgaatacttcatcctctccatttacataaggtgtatctgaagtaaccaatggaatcctctgggggtaaatgccccacaattctgtaacgggacctttgagcccctacgctccgcctgctcccacactgtggtgtgtatgttcattttcaataaatcccttcattccttcctt

SEQ ID NO: 202499 - DNA, 639 bp, Homo sapiens
tgtgtagtgtctagaggatccggaacacaaagcggcaggtttacagagctgctctctgctctgcattaattgtagagagccacaagatgcaattcaaagcataacggagttacatagagctggtttaggtattacagaagaagggtaaacataaatgctgtcatcagttgggtccagtttatcagtgtttatacttatatgaatagaaaagatatagaaggaaatgagtccgcttttgtggcacgtaagggaggaagagcagagcgggaagtgaggccagagcctggaagctgctattctgcctcctgccacctggggccagtgtggctccaccgtgcctcctccaaagtgcagccttcgggaagaagggagggaggctggatcctgtcttctcacgggccgcttttgtgttccttgccatagacctgtctgtctatagtaatactctctataaatgtgagctattgtcgacagtaggatgtttcagttcatgtcctttccatgtacacacaactctatgcttcttgaactgcctatctctgcttcctaaacattcaaaatcagtgcctaggttcaccacccatgggggcttttaaaagcaaggttaacagggattgcgcagaagtcgctgccgcttgt

SEQ ID NO: 202500 - DNA, 782 bp, Homo sapiens
agcggttcccaggctaggggttgaatcggagctgtagctgccagcttacgccagagccacagcaacgtaggatccgagccgcgtctgcgacctacaccacagctcacggcaacgccggaaccttgacccactaagcaagggcagggattgaacccgcaacctcatggttcctagacggattcgttaaccactgcgccacgccgcttttgtgttccggaacacaaaagcgggaaggggaatacttgggcagtggtgttcccatgtactgaacgtgcttgttccatctcactgagtccctggggccgaccaaagcagtgctatcgctatccccattttacagaaagggaaggtgaggcgaggaagtgaagtcactcctctccaaagcacgtaagggaggaagagcagagcgggaagtgaggccagagcctggaagctgctattctgcctcctgccacctggggccagtgtggctccaccgtgcctcctccaaagtgcagccttcgggaagaagggagggaggctggatcctgtcttctcacgggccgcttttgtgttccttgccatagacctgtctgtctatagtaatactctctataaatgtgagctattgtcgacagtaggatgtttcagttcatgtcctttccatgtacacacaactctatgcttcttgaactgcctatctctgcttcctaaacattcaaaatcagtgcctaggttcaccacccatgggggcttttaaaagcaaggttaacagggattgcgcagaagtcgctgccgcttgt

SEQ ID NO: 202501 - DNA, 807 bp, Homo sapiens
agcggttcccaggctaggggttgaatcggagctgtagctgccagcttacgccagagccacagcaacgtaggatccgagccgcgtctgcgacctacaccacagctcacggcaacgccggaaccttgacccactaagcaagggcagggattgaacccgcaacctcatggttcctagacggattcgttaaccactgcgccacgccgcttttgtgttccggaacacaaaagcgggaaggggaatacttgggcagtggtgttcccatgtactgaacgtgcttgttccatctcactgagtccctggggccgaccaaagcagtgctatcgctatccccattttacagaaagggaaggtgaggcgaggaagtgaagtcactcctctccaaagcacgtaagggaggaagagcagagcgggaagtgaggccagagcctggaagctgctattctgcctcctgccacctggggccagtgtggctccaccgtgcctcctccaaagtgcagccttcgggaagaagggagggaggctggatcctgtcttctcacgggccgcttttgtgttcggaacacaaaagcggcaggtggtgctcaacagttgaccctgcacccatggtcagagccagggtcaccttgcaccaggccccacatggacagcatcttggcccccccgtcattgtgttctcatatatttgccacattgccctatctgctgtgacctaaaaccaccacaaaatcttgaccttggctcaccaatgtatgctacataaagaatcgtagcaccagccatttatagatgcgcgcccgcttttgtgat

SEQ ID NO: 202502 - DNA, 1010 bp, Homo sapiens
cactgtggctttctatcctgtatgtaggttgacgtctctgggatctacacgagggacagagtgacctggtgaggggaggatggagtgaacaggcacaggctctttctgattccttcagggactacctgtacagccaattgtgacatggttccctttagaaaatagggacctagactggcgtcatggggtttaggccaaaggccttgagttcatttactccaactcctcctcttgacagatgataaactatcccagggagtatcttgggacctacccgaggtcactctgctagtagcagaatcagaacttgaacttggaacttgaatctcacatccagatcactgagatttctagagactccagattctgtggttctcacttctgaaaattttcttgggcacagaaatttaagttaaaccattagactgtgtttactgggagtggagggggatgacagatcataaaaaagaaaaagaaaaaaagggaactgttgaccttcaggaaagggatttgaaagaatgatcaagtttatatgatttaaaaattcatagatacttagttttactatgtgtcactgaaaaataattttctacccagtggatgggaaattccagctcctagcttcttcattcatggactcatcacacctaggtattacagagtatagaatttacaaaatcagcagccattatgtgacctcagacaccaccaagttaccactttttgcctttttctgactttcctgtcctcctcctgcagggtgaagtagagcaactaatgttatttcagttagatttcagctttccaggcttgctttaaatcacaagagtgggatgccgggtaggttcatgatggtcgcagcattgcatatacagcatcttggtagctttaaatcaatatctctcctaagggttcagaagaaatgtcacatacaaggtacattgcttgcacaagtgtcctttgtgtcggatgccctcgaatgtaatttctgtgcccatttcaggggatct

SEQ ID NO: 202503 - DNA, 993 bp, Homo sapiens
cactgtggctttctatcctgtatgtaggttgacgtctctgggatctacacgagggacagagtgacctggtgaggggaggatggagtgaacaggcacaggctctttctgattccttcagggactacctgtacagccaattgtgacatggttccctttagaaaatagggacctagactggcgtcatggggtttaggccaaaggccttgagttcatttactccaactcctcctcttgacagatgataaactatcccagggagtatcttgggacctacccgaggtcactctgctagtagcagaatcagaacttgaacttggaacttgaatctcacatccagatcactgagatttctagagactccagattctgtggttctcacttctgaaaattttcttgggcacagaaatttaagttaaaccattagactgtgtttactgggagtggagggggatgacagatcataaaaaagaaaaagaaaaaaagggaactgttgaccttcaggaaagggatttgaaagaatgatcaagtttatatgatttaaaaattcatagatacttagttttactatgtgtcactgaaaaataattttctacccagtggatggcttcttcattcatggactcatcacacctaggtattacagagtatagaatttacaaaatcagcagccattatgtgacctcagacaccaccaagttaccactttttgcctttttctgactttcctgtcctcctcctgcagggtgaagtagagcaactaatgttatttcagttagatttcagctttccaggcttgctttaaatcacaagagtgggatgccgggtaggttcatgatggtcgcagcattgcatatacagcatcttggtagctttaaatcaatatctctcctaagggttcagaagaaatgtcacatacaaggtacattgcttgcacaagtgtcctttgtgtcggatgccctcgaatgtaatttctgtgcccatttcaggggatct

SEQ ID NO: 202504 - DNA, 254 bp, Homo sapiens
agaaccctttattccttcctacacttcctttgccttcctcctccctcagtccacaagcacagatctgtaccactcaaagaggaggtctaataatcccatttccgaaagacagtatttcattaaatttattaattccttttatccaggcatttagtggtcatttttagatgacctttaccacatatcttcagatgctttcaccgtccgccataagaatttttactgaaatgaattcttgaaatgtttaaaacttt

SEQ ID NO: 202505 - DNA, 585 bp, Homo sapiens
ggggcttcctttgggagagaggggtccttcctgtggaagatatattttgcatccttgtatttgctagaagcatctgggtgaacatcaaactgagcagagattaatgtatgtgaaaaaacccgaagaatttctaggtgctcctaccagaagcacacagtggtggtgatcctgccaagaggtccctttcctggagattaaatatgtccagcctaggttcattcaaaaggtacttttagctcagacctgtaatcctagcactttgggatgctgaggtgggaggatcccttgagcccaggagttcaagaccagcctgggaaacatagggagaccctgtctctattgtaaaacaaacaaaaggtacttttggagacctctgtcatggaagtcaccttcaagacagtactgtaacaagccatttgtgaaatatgccaattgcaatgacagagatacagcagcaacctgagccccaaggacggctgccaggctactgattctgagtgtgaaaattacattactaaagaaaacaatataaatatggtgagaaacacttttaaaactgtatctggataactgttgccatggcag

SEQ ID NO: 202506 - DNA, 472 bp, Homo sapiens
gagatagggtcttgctctgttgcccaggctggagtgcagtggcatgatctctgctcactgcaacctccaccttctgggctccagtggtcctcctacctcagcctcccaagtagctgggaccacaggcacacgccaccatgcctggataattttttgtagagacggggccttgctatgttacccaggctggttttgaactgggaaacatagggagaccctgtctctattgtaaaacaaacaaaaggtacttttggagacctctgtcatggaagtcaccttcaagacagtactgtaacaagccatttgtgaaatatgccaattgcaatgacagagatacagcagcaacctgagccccaaggacggctgccaggctactgattctgagtgtgaaaattacattactaaagaaaacaatataaatatggtgagaaacacttttaaaactgtatctggataactgttgccatggcag

SEQ ID NO: 202507 - DNA, 1336 bp, Homo sapiens
taccacatccacaaagaaacgaactccccacatacccacaatgtctcactgcttcattaaagcattgtcatgcctgttatcactcagatctgaatgggcaggtatagcctctgattgattttttagaagaaacaaaaataacagcaaaatatgttaattgtaaccttcagcgagagctgaaggagttttttgggcagttataacctttcaaagcatgacatcttttgggggaagacaaaggggctgtgatggaaaggttggcttgagtgagtactttggtatccctacccgcccccagcctcaaatgctgatcttgtacttggggaggctatgctaaaggagaaacacaccccagaggagacaccaggtggtgtcttcagacaattcccacccagccatagggataggcattttgggtttgagacggccctttctctggcttacttttagagcctggagtcagacttcttcacaacaaatagcccagaaccagctgggaactctctggcccatatgacacatgacactgatacagtaccagaaatgcatggcaccagctaataccactgaggggcaggagggcatactctctctcagaccctcatccatcacccccagaaccaggacaaggtcatgatggctcttggcagcctgctcagcaccagggcaagaacaactcaggctggacattacgagagtaaacacaatagatttctttcccagaccaagagcttgggcaccaggagtgggcattctggttcactgttaggcaaaaaagcctttggggaaattaccagctctcccgtcatccccaccttccttgaaaggcagcatgtggggtgggaagaacaatcagaagacaaattttaatctaaatcctgcccctctgtggccctggaaacttggcccctttgagcttcagtcactttgtgaaatgacaataacattcaatctccttcaacctcattactatggattaaatgagacggtgtctggggacatgcttggagaatgtattgtacaactgcttaggaattttcttctgcccctaaacctggaacttagagtggagcaaacagtaaacagtcactgtgtgtcggttaagggaacagagcctcagagccccgacccctggaaacgtttcttttttgtttactaaatttctagcaacaccgtgttttctacagaggtggggggaaatgtccatttaagtgcaagatgaaggggcctgtgaaaggaccctccaaggcaatcccatgtgctcccgtctcctggaaagaagagaataggaccacgcgtagtgaccagggaggaatcgtaccatacgcgtctcagc

SEQ ID NO: 202508 - DNA, 310 bp, Homo sapiens
gccagggtgttaacaggatggtctccggagatcgggattctcggagggtcgaccaccaggaagaaacctcaggagcaagaaagctcaggcagattgctggggaggcagtgcgagatcccaaactcaggccaggatttgcggagggtcaatgaggcccctctcccaatcttcacttcaccagccaccgccccagtccccgcagccgccgctctgccgtcatttattttattattatttttttttaatagtcggagtctcattctgtcacccagtctggactgcagtggcgggatctcagctcactgcaaac

SEQ ID NO: 202509 - DNA, 353 bp, Homo sapiens
ctagacattgaaatattttagacactagaaaataaaggatttttaataaatggagtgtaactactcaaaacttttttcttctttccccaaagtgaataaataacaattgtaggctaatgtttcagattagcataggtagataatattagtttttaatcatgaaattattttaagtgcatcatttgagagaatttatggtataaattctctataaattttatatttgataagaaatacgaagatagaagctaatgaagagggagaagaactaagtattcttgagttgtttgtgaaagtagtaatttaatcgaagttgtattcacttagcccctccaagattaagtttccatgtg

SEQ ID NO: 202510 - DNA, 401 bp, Homo sapiens
attatatctaggaagtaactaactcgcttttgattttacaggcccataggtggaagggacttgccttgtctcggatgagactttggactttggactgtggacttttgagttaacactgaaatgaattaatgctgaaatgaattaagactttgggagacggttgagaagccatgactcattttaaaatgtgagacatgcctttcaccttctgccatgattgtgaggcctctccagccatgtggaactgtgaacacacagtgttcatcccctcaggaggacacagcttttgaggtaccatcttggaagcagagaccagccctcactagacacaaacttcctggcacgttgattttggacttcatagcctctagaactgtgagaaataaatttttattatttat

SEQ ID NO: 202511 - DNA, 1177 bp, Homo sapiens
cgcaatcagtattttcatacatatttaaaattttccatccatacaaaggttgctaacatatttatttaaaattttaaaaataattttatatgcctcttgtaaccagtaataggatgcaaagttttttttaaggtaacattgctcctcttcccccattgtctctgtcatctatagtactccctgaggtagttcatgttattgcaagggtgtgtatcatcacaaacatattgcttccacatacatatatcagcatacatatatatatatgtatagcatatatatatatgagcacatattaatatatgcccatgcacatacaagcatgtttttgttaatttttactgaaatggaatcatactgcatacttatgaacaaattgcttctttcaccttatatcacttataattgttattctacaaatcagtacatataaaaaatacatatttacatatgtaatactctatctttctgttataattttctgcatgcacatgtatgcatatacatatattcataaacataaaacttaatctaaacgggatttttttttgggggggtgatatggtttggctgtgtccccacccaaatctcatcttgaattcccatgtgttgtggggggacccggtgggaggtaattgaattatgggggcaggtctttcctgtgctgttcttgggatagtgaaaaagtctcacaagatctgatggttttaaaaaggtgagtttccctgcataatctctcttctcctgtctggttccatgtgagatgtgccttttgccttccgccatgattgtgaggcctccccagccatgcggacccgcccataggtggaagggacttgccttgtctcggatgagactttggactttggactgtggacttttgagttaacactgaaatgaattaatgctgaaatgaattaagactttgggagacggttgagaagccatgactcattttaaaatgtgagacatgcctttcaccttctgccatgattgtgaggcctctccagccatgtggaactgtgaacacacagtgttcatcccctcaggaggacacagcttttgaggtaccatcttggaagcagagaccagccctcactagacacaaacttcctggcacgttgattttggacttcatagcctctagaactgtgagaaataaatttttattatttat

SEQ ID NO: 202512 - DNA, 717 bp, Homo sapiens
gccacttcctgcaatctcccagccatgcccattgtatgactcctatgctgaatgactttaagtttctttaatattacatgctctctttcccactgtgggttctacagatgctgtttgctgtgtctgaaacatcctactgttcctctctccacttaccaactaagctttcatctttcatcctccacctaatctctactctcctttcaggatcatcagaggtattacctcttacaaatatctttccctgccttccaaatcctgtctccaaagcctggattatgtacttattataggttcccacattgcactcagtacattgtctccaccctctactagcttggaaaaatctgcgagagcaagaagtatgtctgttcatgttagagttacctctaatgcctgacttgatacctgacaacatagtgttgctcaatcaataattgtaaatacctgaattattaatgcatgaataaataaatgatttggtaaatatacaaatgtatgtattaaaaacaggagagaaagaaatggaaatatttgtataaccagaacatcaggcaattagcattaggaaagctttttttttcttgtttaagtaggttaaaacaggccttaaaagacaaaaaatcgtggaacattaagatctctctcctttcccccctcctccttctacctgtgtgtgtgtgtgcacgcatatgtgcacttgttaaaggtagagag

SEQ ID NO: 202513 - DNA, 203 bp, Homo sapiens
aaacacaaatgaccacatttctaaacctgttaagagccttttactgaggacactgactaagatagctttgcttccctttcccaaatgtgagataaagcaaattttgatacacaattaccgttagtgccactccctcccttaataaaaggatccatctgaaaacagagcaggaacataactcaaagggactcctaagtgggagg

SEQ ID NO: 202514 - DNA, 581 bp, Homo sapiens
  misc_feature (540)..(540): n is a, c, g, or t
  misc_feature (573)..(573): n is a, c, g, or t
cccatttgaaaaagtaaaaattacaaatttttacattttaaaataatttcattatttgttgccaaaagccaaggcaaattcctccttttcatattaataaatattctttcaagttcttagaatacctgttaatgttttagaattatctttacgaaaaagtaacatatagctctggagtgtttttattaagattcaaattcataaattaaatattgaaaacattaattgagcatttgtacatgcaaagcacaatataagtggaagatactttttagtgtgacagagaataagaaaaggtttgaaacaggcttaccgattccttcttttccagcttcagttttgaatttgtaagtggaggataataatgcctatctcacagagaagttgagaaaattaggaaatgacagatctaacgtgtgccaaagcataggacttgacacacggttggcacttaataaatgccggttctcttcttccactccatttttcagagatgcagtgaaaagaaagaaatcatctgcttagtagttggattaatcngagctgctgagggacattacttaccctggcatnttggcttg

SEQ ID NO: 202515 - DNA, 442 bp, Homo sapiens
aatgtaatctgaggcaccacatatgccaccaccaataaaaggaccggcgtaacacatcgtgtaacgagcggcaccagtcaaaccagaaatccagcacaccgcaggcctggaattagcacgtggaatatgctgcgacaacaagtacggagcattcccttctgcagcaacaacaagttcagcggtcaatatgatgcgttctgtggcagaatcgttcgaaaagatttcgaggcagtcaataaaatctgttccattaaaaggatcacctccaatgccaacgcacaaagactgcctcgaaatctttttgaacgattcagcctatgtgcctgacactggtcttgcagtacaactggaagccaaaacaaggtggaagatgtcctgaattaagacgttttcaccacattgtattacagagacagccaataaatctactatttgatttcaa

SEQ ID NO: 202516 - DNA, 1434 bp, Homo sapiens
  misc_feature (149)..(149): n is a, c, g, or t
gttattatctgcctctccgataggatgcctctttgtcttcacctgccattcccgctgtttcgtgaagaatcggctgtaaagggaaatttgttcaggcgactgctgtggccaccctctgcctcctccggcctctgcccctgggaggtccncgggggcctgggagtgtcattggcgtatgaccgcaacccttgccgctgccgctgacatcgctaccatggtctccggcagcagcggcctcgccgccgcccgtctcctgtcgcgcagcttcctcctgccgcagaatggaattcggcattgttcctacacagcttctcggcaacatctctatgttgataaaaatacaaagattatttgccagggtttcactggcaaacagggcacctttcacagccagcaggcattggaatatggcaccaaactcgttggaggaaccactccagggaaaggaggccagacacatctgggcttacctgtctttaatactgtgaaggaggccaaagaacagacaggagcaacggcttctgtcatttatgttcctccgccttttgctgctgctgccattaatgaagctattgaggcagaaattcccttggttgtgtgtatcactgaaggaattccccagcaggacatggtacgagtcaagcacaaactgctgcgccaggaaaagacaaggctaattgggcccaactgccctggagtcatcaatcctggagaatgtaaaattggcatcatgcctggccatattcacaaaaaaggaaggattggcattgtgtccagatctggcaccctgacttatgaagcagttcaccaaacaacgcaagttggattggggcagtctttgtgcgttggcattggaggtgatccttttaatggaacagattttattgactgcctcgaaatctttttgaacgattctgccacagaaggcatcatattgattggtgaaattggtggtaatgcagaagagaatgctgcagaatttttgaagcaacataattcaggtccaaattccaagcctgtagtgtccttcattgctggtttaactgctcctcctgggagaagaatgggtcatgccggggcaattattgctggaggaaaaggtggagctaaagagaagatctctgcccttcagagtgcaggagttgtggtcagtatgtctcctgcacagctgggaaccacgatctacaaggaatttgaaaagaggaagatgctatgaaagaaaaaaaaaattcctaaaactgtggaatggatcacgtagacatgtaacccagcagcagtttgcttctgttgtccactgattaatcagcctatgtgcctgacactggtcttgcagtacaactggaagccaaaacaaggtggaagatgtcctgaattaagacgttttcaccacattgtattacagagacagccaataaatctactatttgatttcaa

SEQ ID NO: 202517 - DNA, 1277 bp, Homo sapiens
tagtagcccgcgttactcggccgaggcgcacctgccgctgccgctgacatcgctaccatggtctccggcagcagcggcctcgccgccgcccgtctcctgtcgcgcagcttcctcctgccgcagaatggaattcggcattgttcctacacagcttctcggcaacatctctatgttgataaaaatacaaagattatttgccagggtttcactggcaaacagggcacctttcacagccagcaggcattggaatatggcaccaaactcgttggaggaaccactccagggaaaggaggccagacacatctgggcttacctgtctttaatactgtgaaggaggccaaagaacagacaggagcaacggcttctgtcatttatgttcctccgccttttgctgctgctgccattaatgaagctattgaggcagaaattcccttggttgtgtgtatcactgaaggaattccccagcaggacatggtacgagtcaagcacaaactgctgcgccaggaaaagacaaggctaattgggcccaactgccctggagtcatcaatcctggagaatgtaaaattggcatcatgcctggccatattcacaaaaaaggaaggattggcattgtgtccagatctggcaccctgacttatgaagcagttcaccaaacaacgcaagttggattggggcagtctttgtgcgttggcattggaggtgatccttttaatggaacagattttattgactgcctcgaaatctttttgaacgattctgccacagaaggcatcatattgattggtgaaattggtggtaatgcagaagagaatgctgcagaatttttgaagcaacataattcaggtccaaattccaagcctgtagtgtccttcattgctggtttaactgctcctcctgggagaagaatgggtcatgccggggcaattattgctggaggaaaaggtggagctaaagagaagatctctgcccttcagagtgcaggagttgtggtcagtatgtctcctgcacagctgggaaccacgatctacaaggaatttgaaaagaggaagatgctatgaaagaaaaaaaaaattcctaaaactgtggaatggatcacgtagacatgtaacccagcagcagtttgcttctgttgtccactgattaatcagcctatgtgcctgacactggtcttgcagtacaactggaagccaaaacaaggtggaagatgtcctgaattaagacgttttcaccacattgtattacagagacagccaataaatctactatttgatttcaa

SEQ ID NO: 202518 - DNA, 1395 bp, Homo sapiens
  misc_feature (149)..(149): n is a, c, g, or t
gttattatctgcctctccgataggatgcctctttgtcttcacctgccattcccgctgtttcgtgaagaatcggctgtaaagggaaatttgttcaggcgactgctgtggccaccctctgcctcctccggcctctgcccctgggaggtccncgggggcctgggagtgtcattggcgtatgaccgcaacccttgccgctgccgctgacatcgctaccatggtctccggcagcagcggcctcgccgccgcccgtctcctgtcgcgcagcttcctcctgccgcagaatggaattcggcattgttcctacacagcttctcggcaacatctctatgttgataaaaatacaaagattatttgccagggtttcactggcaaacagggcacctttcacagccagcaggcattggaatatggcaccaaactcgttggaggaaccactccagggaaaggaggccagacacatctgggcttacctgtctttaatactgtgaaggaggccaaagaacagacaggagcaacggcttctgtcatttatgttcctccgccttttgctgctgctgccattaatgaagctattgaggcagaaattcccttggttgtgtgtatcactgaaggaattccccagcaggacatggtacgagtcaagcacaaactgctgcgccaggaaaagacaaggctaattgggcccaactgccctggagtcatcaatcctggagaatgtaaaattggcatcatgcctggccatattcacaaaaaaggaaggattgttcaccaaacaacgcaagttggattggggcagtctttgtgcgttggcattggaggtgatccttttaatggaacagattttattgactgcctcgaaatctttttgaacgattctgccacagaaggcatcatattgattggtgaaattggtggtaatgcagaagagaatgctgcagaatttttgaagcaacataattcaggtccaaattccaagcctgtagtgtccttcattgctggtttaactgctcctcctgggagaagaatgggtcatgccggggcaattattgctggaggaaaaggtggagctaaagagaagatctctgcccttcagagtgcaggagttgtggtcagtatgtctcctgcacagctgggaaccacgatctacaaggaatttgaaaagaggaagatgctatgaaagaaaaaaaaaattcctaaaactgtggaatggatcacgtagacatgtaacccagcagcagtttgcttctgttgtccactgattaatcagcctatgtgcctgacactggtcttgcagtacaactggaagccaaaacaaggtggaagatgtcctgaattaagacgttttcaccacattgtattacagagacagccaataaatctactatttgatttcaa

SEQ ID NO: 202519 - DNA, 1772 bp, Homo sapiens
cccatttgaaaaagtaaaaattacaaatttttacattttaaaataatttcattatttgttgccaaaagccaaggcaaattcctccttttcatattaataaatattctttcaagttcttagaatacctgttaatgttttagaattatctttacgaaaaagtaacatatagctctggagtgtttttattaagattcaaattcataaattaaatattgaaaacattaattgagcatttgtacatgcaaagcacaatataagtggaagatactttttagtgtgacagagaataagaaaaggtttgaaacaggcttaccgattccttcttttccagcttcagttttgaatttgtaagtggaggataataatgcctatctcacagagaagttgagaaaattaggaaatgacagatctaacgtgtgccaaagcataggacttgacacacggttggcacttaataaatgccggttctcttcttccactccatttttcagagatgcagtgaaaagaaagaaatcaatcctgccctcagtaagtttgtaatttaaaaataaaaaacggcagcctgtctgtagggaacatttactttaaccctgtccatgaatttgttcttaaatgtggtgtgtagtatggctctgatatgcaggctctgtcatcatccactctggatccagaacacgagcagtcagggtactcactgtcactcactggcacttgtgtcttaaaacttgtgggtgatttatctgcagcatacttcatcaaatagtttctttactcaaagaaatttgttaaatgtttattctttcctctggtgtaacatcagcatgcaacacagatacacattttcttaaaatgttcatttctaaggagttatctgggaataattttgtgggacagaagaggcttgataaaggagctaaaacaaaaagagggttgtcttcgttacagccctagaatattcctagaatatcaggaaccaaccaccatttagcatttatataatattaccaacagaaataaatgtagcattttgtgattttttaaatattaaatgcaagagcaatgatacatttaaaaatataagagagaagggtaagaaaaatgacaaactagttaaaaacatttattgacctaaattccatggttcacccttaaatttccagctattgatatttttcaactttttcaggcattggaggtgatccttttaatggaacagattttattgactgcctcgaaatctttttgaacgattctgccacagaaggcatcatattgattggtgaaattggtggtaatgcagaagagaatgctgcagaatttttgaagcaacataattcaggtccaaattccaagcctgtagtgtccttcattgctggtttaactgctcctcctgggagaagaatgggtcatgccggggcaattattgctggaggaaaaggtggagctaaagagaagatctctgcccttcagagtgcaggagttgtggtcagtatgtctcctgcacagctgggaaccacgatctacaaggaatttgaaaagaggaagatgctatgaaagaaaaaaaaaattcctaaaactgtggaatggatcacgtagacatgtaacccagcagcagtttgcttctgttgtccactgattaatcagcctatgtgcctgacactggtcttgcagtacaactggaagccaaaacaaggtggaagatgtcctgaattaagacgttttcaccacattgtattacagagacagccaataaatctactatttgatttcaa

SEQ ID NO: 202520 - DNA, 1099 bp, Homo sapiens
  misc_feature (149)..(149): n is a, c, g, or t
  misc_feature (870)..(870): n is a, c, g, or t
gttattatctgcctctccgataggatgcctctttgtcttcacctgccattcccgctgtttcgtgaagaatcggctgtaaagggaaatttgttcaggcgactgctgtggccaccctctgcctcctccggcctctgcccctgggaggtccncgggggcctgggagtgtcattggcgtatgaccgcaacccttgccgctgccgctgacatcgctaccatggtctccggcagcagcggcctcgccgccgcccgtctcctgtcgcgcagcttcctcctgccgcagaatggaattcggcattgttcctacacagcttctcggcaacatctctatgttgataaaaatacaaagattatttgccagggtttcactggcaaacagggcacctttcacagccagcaggcattggaatatggcaccaaactcgttggaggaaccactccagggaaaggaggccagacacatctgggcttacctgtctttaatactgtgaaggaggccaaagaacagacaggagcaacggcttctgtcatttatgttcctccgccttttgctgctgctgccattaatgaagctattgaggcagaaattcccttggttgtgtgtatcactgaaggaattccccagcaggacatggtacgagtcaagcacaaactgctgcgccaggaaaagacaaggctaattgggcccaactgccctggagtcatcaatcctggagaatgtaaaattggcatcatgcctggccatattcacaaaaaaggaaggattggcattgtgtccagatctggcaccctgacttatgaagcagttcaccaaacaacgcaagttggattggggcagtctttgtgcgttgggcatggaggtgatcattttanggaccagatttattgatgcctcgagtcttttgacgaatctgcacagaggctctttgattgtgaatggtgtatgccgaaaatgttccatttggacactatcagccaattcagcgtaggcctcagcggtaggccaggaaaagttgcggcatcggggagggaaaaaccccaaggggggtttttgctgacaccgtagattccaacccgggcatcagctcatctgggctcaaca

SEQ ID NO: 202521 - DNA, 586 bp, Homo sapiens
agcagtggtatcaacgcagagtgcccattacggccggggactgcctcgaaatctttttgaacgattctgccacagaaggcatcatattgattggtgaaattggtggtaatgcagaagagaatgctgcagaatttttgaagcaacataattcaggtccaaattccaagcctgtagtgtccttcattgctggtttaactgctcctcctgggagaagaatgggtcatgccggggcaattattgctggaggaaaaggtggagctaaagagaagatctctgcccttcagagtgcaggagttgtggtcagtatgtctcctgcacagctgggaaccacgatctacaaggaatttgaaaagaggaagatgctatgaaagaaaaaaaaaattcctaaaactgtggaatggatcacgtagacatgtaacccagcagcagtttgcttctgttgtccactgattaatcagcctatgtgcctgacactggtcttgcagtacaactggaagccaaaacaaggtggaagatgtcctgaattaagacgttttcaccacattgtattacagagacagccaataaatctactatttgatttcaa

SEQ ID NO: 202522 - DNA, 817 bp, Homo sapiens
  misc_feature (149)..(149): n is a, c, g, or t
gttattatctgcctctccgataggatgcctctttgtcttcacctgccattcccgctgtttcgtgaagaatcggctgtaaagggaaatttgttcaggcgactgctgtggccaccctctgcctcctccggcctctgcccctgggaggtccncgggggcctgggagtgtcattggcgtatgaccgcaacccttgccgctgccgctgacatcgctaccatggtctccggcagcagcggcctcgccgccgcccgtctcctgtcgcgcagcttcctcctgccgcagaatggaattcggcattgttcctacacagcttctcggcaacatctctatgttgataaaaatacaaagattatttgccagggtttcactggcaaacagggcacctttcacagccagcaggcattggaatatggcaccaaactcgttggaggaaccactccagggaaaggaggccagacacatctgggcttacctgtctttaatactgtgaaggaggccaaagaacagacaggagcaacggcttctgtcatttatgttcctccgccttttgctgctgctgccattaatgaagctattgaggcagaaattcccttggttgtgtgtatcactgaaggaattccccagcaggacatggtacgagtcaagcacaaactgctgcgccaggaaaagacaaggctaattgggcccaactgccctggagtcatcaatcctggagaatgtgcacattgggcatcatgcctggggccattattttcccaaaaaaaaagggaagggcttggggctttgttgtccccgattcttggcgaccctcgattttga

SEQ ID NO: 202523 - DNA, 486 bp, Homo sapiens
tcatagatcgagccggtaccctagtttagaagtttcaatagcaacataattcggtccaaattccaagcctgtagtgtccttcattgctggtttaactgctcctcctgggagaagaatgggtcatgccggggcaattattgctggaggaaaaggtggagctaaagagaagatctctgcccttcagagtgcaggagttgtggtcagtatgtctcctgcacagctgggaaccacgatctacaaggaatttgaaaagaggaagatgctatgaaagaaaaaaaaaattcctaaaactgtggaatggatcacgtagacatgtaacccagcagcagtttgcttctgttgtccactgattaatcagcctatgtgcctgacactggtcttgcagtacaactggaagccaaaacaaggtggaagatgtcctgaattaagacgttttcaccacattgtattacagagacagccaataaatctactatttgatttcaa

SEQ ID NO: 202524 - DNA, 671 bp, Homo sapiens
ggtgactagaggaccctccaagcatgagaaactgagcaaacctgtttccattgccttcttagaagggttcatgtatatagcactacagaagcataatgaagtttctcagctcccaaaattattgttattatactgctgtgaaaaaataaatattattcaaaacctccctctctgcttctggatttaggaaatgtaaagttgaagctctgcatctgtttcgtgaaattcaggctgacacagactgattttgaaagctgttattctgtgttcaaacaccctcatcctggtacatttttcttctgtaatttgattgttcaggggatcctaaagataataggtttcaaaatcattttgatcctaaatgtgatttggatcttttatctttattcattccatctctcttctctctctcttctgtttctgaaggaatttgaaaagaggaagatgctatgaaagaaaaaaaaaattcctaaaactgtggaatggatcacgtagacatgtaacccagcagcagtttgcttctgttgtccactgattaatcagcctatgtgcctgacactggtcttgcagtacaactggaagccaaaacaaggtggaagatgtcctgaattaagacgttttcaccacattgtattacagagacagccaataaatctactatttgatttcaa

SEQ ID NO: 202525 - DNA, 1714 bp, Homo sapiens
  misc_feature (149)..(149): n is a, c, g, or t
gttattatctgcctctccgataggatgcctctttgtcttcacctgccattcccgctgtttcgtgaagaatcggctgtaaagggaaatttgttcaggcgactgctgtggccaccctctgcctcctccggcctctgcccctgggaggtccncgggggcctgggagtgtcattggcgtatgaccgcaacccttgccgctgccgctgacatcgctaccatggtctccggcagcagcggcctcgccgccgcccgtctcctgtcgcgcagcttcctcctgccgcagaatggaattcggcattgttcctacacagcttctcggcaacatctctatgttgataaaaatacaaagattatttgccagggtttcactggcaaacagggcacctttcacagccagcaggcattggaatatggcaccaaactcgttggaggaaccactccagggaaaggaggccagacacatctgggcttacctgtctttaatactgtgaaggaggccaaagaacagacaggagcaacggcttctgtcatttatgttcctccgccttttgctgctgctgccattaatgaagctattgaggcagaaattcccttggttgtgtgtatcactgaaggaattccccagcaggacatggtacgagtcaagcacaaactgctgcgccaggaaaagacaaggctaattgggcccaactgccctggagtcatcaatcctggagaatgtaaaattggcatcatgcctggccatattcacaaaaaaggaaggattggcattgtgtccagatctggcaccctgacttatgaagcagttcaccaaacaacgcaagttggattggggcagtctttgtgcgttggcattggaggtgatccttttaatggaacagattttattgactgcctcgaaatctttttgaacgattctgccacagaaggcatcatattgattggtgaaattggtggtaatgcagaagagaatgctgcagaatttttgaagcaacataattcaggtccaaattccaagcctgtagtgtccttcattgctggtttaactgctcctcctgggagaagaatgggtcatgccggggcaattattgctggaggaaaaggtggagctaaagagaagatctctgcccttcagagtgcaggagttgtggtcagtatgtctcctgcacagctgggaaccacgatctacaaggaatttgaaaagaggaagatgctatgaaagaaaaaaaaaattcctaaaactgtggaatggatcacgtagacatgtaacccagcagcagtttgcttctgttgtccactgattaatcagcctatgtgcctgacactggtcttgcagtacaactggaagccaaaacaaggtggaagatgtcctgaattaagacgttttcaccacattgtattacagagacagccaataaatctactatttgatttcaaaaaaaaaaaaaaaaaaaaaaaaaaaaaaaaaataaaaaaaaaaaaaacaaaaaacaaaacaaaaaaaaataaataataaaaaagaggcaacaaattcgaacacatgaaaacacagaaaagagaacaaaacaagaagggatgagcgccgggcgaatcgacaagttaattctgactgagtgggacgagcaatgaaatcaacgccacgtgctatcaaaacgaagcgtctaatctcgcgtcgctattgtattagcatacgacgcgggggattcatccataatgt

SEQ ID NO: 202526 - DNA, 1372 bp, Homo sapiens
  misc_feature (149)..(149): n is a, c, g, or t
gttattatctgcctctccgataggatgcctctttgtcttcacctgccattcccgctgtttcgtgaagaatcggctgtaaagggaaatttgttcaggcgactgctgtggccaccctctgcctcctccggcctctgcccctgggaggtccncgggggcctgggagtgtcattggcgtatgaccgcaacccttgccgctgccgctgacatcgctaccatggtctccggcagcagcggcctcgccgccgcccgtctcctgtcgcgcagcttcctcctgccgcagaatggaattcggcattgttcctacacagcttctcggcaacatctctatgttgataaaaatacaaagattatttgccagggtttcactggcaaacagggcacctttcacagccagcaggcattggaatatggcaccaaactcgttggaggaaccactccagggaaaggaggccagacacatctgggcttacctgtctttaatactgtgaaggaggccaaagaacagacaggagcaacggcttctgtcatttatgttcctccgccttttgctgctgctgccattaatgaagctattgaggcagaaattcccttggttgtgtgtatcactgaaggaattccccagcaggacatggtacgagtcaagcacaaactgctgcgccaggaaaagacaaggctaattgggcccaactgccctggagtcatcaatcctggagaatgtaaaattggcatcatgcctggccatattcacaaaaaaggaaggattggcattgtgtccagatctggcaccctgacttatgaagcagttcaccaaacaacgcaagttggattggggcagtctttgtgcgttggattctgccacagaaggcatcatattgattggtgaaattggtggtaatgcagaagagaatgctgcagaatttttgaagcaacataattcaggtccaaattccaagcctgtagtgtccttcattgctggtttaactgctcctcctgggagaagaatgggtcatgccggggcaattattgctggaggaaaaggtggagctaaagagaagatctctgcccttcagagtgcaggagttgtggtcagtatgtctcctgcacagctgggaaccacgatctacaaggaatttgaaaagaggaagatgctatgaaagaaaaaaaaaattcctaaaactgtggaatggatcacgtagacatgtaacccagcagcagtttgcttctgttgtccactgattaatcagcctatgtgcctgacactggtcttgcagtacaactggaagccaaaacaaggtggaagatgtcctgaattaagacgttttcaccacattgtattacagagacagccaataaatctactatttgatttcaa

SEQ ID NO: 202527 - DNA, 669 bp, Homo sapiens
tctgcgatccttaagcatcctaaccagggggcctctttgtacgttgagatgcagtgaaaagaaagaaatcaatcctagcctcagcattggaggtgatccttttaatggaacagattttattgactgcctcgaaatctttttgaacgattctgccacagaaggcatcatattgattggtgaaattggtggtaatgcagaagagaatgctgcagaatttttgaagcaacataattcaggtccaaattccaagcctgtagtgtccttcattgctggtttaactgctcctcctgggagaagaatgggtcatgccggggcaattattgctggaggaaaaggtggagctaaagagaagatctctgcccttcagagtgcaggagttgtggtcagtatgtctcctgcacagctgggaaccacgatctacaaggaatttgaaaagaggaagatgctatgaaagaaaaaaaaaattcctaaaactgtggaatggatcacgtagacatgtaacccagcagcagtttgcttctgttgtccactgattaatcagcctatgtgcctgacactggtcttgcagtacaactggaagccaaaacaaggtggaagatgtcctgaattaagacgttttcaccacattgtattacagagacagccaataaatctactatttgatttcaa

SEQ ID NO: 202528 - DNA, 992 bp, Homo sapiens
  misc_feature (149)..(149): n is a, c, g, or t
gttattatctgcctctccgataggatgcctctttgtcttcacctgccattcccgctgtttcgtgaagaatcggctgtaaagggaaatttgttcaggcgactgctgtggccaccctctgcctcctccggcctctgcccctgggaggtccncgggggcctgggagtgtcattggcgtatgaccgcaacccttgccgctgccgctgacatcgctaccatggtctccggcagcagcggcctcgccgccgcccgtctcctgtcgcgcagcttcctcctgccgcagaatggaattcggcattgttcctacacagcttctcggcaacatctctatgttgataaaaatacaaagattatttgccagggtttcactggcaaacagggcacctttcacagccagcaggcattggaatatggcaccaaactcgttggaggaaccactccagggaaaggaggccagacacatctgggcttacctgtctttaatactgtgaaggaggccaaagaacagacaggagcaacggcttctgtcatttatgttcctccgccttttgctgctgctgccattaatgaagctattgaggcagaaattcccttggttgtgtgtatcactgaaggaattccccagcaggacatggtacgagtcaagcacaaactgctgcgccaggaaaagacaaggctaattgggcccaactgccctggagtcatcaatcctggagaatgtaaaattggcatcatgcctggccatattcacaaaaaaggaaggattggcattgtgtccagatctggcaccctgacttatgaagcagttcaccaaacaacgcaagttggattggggcagtctttgtgcgttgtgagggacttttgctaaaatcattttattggagtgtggtgtcttcattggatgagtataataataattattgattttattatttgcaaaagattttgatactcttatgaaaaggatgttacgatctcaaatttaatttgcttaa

SEQ ID NO: 202529 - DNA, 752 bp, Homo sapiens
  misc_feature (149)..(149): n is a, c, g, or t
  misc_feature (717)..(717): n is a, c, g, or t
gttattatctgcctctccgataggatgcctctttgtcttcacctgccattcccgctgtttcgtgaagaatcggctgtaaagggaaatttgttcaggcgactgctgtggccaccctctgcctcctccggcctctgcccctgggaggtccncgggggcctgggagtgtcattggcgtatgaccgcaacccttgccgctgccgctgacatcgctaccatggtctccggcagcagcggcctcgccgccgcccgtctcctgtcgcgcagcttcctcctgccgcagaatggaattcggcattgttcctacacagcttctcggcaacatctctatgttgataaaaatacaaagattatttgccagggtttcactggcaaacagggcacctttcacagccagcaggcattggaatatggcaccaaactcgttggaggaaccactccagggaaaggaggccagacacatctgggcttacctgtctttaatactgtgaaggaggccaaagaacagacaggagcaacggcttctgtcatttatgttcctccgccttttgctgctgctgccattaatgaagctattgaggcagaaattcccttggttgtgtgtatcactgaaggaattccccagcaggacatggtacgagtcaagcacaaactgctgcgccaggattgatgactccagggcagttgggcccaattagccttgtcttttcctggcgcagnagtttgtgctttaattgtaccatcgtcctcaagga

SEQ ID NO: 202530 - DNA, 403 bp, Homo sapiens
actgtgcctctgccccctggaacttcttccatcttctcaacattgggaggcgccttcccaacttagaggcttggcctttgctgttccctctgcctgggacatgcttcccaccactctgcctgtgatcttccttcagatttcagcttaaaggtcatctcctgaccaccttctccagagctggcattcccttccagtttccatctcagcttcttgtgggtttccttcctacaccttatctcaatctgtaattgctctatcggtttgcttccttgtttattattattgctggttttcttcctctctatggtgtttattactgtcggatgtctctcatgttttatttatttactttcttactcttacgtctactctgtctcccacgacttgaatggcaaccctgaca

SEQ ID NO: 202531 - DNA, 321 bp, Homo sapiens
ttatactaatagtttgtatcttgtaatattcagtcagtaaatgagcagcttggtagggatcatttacacattttcccaaaagggtagtaggtgtttttcaggatatttatattgaaggtataggaatggaatctggttgcacataaatgcactccttaatgtattgattattcataagagaggaacaagaagataaagattgggctatagcatgaggtctaggcgatagcacaagttctagacaaatattcacaatctttaagtttatcacgtgctattgatctgtctaggtatgctcaaaatggtctacactgaaaaaaa

SEQ ID NO: 202532 - DNA, 618 bp, Homo sapiens
ctttcatagtaatctatgttagtaattcattttaaataaaatagatgtttcttagcatatgcaaaacataaaagcagagaaaatgtaattgtgtaaaggcagagttaaatatttaaaatttaaaagcacagaaacttaatttgattgaatcatcaactcagtcctcctagttattcatagattgtgagggaaaggggttttttctacgttctcaaacatggatgtgagggccatctggctgcaacacctgtcaccccattgatcggcagagttgattccgctgatctggctggctacgcaggtgtccccttcctccttcactgctccatgtgcatccctcctgaaccagcagctgggtcaaagaggacgaccatcccgtagaggagggccgtccctcagtcaagggcatacgagtagctgccctcccctgctagaacctccagacaagctctcaagttctcagacacctttgcaattggaaagactaattctaaaagaaaggaaatgtttccatctctacagaaaagccaaagctgtttaaaaattttttttcaagtgaatataggcacttaatggaaactttctaacttactggtataactgtgtctcaaacaaaca

SEQ ID NO: 202533 - DNA, 250 bp, Homo sapiens
gacataaaaagcaactaccaaggactcttaaaagtgagcaataacagatggattgaaagcaaaatcaaaataccaatagtgatctgtaacaggggtgggtttaatgggcttttttttctaacccatggtgtgcaaaatttctactttttctagctagagaaccaggaatgtggcctctgtaagatggatcatatatagagaaataatccttttgtttttcgttttcccactcagctctacctggaagcca

SEQ ID NO: 202534 - DNA, 558 bp, Homo sapiens
agctttcaccattttaccagaatctgtaggatttagatgatggtcattttattctgttgacagtatggagcactttgcagatggatatcaggttaattgttatattgaaaagtgaaggagtacattctactaacagtctttctgctgagaaaaatctaattattgccattaaggtggcattaagttagtaaattgggtaaataaacagttaaaatccccaaatttcttataacatgccataattgctttgcttgaaaatagttatcggccaggcgcagtggctcacacctgtaatccctgccatttgggaggctgaggcgggaggatcacctgaggtcaggagttcgagacctgcctggccaacatggtgaaaccctgtctctactaaaaacacaaaacttaggtgggtgtggtggcttatgcctgtgatcccagctacttgggaggctgaggcaggagaattgcttgaacctgggaggcggaggttgcagtgagctgagatcatgccactgcactccagcctgggcgacagagtgagacgctgtttcaaaaaaaaaa

SEQ ID NO: 202535 - DNA, 567 bp, Homo sapiens
  misc_feature (1)..(1): n is a, c, g, or t
nggcttgatgccctgcgctctagagaccctgaggcgaagcaatcaggatccccgggtgctgaggtggaggtaagggatgtttcaggcacaggcaagcttccactctacacattatctgtgggatcaagtcatcacacaagcatcattcactttaaccaggctgctgcaaatgcctctttttcattccgcctcaatctcttgcattagactttgacctccttaaagaccagaacccctgtggggtttatctcttaatctctcatttccatcacaggacatggtacagagattatagctgctcaatgtttgtttcaaataaacttggacatttacagagcacttcctggtataccaagcactatttaagccctttccgggcatcatgtctcattatcctcacaataatcctaagagatcagtggtatccccattttacagataaggaaattatccctattttatagataaggaaaatgaggctcagtgattaacaaacccaaacttaaatagctagtgagttcagaagctgggatctacaaagcccattttatggcaaaagacttagta

SEQ ID NO: 202536 - DNA, 533 bp, Homo sapiens
caaccataatgatactccccttcaccaccaggatacatgatacgatccttaacttggggtagaaggcactgccagttcagccctgcctccctccctggctctgcacaccaccacagccactctggccctcttgcagttttgcccccatttttattccttgcctttgggcttcatgttagctgtcccttctccagaactaacttactttgcctcaataattcctatttgtctttcagaaagaaatctctaaatcaggctcctctttgtaataccttttttttttttctttttttgagacagtctcactctgtcacccagggtggagtgcagtggcatgatcttgactcactgcaacctccacctcccgggttcaagcaattctcatggctcagcctcccgagtagctgggattacaggcatacaccaccacacctggctaatttttgtagttttagtagagatggggtttccccatattggtcaggctggtctcaaactcctgacctcaggtgatccacccacctcggcctccc

SEQ ID NO: 202537 - DNA, 502 bp, Homo sapiens
atttatacatgataacccccatatgtaggagtgtgtttcctagatttatgctacgcttaactataaaataatgatttgggggtcacacataaaaattattcgtatctttcccagaaattgcacttcaatagaattaaaatacagaatcaaaggactttaggagggcatccaatacaacttcaatatcatgcttcaacatgctctttgttactgtaataaattgttggcctctagatctatagtttgactccagtttatcctgaaatccctatagacttaaaagtggcaaagaggaaaattttacccaaagaatgaatataagtaatattcataattggtgcggtttctttcaactctattcagtgtttttatccctgtgcataagtccttaaaaatatcgcatcggctttgtccttacatggtgaatactactctctgattagcaactacagtggctgctgtttgttggacttactcttcccttggaaatacaggagtgtga

SEQ ID NO: 202538 - DNA, 389 bp, Homo sapiens
gtaaattaagcaaatggtattagtactactgtgaagatataaaactctaataagcctactaaggctggatctagaaactcaaaggtaccaggaggattttgagggggaaggcatagaaattgagaattagaaatagataaaaattacatcactaaagaaaaaataaggataagaaaaatcttaaatatttaaagtacaaaagtgaaagccaacagatctttttttctcccccagctctgggtatattgtgtcaggggatatagtgctttagtgtcaggataagctttactgtagatctgggaaaggaaactagtatttaccacactgtgctgtgtattttcacatacgttatcccaagtgatcatctcactaagccaagtagaaatgaa

SEQ ID NO: 202539 - DNA, 574 bp, Homo sapiens
ttaaaagaacaataatagagtattataagcaactttttgcaataaatgcaacaagttaaatgaaatgggtaagttccttcgaaaacttatcaggcatgtgaagagacggaacaatacaaccatatgaccaataaccaacagaaaaacaaacaagataaacagaccaatagatgatgccgatattggaaaagacaagcatttaaataactataattagtatgttcaagagaactggagtctattacaagtctataaaacaacatcaaaggaatactctagaactcaaaaccacaatgtaaaattaagaacacaaaagattattttgacaaaaagagaagatagttttggcatactggaaggcaggtcgatagaaaatatccaaacagagaaaaaaatttttttcaacatgtggaacatgataattaagtttaatatatgtgtaattaggatccaaaaagaaaaaaggggcagaatatatgaaaaggtggtaacagaactttccaaaactaaaaggcatccagctagattcaaaaaactctataaacataaagcaacaaagaaaaccacatctgaa

SEQ ID NO: 202540 - DNA, 608 bp, Homo sapiens
agattatcatgcagtgataatctacatgaggtaagtgttggttgaatatatagtggaaaatatgtttgaatgtgtgaggtagtttcagattataaagttttaaagtaagccaaagagtttggagttaatagggagctattttctgttctgaagcaggggaaggcaattggaaagtggtattttaagaacatttatttgatatcaaagagtaaaacagtttagagtgaaagataagaaaggttatcttggggaatatggtgataatcattcggtagcaatgaggtgataaaattctcagctagggcaataagtaatgagaattgagactcattggcaacttgacaaacctactaaagaacctgggaaaatggaaaaacagcaatgccactttctgaaatggtctttaaaaagggctacccagtttatgttggaaaaggagttcaattgggatatactgaattagaagtgtcagtgttgggaaacagagtctgagttagaggtcagggtttaaaaataaggtataatgtttgataatgcagattttataattacctgattccctgaaaatggaggagctcatcaaataagtaattataaagtgaaagaaa

SEQ ID NO: 202541 - DNA, 123 bp, Homo sapiens
aaggatcttaaaggctcacaagatttagacctcaaaccatgcttggagaatcatcaccctagagcagtctcaccatcctgccaggtgaggaagtggccaggtgtggcagaagccccgtccccc

SEQ ID NO: 202542 - DNA, 372 bp, Homo sapiens
ctatttatatagcatatgcattgtattaggtttataaataatctagagatgatttaaagcataagggagtatatgtataggttatatgtaaatactacaccattttatatgagggacttgagcatcctcagatcttggtgtctgtgggaggtcctggaaccaaacactaatagatatgaatgatgactgtaatttcaattagtagagatgaagctttctcaaaagaaaactcttgtattttttttagtatgtttgccccagataaagcacctcacccctgaagaggaaaacagggaggatgggagcagcagaatttaggggaaatgggtttggggaaataggttaggggtactgtgtgaagtacaggacact

SEQ ID NO: 202543 - DNA, 438 bp, Homo sapiens
tatttcctttcctggtgtgttggagaattacagctatgattatagaactcattgtttttgtgttgccagtaaaaataagactagccagggaagcagaaaaggtgtgtagatggtataacagagacacaaccgtgtctgaggaaagaagccctttctctatgtgccccatccctcccttaggaagcatttaaggaaaaggcttgtttttcatttcaggggaggtttaggccaagagagtggttgagtaaacacactgctgtgagagaatgcctggtacttaaatgcccaatagtttgttgtgtgtttcagtttaaagatggagatgatggggaggattgggaggtgacatttggtgtttgattccttaatattatcgttttagtcaaaggtaaattgttggctttgatggaaacctttgtgtatttaaatgcacagttc

SEQ ID NO: 202544 - DNA, 285 bp, Homo sapiens
ctgatttttgaaaaattttatccaagtaggcttcaaagttttatcacacattcatagtataagacacactaatgaggtatgggacatggtatatgatatatgcaagagtaattatttctcctatttaaagctaacttttttttaaccaacctgtgttgaataaaatcaggtagctaacgactggataactttgaaaaatccatctctttctttttcataaattttaaaaacccttaagataaacataatatatttcttctaaataactggcttagctctcaaaaa

SEQ ID NO: 202545 - DNA, 351 bp, Homo sapiens
ggtggtggaggtggtggcagcggtagcccccataatacttctaggtggaagaacagaccacctgagtgagagaaatcactcctgagccctgggggagaactgtgtggaggggcagatgggagcctggagttttgagggaaaaaaaactttccttttggaagccagacgtagggaagaagcatattgatcacaatgactattaaagaaagctccccaacaccccagcaaaacacccacaaaacaagaaactacttctgccaatggttctagccagttttcttcaccacagttcatgactgcttcatccttttaggtgatcacacccaaacttttgggtcttcctgccttttt

SEQ ID NO: 202546 - DNA, 344 bp, Homo sapiens
ttcaacataacttccatggtttcagtcttgccatacttttcaaagtagtctcaaattatattcttctgtatcttctttaataccaccaaggaaatttttcttcactggaagatgggcatcaggctttatcgactcctctctagaaagagttatctttggttccaatagacacccaccaacctgtgtggttgagcacatgttgttgcatccacctcttcaacacaagagtaagtcacaaaaccaaaccccctggaacgttttctttgggggtgtctcattaccatacaatctgtgagtgtgcccatttttccaaatgttctcttaaactatcatctgtcgtttca

SEQ ID NO: 202547 - DNA, 132 bp, Homo sapiens
tgctgggatgacaggggtgagctaccgcacccggcccttgaaggcattttagcacttgacttccaccacagccccaaggaatccatctatcatgactcgcacgcacccagtgagaagaaccaagacatacga

SEQ ID NO: 202548 - DNA, 609 bp, Homo sapiens
gtaagagagtatcacctgtagtgtcaatatgtattaccctgccctgaactgataacatggaacacacattagctccaagtttttggcagagatgctgtcctttaactctttgttattcaatcctcatcaaatccttctttcctttttctaattgcactccttttatactcccgtatcaaatccttcaatgtaaactgttaattctatttctaaaatatattgcaaattcagccacttctttttctcttctgtgaaatcaggcctggccatctccatcatctttgtttaggtctttcttttcagctggttacattactttcaagtctgtctctcctctactccgtaactgaaaaactatattttttttctatggaaattccatcacatagctccaagtttttggcagagatgctgtcctttaactctttgttattcaatcctcatcaaatccttctttcctttttctaattgcactccttttatactcccgtatcaaatccttcaatgtaaactgttaattctatttctaaaatatattgcaaattcagccacttctttttctcttctgtgaaatcaggcctggccaccacctttatgataaacggggga

SEQ ID NO: 202549 - DNA, 611 bp, Homo sapiens
ctcccaaaatgttgggattacagggacaagccactgcacctggccaaggattgttttttaagtgaactgagacccagccttattagtggtcccagagcagacctgggacctgaagggaacccttttcttctggtccagcgtctttcctctgatgggctactttcctggagcctttgattgcctgtcatcagagtaactgagtttgaacagagtaggtagttcctctccagaccaccacactcaccagctttcattctgcttctctcgtttagactgtggttctgaatcctcagttctatttactgagtgtttttaaacataaaaatgccttttaatgagattgaaggccagaggtgggacagttgaggacaaagtagaaataaaaccttcaaggcggggttgttggtgggagtctttttttgtttgtttgttttttgagactgagtctcgctctgtcacccaggctggagtgcagtggcacaatctcagctcactgcaacctccgcctcccgagttcaagctattctcctgcctcagcctccttagtagctgggatttcaggctcccgccaccatgcccagctaatttttgtatttttggtagaaacgggg

SEQ ID NO: 202550 - DNA, 567 bp, Homo sapiens
aaaatggcctttgtcacaggccactaggaagtgagatggagttagcatagcatggatcctctctggaagggagcttccagccctaagggatggctgggatttatgagggtgcttcagaagccggtatccacaaatgaatgaatgaaagttttacttataacttcactgaaacacagcttttgcttattctagtttaggaaccatgagtgatattttgggaaaccttttatggatttacgaaatgatccctggctgggcacggtggctcacgcctgtaatcccagcactttgggaggccgaggcaggcggatcacgaggtcaggagttcgagactagcctaacaaacacggtgaaaccccgtctctactaaaaatacaaaaaattagccaggcgtggtggtgggtacctgtaatcccagctactcgggaggctgaagcaggagaatggcgtgaacccgggaggcggagcttgcagtgagccgagattgcgccactgcactccagcctgggcgacagagcgagactccgtctcaaaaaaaaaataaataaagtaaaataaaataaagga

SEQ ID NO: 202551 - DNA, 107 bp, Homo sapiens
tctccttccctgtccctgcaccctcaactccatttatacgctatgaggtttcctgctaccatccgcgaagacccttgtcaacacagccggtgcaccagggtaccgag

SEQ ID NO: 202552 - DNA, 620 bp, Homo sapiens
atttattgttagtctcaccaatgagtaactccacacagcatctttgatcagtaacataatcctaaaataaatactggtacttcaggggaaaaaaaagacaatgtttttaaacaatctttcactccatctccaagaacatattatcacaaaaagcagactgtttttctccaacttatattaacataagcagccaaaaagactgataatgttaaagcacagctatctcctttaagatacatcctgaataggctttatctcagaggcacattttctaaataattttcacagaatatactgaatttccaaaatataattttataccaattaagttaaaaaacagaacaatgcttcatatagtttatgaagtaaaagtatgcaaagaatatacactagcttcttaatagcgggctatcaatacaggaggcctgggggcagcaaagggaataggatggaaaaaagtattaaatatggctgcaattcggcaaggtgtggtggctcacacctgtaatcccaacactttgggaagccaaggcaggtggattgtctgagtccaggagttcaagaccagcctgggcaacatggtgaaaccctgtctctactaaaaatactatttttaaaac

SEQ ID NO: 202553 - DNA, 612 bp, Homo sapiens
gggctgggagatacaaagggaagatgtaatctgtgaaggtcgtagaggccaattagggattgaaatcccacggatatgggttgtcgtacacccacttcacaccagttgctcttattctacaccatcatttcacataagcctcccacaaatggcaagtggaatggcatgattctccttattgcaagatgaggctatctggaaggatccaatgacttccccagtgagtagggggctgccccgggctttgcacccaggcttttgtctccaagcgaagagttgtcactcactgcacaggaagcagcaggagaataaccaagtcacggtctaaagttgggacacccaactgagtttcagatttctgcctgcaccaatgacacaggaattcagaataagggcgagatccttgtgggttcgtgtgatggtggcatggcgattcatgcttgattgagaagacaaaacgtgaacactttaagggcttcttgcacaagtgaagtggttgtggaaatgttttcaaggaggaaatgcctttttaatagagaaatttacttggctagttagcagaagttttctttcttgggttaaaagtagttgctgctattatatcctgaagca

SEQ ID NO: 202554 - DNA, 351 bp, Homo sapiens
ctgaactatagtttcttcatctgtaatatgaagacagtaatacttctggagtttcttttagaagattcatggagtaatacatgtagagcgtcaagcataatatggtatatgggagacaagatttggctattttatgtcttgtaattatttaaatatgcccaacctgtgtataaaaatgatttagatggcttacagtaagatatacttttataagtagaacaattatgccccctgcagtcctaaatgaaggcgaagtgcttttttttttttttttaatctggtgcacattaataccaactatgtgcaggaacccaggtactggaaattcaagaaaaagacatagtccctgcc

SEQ ID NO: 202555 - DNA, 1033 bp, Homo sapiens
cggcccacaacatggcctcgaccatcaagcaccaggacctgcacctctgccgtcttcgccagccgcttgggaaaggcttttcttctctttaatacaggaatattttaattccttgtaaggaaaatttcctggataattccatgtattttaataatcacagagatagtcttattcttactcattcattaccaaaaataaagacttcagtaacaatttatactccatagagtatacgatctcatctattttgacatccaaaaaaaaaaaggcagaaagacaaaacgcaaattctgaggcagaaattaagaaaatataattcttattttttatttaatttattgtttgttccgctgtttgaatgtttatcttccaggagcctacagaagtgagggaaagtatctgcaggctaattttaaataacacgagacagagattaaacattaaatataaaaaaaaaaccttttagcttacttattaaactaggaagaattttccttaaacacatcactcaaattggtctgcaatgcatcaataaatggagaaaatagatctcacctaggaaatattttatacattgtggacactacaaaaaagctcatcagaatataaaaatttccaagtcacaatcccctaagcagactaaaaacaagttagcgtttaacctgaaatcagaagtgcaaactctgtaaaaataaaaatattgccattgttctcagcaatctatgaataaatcctacaactccttaaagtcttttcaataaaatgaaccatgatctcttgacaaactccttgcttaaatggcaggtaacttttgaagctggacttctcaatctgtcaagagaagcaagctgcattggcagcattgctcgcttttgaaaatcaccttctgaacagaaggtccagcaaagaccttcaatgcaacactccctgtatatgtgcaagtctgcatgagacgtcctcccgcaggtgcaactcccagccaatgaaccagaaacagatgaaagacaaaaggggaagcgagtccatgtttcag

SEQ ID NO: 202556 - DNA, 380 bp, Homo sapiens
tgactctggaggcaactctgaggaggccctaggggacacagtgtgactggacaaaagttaccaggatgcccgtggcattgcctggaggaaagctgctcatccagaacagtagctctggagtctgcaggagaaagccacagaccacaaaatattaaaccactgagttttggtgggcggggtgggagcaaaggggggtgtgtaatgtgttaccgcagcatagcctagccttcctcaactaatatagctgcataaaggaaggtgtaacgggtgccccttcatcatcttagccagaccaaactgttgctccactccattgttctatattacatagagccaatatcaactttataccagatctgtggctcccaaacctggctcat

SEQ ID NO: 202557 - DNA, 248 bp, Homo sapiens
caaaacgaaagaaatccctgctcaaaaaagttgacgttacttcgagattaactcccaggtttgcaaaatctggtaaaaatctttccatctggtgtacttccttcgcctcgccgccacccccaactccagaaaagcagcacaaggctccttgtctccctccgaggcggctgcgacggcggaaacctgatccgagcctgactttcagtaaacaccagcgcagagagcaataaagcatccggaacatttgt

SEQ ID NO: 202558 - DNA, 399 bp, Homo sapiens
aacttagctgggtgtggtggcgcatgcctgtaattccagctattcaggacgctgaagcagaagaatcacttgaacctggcagacagaggttgcagtgagccaagatcgtgccactgcactctagcctgacaacagagcgagactctgtctcaaaaaaaaaaaaaaaaaaattgtgatattactactcttattacatggttgaattcactgataggtacttcttgatttttacccaggagttaggcctttatttttgttcattttttaatctttgtacgtaagaaccaaagtgacaatgttatagtcctccatttagtttatctcagggctagttgtgaaattctaataaagtagctaaagtttcacaaaacaattttttgactcaattcagaagtttca

SEQ ID NO: 202559 - DNA, 465 bp, Homo sapiens
tgtaaagcataggaattcctctttcaaaataatagaataaccacagatttgttagaatctattctctaaagatagctttcatttaaaagagatagatctgccagttacatgctaattttctgtttcttcagactgtcaaaatcattcctttacacaactgcacatgccatgtagctaaataatggccaaggagataacatcacaagtgttttgtgattcccagaattctcagaggaaaatggatatgcctactttttaccctcatttttcctactgtctactagtagatgtgatggctcaattttgaggcaccattttgtaccatgaggtgacatactaagaatggcgaagcagcaagataaggatcctgatgactcagacaacagattagtcctggattacgcatctctaggctactttcacatgaaagagaaataaactctatgttattgtatttgtcttcta

SEQ ID NO: 202560 - DNA, 516 bp, Homo sapiens
aataatgctgccccatctgagatagaaccttcttttgttatgtactgggcacttaaagaaaaaaagtacaactctgtaatggcaaaagaaaggtgcaaaaaaatgcaggatagaagcagggccttgagaatatatctgggagttggaggaagaaggtgggaaaaaggctgagacaatgtacagcatgggctctgcagactgggcagggagaacataacaaccagtaggcaagataaggaatacagttaaatgaatcaatgagtgagtaaatgaatgaatgaaccaacataggaaccaatgaacatacaaataaaatgaatgaataagtgaatgagtgggcatataaatgaatgaagttgctgaatggtaggctggaactaagatgcagacagtcctaaatgtcatgtaatgagtctgaattcatccaaaaaagcagaatgagaaagacatttcttagacttctgcagagcacagtctgcccaactgtatgcacagacctaactaaaagcaatgaga

SEQ ID NO: 202561 - DNA, 319 bp, Homo sapiens
gccgatgagactctgcagtctgcaggaacaaaatggcggcacccattgatttagtttagttcaaatgtgcacatagaggcattacctctctctagagtgtaagctctttggggacagggtggcttttctcccttagaattcccttcgattgtataacgtctgcatgcatagtcagctcaaagactgtggaatgtagctgaatttcgaatttgcttatagccagccaagccatattaaatttccccagtatatagagagctgagaacacacactgagctcggggcctgaacctcttattgcaggcattggtctgaggggc

SEQ ID NO: 202562 - DNA, 442 bp, Homo sapiens
agcagtggtgcccatagcctcagagcagatgcagcaccccaccagagacctcaggctccctgtacaccagagtaattactccctctagaaccacaactgagacagtgcactgctcccagaggacctcacacctcatgcacactgagcagtcacattctttgaccctacagctgaaggagtcccatgctctccacccaaggacatcaggcctccagcacactggagcagttgtacctctcagcacgacagctgatacaatgccccacccttagtgatccgaaggctacattgacctatgtagccactttctgaggctgagcagacaaagcggcttaaatcccattaaatcagaaccttggctgagttgagccaccctgccctccaggccatacatccagagcatttcacccgcctggaattcaagcagcaccccgtggtctga

SEQ ID NO: 202563 - DNA, 116 bp, Homo sapiens
agttgggaattccaacacccagataaatagtaattagagaacatatatgtccctgtgattacatacaatatatgcattgtacatgtggattacatacaatatatgcattgtacatg

SEQ ID NO: 202564 - DNA, 399 bp, Homo sapiens
ggcctcagggagctttcgctcatggcggaaggtgaagcgggagcaggcacgtcacccactgagagcaggagcgagaaagagagggagacggaaggtgccacacacttttaaacaaccagatctcgggcgaactgattcactatcttaaggatgcaccaagaggatgatgctaaactactcatgagaaatccaccctgtgatcccatcgcctcccaccgagccccacccctaatactgggattacatctcaacatgagatttggcaggacgaatatccaaaccacatcactaaccactcacgagcctagatggaaaccgtgagcacgtcaggtttattccaggaatacaagatgggttaacgtttggaaattaaccagtataattcatcacgttaacaag

SEQ ID NO: 202565 - DNA, 553 bp, Homo sapiens
tgcctcggcctcctgataacattaaattcttgtatagactagagggtgtttccaggctgtttattctgtttcattcaaacttagttctataccacactgtttcaaatgctgaagttttcattttgtgttttaaaatctggtagtacaaatcatcttcattattattatttcccaaaatatttttggctactatgtctgacatatcttgtatagcccagaggaaatttagaagcatttcacgctaaaaaaaaaaaaaaaaaaaatggggtttttttttaacttgataggccatttgattccgaggagatccgaagatggatttataacgattgggctttgggactccattatggagtctcctcatacaggatgtgtgctatcccattacctctattccaccttccgctagtgggagaccttatacttactttggaggctcttaccggggtcctcgggtctgtggccctgtgggagttttccctctttcctctgtaacctctgtgctgtggccattaaccccttacaggtgtgttcctgtctgtggttgggccca

SEQ ID NO: 202566 - DNA, 206 bp, Homo sapiens
cactctgtgctaagcactctgccaagtgtattcagagcatcaccccagaaattccacatgcttaccttgtgaggggtcattatccccatctcagaagtgaggaaacaggttcagtgaggtgaagtaacccaaggtcacagtgctggaacctcagggtctctgactccatagcccatgtgcttggcagccacaaggagggtaggatg

SEQ ID NO: 202567 - DNA, 654 bp, Homo sapiens
atattgctgattgtatattacttaacaaattattagttggtattggcagattattaaccatggcctaatttctatcatgtctaaaataaatcccatgtttggtgaagatagaaaatgaatgagattttgtgtgtgtgtttgtgtgtgtgtgcgtgtgtatgtgtatgtttatgtatgtgatgagattatttccttaagtccccagtctaatagttgttcagaatgtataggaattgcacttctaaaatactcaccacaaccacatcatgcctagcacaatactgttggaatttaaggagactcaagtaacgagacctcccccaccatcaccccaacacccaacaccccacacacaatatctggtacgtttggaatatttcttctctattcttcacttttgcatggaaaggtacttccattagaatattgtcctggtcattgtcctacctcctcactgacctccgttaggcatcttagtctgtttctgttataacaaaatacctgagactgggtaatttataaaataaaggtttatttggcacagggttcctgaagctagtaagtccaagatcaggcagatgcatctggtgagggccccatgctgcatcctaacatggtggatggcatcacttggaaggagtgcatgcaaacaga

SEQ ID NO: 202568 - DNA, 258 bp, Homo sapiens
gaaatcccctcttcttcctccttcaacttctccctctttacctcctctcaaatttgaaatcctacttgatggttacattactctgtctatctaaaggttatttactcctgaaataatacattataatgatattttctttcttgtacaactctatcaccagaaattaataataaactttttcatttgcttagtttttttagttatgaaaaattgaaaaatatcggctgggcatggtggctcacacctgtaatcccagca

SEQ ID NO: 202569 - DNA, 495 bp, Homo sapiens
tcctcctacctcagcctcctaagtagctaggactacaggtgcatgccaccatgcctggcttttattttttattttgtagagataaaaaattcaaagtatgtattaattgtataaacattcacagcaagaagcaaatacagcttcttaataaaaaccgtgtatagtttttgaggttttaaaactagctcttggacagtggccagttatgagtaagtgaaggagaaaggagctttgcctggactgatttggagggttacagagaggtggcaggttaataatgtactttcctatcataggcaaggggaattctaatgccacctggttttaaagtcagaccccccccaaaatgtctgtcacaggtgatgagtccaaatggaaattggctcctttaatacctcataagcaaaccatctaggattattataaagtagaacaaggtaaagccagagaatctctaaaactgaatctttttagtcaacctggattccattgcac

SEQ ID NO: 202570 - DNA, 351 bp, Homo sapiens
gtctgaggatccccaaaagtgcactcttctatatctactgtgttgttagattgccttaaggccaccaagtcatagcttactaccataatttgtagagttttcatcaattccagtgaactatatagtgattctttgtaattcttaccagttatcacccacattcttgaaatgctgctttaacatctaacttcaaataatctgttatcttatttctacgttctatcttgttgattattctcaaagagaaatgtagtgcttttgtaccttttctatcaaacttacagagtacataaatctaccaacaagttatgtagatatagaagagtgcacttttcaggatcctctagatca

SEQ ID NO: 202571 - DNA, 636 bp, Homo sapiens
ggaaaaaaaggcaagagggttttattcctgaccaggagaaagagaaggagggggctcttgctctaaagacaccttcaccccgagccatggaaactggggagttgtaaggagataggtgtggggcagggaggtgtgtaagcaggtgcggggtcacggtgtgggggtggagacctctagacgctcaggcccaggtcataaacatgcctgagacatgtcctccagagttgacttacgcgaggacagaggtgtgcagaggcacggcaagctgggccccaggcgagaagcatggagtgagggatgtggaggcagcggaaggcatctgggagtctgggctgccccgtagcagctctgtgttctgcctgctcttcctccaagatgagctcccttggccagtgtgtgaaacgtgtgtgtgagtgtgtcaccggtaagctgagttctttccctacttggtatcagttgcaaagaaagaacactcagttggaaaaaaaggcaagagggttttattcctgaccaggagaaagagaaggagggggctcttgctctaaagacaccttcaccccgagccatggaaactggggagttgtaaggagataggtgtggggcagggaggtgtgtaagcaggtgtggggtcacggt

SEQ ID NO: 202572 - DNA, 461 bp, Homo sapiens
ggccgctggcttccagaactactgatgtaccattatgtacgcgtcagaagagcctggtcacagttcatggagagccactggagctctctgcgtgtggtggaaacagtgaaggtggtattttaggaagtttgggcaaagctgttggcgacgatttggaggagagagtctggagccagaaggtcagatgtgaagggacaaaagcctgtcctaagatgacaatgacaccaataggaatagggagatgagtgcccaccattcctcaaggaaaaacaggagtcaggactagcactgactggggtggaagggggacagtaatgccttcaggctgtaggaccgaagcaaagggagactcaagaacctagggccagggataaaactgtaaaagttaggaaaggagtggacagtatgtttctggtgatagcagcatagtttctcttgcagataaaagctaccaaccttag

SEQ ID NO: 202573 - DNA, 712 bp, Homo sapiens
cagaggttgcagtaagccgagatcgccccactgcactccagcctgggtgacagagagagactctgtctcaggaaaaaaaaaaaaaagaacattgagaacattgctagttggtccctatcaatttggctttctggattattttcatcagtgctctttaatagaactttctatgatgatggaaatgttctgtaatctgtgctaatacaacactagccacatatagctattgtagtacttgaaatgtggcgattgtgactgaggaactgaattttaaattttatttaattaatataaattcagttagccgcacatggctagtggttaccatattagacaacatagacctgcattattttggttaggaacaaaatatatcaagtgtttttaatctaacagttttaatcaacttgaggatctctaaaagctgtttacgtaataatgacaaaatgagatgatggaaaatcattggagggcccatgattgcaggtactgtgagtacagagatgttaacatctagaaatttttatagtctgaatacttacttattttaataggaatgttatagaagtgatataggtcaaaataaaaaataaaacagtgaaataatacattcaactgtaccaatgtttttttacttccccaggccagacactgtgttaagctttaagcagagatggcagtatttggcagctaaatagtgccctttgtaccc

SEQ ID NO: 202574 - DNA, 257 bp, Homo sapiens
gccttcactacatggtggccccaagttgtggtcatggaggggggctggtcactttcctggtggtgaggacacttaaggcaggcagatcccaatggcgaccaggccctgtgtgggcactctgcatatttataccttgcgagcctcaccttgtctgctgccattggatcacttcactttatggatgcacacctgtccctagagatggccacggacttccttgtatcacacagctagtgagtagcagccctgccactccc

SEQ ID NO: 202575 - DNA, 1170 bp, Homo sapiens
agcgcacgagcggttcaaaagtatacagaaaaaaagcaagcctccctcccactcttgccaaataagtacccaattgccctctctgtaggcaaccaataatttcaacttgtgcatcttactagtttcctatgcataaacacgcatacacgtatttggtttttttcaattaaacatatgagatgacatcatatatactgatttgcacttgcttttctccccctcatgcaatagtattttgaccatcatttcatatcagcacatatgagagcaacctcatttttgtctccaatggttgcacagatttacattgcctggatgtatcaaattatttaaccaggaacatttcacttctagtctttcactgttaaacaatgctggggaaaaaaaaaaccccttctatatgtgtcaatggacacataagcaagagtactcttaaatacacctagaatatgaagtgctaggtcaaaaaatatgtgcacttttctattaagtaaaagctaaatctctctccacccagataagccattaataattgcaatttcttccctaaatgctccccttgctttctcattctaagtgaaacccagctctcccctgaatatactgcttcctcaaagtcttcccacattccatgttcaaataggcctggaagtaaattcagtgtgcttactatacatagcttcttcgtcatttttctctcttctccctgaaacctcccagctcaaaatctcctgtaacatataccacccaatatgtgtccttgatgctcctctaccaacccacgagttcttggaaattctaactttcagctcactgtcattttcttaaaaattattccttgcctaattgttaattattttaataactatatatagatgattaatatcctggtctatcagttttcttgacttcctcttctccaaagatcttttattctgcccacttccacttcacacaaccatgaccacaccctaaacactttttcattaccaataacttcactccctccttcaccttatgacataacactttctgacaactacttccattctttccagttgattccttgtctccaacaatccttcaaggccattgtgatctaaaaatctatggaacctacacccactgctaaattgaccgctcgtgcagcatggggatactctaggaagt

SEQ ID NO: 202576 - DNA, 609 bp, Homo sapiens
cttgtctttctttcctcctttccttcctccctcccttctctttctttctctctctttcttttctttctttctttcttctttttggaaatgggagtctcactctgtgcccagacggaatgcagggcacaatctctgctcactccaacctccacctcccagctcaaaatctcctgtaacatataccacccaatatgtgtccttgatgctcctctaccaacccacgagttcttggaaattctaactttcagctcactgtcattttcttaaaaattattccttgcctaattgttaattattttaataactatatatagatgattaatatcctggtctatcagttttcttgacttcctcttctccaaagatcttttattctgcccacttccacttcacacaaccatgaccacaccctaaacactttttcattaccaataacttcactccctccttcaccttatgacataacactttctgacaactacttccattctttccagttgattccttgtctccaacaatccttcaaggccattgtgatctaaaaatctatggaacctacacccactgctaaattgaccgctcgtgcagcatggggatactctaggaagt

SEQ ID NO: 202577 - DNA, 208 bp, Homo sapiens
cacaaccatgaccacaccctaaacactttttcattaccaataacttcactccctccttcaccttatgacataacactttctgacaactacttccattctttccagttgattccttgtctccaacaatccttcaaggccattgtgatctaaaaatctatggaacctacacccactgctcctcactctgttatgtatttactttcttctt

SEQ ID NO: 202578 - DNA, 499 bp, Homo sapiens
aatgaatgggtctttaaaaaaaaaatcagcatggaaaagaggcctgcatagagagtggaggcagcaactgtctagttcagaggagcacagtagatacttaaacctgtgtgaagcacagctgtagatcagatcctggttcaacaacaaattcttaaaacttttttggggttaaattggagaaatttcaatgttcactggatattggactatagaattattgctgatttcttaggtgtatgatggttttgtgggtagacagaaaaatgccattattttaggagatacatggtgagttatttagataagctgtgccttgatgtctgcaacttaaaaatggcttaacaaccaacataatagattgatagatacatacatacataggaatagttaacagagagaagacaaatcaaattatttaaactaggtgatcagtatagggttatccactgtcctatttgaacttttctttgcatgaggaaaggttcataattgacagttc

SEQ ID NO: 202579 - DNA, 435 bp, Homo sapiens
agatagggctttttctgggatgtggtagatgctaaaacttggagagttaagtttcagttctacttctcccatctaactacctgtctaaccatgagaactagttgcttaacctttcctgttctcaattgcctttcctctaaagtgaagagttctactgagacaatttgcaacttttggtataatatacttgttttgcacatcatcaaacacaatggcaactatttggttatctcttaacattagggaatagaaaatcttagggtgttagatattggtatacatgattagaaactatagttcttctgactcataagcctatatttagagagatttgatgttctgttggaaggtgcaataaaggttttacaaattaccttttcagcatatctaaacagcatatcattgcttactcctctaccacttggtacacagtga

SEQ ID NO: 202580 - DNA, 557 bp, Homo sapiens
tgatgcagaagaagatacaggtgccagaatccagctcattggcagcaccaaggctttgagactgaccactaagaagactaataagagaggcttctcgggcaaatctcttcattagcaattttcataaagtaattcatctaatcccacaagttatacagaaatggcagtaagaaaaacaaaaagacactgaacacatcaaaacaattcaatgcaacaggaacttaacagtattgagtaagaaatctgggcgactaatttaatgagtaaaatagttgggaaaacaaaccctcccatcccttgtagattataaataaaagcaaaaccgccacagaactagaggtcttcttctttaatgttactttaaaattgctatgattgtattgtacgttatttaatgtctgattgaaacacaaatttacatgcatgtttgttacaaaaaaaatgaaaaaaaaagtcacaatttgtcagctctgatttcaaattgcaattatttttaaggtgtataccatcgaagagaatgggtatttttttgtatgtattctggaagaaaacaacaa

SEQ ID NO: 202581 - DNA, 325 bp, Homo sapiens
cgaagcaaatataaaccaagcaagataaaatccactcatgttgactatcatagtattgagatccaggaatccatgctgtctgtagttaaagcagattatcttcactgccatctattggtctttatcctgaattaggagagaaatcccccgaggttctgcatggcaaataaagagttaggaaagccaaaatatcagtgggtatcataagtgatttactctagataaatcactgaatcatagtgacaagcccttaggagctctgccttagaatttcccaagggtttcgtagatgatcctgcagcaaagaatgaattccagggtgtca

SEQ ID NO: 202582 - DNA, 434 bp, Homo sapiens
catcattctcaagttcttgttttcctcacctctgacatcaaactggtcatcaataccttttgatttgtggtggaaatgttgtatgaatacatctcattctgggtaatatcatcttctggcttatttcatatctttggcatgtggactactgcactagcctcctaattagcttctatcattctagttttcttctatcaaaccaattttcagggttattgcctggattctctttctacaacaaaaatctaatcatgtgattctcactgccttaaacatttagggatctatattatatgtgggataaatcctaaaattctcaatatatcctctaacatccttcaaattctagactgaagccccacatctggctcccattgttcctccaacaaaccaggggatgagcacaggtttattctttaagaaacatgtgatgc

SEQ ID NO: 202583 - DNA, 297 bp, Homo sapiens
aaaatatgagagtatattacaagtaataagggtaagtattcttgtgcattctttgaaacagagtctctagtgctacaagttaaaggtagttcttccttaagtgttgtaaaaaaattctttggagcactgcactgctacttttcttcttcctcctttataagaaagtttcttagaggcaggcatagtggctcacatctgcaatcccagctactcaggatggccgaagcaggaggataacttcagcctgggcaacacagcaagactccatctcaagaaaatttattctttaagacccag

SEQ ID NO: 202584 - DNA, 793 bp, Homo sapiens
tgtgcaatgcttgaagatagttttgccttctggaaatctagggccaacggtttgcacaggcagctgccttgctcaaatgcaggaaacttgagttcctttctcaccagaatgttctttttgcagattctgccggggccacccacagtgtgtggctaaccctgatagctgtcctgtgtcccagcgggagtgtgtgttattcctgactcaagggcagggcagagacctactgcctagacctgagcccaggtctgggctgctatctagtacaagcagatggtgagaggcagagagagcacagggcagctagagagagtgctagaggaaaggagggtgagggcatgcttcttctttgataggttttctgaagactggggaaacagcattttggctgtgatctgaccccacagtggtaaatgttttgactccttctgctacatttagaacactgactacttctgtatgtgcacaacggtgttccaggtcctttagacgcactaatttacccctcacagtcaccctatgcaagagtgctatattttccccactacacagatgggggaagtgaagcacaggaagctaaataacttacctagggagtagcagatatgggacttgaacctacgtactctctggctccaaagcccttgtatctagccatcacattatgttgccttctttatgatttgtagagatggggccttgctctgtcacccaggctggagtacagttgcaggatcgtagcttactgcagccttgaactcctgagctccagcaatcctccagcttcagcctc

SEQ ID NO: 202585 - DNA, 230 bp, Homo sapiens
tgggcagatcacttgaatcctggaggttgaggctgcagtgagcagagattgtgccactgcactccagcctaggcagtgggagtgagatgctgtctcaaaaaacaaaataaaataaaataaaacagcaggaatgacatttgacttaattttattctattgtagaaactgctgaaaatataggatttgcttgtgaacttctgactgaagacaccaccatctctcgatgggga

SEQ ID NO: 202586 - DNA, 300 bp, Homo sapiens
ctgggagtgttgagtaagcaaccaggtacggtgtaatgcttctgcagttgatcacactagagcccgacccaaaaccccaaaccactctccatcctccccagcctcgcagactgctggcttctccaagccatctttccttctctctgtcatcatgcaaaagctgtaactatgtttcagaaacgcaatctgtatttcatagacattaacagatgttctgtcctctgcaacatctaaaagaaccaaacacaaactccctataccaaaatactcccatctcccctaagcacacacagttctact

SEQ ID NO: 202587 - DNA, 451 bp, Homo sapiens
agggattatcttaattaaaacttagaaaataatgacttttggtttaggccagggcctttgttttcttttttgctaccaggtacttgttgcctttagactgaccaaccagatccctgcactggggtatatatcccatctatcttcccacataccatacttggctctctttggatagactctgatattaagtacttgtttctcttctacttgaaagtatctatatttcatggaggatggtgcttcttaacgttctggttgcagggctctaggcctgaagggcttttttggctagtgaagatgggtttcatcatgtttttcaagtcacactttccttcggtggtggtcttgttgccatacccagctgagcttatatctaaccagccctactttcagagagttggcattcaggtgtcttcatataaagtcagttatgctggagtaacagagaaca

SEQ ID NO: 202588 - DNA, 466 bp, Homo sapiens
cctgaatgaagagaaggtagtaaaggaaatcatttagtaatggaaaaaataaacacaagattttagtaggaagaaggtactaaaagccctgttaaaagagtcctgggagcttccttgactggcatttgaaattaatcttatattttcctcataagcagttgttagcatagcagaattttgatttgtttagaagtcaaatgtgatttactaattcaatccctgtggtttgagggagaaaggagtaggtccctattagaactgtgaaatcagtacagtttgctctcataaatgctcatacacaaccctcctcacttcctctttttcttgtggttctttttagtccccaaagtccagcaaccccttttttccccttgaccaatttaaaacaaaccatttgaatggaatcgtagatgattgcaatttagtgtggatttagttgcattgaaaaatgctgtcacatgttgga

SEQ ID NO: 202589 - DNA, 495 bp, Homo sapiens
gtcctcaaatttgctttttgatctgtaaagactaagatatttatcatctagttttacagaaaagtttgcagatcttctggtttaaaagagcaggagatttagtgtcaggcaggtttggattgagcccaagggctgccatttactgattgtatgactttgagcaaggtatttatcttttctaagcctcaatttcctcatctataaaatgggcacacaaatagtatttaccttggagagttaaatgggataatgcatttaatgtgcttaacacagttgcctatcagatgcttaggggctcaaaacattactattgttgttgttgttgttttaccctaaagtaaatgagacaaaatagcaaagctaaatgaggaggaatttttaagttacatcagaaactgtaatagattctaaaatattataattaagaaatttcatacttatttaaaaaggcattttcaatttaacaatttaacaatttaaccctcttataagtta

SEQ ID NO: 202590 - DNA, 367 bp, Homo sapiens
cgacaaggcgaaaaaacccatctctactaaaaatacaaaagtagatgggcgtgatggtggcatgtgcctatggtcggccgctcagaagactgaggtgggaagatccttgatctcctgggctcaggggattctcctgtgtcagcctccccagtagctgggattacaggtgcacatcatcatgaccagttaatttttaaattttctgtagaggcgagatctcactatgttgctcaggttggtcttgaactgctggcctcaagcaatcctactaccttggccttgccatatgcaactccataggtagctttttctatttcgtcacatggttcatcttctgaccttggccttgccatatgcaaggggatcc

SEQ ID NO: 202591 - DNA, 292 bp, Homo sapiens
gcccttgtgcccctgcctgcttttgcccattcccctgggctctggggatgtgtgtgctgaaacctgggcctcagagatggtcagtgagaaggactaggtcattcattgcctctctgggccctcttagctaccacacagaagatggggcccaggccccctgcaggggtcatggacattatgagggaggagagcctgccaccctagtcctgcccgtacctccaacagccctgcctgaccttttggggacctcccccagagcctcttcgcatgccttggtcgcttttacctacat

SEQ ID NO: 202592 - DNA, 437 bp, Homo sapiens
aggagatgtgtcctgtggatggacatggtccacagagttgaagcacagagggtgaagcgggactatctggagacactgccagatcacaaccttgaaaacctggtcaaggagcttcattgaagtttaggctgagagcaatgggagccatggagaggttttcagcccaaatgtgatgggctcagatctggcctttagaaagctggccgcagctacagtgtgaagagtggtcagagggacaggggaggctgcaggaagatcaggcacaggcgctgcagtgatttaggtgagagatgatagagccacagggaagggcagtggggtggagacaaagccagcagatctgagagatgcacagcctttgtggttaactagatttattggtgggagaggcagcatttttgctattcatccagcataaacaggaagatgacttattg

SEQ ID NO: 202593 - DNA, 483 bp, Homo sapiens
gatgattctggcccctggggacatttgtggagacatttttggttgcctcaacctgagggggtcaggggaagtgtgttctactggtatctagtgggtcgagaccaggggtgctgctcaacttcctgcagtgcaaaacacagtgctcacaataaggaattacccagcccagaatgtcaatagtgctaagactgagaaacctgggcctacaactgttttcaatacaaatacaaatgaaaatgagggaggcagtctgaactttacacactggatcaagatccttttcaaaggtggaaataaagcaaccctaaaggaggaactccacctagggtacaagaagagaggaaacgttttgttcctttgtgttccgcatgtcattaggaagtacacatgggtggactattacattacagtgaatcatgaccatgtgttcattctaaacattgttgtatttgttattcctaactttaataaactgtaaaatct

SEQ ID NO: 202594 - DNA, 379 bp, Homo sapiens
tatggaattccttccttaatttccttttcacactgttcatggctggtatacagaaacaactgattttgtgtgttgatcagttgctgcaactttgctgggtttgtttattacctctaatagcttttttgtggattctctgggatttcatatatacggattcacatcttatggaaaaagaattttacttcatttcccaactggatgtcttttatttctttttcttgactaactgctctggttagaacttgcaatacaaggctgcagagtggcatgtttgtcttgttactgaccttaggggaagagttttgttcttcactactgtgtatgatgtcagcttgagggttttcacaaatgccctttatcatgttcaggaggtcct

SEQ ID NO: 202595 - DNA, 237 bp, Homo sapiens
aagtacacagtattatgacagtaagatgtatgttgggggaggaggcagaaacgaatggaaggaataggacggtgaagaaagggacattactaaagttgagcattggtatagtgagtagtaaataaaggtacaaaatattaggtctattctttaatagactgagaagtaccagcttgatctaattgaccaaaaaaaaaaaaaaatgaattaagaaaaaacatttggacgaaaagacca

SEQ ID NO: 202596 - DNA, 299 bp, Homo sapiens
cagagacaagagacagtaagagaaatggcctgtctcctcaccaccacttacctagcaagatgactaaaagttgaaaagcctgacaaaataagtgttggctgagatatgtagcaactgaactgtcataccttgcctgagggagtgtaagttggtaccatcactttggaaagctgtttagcaagatctactcaagcaggggtatccaatctttcggcttccctggggcacaattggaagaggaagaatcatcttgggccacacataaaataatactaacaataatgatagctgatgagcta

SEQ ID NO: 202597 - DNA, 739 bp, Homo sapiens
  misc_feature (647)..(647): n is a, c, g, or t
gatccgaaaccatgaagtgtgaactcggtgccctactccggccatagcttagtgcctccctttgagagtcaggctttggggtatcttttgctgatcatatttgggcacaggtggtgtaaattctactccaaatgaatgccgttttctctcacccattctacagtgagcagccccaaatgtgaacactgtctcttgactatggctgggtgaccctgggcagctggtgaacctcatcaaatttccatttgctcatggggagaaggtggagaatcagatccacaccgatcaagttgtggagatcggtggggtaatacacggagtatccagtgggtgcctggcacacagaaagggctccacaaacccttgccccttctcctcaccatattgccgaagggtaaagggaaaggcatgtctggacctctaagaaatccaaaggcatgagaagacagtaggacgggcacccttgggagcgttttctctcacaaactaaaacaggatgacatgccgaagtgttctgatctagcagtcccagatttcccctcaggcaaaacttccctgagcagaaccatagctttgttgcaaaatagagataagtcacctggcccattaggagtttaaagagtgcttatcctgaaatgtgactgctnacataacgggcctttgtctgtacataactaggatggaaggctttatgattcacttttcattcactgatatgacacacagatactataattaa

SEQ ID NO: 202598 - DNA, 537 bp, Homo sapiens
  misc_feature (45)..(45): n is a, c, g, or t
gctgctccaggattcaggtagactaacatatgcacaaaaatatanaatgtaataaaaaatacaacaattcctttttaagtacctttagaaaaaagcaggcctggaagtttggttccttttcctcccctgttgcaaattctcatggtttggggtttgggtgggtggagagcgcgtgtcatctgcgggttggactgcccacggtgggcgggcgggcctctctactcgaaggtgaccacgtatagattctggttaggtctacctggccaggtagacctttctctgtctttactgccctatgctggacagcgcctagaaggtctggcacagttagaacacagaataaataattgtcatgggaatgaatgcatgaattcattctttctgatttttgtcccccaaaatataaggagaaagccatttaacgcgttggtctaactgagcctcataatcttttctgcaaggaaaagatgtatattcttcaggggaaaaggaagattttgttgttgttaagatgatattacctggtttgagatgctt

SEQ ID NO: 202599 - DNA, 802 bp, Homo sapiens
aaatcggtaaagaggaagtcaaactgtccctgttagctgatgatatgtgattgtatacctagaaaaccctaaagacgtatccaaaaagctcttaaaattggtaaatgaattcagcagagtttcaggatgcaaagacatcatgactgagaacccaaaagtgaatgcaacaaaaaaggttttgcacagcaaaagaaataatcagcaaacagacaacctacagaatgggagactgtcttcacaatctgtacatcagacaaaggactaatattcagaatctacaaagaagccaaacaaatcagcaagaacaaaccaaacaatcccacaaaaaagtgggctaaggacatggatagacagttctcaaaagaaggtatacaaatgtctaacaagcctatggaaaaatgctcaacatcactgattatcagagaaatgcaaatcaaaaccactgtgcaatactacctcactcctgcaagaatggccataatcaaaaataaaaaaataatagatgttgacgtggatgcagtgaaaagggaacagttttacactgttattgggaatggaaactagcgcaaccactatggaaaacagtgtggagattccttaaagaactcaaagtagatctactgtttgatccagcaatcccactactaggtatctacccggaggaaaagaagtcattattcgaaaaagatacttgcacatgcatgtttatagcagcacaattcgcattgcaaaaatatggaactggcccaaatgcccatcagccaatgagtggataaagaaaatgtgtgtgagtgtgtgtgtg

SEQ ID NO: 202600 - DNA, 255 bp, Homo sapiens
tgcagtgcttttagttatcagtggagattgtactgcatatgctatcttcagatttgaaggtcatcccagtacaagaactgaagatgttcaactaatttagctgaagtgataacagctctgaggcaagaagagtataagtctaggttactggatcaagggataggttattagggctctccagagggacagaaccaacagaatatatgtatatataaaaggggctttattagggagaattggctcacgattacaagg

SEQ ID NO: 202601 - DNA, 386 bp, Homo sapiens
cgcaaccttcatgcaaaccagactgaggtcatggcttatgtcttcaaagtctgacagtggtgggcagttggaggggcaacagattcactgctcctcccagggcaacatgagttcctaggcgacctgctgtttaacaacaatttcggcagctgtaaaactagtaatcctttacggtagaataatgctctgtactctagaaaacattttcaaccctttctctcctttgatgctcagaaaaaccctgtaagacagataggtagagtaaaaccctgggataacatgaatttagttaaaacaagatagcctattggctcttatgcttggcccaactcccaattctcaaataaggtcaacttaggttctgttctgctggggtgggggaaagg

SEQ ID NO: 202602 - DNA, 529 bp, Homo sapiens
agctcactgaaacctccaccttccgggttcaagcaattctcatgcctcagcctcccaagtagctgggattataggtgtgcaccaccatgcccagctaagttttgtattctgtagagatgggatttcaccatgttggccaggctggtctcaaactcctgacctcaagtgatctgcccgccttggcctctcaaagtgctggatttacaggcgtgaggcactgtgcccagccacattgagtgttctaagggaagccaaatcttactctcttctgagcctcagtttcccacttgtgactttaagccagggggctctggaaggatggttcttctcttttcaaaggacacaaatttcagaaggcctcctgaaagaacagtgcaacactgattatgaaatgctccattggaaaaagactttccagacagaaactagaatggtgattgccaggaccttgtgggaggggaaaggggagcagttatttaatgagtgtagagtttcagttttgcaagatgaaatgagttccatggatgaa

SEQ ID NO: 202603 - DNA, 311 bp, Homo sapiens
acagctgtataaatctgggcaattattctcctacaccttagtttcctacaaaaaaatgtgcctccttcacaaggttgttgtgggaatcaaatgaatttggatttgcgaagtgctcaaacaatgcctggcacagcatgagcactggccacgggcatatcttctctagggaggagtatctgtgaatgtggttttctgtgaatgtgaagcaaatttaagtaatgaatcattgcttccttttggcagcatggtgcaggaatctaaaatatttttgttaaagtttctttatatttcttcaaagttttgatatcact

SEQ ID NO: 202604 - DNA, 426 bp, Homo sapiens
gattctctcagtttcaccttggggaggaaacacttaggggtctgtggacagaattcaaggagttcgtgaatttagatagaaaataattacccctttacttcctcttactttcactggaagtggaacattttcttccatgatgattggaggtggcaaaccgcagaatcagtgacccccattaccaacagaaatcacatatagttcacagatatcatgcaaagtcttttaagcttaatactcccatgaaatcccaagacttatccaacccatcgctgggacttgttgttgatgtgttatgaagaatcacatctcttaaacgacatcacaactccttaaaaaaaaattctgggctggtcacagtggctcatgcctataatcccagtgactctggaggctggggtgggaggatcactagaggccagtagc

SEQ ID NO: 202605 - DNA, 676 bp, Homo sapiens
ctgtcataccccaatggaatcccatgtgaaggctttggctgtggaaaagcagaaaaccttatagaaaaaaaggatattttaataagctggctaatcctctctagccatacctctttcaaatggattttaaaatcaccatgtaattatagatggagtccaagtcagagcaggaatgtgaaatgcctgcaagatgctccatataggcatactctccaggaggctgtaaaagaagcacagtttcaacttttggagaactttgaaaagcaatatcacagtcagtttttctgtgggttaccacagtctttcaactcatgctaaaggaaggagcattcagccctgactgagaactcatgagttagaaaaactgatatcagaaaccaaaaagcagcaaaatatgtcagagaaagtgacaattcaagccacttgcttcttgtagatatctacaacaaagaaaatatgtttgtggcatctcataaaaacaccagctaacttaacattgctggcaagccaaaaagaaaatatacctgagggtgtgctaacataaactaaaaaaaaaaaaaaaaaaaagaggaacaggaggatgctttaaatacactgacatgattttccttgtgttagctttcaagggcattattggaagctcatattaccaataaatacattattggtcttgttt

SEQ ID NO: 202606 - DNA, 314 bp, Homo sapiens
cccccaatgggatcccccccatagtctctttcacacactggtgttatgccaattgtgaatcttgtttccttgccaatttgactttatactaccgtggtcagtggtgaagggaataatgccagttaccaattctgcatttggcaagccaaaaagaaaatatacctgagggtgtgctaacataaactaaaaaaaaaaaaaaaaaaaagaggaacaggaggatgctttaaatacactgacatgattttccttgtgttagctttcaagggcattattggaagctcatattaccaataaatacattattggtcttgttt

SEQ ID NO: 202607 - DNA, 454 bp, Homo sapiens
acccactcatgtcttcaaaaatactttgctctcaaataataaagacaatttctctcatatgttaattgagagatctccgtatgaaaatattattatgaaattgtactgaataattcagaaattgttctcatggtatcttctttggatgctggcagtattattttattaaatcaatttaatactggatgtagaacaattcagctgtaaaatgctgagaaaaatcttttatattcactctattcctcccgtgagatgtaagagtgttcaactgttttcaacgtcagttaaaactactctggcccgtaagcataaatatgcaaggcaatacagatcatgtgacagtttgcattcttggcttgtactcagagaataatggctgaggtagaatattgctctaaacccacctgatacgtatgagtttataaaggagaaagtgcatatctgatatgtatga

SEQ ID NO: 202608 - DNA, 523 bp, Homo sapiens
gcaccctcactttgtctcatcaaacactgtcttgtgaatggaggaggcaaaaagagagaggggaaagtgagagagggggatggaaagactagtgttggaaggactaaaatagacaaaccaaacaaagacatgtagctgccacatgacaaactcacccatcagaccagatttcatccaaaacacccccagaggaaatggcctcagaacacagtgacaagagaggtgggcagattttaggtggtggggtggcttccgcaaggcaggggatgccgtgccttgagtacttgactgcccacagctgcatcttatgcctgggcatttttgtaagaagtgggaccacggctgcggtccctaaaggagggctggaatgccttgaaggagggctgactggcctataaagcccatcacatgtatctcctggagcactggacgtgtctcaacctccccaagcacttaacacttaacaaattactcctgatcaccaatacctagcagatgaagcataaccccaggccagcagggc

SEQ ID NO: 202609 - DNA, 100 bp, Homo sapiens
ataaattatctcttacaggcatacaaacataacggaaagacgttctgagggaataaacatgatgattagataaaagatgagaagttggcctatataactg

SEQ ID NO: 202610 - DNA, 284 bp, Homo sapiens
tgaggcagcctctctattcttggggaatttaaatctcagcagggaaagacagtaaataagaaagcaagtgaataagaaaataaggtaaggcataagttataagaagaaattaattaaattaaaccaggaaaatgatatatacaggatgctccagtggattagatggtcagtgacatgctttctgaagaggcaacagttggactgagagctgaatcatgaggaatggagagggcagctagtgcagaagctacaatgagtttgatgcagttcaagggcctgctggg

SEQ ID NO: 202611 - DNA, 283 bp, Homo sapiens
tgatggggaataaggaaaagggcacagatggcaacgccaggagaactcgcgggcccgagcagagctccagaggcgaacactgaaagacctgcagagacagttcctgaaaaagagctgccagaaatgatgcttaaaatccagagcagaatgcgcagactgaagatcaacatttttttgggggaggggggagggggacgaagtctcgttctgtcgccaggctggggtgcagtggtgcgatctcagctcactgcaacctctgcctcccgggttcaagcgattctcc

SEQ ID NO: 202612 - DNA, 257 bp, Homo sapiens
aggatcgcttgagcccaggatgcggagattgcagtgagctgagatcgtgccactgcactccagtgtgggtgacagagcaagagcctgtctctttaaaacaaaacaaaaatgctacctttggggagaaactttgaggctatgctaatatcccacatcccgcttttcctcaaacttccacccactaattttaccatccattggtggccgggtcttgtctacagcagttactgctgtgctgtttccctgatggcagtttt

SEQ ID NO: 202613 - DNA, 582 bp, Homo sapiens
tattagaaaatgccccttaaatacttcagttttattcctaatgctttaaatatgtttgttcttggcttagaaatattttccttagcactgttactcttttctaaataaaaaccttggaaagaaaaaaatgagtttttttttctctctaaatggttttagccctaaaacagtgtttctcagcttttaaaatccatttccaaaaatgaacaaactctctcatgtcaacagctatactatttgaaattctaaataaaccaaacaccaggactgaaaacaagataaagaactgtgacagccgggcacggtggctcattgcctgtcatcccagcactttgggaggctgagttgggttactctaatctggagactcttagttgatggttgctctaatctggagactcctagttgatggttaatctggagactcctagttgatggttgctctaatctggagactcctagttgatggttgctctaatctggagactcctagttgatggttactctaatctggagacgcctagttgatggttactctaatctggagactcttagttgatggttgctctaatctggagactc

SEQ ID NO: 202614 - DNA, 231 bp, Homo sapiens
atgaatagagttcattaaatttaagagagagaattttaaaggagaaaggaatgataaactgtattaaatgcaggtaaggtcaagtaaagttaggctagagaagcaacgactaaattgagcaagatgaaactgctgatgacctttacaagatgggtttcaatggcatggataaaacaaatgctccatggaagtgaagtaaggagaaaaataggataagacaaagtagagaca

SEQ ID NO: 202615 - DNA, 343 bp, Homo sapiens
tactcctgacctcatgtgatccccctgcctcggcctccccaagtgctgggattacagttgtgagccaccatgcccggtccctaattttggtgtttttagtagagatgggggtttgccatgttggccaggcagctcttgaactcttagtctcaggtgatctgcccgccttggcctcccaaagttccgggattacaggaatgagccaccatgcccagccttgaaacagaaagttttctaagaggcattcccgttctaaaattctatgatgttaagtcatagctttaagtttactaaaaaccgattagctctttataattgtaagcactagaggaggaaaatgata

SEQ ID NO: 202616 - DNA, 348 bp, Homo sapiens
cgaccttggcctcccgaggaactgggattacagatgtgagccactgcatcctgccagaaatggtgaattttgaatttgaattcagctcttcctcaattcatagcccacattctttctagcatctacttccaaagatagcctagagagtattttttatcttctatagctgtaaaccttgatatgggcattctctgatggcctgtgtgttttgaaaagattaatggataaggcagtggatttcactgctaaccttgctacaccgtagctgtgtaaccttgggtaaggcagtttctttatctgtaaaagaatggaaagatcacctaaataaagtactcagtaaacactcaa

SEQ ID NO: 202617 - DNA, 482 bp, Homo sapiens
gaagaattttgtttcatttcagttgtgggtttttctacccaatataggtcagctggatctcacaagctattgtggcttctaaggcatagcctgtcgattctaaggaaatttgtattgttctcctccatcagagaaaggggagagtttcttgggggagaggaagcaagaattgctaagactggttaaggaaatgtctactccagagtttagctctcccatgcctttgggggacagagaattctataaagatcatgaggcttcccagagctttccatctttttaaatgaggaatttgttaaaaatcatccataatttagtaatatgttgctttaagatggcaatattttaaaataaataactccatagtaatcaataagccttctattcttttaattgttatttgctagaagcttttgctggacttgctccatggatcacaatttattatttgtttggtgtatgaaaatagtccattagaaatt

SEQ ID NO: 202618 - DNA, 307 bp, Homo sapiens
acttttttcagatcgactgtgggtttagttttagttgtctgaaaatcacttccaccactgattattctaagatgacattgttgatcttgaatgatacagttaccgggagcaatgaactaagtaaactctcactgtagagttcagaagggtgttgagttagggtgagtttccaggatacaaaatctggttagctcattggctgatttataaggggcttattagcctatgggagtaagttcttcattggtggtggtaaagggcacagggttgggaataagggttgttggggtttaaatcctggctttgc

SEQ ID NO: 202619 - DNA, 828 bp, Homo sapiens
ccagcctgctctgggctcttgttacaggtgaatgtcactcactggcagctctccctgctccccccagcacaggggtgaaagtgggcagtaattctgggataagggacactttgaggcaaggtaatcccctcctgccagtccctggaggagaggaggggagtgtgcctctgaggctccccagcagggcgggcacgctttctcttcctgtcctgttctccaagcctccttgtgggaaaagtccatcagcccttagggagggccgggcatcacctggagctggcgctagggagagaggccaaggcagtcaatgaagagccttggtgggcccagtgctgaaggaacggtggaatattctggtcatgagtcagtcaaaaatggccaagctccaggcctggcggtagccttgggggtctatgtgtagaagagagggtggacatgcctgggccagttctggataaaggcaggggatggggaaagccatctggggcaaccactgtccccctggcatgggattaatgccacttagaggtggaaaagaggcagcagctgccatatcccaggaaagtcactgacctttagaacaggagacagaaatagccctggagagttcagaatcctgtgtgagagaggtggccaggccaggcagggcaggccccaacatgaggaggggaggagaaccatgttagtacccactgtgtcagacatgatgcccggcatttcacaggccttcctcacttactttccacctccagccagcagggtatgcatgattgtctccattttatggatgaggaaactgaggctcagagaggcgtggccaaacttgtc

SEQ ID NO: 202620 - DNA, 169 bp, Homo sapiens
gggaaaatgagatatcccttatggaggctcagaaatctgtttttgttagagactcccagaattttgtaagagtcatcaatcagctcccatgtacgtctgaaagtcctttatcgcatccctgagtaagggccacccattccttccttaacactctctagaaatggggatc

SEQ ID NO: 202621 - DNA, 538 bp, Homo sapiens
caagcagttaatccagactcaagcagtcaagcaaaaaattaaaagacagtggatatgttagattaagtaaatgggagtccaagatggactgatctcaggcatgcgtggatctagaaccctgatgatgatgtcaagggtcttcttctgctgtgtgggctggctctgtttccacctgccatggcttcattctcaagcaggcttctgttgtgtgcttatagcctcagggcaacgtcatcacggctcactgtctgaaaggaagatagactccttctcaccagttatatggtaaatttcagaggtgactctgtgttcctccttatgtcagtttttcatcccttaatgtatcacggtagccaggagtcagggggatggcaaacttgattgtctggatcctgggttatgtgctcatttcttgaaggaggtcactgtggttatgagttgtcggggagtagtggcttttaacatttttggcacatttcctttcagtcttatgtgtgtgtgtgtgtgtgtgtgtgtgtgtgtgtgtgtgtgtgtgtgt

SEQ ID NO: 202622 - DNA, 669 bp, Homo sapiens
ttaatgaactaagctcacaattgtgtgaccattgaggtgatcatccctctttaatcaaaacttacatttttgtagcagcagaacgatgaatattgaatgctcaaaaagcattcagacttcctgcttctgtacaccttttggctacagattgttttgttttgttttgttttgtttttttgagtggttacattgttttgtgctaacatctcagaatttggttttgcaattcatgttgattctgccataatggcattgtaaatcctggatcctccttcacattcagttcaatcctttgcatgagaaaagagttcttgtacctagaacttaattttttttctagtttcccaagtccctttaagcaaattacttatgaagatattctaattaatgtctctctgagtgagaggtttatgcacctctaggaagatggtaaacaattcattcttaccagcaagattagagccattcattctgtagacaaatacctccatcaagtggatatagattctttgctttcctactgataagaaaactaagaagccagtggtgcccatacctgccagacaagctcagaaggacaaaggagtcttaagtatctaaagtacatcatcaggcctgctgtaaacatgtgctaattaaagagtattaaaaatatagtgaaaatataaa

SEQ ID NO: 202623 - DNA, 120 bp, Homo sapiens
cctgggataatgttattgataaacttttttggtaaaagttaagaaaaaaagtggtgattacatctttccttcagtatgaaaagttcccccctttagttaattatcatggtggtggtggtg

SEQ ID NO: 202624 - DNA, 210 bp, Homo sapiens
ggaatttttataaaggaaataagatagcttcttaccagtttattgtaatacatgtaatatgttagatatgtcgaatgcaattactatcagatgaacagttcttttcctactctttcatgaatctgttttagagcagtcacttaatgtttgtcgtttttcatttccttattaaaactgaaataaatgaaatgacctgagaatccttctaac

SEQ ID NO: 202625 - DNA, 420 bp, Homo sapiens
gcaaggatccacgggagaagcatgatttcctgggcagggtcatacaatcacttactgcttcatacagtcactacctggctggggtgggggttcctttgcctctgtgctgctcccaagtaggctatctgttgccccaccctgcttttcttcgttcttcgtgggttgtttgcctagtcagtcccagtgcaagaacctggatatttcagttgaaggtgctgactgaattcacttgctcctttcattcctctctgtaagtgccttggaccgcagttgcatctaatcggccgtcttggccctgacccactaattttcttagtgtgttttttgttgaacagagatttttattttgatgaagtccaaacttatcaggttttatgtttttgtttgtttgtttcttggctagtcctttttctgtcctgt

SEQ ID NO: 202626 - DNA, 414 bp, Homo sapiens
ctgggtgacaggcacttcgtccctcctccagcctggggttgggagacagacctgtggccctcttccaggaggcagtcgcctgggctgaggtctcaccaggagagaggctgcagggctggacttctgagctctgtgctgagaactgtaggctgcagcagtagaggctatgtaggagcatgacctggggaggcttcaaaactgccttgcagacaagatccatcagcccctaaggagaagtccgggcagatagctgcattccccaggtccctcctaatggatatgttgaatctggttgcctgcaacattaggaatttcaggacgtccttcagaaaaccctgtagtaccttccatgccacactgtcatctcagaattcctgttacgacagctgtttcataaaggttagcaacttgttt

SEQ ID NO: 202627 - DNA, 406 bp, Homo sapiens
tggaggacagcgatggagagggagacggaagactattgtaggttggtagttttgtccttgtctagattgactgtccctgggcaagatattgcagctgtctttgtgacaaggacatttcatctaaattggagtcactttttgagtcaagagtgatcaaatgtaagtgctttgaaaagtgcatagtaccttgtatgtgtcaggtttcagcatcctgttaccatggagctcccctctcctgtgattaacgtcactccagtcacaagtggttttaggcctggagtctgaggttcctctagtgctggtttcctgtgtttaattcatatccatcgattaactctttttctgctccgtaaaccactcacaagctcacgagaaagggcggctggtatgctggtgttagcagtga

SEQ ID NO: 202628 - DNA, 1457 bp, Homo sapiens
gcctgcctattatctgttccactggagtgtaatcacttgagagcaggaatctgatccataatccatgtattctactctccttatggccaggcagtacctggcagctgagcagcataaacatttgtggaatgaatgagtgaatgaatgaaccaatcaagatggcatccttcttggtgtgggtaggtaccttccaattggatatggctcagggaagatacgagaatttaccggaagccttgaacagttctggggaacaatggagacacactgtggcttcccaaagggaagagcgagaggtgatcagacagccagttctcattcttgcaaaacttgacaagcaatgacttgaaagaggaggatgggaggtaagtaatgagaccaacccatgctgtgctgagtgaggtgagagtcagagctcaggtggctgattaagaccccgagcactcagaatgcagaaggctgcaaagagggtcaccagcccatcagcggccaccaaaggctgtaccaagtccacctggaacctagccacaagggatggtgatcatgatccatgtgaggcaagatagtttactggttacagtggtcactggcctattttcaattccttcaccggcccttaccggctgtgtgaccttgatcacttgcttaacctctctgtgcctcagtttctgcatctattaaaaaaaaatgcctggctctttgtgcctggctggaggccacttagcctagaattttggaatcccagggtttaactcctggcactgaatacccttgttggaaggtagagaatgggatgtcacctctggggtactagagtatggccaaatgctgttaaccaggcagtcagtctttggaagaaaatactctgcttttacatcccctggtggtagcagaaagttacacgtgtgaaaatatgcaggggctgctcctgtgtgtgttggggtgagggtgtagtggaggttaaaggtattttgttccagccaggcttgtaaaagaaaacaacattaaatgggcatgtgcagacaccccccccccccatgaaagtgtcttccttatctttgtctcctggttgtgtgttcgtgaatgcacaaccaccaaaaattgtggaccgcatctctgaccaagatccaaggaggaaaaataaatgagtccaagacaaagcaatttacagatattaattcccaaagaagagtaaagatgtttgctttttctctcagcttgttggttctcagcattctcattgtttaactattctaatggtttctgcctccttctttgtgttttcctaagagtcctttcttttcaaagttgggatgacttccagccctcacttgcccaatctgtcctgtcacctggctgttgggcttcatgtatgaaagtgaaaaccgaggagagtagagctatacggatgataacaatagtggagcttgatttagtgcctctctactcaggctttg

SEQ ID NO: 202629 - DNA, 1123 bp, Homo sapiens
gcctgcctattatctgttccactggagtgtaatcacttgagagcaggaatctgatccataatccatgtattctactctccttatggccaggcagtacctggcagctgagcagcataaacatttgtggaatgaatgagtgaatgaatgaaccaatcaagatggcatccttcttggtgtgggtaggtaccttccaattggatatggctcagggaagatacgagaatttaccggaagccttgaacagttctggggaacaatggagacacactgtggcttcccaaagggaagagcgagaggtgatcagacagccagttctcattcttgcaaaacttgacaagcaatgacttgaaagaggaggatgggaggtaagtaatgagaccaacccatgctgtgctgagtgaggtgagagtcagagctcaggtggctgattaagaccccgagcactcagaatgcagaaggctgcaaagagggtcaccagcccatcagcggccaccaaaggctgtaccaagtccacctggaacctagccacaagggatggtgatcatgatccatgtgaggcaagatagtttactggttacagtggtcactggcctattttcaattccttcaccggcccttaccggctgtgtgaccttgatcacttgcttaacctctctgtgcctcagtttctgcatctattaaaaaaaaatgcctggctctttgtgcctggctggaggccacttagcctagaattttggaatcccagggtttaactcctggcactgaatacccttgttggaaggtagagaatgggatgtcacctctggggtactagagtatggccaaatgctgttaaccaggcagtcagtctttggaagaaaatactctgcttttacatcccctggtggtagcagaaagttacacgtgtgaaaatatgcaggggctgctcctgtgtgtgttggggtgagggtgtagtggaggttaaaggtattttgttccagccaggcttgtaaaagaaaacaacattaaatgggcatgtgcagacaccccccccccccatgaaagtgtcttcctgagtctgaccttcctccccggtggtgccacctctttgattctgactggcttgaacctcgcgcctgtcagt

SEQ ID NO: 202630 - DNA, 667 bp, Homo sapiens
aaggaggaggggaaagctagagcctcgccccactcaaaagaagtaccataaagagccaaagaaatgaaagaagccatattcgtaccatcaaaagcaagaatgttgctgccttccaggagttaacctggacacgttagtgactttggtacctggcccgaattgataacgactgaattttagaaccaacatttttcaaatgtatttttgatgaaatgcctacttctccctacacacacacacacacacacacacaacacacacacacctatctccaggcagatgcacacaggtgtccttggagctctactccctgaagccaaatgtcagtaagatcctgcggatttccagatgaaggaagcctcttgtctccccccacttttttcagtcggcctgctagcttccacacacaagcccctctcgcaagacaaccacctggctgaaatttagccaggtgtcaaatgtatccatctcattttcacgtgcaataatgtgcctttctgatcaatcttcacatccttgcatccattccttcctccctgctactcaagaagcaagaaaggagcacacacatcctcccaggcagtccagaggaaaggcaggcgtgacaaagaacacagacacagtctaatgacaatttagcctgtcttctattccttgactttcttgt

SEQ ID NO: 202631 - DNA, 652 bp, Homo sapiens
ctcacaaatttgtgttttattcaaagggagagggatttgatgtcttctgaaagtgttgattttagtgataagtacaagatagtgggtaagtgaggaagcaggagatacaacaagtgtcttgagggtatgacaagtaatcaacagatacttagtaagcatctgtcacatactcagtttagcaatgaaagatattcagttcctgcccacatagagcttacattttgctgttggagtggggaaaaaaaaccagacattaaataattaccattctaaatacgtctaaattattgcaaataaatattgcaaagagatatgggactcataatagggggcgagaggttagagaataccctcaacactgaaaaaagtggcattaaagctgtgacactaatatgggagataggagggctgaggtggagtgctgtcttctttcgtatgatccatcatttaagaaataggctgggtgcagtggctcatgggagtgctgtcttctttcgtatgatccatcatttaagaaataggctgggtgcagtggctcatgcctgtaatcccagcagtgtgggaggccgaggtgggaggattgctggagcccagaagtttgagagcagccagggcaatatagcgagacccggtctccattttttttttctta

SEQ ID NO: 202632 - DNA, 223 bp, Homo sapiens
gaatgtcccatgggcattctaatggtaacattgtctccatcccatctgttctcatcgcctgtatttttaatcttgggtaaccatctccttttcctcaagtcacctagaccagaatcatgagagttatcgtcactctcatgtccaggtactcaccaagtcctatcagttccttatcctaagtatatatgctatcaatccttccaaactctatcactattaaagt

SEQ ID NO: 202633 - DNA, 108 bp, Homo sapiens
gacacttcctttaaaaactacacgccaatgcccaataatgctcagccttggaaaacagtgagtgtctaatcaagccatttaaagcagggagaagattttaattggttg

SEQ ID NO: 202634 - DNA, 809 bp, Homo sapiens
acacgccaacctgaagaggtccatttctatgtagcaggcacacattttcactgtcattcttctctctattctcatagtttcattctaagtttgtcatgacatcatcttactttcttgtatcataggtatctgaagtctcatccattcgtctggacagaaagacctggaagggcctagaacagatgtcgcattcatctctctaacccccagaataatgaattctctatcagtttccatcacaatacatacttgatgatatgaaaaaccatagacacacacaatttcccaaactaaaatggctgtagatctatgactctcctgctcaagaaaccatagagaacacaaattcattaaagctaaaatactataggcattacactaaatcttaactggttaatttaaaagtaaataatttgcaaaaactattatagtcatcatgctaaatcttaactagttaatttataagtaaatcatctgttaatttttgatacttcagtgacaattcattcgttttataactaacaacaaacacagcaagatttcatgggttagaatcactgatctggatcctgtggcaaagtgtcccacttctaccaggtatttagtaaaaagaacttaactgaatggacctgtacttctatttgtttttctctcttgtttattctgtgcttcttgtagagtatcaaccaatgagacagcttagaatagggtctgaggctgaagcaggagatcacttgagaccaggagttagaggctgcagtgacctaagatcataccactgtactacagcgtgggcaaaagagtgagac

SEQ ID NO: 202635 - DNA, 312 bp, Homo sapiens
ttaataaatattgtgtggtgacgataaaaatattgctgcatcctagcaggaacatatccttattccatgcatacagaaatttctaacctgtgacatttatgaccatgcctggcaataccgcattaaagatagcttctaataggatgtgccagtttggatgaatgaccattttggcatttcactaaataactttgttctggatttgtattcagcaatcctctctcaaatgcctctccctgtgggcccatttttcagatctcattcttgctctctccttttatctggccaaaaaatatcaaggtcgtgtcacgg

SEQ ID NO: 202636 - DNA, 551 bp, Homo sapiens
ggcagaaaactctgagtcctcagagtgtgaaaggaagagaaactgcctctgggatatgcactcccactggggaacctggcaatccaggccacggggaagaccttaaccctacccagtgctggagctgatttaatgagctgaggggagtatatgagaaggagcagcttcaggatgtgctttgcttgcactcctagactctactggggacagagggaagccattcctgatcctacctcacagaggaccatgcagaagtcagccaactagctcaggcggtggccatgggctgagaggagtgagaagctcccaactgagattcacaatataatctctagcagggatggacctccttgaccagaactgaggggcaagtgggaagtgcgctgtgcccacaggtgtaggagtgtcttggcagccagagaaggcttatggtctgggacagttttgagtgctgaatgcagcctgcttgcaacctagatggccgctgccagtagaacactgtgggtctgagacctgtcttgccaagtgcataggggctgagtggggcttac

SEQ ID NO: 202637 - DNA, 538 bp, Homo sapiens
caaccatatttatgggggttagtattgattgttcgcggtgtggtagggtgtgttattattctcttttgggagagggtgatatggtttggctccgcgtccacacccaaatctcatctcaaattgtaatccccaagtgtagagggagtgaggtgattggatcacgggggtggtttcccccatgctgtcctcatgatagtgactgagtcttatgagatctgatggttttagaagcacctggcattccccctgctggcactcactctgtcctgccgccctgtgaagaagtgccttctgccatgactgtaagtttcctgaggcctccccagccacgaaggactgtcagtcaattaaacctcttttctttataagtcacccagtctcagatatttcttcataccagcgtgagaacggactaatgccgagggggtacccaatgcagagacctcatcttacaccaaatcatcagttgcatttaatgacccaggactgatgagagaatcgtgagagagaaaacactttagggaggacctggaggggc

SEQ ID NO: 202638 - DNA, 688 bp, Homo sapiens
ctgaaatgtatattcatgctctttgacaatgtgaagtctgaggacggagaggacagagaaccggggcgccagatgtcaagtatcagagcccatgtgacaagagagaaataatactgtgctactgaccaaacacggtgtttccagtgtggtgagaaagggttctggcctccccttgtgagcttactggcctctctcttaaaacccatgatggccagctgtttcctgtgcagagtgattgggtggacagaatgggtgaaataattcttcatacatatgtccccatatgtaacatgtccatgtgttttctcccaccttcccttccataagtattaatatttattgagtgtttactgcatgtgggatcaaggtctagaagttgcagatacagtagaaaacaaaacagacaaagtccttacattcatggggctagaatactgtggggaaggcagacaatggatgagctaacgaataaaaatttcagcttgagattaaaaaaagaaaacctaggctaacaacaagtatttgggtaggaatggaagttgggggagacattatagacctctggagattccatacatgtcaaaatgggactgagcaattgaaggagtcacccagtcaaagacttgggcaaggacaacccaggcagaagcaacggcaagtgtgagtcactgaggtaggaggaaggttg

SEQ ID NO: 202639 - DNA, 138 bp, Homo sapiens
tttacgctatctaaaaaactaaaacctacccaaagaaattaccaaaaggtttttttgtgtgtgtttttctttcgtttgtttgtttttttgagacagtcttgctctgtttcccaggctggagtacagtgatgcgatctc

SEQ ID NO: 202640 - DNA, 269 bp, Homo sapiens
tgagaaacccaactgtgcagccattaaaaagcacggttataaagtctgtacaacagtatgaaaagaaatgctcatgaggtaatgttaaaggaattgtgaaattacggaaaaactatacacttgaaaagagacttaaagtataaggtaccaaaaagataaggattgtatctagttgtattagagtgatggaatagaagtctgttttctatattcttacatttcttgatgtgattatactccttttataattacatttttaaaaaatcgtc

SEQ ID NO: 202641 - DNA, 485 bp, Homo sapiens
taagcaatgggaatgtcaaactatttcatataatagcttatatttcagaaagttactgctttataacattgtggaatctattttttatgttggtatgtggggatactagttttacttgccttatacgttgtccataatctattatccatagtttgtttttactatatacttaataagaggctgtgtcttaaagtgatcctgctatattaataatgactcctagtttcctcagtctttttggcaaggttggggagaggaaactattacatattattaaaaagtttaagatctatggttttcaagtttaagatctgtagttattatgttttatgtaagaaactgtaaaatataatagaattagaaaattataatcttcaagtggagaaggatataatattcctgtagttgtagaaattataaaagattgctaaatttgactaagtaaaaaaaaatttttttaaagattctgcgtgacaaaaaaaaaa

SEQ ID NO: 202642 - DNA, 234 bp, Homo sapiens
ctctctgcctttctgggtatggcccagactcatacaagcctgttagtgcaagatctcatcactggaggcgaaactcacgagacatcctcaccatggcacaggcctgaggttttcaaggttgtgctgggcgggggtaagaatctgatgagggagcccatccctgccttatgagaacagctccaagttcctgacctatgccagtgccttccctataactttctttttcttcttttt

SEQ ID NO: 202643 - DNA, 472 bp, Homo sapiens
aatccgcccccctccccgccccagttggtgtttcaaaccctgagacttggccttggaattcatggggtgatgaggaccccacagccagaggtgccaggcgttccctgccccaaccccagagcaggaggccatcattaaggcaggccagccaggtggcttttcagtgccagccgtagctgaatatattaggcagggagacaggcaagggtttgtatgagacccacagaaggaacagggaatatgctggtctgggttcaagtcccggttttgctggttagccgtgtgcctctgggcaagtttattcctctgaggcttagttttcccatctgtaagatgggcatagaagtggtcactactggctgggcacagtggctcacgcctgtaatcccagcacttggggaggccaaggcaggtggatcacctgaggccagaagtttgagaccagcctggccaacatggtgaaacgctgttt

SEQ ID NO: 202644 - DNA, 462 bp, Homo sapiens
tgggggatttaggctgtgtctgtttttgtatgcataattttagtgttttaaaatatatatgctatatataaaatatcaaatatccagctttattttaaaattttataacagttcttttcttgattgtaacaaatactttctaaaagtaatgtaattactctataatattgtatacgatgaattgttttaatttcttaatcatacctttgttagataagggtattccaatgtgtgatgttttaattaatagtctagtgagtaaagatgttttactgtgcaaaagatttaggataagctctatatgtttaggatacagttcttaaggtaaattgcagaagctgcattaatgggtcaaagatgggaatagttttaagactaagtggttttccacaagaattgtaccaatttacagctcatcagtgtgtttgagaatgcagttttcattttactgaagtgaacttt

SEQ ID NO: 202645 - DNA, 434 bp, Homo sapiens
atcaggagaccaagtaaagcagattctcctgtgtggtgggccttatccaatcaaatgaagaattgaatagaataaaagactgagtaataggaaatttatcctgcctatttgagttgggacatacatcagtcttttcctgccattggactcaaattgaaaaactgactcctcttgggtcttatgcttgccagcttttggattgaaacttacaccattggctgttgtggttctcaggcctttgcacttgtactgaaactgtactgtcagctctcctgggtatccagctaactagttgtagatcttgggacttcttagcctctattatcacatgagcttataataaatcaatctttcactgtctctctctcttgctctctctctctgccctcatcttcatccatcacattggttttgttttctctagttccttttcc

SEQ ID NO: 202646 - DNA, 399 bp, Homo sapiens
gctccctgacacccccatacaccctctgtgcctctctacttacagagcaattcataacgttagaattttttaaaatttggataaactttttaaaagattctcatcactaagacaagttttagaaatagtattcaaattgatcataaatcttaatttgaaaatattatagtgttctccctttcccctaaggttagagcaggattcaggaataaacatttttcatgactttttaaaacattttatataaggagaattttaaacatacacaaaactagaaaaaatagtatacacactcctcttgtacacatcacccagcctcaacaatcactagtccctggccagaccctgccctatccataccccgtccactttcttcctgtattgtttgaagcaagccct

SEQ ID NO: 202647 - DNA, 443 bp, Homo sapiens
ttcctcattcacataacttgccagaaaagatatagagagattgctgcatacctggatgacttcaaggtagtaaagctataacttttgaggggttataatttccaacacactctctcactgagtctaaactttttcatctaattttcttttgtttgcatgttgaggtgcatttggcagagggctgaatttttcacatataaaaacatatatgaaacatttttcaatacaagtcaaatataataaacacacattttcttgaggatagacatcatcctttatcacttccctctgtaaaaccaccatcaaacccaaccaagactgaatgacagaactagaaacatttaacaacggcatcatcatgccttaagcttagtacacaaaatagcgttgtgtttaagggttgaaacgctttctatgttgtaagttttccaagaggtacaagt

SEQ ID NO: 202648 - DNA, 522 bp, Homo sapiens
gtatcgttatcctcatcttgtttctttgagacattcgtctccaaaaataaataaatcaataaaataaagtgcagtagaagacagtgtccttattgttgtaggtgaggtggtagattttgtatctgagccaccatccctgctgaaattgccccggacaggctgatctggtacaggtggcacctgggaagtggcagcctcgcttccgctggccagttccctggttcagggttgccggcctcccagatccacacctgtggtccagactctgctgtctggctgcccgttggatcttctgacagggatggccatgagtcttctcagtccagacatgtctccacctggacttagggtctgttcccccggaaccagctcccccttcctgtccatcgctcagccctccaagcccagaggaccctgctgtggccgcattttcagtcaactctcccatcgccagactttgcccttggttcccaccatggtcacctttgacaaagcacggaggggcggtttgccccgttccac

SEQ ID NO: 202649 - DNA, 605 bp, Homo sapiens
aaccggtccggcgttacggacgctcatctgtttctttgagacagttcctctgtcacccaggttgcagtgagctgagatcccaccactgcactccagcctgggtgacagattgagacttcgtctccaaaaataaataaatcaataaaataaagtgcagtagaagacagtgtccttattgttgtaggtgaggtggtagattttgtatctgagccaccatccctgctgaaattgccccggacaggctgatctggtacaggtggcacctgggaagtggcagcctcgcttccgctggccagttccctggttcagggttgccggcctcccagatccacacctgtggtccagactctgctgtctggctgcccgttggatcttctgacagggatggccatgagtcttctcagtccagacatgtctccacctggacttagggtctgttcccccggaaccagctcccccttcctgtccatcgctcagccctccaagcccagaggaccctgctgtggccgcattttcagtcaactctcccatcgccagactttgcccttggttcccaccatggtcacctttgacaaagcacggaggggcggtttgccccgttccac

SEQ ID NO: 202650 - DNA, 711 bp, Homo sapiens
catcaatctgtgtatctgttaagtcttaatgagcagccaaccaaacccaggggtgtggccctgcttcttcagtgggttatgtgatttgagctgttttctcagcaaatgatgagctaaccaatacgggcccagtttttggctagtgagattgaggattgggctttaaggtgcatggtggtgaagtctgcagttcacacggaaatcagagcacattaactgctgggtgatctcaagcctaaatttcttatggagctgctccaaccaactgagccttgtggttattttactttgtgcaagaagtaacagtgaggcagagaaagagaggtgataaaagaaagattgggacttaaagcaagatatttcagatagtatgtttgtttttgtcacttactcttaggtaatagacaacggagtgaagttcaaaggcaactatgttgtgggtgactccatcatgaaagcagctcttttgtaaatcttcaacaaatgtaagctccctgagggtgaccaagataatcttgttgtttttgtatccctggctcttagcataacccctgacttactttctgattgaatgatgtttatccaaatgactgctgtgcaagggaaaactgtatttctttaaagaagtttctcattgcatctttgatcttaaggtaggctatccatcattttgaagttcattcttggtgcaactggttatttcctttattt

SEQ ID NO: 202651 - DNA, 455 bp, Homo sapiens
ggacaaagtcccctctactttctgcggctgtcactgaaatgtcagcagtggagggaaaaccagaagagaaaacctctcactgacaggcgccctcagtgtgcaaagagctcaagtttcagtgctggggtggggtgggggctgcgcccctgcctattcaccccactcctcccctgggctgctccactcccatgatgactgggaatttatcctacaacaggccacgagctccttgttctgcagtaggaaattatccttcataagagggcaactgttagtattgtttgtttgttttttaatttccaaaagtaaggagaagtttattaaataagagcgggggaagggaggagggagaaggagagggaaagggcccgagaggcagctgaccccagcatttcccgtctccccttggcttctcccatcccccttgtcccagacccccctccttctggttctga

SEQ ID NO: 202652 - DNA, 547 bp, Homo sapiens
caaaaaatagaccaatgggattacatcaaactgaaaagcttttgtacttaaaaaggaaacaacaaaatgaagagaaaatctacagaatggaagaaaatataagcaaactatacatctcacaaggagttaatatctgaagaatatataataacttaattcaacaatgaaaaacaaattatcttaatttaaaagtgggcaaaagaccttaataggcatttctcaaaagaagacatacaaatggccaacaggtacatgaaaaaatgctcaacatccctaatcatcaggcaaatgcaaatcaaaatcacaatgagatatcatctcactctagttagaatggctattaacaaacagacaggctgcgtggtggctcatgcctgtaatcccagcactttgggaggctgaggcatcacagtacttgattgcaaaatgtactacaaggctatagtaaccaaaacagcatggtattggcataaacacaaacacagagaccaatgaaagagaataaagaacccagaaataaattcatgcatctatggccaactgtttt

SEQ ID NO: 202653 - DNA, 456 bp, Homo sapiens
actctggaggctgaggcaggagaatcgcttgaacctgggagacggaggttgcagtgtgagccgatatcgtgccactgcattccagcctgggcaacgagcgaaactcggtctcaaaaaaacccaacttacattatccgcagacacattacatacaaaagtaaccattttctttcaatgggaaaggaggtttagaagctagagattcaaagttaccaggagttactttttcccactaggaattcactacagtcctgacattggactctaggtagtttctactgagggtaagtgactcgtccctcttctgggcaactctttttcttactgccctcagcagctatttcaggcctccaccccttccctcccagccaggacgtcctcttcacagaaaatggaaacctcctggtttcttaagtagttgtgaggctgaacctgccttaatccctcccagttcag

SEQ ID NO: 202654 - DNA, 453 bp, Homo sapiens
agtctttcttaatctgtagcattttctcttctctcccttttttcatgtaatttgttgtggaagaaatggggtcatttgtcctgtgtcactttaatagttttctttcagttttgttcttctttgtgatcaaagatatgttttaaaagcaaaattaagatcatattgcgcatactgttttatgagctactttttatacttaacgattgaatgaggacatttttctattatttactcttcttcaattagtttttattttctgttaaatcttatggaataatagtaactaaaatgagaaagatgtagttgattatatttaaagtaaatctggccaggcatggtggctcacgcctgtaaccccagtgctttgggaggctgaggcaggaggattgcttgaggccaggggtttgagaccagcctgggcaacatagtgagacccccatctctacaaaaaaa

SEQ ID NO: 202655 - DNA, 448 bp, Homo sapiens
agtctttcttaatctgtagcattttctcttctctcccttttttcatgtaatttgttgtggaagaaatggggtcatttgtcctgtgtcactttaatagttttctttcagttttgttcttctttgtgatcaaagatatgttttaaaagcaaaattaagatcatattgcgcatactgttttatgagctactttttatacttaacgattgaatgaggacatttttctattatttactcttcttcaattagtttttattttctgttaaatcttatggaataatagtaactaaaatgagaaagatgtagttgattatatttaaagtaaatctggccaggcatggtggctcacgcctgtaaccccagtgctttggtagctctagccataagcatttgttatagtgatatgtgtctgtacccattgcggtctccagcgttccccctctatcctaaa

SEQ ID NO: 202656 - DNA, 201 bp, Homo sapiens
ttcaaaatatacacaattcaagactgattctctatatgaataaactacaagtagaacttgttttgtgtatgaagtgtggttttaatatcagtaatatttttatattgcactatttcaaatttgcgtaattcagaattgcatatggtgaggctgaattgtattaataaaactgattaaagtgaaactacttttttttaaatg

SEQ ID NO: 202657 - DNA, 654 bp, Homo sapiens
cacctctggggttcaagtgattctcctgcctcaacctcctgagtagctgggactacaggcgcatgccaccacactcagctaatttttgtatttttaatagagatggggtttcaccatgtgggccaggctgatcttgaactcctgacctcaggtgatccacctgctttggcctcccaaagtgctgagattacaggtgtgagccaccgcgcctggcctaattttaacaatacattttattttcatattcaagatcacaccactgtgtaagtagcggagctgggatttgaacccaggccactgactacagagtccttgctgtgaaccactacacagtagtgcttgatgaggatatatttgtggaatgatgaatgagttaactgaatgtgtcacacgtgcacatattcgagcccaagtgtatggagcatgtgagcatatgtgtccctatatgcactcaggtgtatgtgagcgctcctgtttgtgcctgtgtgtaccgagtgtgtatacaagttcgattgtgtgtgcttgtatctttcaggggaataagggtggctttgatccagcctaaattgggatgtttccagcccagggagggtttattgagtgtggggagaggtcatagcttctcaaggagctggtgggaagaccaggcccacc

SEQ ID NO: 202658 - DNA, 738 bp, Homo sapiens
tatcagttatcgcgactatagccagccattctgcaatcctgtcagtcacagctagtgaacttcatgtccatgctgtggcggctgaggaaggcccctcggcccagtgggggctccaggctgcctggtgtgggggatggcttcgcagattagcaccaggcactgcagcgggggctctgagtcagtgctcccagctggagaagtctgcgcaggtggcttgtaggccctcatatgtccagagcagttcagcaccttccaggtggccgccttgagattacaggtgtgagccaccgcgcctggcctaattttaacaatacattttattttcatattcaagatcacaccactgtgtaagtagcggagctgggatttgaacccaggccactgactacagagtccttgctgtgaaccactacacagtagtgcttgatgaggatatatttgtggaatgatgaatgagttaactgaatgtgtcacacgtgcacatattcgagcccaagtgtatggagcatgtgagcatatgtgtccctatatgcactcaggtgtatgtgagcgctcctgtttgtgcctgtgtgtaccgagtgtgtatacaagttcgattgtgtgtgcttgtatctttcaggggaataagggtggctttgatccagcctaaattgggatgtttccagcccagggagggtttattgagtgtggggagaggtcatagcttctcaaggagctggtgggaagaccaggcccacc

SEQ ID NO: 202659 - DNA, 393 bp, Homo sapiens
atcatctctaaatatcaaatcttacaagattatattgctgtcctcattatgtagtcacagaaagactaagtaattcagattacctatccattaagaggcagaacagaggccagatggagtggtttatttctgtaatcctagcactttgggagattgaggcatgagggtcacatgatcccaggaatttgagaccagcctgggcaacatagtgaagccctggctgtacaaaaaaaagctgagtatggtgatgcattcctgtagtcccagctacttgggaggatgatgtgaggattgcttgagcccaggaggtcaaggctgcagtgagctatgattgtgccactgtattccagcctggtccacagaggggagaccctatctattttaaaaattaaa

SEQ ID NO: 202660 - DNA, 438 bp, Homo sapiens
tgttaagtccatttttaggtgatactaacttcaagttcagtctcacctaactattagatatcttaaggaatacattgtatttatgtaaattagtaggggaaagtagagaaaagttggttcgtatctgcaaacgtgtatgtatatataagaaggaataaaatgcacatcgctgccacggttcttgtttctgtccctggttgtggagggtgttggcttaaagcctttactaagttccactccccctttgccagcccctcatctgttgggtggcctgaaccttcatttgtgagcgctctgagtcattagcagtcctgaggtccctgggttgtggtcatcttcaattagttttttcccaaggccagtttttctttttaatgaaaatgttctagggagtgatggaaaatgtgaaagctaaaataaataaataaataaataata

SEQ ID NO: 202661 - DNA, 496 bp, Homo sapiens
ataccaaagtcaactatattcttacacagcaacaaacggggaaattaaatttttctttaaagaaagtagtaccatttataagagcatgaaagacttagattatcacctagtaaaatacatgcaagatcgctatgctgaaaagcaaacactgataaaagaaatcaaagatgacctaaataaatggcgagatataccatatttatgaaagactaaacatatttaacaattctgcccccaaattaatgtccacattcaatttagtcctaatcaaaatcccagcaggattatttgtagaaatcaacaagctgatcctaaaatttataaggaaaaacaaaagacccacaatagacaacatagttttgaaaattttgttagaagatgcatactacctgatttccatacaagctacaataatcaaggcagcatatatatacgtgggcaatcaatttttttttttttttgagatggggtctcactctgtcacccaggctggagt

SEQ ID NO: 202662 - DNA, 200 bp, Homo sapiens
aagacaagtaaataaaaaagcctttctgaattcctgagattttcacatatcctaaatgtaggacttaggttcagttaatctagatataagaatgtgtataacattatttatttactatatcctggctagttctaaaaaggttgagcatttcatataaaagatttgtatttgtataggctgggcgtggtggctcacgcctg

SEQ ID NO: 202663 - DNA, 548 bp, Homo sapiens
tctagaggacccccaaagcagttaatacacacacacacacacacatatacgactacccacctcatagcaccattgtaagaatatataaaagtacctggcagaaggcacagtatattgcaggtattcaataaatcaacattttagactgaaaagtactaatacttttagattagtttcagaaaaagcttacctctatgtttagcatcaagaattacatatttttttaaaataaaactgtgtataataaagtaaaaacagagaacctagagtttgattaggaaagaaagatagtattttctatcatttaattatcctaagatttccaacaaatcattgtcctcttttaggcaagaatagtacactgagaaaacgatggttaaaaaaacaaacaaaccctataatgacttctacacctatttgtcaggttactgatagttctaactacattaccccataaattgtatttatttaatgcatggaaatttctaaaacaaggtggtgtttataataaaacgcacagattcaataaaactgagaaccattttaat

SEQ ID NO: 202664 - DNA, 327 bp, Homo sapiens
gtattactttctgcctggtgattctactcaagttttaatacttaagtaatatatgacctttctttctcattctttttcacttccttcttagaatttaccattccctcttttatgcttcctattgtattttgtcaaagacctgtaaaatattattgtactggttatcatgttaatctccttctgtcaaaaccacattcattcactgaagtagtacctaccttttagtgtttttgtgatgattaaatgagatagtttatgtaaagcttttggcacattgtctggctcaattatttcctgctattatagtggctattataacaactacag

SEQ ID NO: 202665 - DNA, 292 bp, Homo sapiens
ggggtgctcatgatctcatccagatcttcaggggtgcttgtgatctcatatagatcttcaggggtgctcatgatctcatgtcaaataccatctcttagatttgtttcctcaccagggctagtgaccagatgaggcctggcaaactcaagaaatacttgttgaatgaacgaatgatttcaactgtagactaaaataaccatcaaatgtcaattgaaagcattaaatgtacagggctgtggacaagatgggcaagttccccagacccatccacctctattttatttgataaatg

SEQ ID NO: 202666 - DNA, 363 bp, Homo sapiens
cagaaccatgtgatgcaccctgtgggcggccacctggggactcaggacatgcacccagatccctcctcccctacccacttcaaagaaagtgctgccctcccagtggtgatgaagaccttccgctggccccagcctctgggatctggcctttacttgggtattcatgtggccctgggggttggctttgctgaagttgggcagagcaggtgggttctggaatgtgcaggggcaaccagagtgtccatctgtttgggtgaagccagctgtttaggtctgaaggatctgtttgatttttagaaacatgatgtgttccagagttagtaggtggtggtgatggagggtattggcgtgaagagtgtggat

SEQ ID NO: 202667 - DNA, 383 bp, Homo sapiens
aactgtttcacctaccaaaccctaagagccatgagggcagggactgcgtctgtcatgttcaccactgggcctacagggtttagaatagtgcctgacatactggggtcactcaatgagtacgggagtgctgtatggtgttacaaaatgggggagtttcagagatgaaaacaagatctgcaagaccaccaggaaggattctgagaccagcagcaaccatctggaagaggtgtacaggctaagcatccctaactcaaaaaatctaaaatgtttcaaaatccaaaactttctgagtgtctacatgatgccacaagtggaatattccacacctgacatcatgcgacaggttgcagttaaaacgcaggtgcacaacacagttttatcag

SEQ ID NO: 202668 - DNA, 519 bp, Homo sapiens
tcttttcactttctggaccttaattttccctttatggaagaaaatgaaaaccaggccccacctgagtttgttgtgtgtagcaaagagggagggaaccaaacctactcctaaaagaagatgtggtgaatttgattcacaccaataagtatccatcttctttagatgaaaagctccaacctgctgcaagtttgcagggtgcacctgcaataggcatttgctattcctgttgtttacacttcacactgaatttcacagacctatttccatcatgatccacaatttaaagaaatatttcccaaacttgtatacacatttcaatatctatcaactgaaacaaacatttcatgaaacaaaacctacccttacgtacaatatagaatattttccattgtattcctgttcgtattttaaaaatcttggtcacgacccactaaactcattacacggccttcagataggtcacaactggaactttaaaaagcactgcccagagtaaatcacaacggttcaacatccacg

SEQ ID NO: 202669 - DNA, 341 bp, Homo sapiens
cctttgatcccaaagtgtgggattacaggtgtgagccactgcgcccagccccataccaataaatagtaatgctataaaagtattctatcaatctagtttaagagtagaacttcaataaccatgaacaagctggaaatattttttgggttacaggggcaaactctatggttttgggtaaagcacaataaatttgtaattaaccaaaagctcctttcctcaaagagatattatactacccctcggcccactggcaattgcccggcaggtcaaggccagtgagccatgagcacatcactgctccaggctgggcaacagagtgacaccctgtctcaaaagagaaa

SEQ ID NO: 202670 - DNA, 683 bp, Homo sapiens
ggatgaaaatcaagaacaagcacaccaagtcaattatagtaagagtcaaaattgtggttgccctgtggagtaattatcactgagaaagaggatgaaggaacttcctaaagtcttggaaatgttctgtttaccaggacatgtacatacatgaaatgtcattaagctgtacattgaagattagcacacttcatgcatgttagtatatgtataataaaataaaaagtgattatggggaaatagtagagttatacttttaaagagaaaatataataggagggaaatatcacagtagtagattatacttttaaagggaaaatataatactgtagctaaaggtacctgaagcaattcatcttcttacatttaaaaaaaaaaaaaaagcagtaaaatctttcctgtttaaaggtgtcaagtataaatcttcctccattaaaacaggatgataccctgtggatgcttacctcaattaccaagggtaacttccctcactctccacagctcttgcttttgagacttgcgaacgtatttttccccatgaatagcatgacatgatgcgattggactgtgtaagaaagactgcaacataagcaaaatggcaatgccagagcttgctagaaaatccaagaagctgtatctggtgatagctttagagatgctgccttggaagacactgaggtcaagca

SEQ ID NO: 202671 - DNA, 336 bp, Homo sapiens
aatcatttgtctatataccagcaatgagtaagtggaatttgaaattaaaaacattatgccatttacattagtactccctccaacagtgaaatacttagtataaatctaacaaaatatgtacaagatttatataagcaaaactgcaaaactcaaatatcaaagaactaaataaatggagagatatttcatgtttgtggataggaaggttcagtattatcaagatgtcagttcttcctaacttgatatatagatacaacacaatcccaatcaaaatctcagtaagttattatgtgaacaaactgattcaaaaatttatatggacagacaagagaacta

SEQ ID NO: 202672 - DNA, 447 bp, Homo sapiens
agccatagtatcagtatggccaccgccatggtgatcgaacagggattccttatcagcaaacaggtccatatatctgtcagggatgtctacacttgtggcatttctattaccgacatatgtacgagagtgcaaacacaaatatgcctatcatctggagaacgctactgtgggactagggattggttataagaagcaactaggatgtggcgcacagggtcacagcctggtaatctcagcaccttagggaggctgaggcgcgcggattaccacgaggtcaggggtttgagaccagcctggccaacacgatgaaaccacatctctactaataatacaaaaattagccagtgtggtggtgcgcacctgtaatcccagctacttgggaggctgaggcaggagaatcgcttgaactcaggaggcagaggttgcagtgagctgagatcttgccat

SEQ ID NO: 202673 - DNA, 898 bp, Homo sapiens
gttgaatcatacggggcagtttccccctgctgtcttgtgatagtgagtgaattctgatgagatctgatggttttataaggagcttttcccctttcgctcctctcacttctctctcctgctgccttgtgaagaaggatgtgttgctttcccttctgtcatgatgtaagtttcccgaggcttccccagccatgcagaactgtctagggcaggaaatgtgcaagataagcctaaaacatcttgtcacgcaggatagcaagggaacaatcaaaaacatgttcaaagaactcaacagccaacttgaagaaactactcatgtccaaagtttcagcttaaggtgaaataaataagtggcaggccgtccatagacgccacttctatcatgttgactgcagtagggaggcataggaggtgacagcaggagtggctgcaggagcagcagtggcagcagtgggaaccctgtgccctacactctgcatccctgaggcagctgactgtgccacccccaccattacccggctgggcaggacacaccttcaggcttggatcctcctccgctccagaccctggcccatgtcactgctctcacccacaccagtgtgggaagggcgtgggaaaagtcagacagtccccagagcccgcccttgggagccccgcagagcctgccattcctagggccacctggatggggctggaccaaggccaccacagcagaagagcagcatagttgggcatccgtgcggtccccagaaagacctgaggagttggatcccacgtggcctcttgctgacaccattggactgctcattacgcatcagacaatgcagcacagggtgacatgccactgggagcaagtggtcccctggaccagcacagctggagtcaggaaccccaggggtcg

SEQ ID NO: 202674 - DNA, 642 bp, Homo sapiens
aaaaacaaaccacgtggcttcaagaaaattacatgttgtgagtaactttggccttgtccctaacccccgatggacatgtccattctgtcaacaggggtgtttaggtgctaagtctgggaagcgctgattaggagtcagagaacagacatttccaactgttaaattgtcatcgcttgtatcagccattatatagtcagttactgggggaatatgcacccgtgatgggcgttaggtgataatgattggaaactagtgaagctgtgagctcacagttgctgaatggtttcttactttgcttatcaagtgggtaatgaagatgagtggattagaaaacaccaacctgttgggcatggtagctcatgcctgtaatcccagagctttgggagactgaggcaggagatcaagaccagcctgggcaacacagtgagaccgtgtctctacaaaaaataaaaacattttaaaaaagaaagccctcagctgttcatgatagaaaaatagagtaaatagcaaaatctatacgtaatcaaatgctagatttgttcggtgatatttaggtattgtagctatacttttcagctattaaaaagccttgttgtttctgaaattcctactgggaaaatagctttgttattgcaagtgtga

SEQ ID NO: 202675 - DNA, 567 bp, Homo sapiens
ctccttacttcaccatcagcaagaactcacgaattagggaagtgaacagtatgacagtaggataagaagtcagaattacaggcttggagaagtgattcacacctgtaatctcagcactttgggaggccgaggtgggcagatcacaaggtcaggagttcgagaccagcctgaccaacatgatgaaaccccatctctactaaacatacaaaaattagctgggtatcgtggcgggtatctgtaatcccaaatgctcaggaggctgaggcatgagaaccacttgaacccaggagggtggagttgcagtgagccgagcttgtgccactgcactccagcctacatgacagagtgagaccctgtctcaaaataataataataatgaactgagactcagaaaagatgtttgttcagggttacaaagctcagacaggacagggcagcattggaaaccaaaattggtctgactcctaggctcatgctgtaaatcacggtgcaaggcttctactatctatgtttttcctaaaagaatgtataaatgaaaagatggttaacatattaagcaaaatatgt

SEQ ID NO: 202676 - DNA, 967 bp, Homo sapiens
  misc_feature (759)..(759): n is a, c, g, or t
  misc_feature (761)..(761): n is a, c, g, or t
  misc_feature (921)..(921): n is a, c, g, or t
  misc_feature (928)..(928): n is a, c, g, or t
aaaaatcaagaagtctttgtaataacaatagacaccatttactgaacaattatcaattttgttgacaattttttataatcttgaaaacaatgctagaaagaagatatgattcaaattgataggtgaggttaactagtctagagcgattaagtagccggttcaaggcaagtcactggtacagctcagcttagtctggatggaagtgccatctccttcctttctcaacatttcactgcctggccccccatcatgactgtaggtattcccaatattcctcctttgtcatgagaattcccagaagataacagagaagacatgaatacaacaacccaatagggcttctcctaaatcttccaataattacagcctgaaaagtactccgaagaccctcttaagaaaaggaacatatttcacactatgacactatgaaagcccagtgcttccaaatcctatttgtagtaggaaaaagaagtcctgacctccttcacacacttacatagtaagtatgaggttctatcttggtcaggctgaaagttccatagcaaactgattattatttggagctcaggttcctccaggcattgtgctgcccagcaaccttttttatcacttctgaattccaaacaattctccacctccttcagtgtatcaaatcataagcatctgaagtgtcagaaacctcaactcaattttctcccaggaccttctctaaactcctcaagaatactctggtcttcaatgaagacttaagtccataancnggatcagcgctgatccgcttaaactgttgaggtttagggctaagcatagtggggtatctaatcccagtttggtcttagctattgtgtgtcagatatgtaaagcactttcgtagtctatttgtgtcactgagtttttacaactcagtgagtttagcttatngggaggngtgatctaaacactcttacgcgctctatgactggtaatc

SEQ ID NO: 202677 - DNA, 153 bp, Homo sapiens
ccccctccattttgttaggagaagcaatctcctcattcctgcgctgtggagatatatttctcagctagggcgcgagcagtgccagcactgcccccggtgaggtccctggcagcaataaaaatttttattgtgattatgttggtgtcggggtgt

SEQ ID NO: 202678 - DNA, 367 bp, Homo sapiens
cccaagcagttaatacagactcaatggcaatacaatagtggaaagttacaataatctaatcaattctactggacttgtctaaggacgtaaaatatcaagagagtatctagtgtctgcaaaagagtttagaaaaagcattaaccaaccaagaaactagaatatcttcagtaacaacaacaagtagcgtgccatgacaggctagcactaaatcttataacccttgaagtcaatctgtcgttttagtgaatatgttgaagcaagcgtaaagggtaatggcctgtgaagaccactagttccgtatgccctagtagcttactcaccaaaccaccttacctgagtctgtattaactgcttggggtcctctaag

SEQ ID NO: 202679 - DNA, 334 bp, Homo sapiens
cacattgtactagtcctctgattagtagtatttctaaaataatcccaccaattattctggttattactttttcaatgcttttgataagtaacaaatatttgaatgcctgttatatacaaattgctatgccacaggaactatagacacatcctctcccttcaagagttctcacagtcaggaaaatgaaacacaagcaatttaaaagtaaagtacaagaggccaaataacaattcaatacagtgacatccaaaggtaaaaaattattggttaccaaatcagtagaagagagaagtcatatggaacagagtcttctaaatgatctttacctgaatcc

SEQ ID NO: 202680 - DNA, 574 bp, Homo sapiens
gggcatcaggattcatggacaacaaaaaaatctctgattcctccaaaaggcgtgtgggtcactgagctccggaagaggctgcctccaccaggtctcatttcacgttgggaggttacagcgtgggtcttgtttccttggctttcccccatctaatcccaaagccaaggtcacaacctcttagcaatggggtgacaatctcatatagagctgcaatcaacagccattcttgccaagctgatattaacatttcttttttctttttgatgttacacacaatcctgtccttgctgtaccagaaagccatttcacccatctgtctgggaagatgatccaattttggtgcttttatcatcaatgctttcagcaactttgttctacttcccctactgtaattacttttgaatcatcaacgcacccagacagccttaaacctcagagaacagaatgctaaaaaaagaaaaaaaaaacccgcaatggcaaggcatggagatgggatgttgtggagaggacggagtggggagaagaaggaactccaaaaggagccaattaaaacatctgcttccccagtccccca

SEQ ID NO: 202681 - DNA, 638 bp, Homo sapiens
gggcatcaggattcatggacaacaaaaaaatctctgattcctccaaaaggcgtgtgggtcactgagctccggaagaggctgcctccaccaggtctcatttcacgttgggaggttacagcgtgggtcttgtttccttggctttcccccatctaatcccaaagccaaggtcacaacctcttagcaatggggtgacaatctcatatagagctgcaatcaacagccattcttgccaagctgatattaacatttcttttttctttttgatgttacacacaatcctgtccttgctgtaccagaaagccatttcacccatctgtctgggaagatgatccaattttggtgcttttatcatcaatgctttcagcaactttgttctacttcccctactgtaattacttttgaatcatcaacgcacccagacagccttaaacctcagagaacagaatgctaagtgaaataagccagacaccaaaggccaaatatgatgccacttttatgaggtaccagcataggcaagttcacagaaacagaaaggagaatagtggttgccagggactgcagggaggaggaaatggggggtggggttattgtttaacgagtacatagtttctgtttggcatgaaggcactcgacatgaa

SEQ ID NO: 202682 - DNA, 383 bp, Homo sapiens
gcacatgcatcccagaatttaaagtaaaaatttttttaaaaagattccagtttggtctatctggctctgaagtttctttttaaaaatttgtaacagccaccctttgaaaagcacttgctgtatggtagacattgtcaagtgtcttccgaacattatttcaaatcactccttccacagtatacaagtccatgcaatactggatctgagatgagtggggaagtcattggtcaatttatacggcatggttgaacaaaaataaaaccacactggaattttctattgtcatcaattccagagtattgagaagcatggcagataggatagagacagcctataagcaggaaaaactagcttaaataaaatcatgattcaagtcctattcc

SEQ ID NO: 202683 - DNA, 420 bp, Homo sapiens
  misc_feature (412)..(412): n is a, c, g, or t
ccacccaaaccaagaacagaacatctaattatgtatcttatatttccctgcactctccttgcctgttatatccttgtgcctctttcacagaagtaataaatgctatgctgagtttgcagtgtaactttctcttttttttatcttttttaagggactttgatcatttgttatttactctactaactttctaagtttctcttccctctgacctccatcccaatccactttgagattcttggactgacctttttttggacatttgttgaacatgtgaatgctgacctagtaatctatccattctcctgtatttatttctgtaatgtttcgtgattgttatttttatatcttgtacctttgtatgtaatgcaactaaacacaaccacccactacctaaaaaatcccaaacatatanctgaccta

SEQ ID NO: 202684 - DNA, 750 bp, Homo sapiens
aattagttcattagactttaagtttaattagattttaatcggtttaattagactttaatttgttaacagtatgtagcatttccatccaacaggatgaaaagttgaacaatctcctcaaaaagcaactataaaggtgaatgaaagtgtcaaaacaattattttagcattctggaaattaaccaaagatatgcatgcaaatgaagagagaagtgttattcatgagaatcactgaagcatgggcagatatagggcaattttatagttttcttgatgaagaccattcctatgcctcacctgtagctctactgctagacagttcaacctggatgagacaggctatgaaaccaatagtcttagcgctggtaccagggaaactcacttgatttagaatcttgtcagttccagaagtgctctcatgaacaagtaaataaggaggaccagcagttctgctagcctgaactagattctgtttggtgcaggtagcagactgtcagactagcagaggattttgtaggaaagaccaagaagttagggatacgaggaaagcttgttaagttcttcatgtatctcaggttgacaggagttgttgccatgcaaacaacgttgtgtagttagcccatgccaccccacattcctggttgatgaagccaataacaaacacatacacacacacacacacacacacacacacacacggtgagagagagatagagagattgaaactgattggcagaatctacaattaagggg

SEQ ID NO: 202685 - DNA, 257 bp, Homo sapiens
actctcaggtgctgcatttctgcacgtcggggaacaagggtgaagaacagagctagtccagcactgctccgtcctcccgcatttcttcttctgtagagtcttttgcaaactagagagtcttgcagagagttgttgggttttcccaggagatactgtatgcaaagaattgtcatgaagacataaaatcaagtcttggtgtaaaacttttaataaatttaaaggcatgtctctgtttttctcctcctccatggggattt

SEQ ID NO: 202686 - DNA, 931 bp, Homo sapiens
atttatgtctttaattctcatccaaatattgccatcccatcaactctcttcaagggcaatgataattaagttcagttgcctattttaccaattttcaatcatataaaagccaaaaaagaaaaaaaaaaagcaagaaagtggatatttgatataaatgggaaatgtcatttgtttggggaagaatcagttacattctggctaggaggaagtgtgtaacaagttgaataatcattcctttctcttacctaagcgcttccactgacatgtccacctccagggttggacctgccacagtcctgcgtgacattcacacagtctcttttattctggggacacagggcagggatgtaaagaagaactcccctggcttggacagtattactcatatttgcagtacaggttgagctgcaccaacctgaggcccgagggatagaggtgcttgtatgaatttgaacaaattgatttgtatgtgcgtatctgttataagctgggccctctgtggcatgagttccaaggaagcccccactccataccttaccccagcctaagggcaatattgcttctttacctccatctttggaccccacacggtctctgatatttgttttgtaatagcagagacttgttcatttcacacaactagtgagtggcagagctgaaactggattctagagctttcagcatctagggcaacactctccccatttatggtctagtggtatgtggactttgatttcggcctgtggaagcaagattctcaagggcagggctgtgctctatgcatctttgtgtccaaagcccctgttagacagtagttgcttctaaatgtgtgtggcattgtactcacaaagttccccgtttcgtagctataagctcaagcaaactcttctttcaaatgatgttagtgctgtatttggtaatctaagagaaa

SEQ ID NO: 202687 - DNA, 577 bp, Homo sapiens
ttgcaaagagttgagagatggcagtgaaaagatgagaaatggttggatttgaggtaattttggaaactgggctgatatgttttactgtgagattagagggttccaaggattttggcttaagcagaaatggtggtgtcctaggcggctggcctacgtggtagtgtcttttactaagatgaggaagtttatgagggagcaagatatttgggaggaggaatcaattattctgttttggccacactaaatttgagatgcttactgacatctttataggtacgctaagaaggcatttgaatatgagttcaggcctatgtatagtttttagacccatttttcatcactggcccctgtaggtctttaggttctcgccatattgagcaacctaaactttttctaggcccctttttacataagctgttacctctgttcaatgaaagaattaagttaaggctcagaagggagacagtaatggttcattctttgttagtctattcctaatatttaatgaggttcataatcctactgcttcttagctcaggaagctttaagctctcttggggcttgttatctgagtgct

SEQ ID NO: 202688 - DNA, 435 bp, Homo sapiens
cccaaggccaagagacctaaatatactacagataacaaggaggtaatggggcttcttgattagaagtcctcaccctgaagcaggccagaaagagcactcagataacaagccccaagagagcttaaagcttcctgagctaagaaggcatttgaatatgagttcaggcctatgtatagtttttagacccatttttcatcactggcccctgtaggtctttaggttctcgccatattgagcaacctaaactttttctaggcccctttttacataagctgttacctctgttcaatgaaagaattaagttaaggctcagaagggagacagtaatggttcattctttgttagtctattcctaatatttaatgaggttcataatcctactgcttcttagctcaggaagctttaagctctcttggggcttgttatctgagtgct

SEQ ID NO: 202689 - DNA, 295 bp, Homo sapiens
actattatataaatggcactgctccaggaactagaaataccacattaaataagagatatgtgtctctactctcatggagcctacatctaactagatagggaaaagtagacacacaaaatacacaaaatttttcaacaattgtacactaaaataataaacaaggccagtgagttagagtgatgactggtgtctggctgaggtttatatagagtggtcactgaaggccacaagaagaaaatggtcaagggcactccaagtcaaggggaaaggagaatggctggagggcaatgagtga

SEQ ID NO: 202690 - DNA, 523 bp, Homo sapiens
agtcctggggatcagataccctaattgggtctcacaggtgtgttagccagggttgtccagaaggacaaaaccagtaggatataggtatatataaaagggagttaattagggagaattggctcacacgattacaaggggaaatctcacaataggctgtctgcctgctggggaaagaaaaaagccagtagcatgacttttgttttgaataaaatatgggtgtataactcaggagaaggttcagagttaaagctgtagatttgggagctaaggtctccagaatgaagcaggatacagagtttatggtttactcattagttagtcatgtgccagtcaatctgatgaaccaggggattctccactttagccacacattagagtcatctaggaagctttagaaaatggtgatgcttgtgacttacacccaaagattctgatttaattggtctgaaatgtagactgggcattgggacttttgaaagctccccaggggtgattttaatttggagacaagattgagagccac

SEQ ID NO: 202691 - DNA, 444 bp, Homo sapiens
caatgcactccagcctgggtgacagagcaagaccctatctcaaaaaaaaaaaaaaaaaaatttgccctataacatgggtgggcttcattcaatcagttgagggctcaaaaacaacaaaaagcaagaggcaattctctagcagactgcctccagactgaaactgcaccatccactctcctgggtttccaggctgctggccagcagactgcaactgcaatattggctgtcctaggtctccagtctgccaaaccacacagcagattctggacttgccagtctccataactgtgtgagtagagtccttacaataaatctttcagccaggcgcggtggctcacgcctgtaatcccagcactttgggaggccaaggtggggggatcacaaggtcaggagatcgagactatcctggctaacacggtgaaaccccgtctctactaaaaatac

SEQ ID NO: 202692 - DNA, 586 bp, Homo sapiens
agggaacaggggccagggctgggaaggcataagaacagaagataaatttgaggctctgttacgctggtcatccaacccaaccaggtatctcttgttatatgctaacttcattttccctttcttgtccatagtgggaaaaaataatttttaactggctatgtagttaaaaaacctaacaaaaagcacttttctatataatgagtggtttatattaagaataggtacaatgtaaatactggtaagtgaaagttcattttgttcagtgctatgggctggtacattgcatttcaacactagttttttacttttatctaccctgagggtagataacccatattccaaaatacagtattattttcatttgctgtaacattttaagaaatatgtagtttctaaaacttcatatactttatatggaatatgaacaactttaatatgaataaatagtctagaaaaaaatttaggaaaaattgccatgaaatcatgagctaagtcaatggttattttaaaccacttaattttgagactagtatttcatacagaaaaagctaatactgatatcacacactaattgtgtataaaacac

SEQ ID NO: 202693 - DNA, 277 bp, Homo sapiens
tctcactctgtctcccagagtggagtgcagtggtatgatcatagctcactgcagcttcaaacttctgggctcaagcaatcctcccacctcagcctcccaagcacctgggactacaggtatgcaccatcacacccagctaatttaaaaaaaaaaaatgggtcacgagcccctgggaggaggtagggcaaatgggcgggaaatgctcattttggggaatggcttcgagggaggaaaccgcagccgactccctcctcaaatctggccccaaagacccgcc

SEQ ID NO: 202694 - DNA, 1290 bp, Homo sapiens
ggagaccgagatgcgtcacactcatagataggcgccacgccccgagagttatggagaatgttacccacgctataagtggaaacagtactgagggcgcgttgtacactataagtggggttatagccgaaaaggcgcagaaaaagtttggaaccgcgggggcctgtgcaaaaggtgtatacaccgtgaggaaaaagtgtgttgtaggacaattataggctctttttcgaccgtgtgatttccaaaaactttagggaacttgagaaaagttgggaaatttggagaaattttgctcttataacatagggacccatgatttctacacgtggatggtccagcgcttgactaagtgccttggcactattttgttcccaccttaagtctcccacctataagatatttgtgattattgtcctctactttatgtgtttggaaagtaggcttagaggccttatgtagccatcgtgaagttacacatttgaccaacagaaagctaacattttaatgccatctgtcatctgatccaagggactagtcataaccacaaaatggattgagaggcttaatgggttgagggagaacttatagcatattctaactcagagaggtatgatcagtcaaggatttttcctcgtagaaaatttactctttatctttctgtgttagattattctatgagattatatttcttattacgaattggaaaactgcttaaaagatttgtttccttgcttatgagaataaatgaaatataaaatttaaaagtccagtgcttttcgatgaaaaatgttaattctgtcttttccccgtctcctataaataactggcatattttcctacagaactgtttgtcacatttaaaggtaagatgtaatcacacttctgatatgtaaatactgactggtatattttgtttatgcatataaattgaacagtgcataatgaaacttttgttactattggtatacttgaatagcaacactttgccacattccttttcttatacctactgtatttcttctatagggaatcatgtatagatatgagtaaacttttgattgaaaatttagtttgtcctaatgaatgcaagattattgtacatttttagtgatatttatattatcttaaatctaggaatatttgttaattcttttagaattatagagtattaatctcacaaaaccttctagatacttattttgtcttttgagaaaatcagtaatgttggtttaagtctgaacaatatgagaaaaagctttgataatatcactaaaatcacatttaagtatgccc

SEQ ID NO: 202695 - DNA, 1205 bp, Homo sapiens
gtgtgggcaccgaggaccaccaataagagcgcccccagtagtaggagaatgtgcccacaaaactggcgagatgtggggagggccaaaaaggtaacacggaggcaaaaaagtgtacccggagccttgaaaattgttaaccgtgttgtcaaaaggtttttaggaagattaggccttttccgcggtatcccaaatttttaggacttgaaaattggaaatgtgggatatttgcctttaaaaagagaccgtagtttaacagtgagtggccagccttagtaaggcttgggctttttttccaacttaagttccaactttaaaaaattgggatattggcccaccttagggtttgaaataggcttagaggccttatgtagccatcgtgaagttacacatttgaccaacagaaagctaacattttaatgccatctgtcatctgatccaagggactagtcataaccacaaaatggattgagaggcttaatgggttgagggagaacttatagcatattctaactcagagaggtatgatcagtcaaggatttttcctcgtagaaaatttactctttatctttctgtgttagattattctatgagattatatttcttattacgaattggaaaactgcttaaaagatttgtttccttgcttatgagaataaatgaaatataaaatttaaaagtccagtgcttttcgatgaaaaatgttaattctgtcttttccccgtctcctataaataactggcatattttcctacagaactgtttgtcacatttaaaggtaagatgtaatcacacttctgatatgtaaatactgactggtatattttgtttatgcatataaattgaacagtgcataatgaaacttttgttactattggtatacttgaatagcaacactttgccacattccttttcttatacctactgtatttcttctatagggaatcatgtatagatatgagtaaacttttgattgaaaatttagtttgtcctaatgaatgcaagattattgtacatttttagtgatatttatattatcttaaatctaggaatatttgttaattcttttagaattatagagtattaatctcacaaaaccttctagatacttattttgtcttttgagaaaatcagtaatgttggtttaagtctgaacaatatgagaaaaagctttgataatatcactaaaatcacatttaagtatgccc

SEQ ID NO: 202696 - DNA, 710 bp, Homo sapiens
cggagaagtgcaagataagggtgtagaggcatgcacgaggtggttgaagtggtgagaatggtaggcgcggtaggtggtactgttagaaattaaagtgaatggtccgcgaaaaattgggtgaggatgctgtgatcgaggctacttatgaacttgagctcgagaaaggaacattccattggctttatatccactaattacctgccttttatgtgtcagtcagaaacaattttttttaaataactggcatattttcctacagaactgtttgtcacatttaaaggtaagatgtaatcacacttctgatatgtaaatactgactggtatattttgtttatgcatataaattgaacagtgcataatgaaacttttgttactattggtatacttgaatagcaacactttgccacattccttttcttatacctactgtatttcttctatagggaatcatgtatagatatgagtaaacttttgattgaaaatttagtttgtcctaatgaatgcaagattattgtacatttttagtgatatttatattatcttaaatctaggaatatttgttaattcttttagaattatagagtattaatctcacaaaaccttctagatacttattttgtcttttgagaaaatcagtaatgttggtttaagtctgaacaatatgagaaaaagctttgataatatcactaaaatcacatttaagtatgccc

SEQ ID NO: 202697 - DNA, 727 bp, Homo sapiens
cgagtaaaaatgtatcctgtagaagattttgaagcatcatttcaatttatgcaggaatgtgctcagtatttcttagaagtgaaagataaagatataaaacatgcacttgctggtttatttgtggagattcttatccctgtagctgctgctgttaaaaatgaagtgaatgttccctgtttgaaaaattttgtggagatgctttatcagactacttttgaactgagctcgagaaagaagcattcattggctttatatccactaattacctgccttttatgtgtcagtcagaaacaattttttttaaataactggcatattttcctacagaactgtttgtcacatttaaagaataaagatccgaaaatgtctcgagttgcactggaatctttgtatagattattgtgggtttatgtaattagaataaaatgtgaaagcaacactgtaactcaaagatctttttccctgtagtcgtcttatgagcatagtgtcagcactttttccaaaaggctcacgaagtgtggttcctcgtgacacacctctcaatatatttgtgaagattattcagttcattgctcaggaacgcttggattttgcaatgaaagaaataatatttgatcttctcagtgttggaaaatctactaaaactttcaccattaatccagagagaatgaacatagtctcagagtcttccttgtaatagcaaacacatttcaatctcgggaccggc

SEQ ID NO: 202698 - DNA, 1131 bp, Homo sapiens
agtgacctttgtcttaaacaattcatagattcactgaaattttcttcaactttaggaaaatgaaatatattccacagtgctgtaagtcttaaatattgattttcctctgaaatcttgactcatcctacccaccaacattctccctttgtacactatgttctttgtaatgttcacgttacacaagtgaaaattagtaacattagtaaattttcattgcaggtttatttgttcatatttctggatatataatccattactgttaaacttcatatcaatgttccgatatttcttcatcttatgttttatgttacaaaacaggttatttcactatatgtatttttaattgattaattcttcccttttttggaaatgaaacagccctctcaattattgggacagaaaagttatttcatagggaatacttcaaacactgatatctacaacaggcagtaagattcgtcacaacaattggtatactgtcaatataccatacaaagttccatctggtcttgattaaaaattattttagttttctcaggaaaatgatacagagggagaattgcctagattatatgagagaaaaaaaagtagagagaaacataatgttttcttagattattacagcagtgaactatttccacctggtaagaagggtgcacttgagaatggggtacaagtactctaggaacatagatgtaagttctggatgcacagtagttgttgcttagctgtaagctggaaatttcaaggcagaaacagcagataccacaactataactgggtcttcttgttttttgttttatgtgtatacgtgagattatggggaaagacaaaagtaatgcatagagatttattttttaacattcaattcataagcagtgtttatacctctttgtacttacttgaaaagtgtatattatgtaaatttagtataaaaacacttggactaattcataccatgtggtaaaatttcacattcaaaagaaatacccttctgttattaaaaataaaaaaaaaaggagccaggagggtggctcatgactgtaatcccagtgctctgggaagccaaggtggagggatcatttgaggccaggactacttgagaacagcctgggcaacatagctagatcc

SEQ ID NO: 202699 - DNA, 505 bp, Homo sapiens
agcaggctctccttaggggctgcaaatagccatgggtgagacacaatccatgatgtggtcttggcctggttgggatgaggccagaggaggctactaggtaacaagaggcagaaccctggcccttggtgaggcctggagcaatcctgggcttgaaggtaccaggaatcttcctcatgccccaagaccactctgaacagcagaagagtgctgctgaatgctggcatttgattaggtttactacaaccaacctactggcagggaacaagatcccttctcccataatgtctccaagtgagcacctgggacaaggaaggaggaatctctggtcctctgagagatgagagcatccaagaggtgaagcagcactccccagcccctggctaattgttctcaggactgtgccagacaaacccctgatggaatcccagggagcctgggatcacacctggcctgctggcctctgtggctgtcctaaggtcttcataaagaaggctccccctcctgc

SEQ ID NO: 202700 - DNA, 435 bp, Homo sapiens
tcttgagttgatttttgtataaggtgagagataaggagccagtttcattctcctacgtgtggcttgccaatcttcccagcaccatttgttgaatagggtgtgtcctttccccactttatatttttgtttgctttgtcaaagatcagttggcttcatttctgggttctctattctgttccattggtctatgttcctatttttatgccagtaccacgctgttttggtgactatggtcttatactatagtttgaaatcaggtaatgtgatgcctctagatatgttctttttgcttagtcttgctttggctatggaggctcttatttggttgcatacgaattttataattgttttttctaattctgtgaagaacgatggtatttttatgggaattgcattgaatttgtagattgattttggcagcatggtcattttcac

SEQ ID NO: 202701 - DNA, 302 bp, Homo sapiens
gtctcattacagtcatcttcagatcttgtatgaggaagaaaagaaagggagaaaaaaattattcaccaccccacctctcattttcctcatggggttcctccagttacaattgcatggcaacctagcagggggtttctagcagcagcaccaagagcactagagcaacacctggaaaaagagacgcatacaaggatgacacacttaagtgtgcatgagaggcaatttctccaattgtacagaagctgtcaaatgataaactagcagcaaaagataacattaaaaactgctacaagattattaga

SEQ ID NO: 202702 - DNA, 311 bp, Homo sapiens
gtgattctctttgagaaataggaaatgactctccaaataatgttaatatataactgataaatagaaaagctaaatttaaacaaacactgttaggttggtgcaaaagtaattgtggtttttgtgattaaaagtaacagtattgctggagctatggatagtagacactctttcaaagacagctgaacatattttatgctactatagttttctctttcattgctttcaggttgtagcttaggtcacatttctcactcacaagagtgagtgagtggaaaattgtaaagcaaagcaggattactatggaaggtagc

SEQ ID NO: 202703 - DNA, 400 bp, Homo sapiens
gtcaggatgattattctgggacacgctgagctttgggttggtccttgtccaaccacagaattgctgcatgccctttggaggtgttttactagcttctccatgtctagatgtactagtgttattatacaatatcagatttccccacaaaatgccaatgcaattggctattcatttgtgtgcaccaacattattatttactgtacttagtccgttttgtagtatttagtgaccttcaccagaagttcagcattcttggcaggcatttttcccttggccacagaggaaccctgtatttctctggctctggctccttccaagagatgggaatgtaatagcagcagctgaagatatgaaaataactgggaacaaaatagacatcaaattcagaaaaggactgaaa

SEQ ID NO: 202704 - DNA, 638 bp, Homo sapiens
gtctaagtgttgtactgaaagattaataattcttcccctcaaaaatacactagcattattttcattcctataaggactactaaatttctcatatcaccatagaatttttgcttgctaaaattccagtattgacaatagcttgactattatcccataccgtggttcttggaattgctttaaacccactgtgggaagcgattggcaagcgggtactgtaacattgtgaggacccaagaagtaaggtattgggatgcagcttatttactgtaatgtctttaatgtgggcgagtggttccacaaaaccattgacagtacagaacatccataggttgccaacagcgtcttacgttagggaagacgaagtaggtggtattccggagtagctgaaaaccccaattcatgtttttgtgagtggagtaactgctcatcagcagcacttgccagcccgaagccctgaggcgtggcatcaccagacacgccttcccatctgggcaggatatgtgggctctgcttcctgatcatcccacacgctaacactggtctatgctgtggaaatgaagatcttcatttttctcatgtaggtattttaacatcagcaggttttgtgagaagcagctcagtgtgtaattaggattaac

SEQ ID NO: 202705 - DNA, 292 bp, Homo sapiens
gggaagctgtcagggattatctgcggttcctgagtagctgaaaaccccaattcatgtttttgtgagtggagtaactgctcatcagcagcacttgccagcccgaagccctgaggcgtggcatcaccagacacgccttcccatctgggcaggatatgtgggctctgcttcctgatcatcccacacgctaacactggtctatgctgtggaaatgaagatcttcatttttctcatgtaggtattttaacatcagcaggttttgtgagaagcagctcagtgtgtaattaggattaac

SEQ ID NO: 202706 - DNA, 361 bp, Homo sapiens
aagacttcatagtgtggtttctaaatcttcctgctctctgcttccaaactggagcggtgatgatttacgtgtatctgggaaccgttttcctcagcaccctgctcctgccagacctggttcttgccactcagatgagtcaggctcatgttttggcttccacatggaccctcccttctccccaacacagttcccagaatacagacttctccccaggtctaagggttttcacaacaacattctgagatgtgattaaggcaatcctgaagagatggggaaaggacagtggatggacagaaagaagttgacttctaggccaggcgtggtggctcacgctgtaatcccagctacttgggaggctgag

SEQ ID NO: 202707 - DNA, 136 bp, Homo sapiens
gtaatgacaagactgccatttaaatcactatttgccctattacatagttcttaatatatttatagtgtgatagtaactatatcatctaccttattgttcaagccacacaattattttttttttttttttttttttt

SEQ ID NO: 202708 - DNA, 376 bp, Homo sapiens
ctaagcagttaatacagactcaactttttgggatcccatttgggaattaagaaaactaattaaaacttggtaataaaaaatgaacccttttatagctctgaatcaagatgtctaagcttcttgaaattgctgtcttgtaaaattctttggtttattctcaccatctccttaattctgtagcatttgacattgctgctttatgaggctctttgtacttttggcttctctcaagtaatattttgggtcccatctctcttgttttcctttactgagtctgtattaactgcttgcaagcggtaattacagactcacaaagccacagacttgttttccacgagcacgttcttaccttagccacgatgtgaccaagccacac

SEQ ID NO: 202709 - DNA, 152 bp, Homo sapiens
tatggagaagtgtcaaatgatgcagcccaaatcaccttttcatgtataatcatctctgtttctgagctcctattacatgtatgttttatataaatcatactggcacttaatcatttattattttgaattataatgttattattttatgttta

SEQ ID NO: 202710 - DNA, 560 bp, Homo sapiens
tgctgggattataggtgctacataaaattgaaaataaagtagaaaataattcctttagtagcccttgcttttcctcctggtaatgggccaaatttttttttttattgggagatggggtctgccacggcactccagcctgggcgacagcgagactctgtctcagaaaaaaaaaagaaaaaagaaaaaagctatcacttgttggtgagatcccttaatcaaatcagatgtatttaagagaatttggtataaagtaggtttatcagtaggttttggagctaaagcaccaaaaagtaactttcaagagttaggaatctcatggtagggaagttttgggcattcattaaatccagggctggatgttttttactctgtaaaacactgtgtaaaaagatgccaagctgttaagtacagggcagttttattataggcttgcctgtgatgttggttactttctctcttttttttttcttcctctagttctactccctgggtagaattaaaaacggttttaaaatgagcgttaattttctgcagtgaacatgtgttttgatagtaagagc

SEQ ID NO: 202711 - DNA, 717 bp, Homo sapiens
ggccaaggaaagagggttagaggaaggaggagttcttctgtggcccttgggtggaggtagttgccgggagcagggtcacctctctggtaaaggaggtgaacagagtgaccacttgcttgtaattttaattgcagataagtttttggatgtgcttccagcattttgtccgttggcagtaaatcagttgttgaagggaattgctcatcaacatccatcacctagaacgctggccaaatactgggagccctccccattttccataagctgatgtatttcacccttagtcatttaaactaaacacagatgtttttataggcctgattgacgcttcagccattgtgattttgctctaggttccaacgaaattctataaacctgtcagattaagtttcttaactctgaaagaatattgcatgttcccgctcccccttttctgttttctttcccctccctccttttccccattactccctgccttcctccctctttctttcagctgtaacagctggaaaccagtaacttgagcttccaatagaatacatttactttctattaaatgttctcaccacaaagaactgataaaaatttgagataatgggtacgctaattactctgatttgatcattccacatgtatatgtgtatcaaaatatcactttgtacctcataaatatgtacagttgtcaattaaaaataaaataaaactgaaaaatagtag

SEQ ID NO: 202712 - DNA, 395 bp, Homo sapiens
acaaaattatgtaatagtagtacatactttcctagatgtttcagtatataatatggcaaaacctcagccatcagatttgaccgaccaatattccacacacatctcttccattcacataaaatctaacaccttaacaataatttgcaatgttttccaccaaaagctgggagcctttatttaattaatacgaaaaacatctattacttatttgacagactcaaatgaaaagaaaatgcactttaacagggaaccagattttactttgaagctgtaggtttgaattggtgcttggatgagggttgccaagaatccagggttgccaagaatcccgggttccaaatccaagaactgaggtcaaacctgcaggaggggtggtgaaggatgcatgaggaggg

SEQ ID NO: 202713 - DNA, 323 bp, Homo sapiens
tcttgaactcccgacctctactgatccacctgcgttggtctcctaaagtgccaggaatacaggtgtgagccaccatgcctggccgggtcttggatttttataagaagaaaaaaaaggtgtggggtaggggagagccaggtgcagtagctcatgcctccctggttcaagcgattcttctgcctcagcttccccagcagctgggattacaggtgtgtgccaccacacccagctaattcttgtattttagtagagatggggttcaccttgttgcccaggtctcgaactcctgagctcaggcaatccacctgcctctatgtcatttt

SEQ ID NO: 202714 - DNA, 374 bp, Homo sapiens
atagaaacaccagtcaatatttgaagactcaaggattagaataaattacacagcctatgaagtttgctttagaattgcatcaaagtaaagatgattctaacatttctctgcttcgggtatttgctaacttatttcctgtattcaaagaactactgtgtatggttgagagggaagaagaatgcaagcactttaaaaaaaagttgtggaatttaggagatgagtcatgcacttttcccttataaaacatgtgttccaaattcatggacctttgcaggggtcagaggtgcttctcagtagtatgttacctagcagggggaaaaaaaaatcagcacactttacgcttcctttcaaagtaaaggtgagactcaacattg

SEQ ID NO: 202715 - DNA, 474 bp, Homo sapiens
tgtatactctatggtggggaggaatatttgactgtgttgttcactgccatatccccaacctttagaataattctggaccctgtagtagatgctcagtaaatattcactgaatgaatgggtgaatgattacattgtcttcacatttgaatgcacattattttttaaacaatcccctattgatggacatttaggggtttgttttttttttttttttcagttttttctactttttaaaacaatgctgtattgaatatttttatacatatatctttgtactgttttataatgatctctaggataaattcctagagatagaattgtgagtttaaaggatatacacattttaagttggatgcggtggctcacgcctgtaatcccagcatttcgggaggctgacgcgggcagatcacctgaggtcaggagttggagaccagcctggtcaacatggcgaaaccccatctctactaaaaatac

SEQ ID NO: 202716 - DNA, 678 bp, Homo sapiens
gcctgggcaacaagagtgaaactctgtctcaaaaaaaagaaaagaaaagaagattgccagcctgaggacaattctgagtcttggaaggactgacagaggggaaatccggtaacagtaacgtggaagtcagggagtttagaatccagcaggtaaaatgtctgaaatcaaggttcactcaaaggagggaccatagattttgtggaagactgacccattctgatcttgtcattggaggaagggtacaatgtggaccttggagattgaggacaagggtaccctaggcccaaagaccttgatggtaaggggagctaacgctaagagtttgctcattcgatgcccatttgacactgtgctcatgttagacccctcatttattgaagaaagggaggggagaggtgaggtgtttgtgtgtggcagtagggctaagagtgacctttgggaatggtagaaaggttagggagtagtgggaatttcaaggaggtattatttggacttgaggagagacatcttctttaagcattgaggagtcactgaaagattttgttggaattggggatcccttagagtaggggacttgatccagatgtgtgttgggaaggagctggtaaaatggttggccttgggcagtggtccagtgacaggaggtgaaggccgaggcgggatagtggcagtggtggt

SEQ ID NO: 202717 - DNA, 871 bp, Homo sapiens
ttggaaataccaaggtatgaaaggcctctgaggtttgctatttttagccagaaataccattgccaccaccaaatagggcatttaatttgtgcacctcagaaagggccaggtttcatagttgtcaaaagaggtcatttcaagttcatgagatctgttctcttttgggacaggtcccccaagggagcctctgctcgactgaagatatcatctgtgtttgcagctctagctctgtttctttggtatcactgactttctcttgttggccacaggaagttgaaggaagtgtgtactccattatcatcaaaaaatgttcccatgatgctcttttaagtgttatgcaaataagttgcacctgctttgtctccaacagtggctgcctggggaatgtgaggattgtcccaaagcacaatcactggctcctcacggcaaggccatgagaacgctcagaagacctcctaagacccttgaggaggttagaaggaaggggaaacaagcatgtagcatcttttcactagagtcgtctttaagatattttgatatcctctagcaagaatagagataggctaatccagcgaaatcagtattgcctttttttaggcaataccctgcccactccccctccaactaagctacagtgagctctcttgtctctgatactcatatcaagataaaccagatgattccagggctaattgcacatggaattcaatgttacatagtaataacttgcatattacccactagtcttgatatagttttctcaccatcatagatacactgatttttacatgtagatacattaatatctacaaaagactttttttacaaaaagagggaggggaatccgaagtataaagtgatcggtacacta

SEQ ID NO: 202718 - DNA, 1068 bp, Homo sapiens
ctttttgaaatgtgtttgaatatctgatatgataaatactggaagatctacccaatgaatccaaagcccacgtagatcctcaataatttaagatgtaaaaggttcctaacaaaacatctgagaaaccagagcactgactcagttagtgtttccattctaggtacccgccctacctccccagtgcccacagtaactaggtttttgcctatataaaactaaacagtctcctaaaagatgcagttactttgaaggtttgttatataaggttttgtgagcccactgtagaaatagactggatggggcaattcatccaattcctaaattttgaagactctgattacaaattggaggcattgtagtacagaagagaaaatcagtggatcatctatgagtcaagatgcccatcttttgatttctaatgttatactagctacctacgacttcaggcaaatcatttatttttttgggcatcagtgtcacaaactataacatcagagaataaaccaaatgatctcatgtcccttccagttctaacttccatgatgtgagggaagcccaaaattgccaatggaaaaaagaaatcataatggacattgctaagcactctacaaagcaaatactttaattgtgaaaaagttggtgatgtgaaagaatttaacagttgcacactttctcctagtattacttcctatattttccaggaaaagtgactggcacctttagatgactactgtgtcataagaaatatcactataagaatcttttaaaaatttacaaaataagaagtgaatattggttacagaaaggacttatcagtaattacttcaccaaggaaagctactaatatttggtaacttaatctaagacaggaaaaatgggggataaaattgttaaaatagaaaactttataaatctaaaacatgtcaacacacaaacagaaagttaaaagctccacactgaaaggaaagggactctttcctgaaataattaaggtttagtttatccaagtcctgatagaattggagatgatttttgtttgttttagtttaaaaatttttgaaactgaaa

SEQ ID NO: 202719 - DNA, 173 bp, Homo sapiens
gtctctgaatacttttctgttccatgtgttttgttcttctcaacaaataccaattgtgtttatgtttgatctcctttgtccgtcttccatatcccttatggccactaaaaaccaattttacatctttgttcttttccatataattttatatgacttattccagtctgtatccc

SEQ ID NO: 202720 - DNA, 363 bp, Homo sapiens
tctgtaaaatggggatattaatgcctcatggggtgtgaggatcagatgaaacaatggataaatcacttgaggaagcactcagaaaatgggagcaactattctaccaaatgggttatttattgacctgcacctctaccatctataaaagggtgtcattgggattcttgaaaacagcaaatgaaatggaaattctgcacatttaataatgatgtaaaagtctgcccttgggtctgaattgaactctgcttttgttggctgggtggctgtggagagagttcctaccccatgggtctgaggacaaaatggcaccaatcgcctccataaacagggttcgccacttcgcaattcatcacttacagttta

SEQ ID NO: 202721 - DNA, 247 bp, Homo sapiens
agagagccctctatccttgcgataaggcagagagtgtaactcagctgattggcacaagccacctgtagaccacaaaactgaaagagcacactgtaacacacggccactggggcttcaggagctggaaacactcaaccctagatgctgctatggagtcaaagcccaaaaacactcctcacgacctgtccgtctgcatgctccccctaggggtttgggcagcgaggcacggaagaagtgagcctagcta

SEQ ID NO: 202722 - DNA, 571 bp, Homo sapiens
aagcctggaactatgcggctagtagaagtcagaaccatttcttaccctaagtgggaatcaaacatattaactaccaaggctgcaactagcttagctgtgtgctctagggcataccactctaatatttcctcatataaaaaatggagataatactaccaccagcctttcctagaagttgtgagatgaaaatgggataataatattcataaattattttgctttgcatttagacatttagagttctgagtacgataaattcatttcagtcacgtgtataatgatgcttggtagaagggcaaactgagaagttagactctcagagtttttgactgtactatcctttccctttcctgtaatggagtaaaacgtttgcttcccatgcacggcggctactttggctctagcctcccttaagtaaaaaggctggtgccactggcattatatttaatttggagatggagataatataaacggatcacaaattgggtctgtgctccatcaatggatgaatgaataaaatgtgattacacacacacacacacacacacacacacacacacacacacacaca

SEQ ID NO: 202723 - DNA, 344 bp, Homo sapiens
tcgttaagagagatggggtcttgccatattgcccaggctggttttgaactcctggcctcaagtgatcctcctgcctcagcctcccaaagtgctgggattacagatatgaactaccatacctggccttctttactgagttttgagagttctttacgtattctgggtacaagtcactttcagatttatactctgcaagtattttctcttattccatggcttgtctttcttttcttaaacgacactgtttttagaaagctcttgttttaaattttgatgaagtctgacttatcaattttgctttggtgccatagctaataaatcttcgcataatctaatgtcacttt

SEQ ID NO: 202724 - DNA, 165 bp, Homo sapiens
actaaatgttactgatattaggaacttatattggaaactaaatgttccttttttaaaagtagttaaaattttattattcctcttgtcattgacttttgatttttagtttttagccaaatggaaaggattgtttctctcaatgagtagtcatatggtttgatttca

SEQ ID NO: 202725 - DNA, 733 bp, Homo sapiens
ccgagccaggtgtgggatataatctcgtggtgcgccatttttcaagcccgtcagaaaagcgcagtattcgggtgggagtgacccgattttcaggagtcctaacctaaaataaaatagaacatactgtgcttaaagcaaggggggaatcatgtaacaataaaaccagtgaagaaaattctaatgctcaggtaaggcctcagaaaaagtggaaaacagctggtcctcaggatcctccagcctttgccaaggaaaagtggttttaatcactgaagaatgaggcttcaacatatggaaagactgtaagtgtcttgacactgaaattttctcttgtaggtgttcctggacagcaagtgagtgacttgctcacaggcggtaattcagggacccaggtttcttctacctggtagctctactgtccttcagaacctcagagccctgtgcattcagccagcaggagaaagaccactactaaggtcattcactttgggagaagccagtcttcatgccatgaggacgttcaggcagccctgtggagagaaccacatggaaaggatctgaggtctctcaccagcaccaatttgccagctatgggaatgggccaccttggaaggagactgtccagcccaagtgaaggctgcagataactgcagctttggccaacatttggctatattgctttgggaaatctcaagccagaaccatctggccaagctgctcttaaattcctgatcca

SEQ ID NO: 202726 - DNA, 601 bp, Homo sapiens
ttaagagagtgctgaagaagaataagttaactataatatattcaatcttgttatacaatcagagtaattaacaccacgtggtattggtacagaaggagatgaacagtggaaaagaatagggaactcagaaatttggaaatttagtacacaacaggagtggaggaaaatcagtaggaaaaggatgagctagtcaatcagttttgttaggacaaatgattttgcatgttattcatgattcttacctcccacaaaacagaaaattaattttagatggattaaaactctaactgtgcaaggttgactctgaagcttttggaagacaacacactgtaagatcatgagagtaaagctgacctgacaacgatgagctttgaccaagcaatttcatttttaggtaaaaaaaacaaaaaacaaaaaaacccccaaaaaactagaggaatttccactctacatatacaagaaggtatgtacaaagaggctctttttacaatttcttgtgacagtaaaaaactaggaaaaaagctaaaataaagaaattgaggtatatacgtacatatagtgaaaagaaaaataaaattgaattatataaaattatatactg

SEQ ID NO: 202727 - DNA, 462 bp, Homo sapiens
catttgcattcccaccagtaattaattgaagttttttttggtccacatcctcaccaaaaattggtattgttagtcttttttgtgtttagaacattttattatgtgtgtggtgattgttgctttaatttgcatttcccaagtgaaagatgatgttgaatagcttttcgatatttatttgtcatctgaatatcttctttggtgaaatgttcagttcttttgcccattttaaaactggggttttcatttacttattgatgagttttaagagttctttgtatactttggatacaagtcctttatcaaatatgtattttgaaaatattttctccgagtctgtggctttacttgttattctcttaacagtgcttttcacaagggaaaggctttaaatgctgatgaggtccagcttattagttttttttcttttatgaatcaccttgcagctctattagtttttgtttc

SEQ ID NO: 202728 - DNA, 353 bp, Homo sapiens
agaaaatatccacaatgaaatttctacaagattagaggaaggagagaggcaacggggattccatttctactaggagtatcaacctctgagagaaaaatatccatctctgtggatgtcatctgctctgcagaaaaccctttcctggaactcccaggaactgctgtactgaagctcctgcacatctgtgaagtgtggaagctgtgggtgaaaacagtaaatacttccagttgcccgtgtgtgtcacttaaccgaggaatcctgggaaagtaaaagttgtcaccacaaaatagctactgtagtggaagaacgtctctgtcattttctgtaatgaaaaatctggtaacatctgcaca

SEQ ID NO: 202729 - DNA, 591 bp, Homo sapiens
ctggtgtcgaactcctgacctcaggtgatccacccgcctcagcctcccaaagtgcagggattacaggcatgagccacttctcctggctcaaagcagttttaaaagagtaatctgctgatagtatctaggttggattgaggagtgaagagattctgtaggtaggggttcagttaggaggttattgtagacatagagtagtaaatgataaggatccccaggtaggacttgacaatgggaaaaaaaatgatgaattgtgagatgttctgcaggaaaaatcaatagggctacctggttcctagcaaggtgcaggagaaatacaaggagaaagatttaaacatctttttgaggcatcaaagctgactggccaggagaattagggttccaatgagggaagtaaatgttcagccagagaagcttattgattggggagagatggtaagttcagttccgggcacattgaggtctatgtggaaatgtcaagcagacaagggaacaaagctaaggaaatgggagtcatgagaatggaagggaatgagacctccaagagggaggtcatagagagaaaaaaaaggttggggtcttgcaatgcta

SEQ ID NO: 202730 - DNA, 252 bp, Homo sapiens
ctggtgtcgaactcctgacctcaggtgatccacccgcctcagcctcccaaagtgcagggattacaggcatgagccacttctcctggctcaaagcagttttaaaagagtaatctgctgatagtatctaggttggattgaggagtgaagagattctgtaggtaggggttcagttaggaggttattgtagacatagagtagtaaatgataaggatccccaggtaggaccacttgcgaggctagacaccttgcgag

SEQ ID NO: 202731 - DNA, 491 bp, Homo sapiens
  misc_feature (1)..(1): n is a, c, g, or t
  misc_feature (12)..(12): n is a, c, g, or t
ntctagaggatncacattgagagaaaggactacatgagccccgaattaataccaatagaagggcaatgcttttagattaaaatgaaggtgactttaacagcttaaagtttagtttaaaagttgtaggcgattaaaataatttgaaggcgatcttttaaaaagagattaaaccgaaggtgattaaaagaccttgaaatccatctaatcaaagaaatgaaagttccatacaaattttagaagtgttttttctatttctgtgcaggatgtcattggtatttagctagggactgcactgaatatgtaaattgctttgggtagtattgtcattttaataatattaattcttctgatccatgagcatggaatatatatttcattgtgtcctcttcaattactttcatcaaattttcatagttttcttgtatagaactttcatttctttgattagattgatttctaggtattttatatttatgtagctactgtaaatg

SEQ ID NO: 202732 - DNA, 440 bp, Homo sapiens
cttatactctattgagaagaacagggcggggctccaagaggaagaaagaatacttcattctttctagataaatacttcattatctaggcaataaagtccccatttcccaaaacaccctgagttgagggggaggtaggagatccatagactacaattagatcagcgtggaagatatatttaatttttgtttggttttgtgggtaaggtgggaaatatcaatgctaaaatgaacatgagttgtgtggacacacattatccataatctttcccagctggctacaaaggttaaaagttggccacattctgattcacctcacttttcattcattctgtggtccaagagggcaagctatttactgatctgaatgtttactgatctagacattttaagtagggttaacctgaggccagtgcatggtggtgtttcatccaatccactg

SEQ ID NO: 202733 - DNA, 239 bp, Homo sapiens
taatataaggtgatttcagttaaccaccccactcttttttactcaattgttttgtgtatttgataagtcactagctatatactgatatccttagaaataatatataataatctttttcaggttatcaagtatcattagaactaactcagcccactagctaatattttgtttttgtgttaaaaggaaagttaagggtaaagcaccaggcttaatattgaaattatttcttttttcataag

SEQ ID NO: 202734 - DNA, 377 bp, Homo sapiens
ttcaatttctagaccaagtccttgtgtgaacatgtttttgtttctcatgggtaaatccctaggaatagtattattgggttatatgctaactatatactgtatgagaaactgtatctgttttctaaagtggctatatccttttgcattcccagcaatgtgttatttcttcgccaataattcttaggttttaattcagtacaagtgtgcttttcccttacctcatggagcataattgtaatgactcctttaaagttcttgtctgatagttttaacatctgggttatcttgatgttaacatttgttgattgccttttgccctgagaactggtcctactcctggttttccattattcatgctatgctgtgtagattctggg

SEQ ID NO: 202735 - DNA, 601 bp, Homo sapiens
tattcacagcactacataatttaagtgattaaattcatccccctttggtgaggttggggggagtttctaggagaatgacaccctcacctttggatgttgagagatgcatatttatggaagtgtgcatttcctctacctgctcagtctaaactgactttcttcctggacagatccttgtgatgatgacttctgtcacagatcacaagagagccagtcacaaactgggtgtctgcactgaagagagtcctttagagactgagtgtctgatggacctgtgtttgcaattgtctttttctatttatgtgacttcggaaagttactactgagttttatttcttcttctccttaaaatggtaatgataaaagtgaaaatacctagctcatagggtggttgtgagaatgaaatctgaaaacatctataagcaccctagctgcataagagctataccagtttttctcaaaatgttaagtacctgtgaagtcatctggagatctttttaaaatgcagacactgattcattttatttagttgatctagggtgaggcctgagattttgcatttctaacaagctctgaaatgatactgtgctggttcaagggc

SEQ ID NO: 202736 - DNA, 400 bp, Homo sapiens
cacacagatggctcgcttggctgtgcctccccagccttcgccacggccctgaagaacctctacatgagtgaggtggagattaacttggaagacctactgggagtgctggcttccgcccacatcctccagttcagtggcctgtttcaaaggtgcgtggatgtgatgatagccagactcaagccaagcaccatcaagaaattctacgaggccggctgcaagtacaaggaagagcagctcaccaccggctgcgagaagtggctggaaatgaacttggttcctctaggggggacgcagatccacctccacaaaatcccacaggacctgctccacaaagtgctgaagtcccccagctttcctgagaactgttgctttctggaccgggacataggacggagcttga

SEQ ID NO: 202737 - DNA, 196 bp, Homo sapiens
gtttaaatccattgtttctttgactttctatcttgatgacctgtctagtactgtcagtgtagtactgaagtcccccactattattgtgttgctgtctatctcatttcttaggtctattagtaattgttgtataaacttgggagctccagtattaggtgcctgtatgtttaggattgtgatattttcctgttggaca

SEQ ID NO: 202738 - DNA, 250 bp, Homo sapiens
gtttattgagcacctgctgtgtacacgcagcactgcacgccggttactggggttgatacccgtccatgctgctactgtgggggagggccgagagcagtgtttctcaatctgggttccaccattcctgacgggaatgtctaaacatgtgctttccgtgttcccagccatctaactgtgcctggcgtgagcctgtgctggttactgggcagccccgctgtgagtgggcacttctgggggatccaggtatgag

SEQ ID NO: 202739 - DNA, 483 bp, Homo sapiens
acagtcaggaaagttactactgtataaagacaaaggaatttatttcactggatgaaaatcaaaggtcatataatggcaggcaggcggtttatttacttcagataattaatagagagttcaccactggggaagcagcagagatattgcaatactctgacaataaatcccttcacaaagttgtctcccacctatgcctgttcctacagctatgtgcaggcagatcccttgcacagccttcttctctcctctcagcaacatctggacagcttcttggggtggaatatttagttttaggtaactgcttatgtaactgagctcttccttctggccttctttcctccctcagaggaactcccttaaaggtatcatgtgtcagatttcatcagggaatttgagaagtcccctggaatctccaagagaaagatctttttctcatatgggaaaattacaattaaaaaaactaacactctgccataatagttt

SEQ ID NO: 202740 - DNA, 352 bp, Homo sapiens
gaaagaatacttccatcaaattggaacatctgagttatgctgagaaaaatctttcttatgtaaggaagagatataatgttgaagattcttgtgtttaaaaagcctatatatatttttattgatgcattaaaacaccataaatcaatggttagccatcttaaagatttcagacacttatctttttgacaaatcatctatcaaagtgttttgcttgaaatttgaattaagtggagcaatatgacaaattattttaaacaatattctgctaacattatataatagcatagagacattttacaggcagtgttttagagacagtatccatagtctgcaagacacacaaaaagtatga

SEQ ID NO: 202741 - DNA, 751 bp, Homo sapiens
aatatttcggccgttcatggtatttctttctgaaaacggtaacctttcttcttctatgtagaacagcagtgcccggcttacagtggctctggaaagaaggcctgtgtacttggagacaccccagccagtggggtgcactccaggctctgagggcttctttttccaccagtgtggagagcctgtggaatgtcgtccgctcacagaccagcctgtgggggcagccggctggtcctcaggaaggccagggtgctcagaacagagattgccattccctgctgcactcctgccagcctccctgaggcgaggcacatcctgacgacagcccatgcgcatcagatgcctcctccatgggagtcaccaagggaaatccattctttccctgagacctctgtatgtcttgccaaggctccatgcacaggtgcggggctgcgtggatcagagcaggtgttctctgaaagaacaggtgccagggctttctgctgactgcagtgaaacgcctccatgcttggatgtcaggagggctctagctcaaaccctgtgattctccagtgcagtgaaatcccggaggacacagtgacagacctcccatgtgaccaggtctcccataacgcatgtcccttttgcaaaccgagctaaagccacactaccagcctgctcacacaacaagcgtttattatttctcaccatctttggaaccagtacttggtgcccggaagcaggctgatcacagggtggtaacctctggttggtg

SEQ ID NO: 202742 - DNA, 425 bp, Homo sapiens
cttctgctgctttcatattcactcctaaataagatttagaatctttttgtcaaatacaagaaaacacatccatagacaccattgtgcttctgtgttttacttctacatctctactttttaacattgttctagccaattaagccaagaaaatgaaaacaaaacaggcaggtaatgactaaaaggcagaaaagaatatatatgtgaaaataactaaaacatacaatattcaactggaaggttagattttgtttacaaattaaaaacacagtatccttatagaatcagtaataaccagttagaaaaaatccgaagttccactatttggaaagctgtgtcgtcgggtcttttcagggcctggaacatctggagcgactccccatcctgatcatacgtgaactgtcccagaagctgcccttcttcctgat

SEQ ID NO: 202743 - DNA, 395 bp, Homo sapiens
tgcctcagcctcccaagaagctgggattacaggtgcctgccaccatgcccagccaattttttgtatttttagtagagacagcgtttcaccatgttggccaggctggtcttgaactccttacttcaggtgatccaccctcctcggcctcccaaagtgctgggattacaggtgtgagccactgcacctggcctaaaataatcttattcgagaggaaaatacttatttgagagaaaacggggccgagcaattctacaggtaaatgaaaaatttcatgattgctctgcttgcttttcattttgaaaccataggaaagaaagatgatttatgggatatggtacaagtattaagaagagttatttttttttcttggatttgcaatgaccagcaagaagcag

SEQ ID NO: 202744 - DNA, 781 bp, Homo sapiens
gctgggcatggtagtgcatgcctgtaatcccacctcctcagtagctgagactactggtacatgtcactacacccagcttttgttttttaataaaaattttagattgcttaattctaggaaaacctattaagattttgattggaacttaattgaattaataaattagggagattatatatatatttttgataattccttgagtatggcatctctccattttttagtctttgaattacgttttgtaacttctgatttaaatttgtgactcttacgaatgcaacttttaaaaatatatacagcttttccaaatatgtaggaatgctgttgccttttcctctgtctctctctctctctgtctctctctctctgtctctctctctctctctctctctctgtctctgtctctcctttcttttcttgacggagtctcgctgtgtcgcccaggctggagtgcagtggtgcaatcttggctcactgcaacttctgttccccggggtcaagggattctcatcagttgatggacaaagttgttttcggccaggcgcggtggctcacacctttaatcccagcactttgggaggccgtggcgggcggctgaggcaggcggatcacctgaggctgtctcagcctcccaagtagctggaattacaggcgtgcacctccacgcccagctaatttttgtatttttaataaaaaaatgcaaaaaattggccaggcatcgtggcgggcgcctgtactcccagctattcgggaagctgaggcaggagaatggtgtgaaccc

SEQ ID NO: 202745 - DNA, 507 bp, Homo sapiens
tccgcaagtgctgacccgggtgcttccttgttgaattggggttttatagcttcttacctagtgtttccccacttctgtttttttacttttaaccctcttttactataatgtaatctctttttcccttaccttcccacagatgcaagaatttttctggtgttttttgactgctgtatgataaagaagtaatgttgaaatttaaaaattatttagttgattgaagattataatataaagtttatattaaaatattaatttatagaagacattgttttacacttacctgtttaatatgatctgtacttagtttttaaaaatattctgagcaaaaggtgatctcagtgcactgcagactccgcctcctgggttcaagcaattctgcctcagctattctggaggctgaggcagggagaatttcttgaacccgtgaggaggaagttgcagtgagccaagaccatgcccttgtactccagcttgggcaacagagtgagactatgtctcaaaaag

SEQ ID NO: 202746 - DNA, 437 bp, Homo sapiens
acctggacttacagacacccacagaaccccccaaaatacctcagcaaagtagcttggacctgaagcccctatttatagacccatagaaacatcctacaagagttcttgagacggagcccaccctgaccccaaacccagggtcacccagcaccataagcctcagtagaagtgtctgaatttcccttattaaaaaatttttttaatttgttttttgtagagatgaggtctcactgcgttgcccaggctgatcttgaactcctgggctcaagtgatcctcctgcctcggcctcccaaagcgttgggactacgggcatgagccaccgtgcccggcctgaattctccttcagcttggcccctccatagcccccaatcccattcctggagaagccagaaccttctcgccttccccagccctggcctcacatctggcaggcctg

SEQ ID NO: 202747 - DNA, 665 bp, Homo sapiens
  misc_feature (584)..(584): n is a, c, g, or t
  misc_feature (602)..(602): n is a, c, g, or t
ggtgccaagaccattcaatagggaaagtaccctcctttcaacaaataagtgcagaaaactgaatatccatattaaaaatataaaaactcaaaatgcatcaaagggccaaacttaagagttaaaactatacaaattttaggaagaagcaagaaaatattcatgccataggattctggcaatgattccttacatataagacaaaagcacaggccaaaaaaaggaaaaaaacacaaagatgacttctcaaaatcagaaactatgtatatcaaagggcacttaagagagtaagaagaatatccacagaaagggacaaaatatgggcaaatcatatactggaaatcctgattttatttggtttcactttattgcacttagcagatactgcgttttttacaaactgaaggttgtgacaactttgtgttgagcaagactattggcaccatttttccaacagcatgcacttgcttcatgtttctgtgtcgtctttgggttatacttgcaatcaatcaatcaatcaatcaaccaataaatcaacgttgtgtatgctgtgactgctctattgaaatggtcgccaatccggcgancatttcaataaaatcccnttcacactgatgggtcctcaccaccaaagctcgagggtttctcagacaccgtactatcatgct

SEQ ID NO: 202748 - DNA, 517 bp, Homo sapiens
ttgtgtttttttctttctttctgggattccttgtacacacgttagattgtttgacattgtcccacagctcttcaatgccctcctctttttttctccttccattttagttttagataatttatgttggcctttaaaattattcaccagttcttccttgttgagtatacttctgagccagtcaaaggcatttatctctggtactgtttgtttctagcgttttacgctgacgttcttgaaattcctcgtctgtagtacaacatttcagtcatctctgagtgtgcttctgttgatgtttctctctcttgacagtgggttcagatttctctagtgcaagacttttcaacctcaatatttttgatgtgttgggccaagtaattctctggggggaagaaggggctgccctgctcgttgtttggtgctgagcagtatcccgttggacaccagatacctcccctatagctgtgacagccataatctttcacctgtgccctaggccatagggttcgcttccctccca

SEQ ID NO: 202749 - DNA, 686 bp, Homo sapiens
aaatagtattacagcaaacctacctcaaacagtttttacctatgtcaggattaaacttaaaattcttggcataccatactttttgcattcagcttgaattttcagacttaatgcttggcatatttattacagttagcttgagttttcctaaaatcaattataaatagccttcattatctgagaaaatatttcaaaactttgtaacaagaaacattaacaacctacaccttttttcctggatctgagaaaaaaaaacctgattttagcagtgtcttctcttgtgtttaaaatatttgggtctgcaatcatgacaaagaaaatggaagttcaagctgcacctatctagcaactttcagtgacattaacagatgaaagtgcatctcgaaatgacttttggctcaagaacaaatatatacttttataaataggttagcttctttctcagacaacttcatttaactagaagaaattaacgacagagagttacaactgtaacctgagggtaacacttctttataagaatggataataactaaatgagtggccctattcaggaaggaaaatttggcctcagaagaaatccttaggttttactgtaccagtctgtaagtgctgctaaagctcagtgcatttagatcatgtactcttaatatttttctcatgttcaaactgatgatgaaatgtga

SEQ ID NO: 202750 - DNA, 480 bp, Homo sapiens
aagttttagtatgcaggatgaataagttggagatctcatgtacagcatggtgactatagttaataatactgtattgtaaacttgaaatttgctgagagagtagatggtaaatagtcttaccacaaaatgaaaagtaactatgagaagtgatggtatgttaatgagcttcattgtggtaatcatttcacaatgcataactatatgaaaacatcacattgtacaccttaaatatatacaatatttatttatcaattgtaactcaacaaagctggaaaaggaagaagagagaaggtgatgtgaagatggaagaaacagagacagaaaaggtgctatgcttgcttctggctttgacgagtgaagccaggagccaaagaatgtagtcagcttctagaagccgaaaaaatcaaagaaaaggtttttctcttagatcctccagaaggaacacagccctacagatgcctgacctccagaactataagt

SEQ ID NO: 202751 - DNA, 584 bp, Homo sapiens
cacttgatgtagttattcatccactacaaaaaggtgttctaatcacttgcagtgctactgaaagcatgtcctgtgaatgttacttgtcagtgacaaaataggtacagaaattgaaataagagtttagaaatttttagagccgtttgatggagtagctttgtgaatctaataattgaggcttacattttgtatgtctttatttttctcataatttatttttattttataaacatgtctgtttgcaactcattagaactttaaaaaaaaaaactagtcattcactctaggtagagtagaagtactgactatgaaggatctttaaaggtcaatagtggtcctaatacgtaaaataatttgctcatatggtgtatttaaactattggcaactatgtaaaagggggaatgggttgaccttcatgttacaaatattaatttctcctgcataaaagtaccctcattgaaatagaggatagagattataaattatttttttctgtcttctttttacctagataagaatttaccacatttagtctggtaaataaccatctgtatggtcacagagagccacacagaagtgaaaa

SEQ ID NO: 202752 - DNA, 278 bp, Homo sapiens
tctgcttctgtttcctcatctgtaaaatggggataatacaaggttatatgtcaatccacataaggtgctgagaacaatacctgatccatgggaagtactctgtaagtgtatgattaaataaaacaagtaaattccaagaccaaggcacccatgaaaatgctgatcatgccccatccctgaagggcaggggtgagcaggcttagatgaagtaggctgtactcctcctgacatcaaccccaccagacgggcaatggagcaaaactgctgtcccctccata

SEQ ID NO: 202753 - DNA, 486 bp, Homo sapiens
tccccccaccccaatttaaacttttctctgattataaactatcctgtccaattatatgactcttctttaaactttttgttgactattttctgatgtcttttacagttcaatttcaatttgacgttcattttcatctgattttatttgcaatttcactgttatgcagtttgtcctggacttcatatctttagcattataatttggaaaatgtgtgtacacatcccaaatggtgactctcagtcacttagccacttagtttatgttagtttctcaatagaaacactactgatattttgtactgaatacctctctgtcgtggaaaaggggcacttttctttgtgcattgtagggcattggcagcacccctggataaactatccaccctactcacctctgcctccgcttgagacaataaaaaaaatccaatactgtcaagtgtcccttggtttggaagcaaatcacccctaattgaaaaccattggttta

SEQ ID NO: 202754 - DNA, 366 bp, Homo sapiens
ggaagttgtagggaacatggacaggacagtgggagaagggtgccacagagcaccccagaggctcaggcattgaaggcctcaactgatgtcttcaggtgaagacacaggtggggctgcaagtaggactcactgaacatctaagattttccttcccttcatgccttttctctgttggttctgtgaatgctaacagccaggctcacagctcctaggcaggagattgaaggactctactttcatgaaaatgacctgtccaaaagacaatgccagttgggactttctcacacgtagctctgctggtttaacctgtagcgaaatttaccaatcagaggctctgcgcatggacacagcttctactgagtgttt

SEQ ID NO: 202755 - DNA, 488 bp, Homo sapiens
tagatcatggggggtggtttcgtccatgctgttcttgtgatattgagtgagttctcatgagatctgttggttttataaggggctcttctcccttcacttctcccacacactctctgtctcacctgctgccatgtaagacatgcctgcttccccttctgccatgattgtaagtttcttgaggcctttccagccatgtgtaactgtgagtcaattaaacttcttttctttataaattacccagtctcaggtatgtctttacagcagtgtgagaacagactaatacaataaccatgttctcttctttctggagatctccagccacatttgacttccaggtctgtgggaagcagtccaaggtgcaacctggaacactttcatttggcttcttcatgtagaggaacatttacatgtcgctgcttgttccttctacccatggcctacacacactgccaagctgtcaccttccctgttgtgcaatgtgtttgcca

SEQ ID NO: 202756 - DNA, 387 bp, Homo sapiens
tcaaaaaacaaacaaaaacagaaaaacccaaaccaaaccaaaccaaaccaaaaaacccctaacacttgcaaatagaaagctatgtggtaataacatccattaacttgacacatcttgttttgacatcatagtgtcacttactgtttcaatgaaatggtaatgaaagaatataataaagtattgcaagttgaatgcttgaaggtaattggaataaaaagtttaaaaaaattttgctttttccgggacttcaatttgaagtaaatgagttaattactacatggtaagtgtcataagagtacaatatttattagcctgcagtaggtacacgtggacaggaagacttttcagcggtccactcccccaagagggaattttcatttccgcgag

SEQ ID NO: 202757 - DNA, 179 bp, Homo sapiens
agaaaaaagctgcagaaaataattacaaaaaaagagtgttaagatgtaaacacaaattcagagattcaggagcacaaaggattaagttaagggaaaaaagagttatcagtattttcttattcattatggagagcaggatgaattcttaaaaggtcaaataattgtgagtctgatatatc

SEQ ID NO: 202758 - DNA, 317 bp, Homo sapiens
tgtcccaaacttgatgaaaaacatgaatctacacattcaagaagctaaacaaacttttaagtaagataaattcaaagggatacacacaggaacacattataatcaaattgttatatgacaaagacaaagagagaatcctgaaaacagcaagagagaaacaactaatcatgtagaaggcatcctcaataaaagtcacatctgacatcgcatcagaaaccatagagccaaaggcaatggaattatatattcaaattactaaaagaaaagcattgtcaaccaaaaattctatatgtgccagaactatccttcaaatacaa

SEQ ID NO: 202759 - DNA, 642 bp, Homo sapiens
gcatgttccccaacaggagtgaggacaacagtggcagtggcagcaacaacagctgccacttaacagagctcacccagtgagccaggaaccgagccaggcacatcacacacgatccacttaaccctcagagcaacatctgagaactgcggttcagagaagggagtgtcttgcccaaagccactcagctggtaagtggcaaggctgatttccagcttgaggtgtctgactccccaaaatcttcctttttagtgactgtgccctactgcttcactaagaaaagcctctctcccacctcccgcttgatagctcaaaattaatatcttcttttctctcctcttcccttccctcttctacctctccactcccgcaaacgcccattctcccttctctctcactgttccttcccctgggctctggtacacactcacacagacacctcaggatggacaggaagctgcctttttctttatgagtgagggtttgtgctgacagcccaatccgagaggtggcagtcagacacagcaaagcctgcagtgtggtctgacttaatgagcccccgcagaagcaggaatggaaggctgtgtgtgtgtgtgtgtgtgtgtgtgtgtgtgtgtgttgggatggagaatgcagccaagggtt

SEQ ID NO: 202760 - DNA, 398 bp, Homo sapiens
cagaaataatagcaaattagatcagattgttgggtgaccttacagtcacttacctgtctgtgccttcagtttccttgcttaaaaggggctaagaacagcagttacttcataggtctgttgtaaggacagattgagttaatgcatgcaaaccacctggatcactgcctggtacatagtaaacatgatgcaagtctgctttttaaaaattactgttaaattcagcataaatgaatttctgcaggagccaggatggttcagaaaaaaacaatgaacaaaacatgggctttggaatcctggttctaacactatcctagctcaagtttcctgtatagagcctctaaggttgcatagtagggttgaatgggagtagttataattctagaggagaaaaaaaaaaa

SEQ ID NO: 202761 - DNA, 837 bp, Homo sapiens
cacagtggctcatgcctgtaatcccaacactttgggaggccatggtgggaggatggcttgaaccaaggagttcaaggccagcctgggcatcagagtgagacccagcctttacaaaaaattaagaaattagcttggtgtggtggtgtgcgcctgcagtcccaactactcaggaggctaaggtgggagaatcacttgagcccaggaggtcaaagctgcagtgagctgtgaatgtgctactgcactgcactcccacctggtaagaataaaacgccgtctcaaaaacaaaaacaaaacaaaaccaccaggaccagaagtcaacaaaaatcttatacaacactgcgcaatttggataacattaagaggtaatgcatgaaaaaaagagtttaatcaaaacagcatctgagttggttaaaaaaagttcaatgttttgtttgtttgtatgactctaagtcagagattacaatctcaaatactcacaggggccagatgagaactgcaaacaaggcaaaatggagaactcctggtccatcactgttacataagccagcattaccaaattttctcaaaagaagctaaaaacacagattgttatgcactctcaattaaatgatgctaactaatttaaaaatattttaaatattgtgcaggtccattgtgctgtataacttcttctaagctttaaaagtatgaatacagctggatgtggttgtacgtgcctacagtcccagctactggggagactgaagcaagaggatcacttgagctcaggagttcaaggttgcagtgagctatggccacacatgtgcaccaatagaggaagaccctgtctctttaact

SEQ ID NO: 202762 - DNA, 741 bp, Homo sapiens
agagaaggaggtggaagaagaagaaggagaaggaggaggagaaggaggagaaggtttgttgagcccttactacgggtaagaagcaatcctaatgtttcttgtacacaattttatttatgaatacaacaacctgaagaggtaggaactgatattcccattgtacagatgagaagacagatgctcagagagcttatttgtctgttgaagccaaaacctgtgcccttgaccacaatggacactatatcttctgagctccacttaattagagaatttggatcaagtgactaaataaatcacacaccacacacattaagatacgccagagtgacagggacattaaataaatcaagtatccatgaagtttgctgccttccaaatcagccccctattcttttgccctaagatatcccatcatagtctgtttccttcccttctctctttgccctcaacctttccttccctcttatccatgggaatgactctaggaatcctgttgagtgtatgtgtgtgcgtgttcttttctttttctctcatgaatattacacttttattagccagctatacttgtgttgatgaaaaagacaaaatggaattttgttttcctttaacaatcaagtatgaatggtctgcttacaggatgtttcttcttggggttcttggaggtaacaaaagctcatcattaaacaggtagctatcatttcttacatgcttaagtatcatctttcagataattcttatatc

SEQ ID NO: 202763 - DNA, 208 bp, Homo sapiens
agcactgtgctgagtccttcacatacaccagcctgtctttgtgcttgtaacagtctataagggaagcattattactcccattctacaggtggggaaattaagactcagagagaaaaggtaatttgctcaaggccttgtagctagaaatttggaagagctaacacataccactcttggcatagcagtttagacatggacagctttagga

SEQ ID NO: 202764 - DNA, 432 bp, Homo sapiens
catttgctttgtctgcaataatttttgccactataaaccattctgcaataaacctccttaggtaaataggtagctggatatgtaggtatttttctctctttctcatgtactggtagttatattctgaaatacgtttttaggagtgagattgattaaccaaagaatatattaataatttccagttcttatactattagtgatttcgagcatcttttgatcgtaggctttatgatatcttttgctcttcccagaagttttaaatttttaaatgcattatgtgtccatgtttaatacttctgagttccggccaggcatggtggctcatgcctgtaatcctagcactttgggaggctgaggcaggtggattacctaaggtcaggagttcaagaccagcctggccaacatggtaaaaccccgtctctactaaaaata

SEQ ID NO: 202765 - DNA, 424 bp, Homo sapiens
cagggcatgttttgtcctgggtgattcactcgcgatgactggggcaacactggtcccgttcaggtggatgaacgtctcttaggcactcagcctccatggatcactcttctctgtatttaaaaatattttgtttttggccggacgcggtggctcacgcctgtaatcccagcactttgggaggctgaaggcgggtggatcacctgaggtcaggagttcaagatcagcccagccaacatggtgaaaccctatctctactaaaaatacaaaaattagccggacgtggtggtgcacacctatagtctcagctacttgggaggctgaggcaggagaatcacttgaacctggaaggcagaggttgcagtgagccaagatcgcaccactgtactccagcctgggcaacagagtgaaacgctgtctcaaaaaa

SEQ ID NO: 202766 - DNA, 352 bp, Homo sapiens
gtcagctgactccactgctccaggcatccttggaggtgcttccccatgggctggggacagctcacttgccgcactgaccacatggtccccctgtcgcagagggactctcctgggattgaccctgtccaggaggctgcctccacttttgggatgcctttcttacaaaacactcagacgtcagagacatcacattctgtggggcagatacctcaatacccagtatgtagtatcatcctcctgagcacatccagattccgtgccctcctctccatctcccctgccactacggcccaaggcaggtggaattctccaagggccaaggacgtgggcttcagtgttagggaactaggtc

SEQ ID NO: 202767 - DNA, 158 bp, Homo sapiens
tctgtgaatgtatgaagaagcctgttgaaattgttgcaagataagcaacatccttattgttggagtgatggagaagtacttactaaataaggctaagtggtgttagaccatttgggagaatgacagcccagatgttcgttcacttcttttcctaattg

SEQ ID NO: 202768 - DNA, 506 bp, Homo sapiens
aactcaaatgagaaatgtagacccttctatgatttccaccgtaaacctattcataacattcatgcacattgcatattataaatgttacagaagctggaagtagggtggcatgaaagaagttattcacattcctgaaatataaaaccctcaaactgtatattgatccatcccgagttgcaaaatattcttcacccacctccctcctcaacaatgaaagtttgtggtcttcatgggaatgagtcctcagtcttcatcttgcagactcctttcttttctcttctcctctcacttctgcgctcctcagaatacctgtgagaatcttaaatcttctcagtttgttttacagagtcagagtcattgcattccccagcaaaacttgaccccttagggacacacttcaaatccatgaaagagctcagcaaaccttttgggaagaaaaaagtattctcccttgtgtgaaacatgaccaacattgattaaacactaataataataatacagagaac

SEQ ID NO: 202769 - DNA, 465 bp, Homo sapiens
  misc_feature (12)..(12): n is a, c, g, or t
  misc_feature (14)..(14): n is a, c, g, or t
  misc_feature (25)..(25): n is a, c, g, or t
  misc_feature (39)..(40): n is a, c, g, or t
  misc_feature (52)..(52): n is a, c, g, or t
  misc_feature (54)..(54): n is a, c, g, or t
tgcagctggttncngtcattattcngatcagacggagtnnttatttttgaananggtcataattgttgatgtttatgtgcctctgaatgcaaggcattgtgctgggtggtacccacagctagttaaatagagccttctgggtcaggagcttacactctaaaatggatagtttcaacagaggaggagaggccaggacactcagagaaaaagctgcagcacaggccggctggagaacagtggtcggatctgccgggtcacttggggaacacggtaaccacttcatagccctcgggtggtgcgactcactcccaggcatgtttctcacagtagatttgatcctccacaaagaaatggtccctctgtttcaggttggtgcaacagtcagtgcacaagtaacattcgggatggcggtgacggtcccacagcttcacgaacacaccgacaatgccagaaccacaattatcg

SEQ ID NO: 202770 - DNA, 538 bp, Homo sapiens
gggtctctcagttgtctgggttttcagcgggcttcccagggacaaaaatggttatggctagcgatttctacctgcgctactacgtagggcacaagggcaagtttgggcatgagtttttggagtccgaatttcagctggatggaaagcttagatatgccaacagtagcaattacaaaaatgacgtcatgatcagaaaagaggcttacgtgcacaagagtttaatggaagaactgaagagaattattgatgacaatgaaatcacaaaagaagatgatggtttgtggcctccccctgacagggctggccgacaggagcttgaaattgtaattggagatgagcacatatcttttttttttttttttttgagacggagtcttgccctgttgcccaagctggagtgcaatggtgcgatctcggcacaccgcatcctctgcctcccaggttcaagcgattctcctgcctcagcctcccaagtagctgggattacaggcacaagccaccacacccggctaattttgtatttttagtagagacgagg

SEQ ID NO: 202771 - DNA, 430 bp, Homo sapiens
cattttccaagggaacataaatgttatgcaaaagttctggaaagctccacaccaatgtgataatccttcaagataagccttcctccaaggtaacccgttggaggaagagatgggtggagggtgagtcacagggggctcagctatttgttaactgatacctagtaattgtacatatgtacgggcccatgtgacgttttgatacatgcacacgatgtctaaggatcaaatcaggataactgcgatgtcgtcacctccaacatgtatttctttgtgctgggaacactccaaatcttctcttgtatattttgaaatatgcaataaattattattaactgtagtcaccttggctcttctgtaaagtaactttttttaaaaacttgtattctttatctaattagaaataaacgagctggtgaaattatggctctca

SEQ ID NO: 202772 - DNA, 530 bp, Homo sapiens
gttttacatcaaactgaaatatgtaattattctgtcaaggttcaaatttctttcatcgcttattttttaagctagtactttctacaattatgtatatgttcatgcatatttatttatgttgctgtttttaaaaggaatttattttaaattacggagttttaaaataaggacatttgaaaatgtgacatttctaataccccgtgggtttttatgttcatccttgtaaatttacgtttaaaatatgttaaaactttaactgaagagatatatgttaaaataaattttggctttgaaattatatattttgcttgaactcttggaatgtctcattttagactaaatgtttcagggtttctcaaaggtagattttttttgtgtaagtcagcgttataaattaacttactttacagtttacatatgtagtgtttaagtgtgctgcaggaataaaattaagtgtgaacatgcaaataaactttttcattataaactatcttctattatggcagaaaataaaattataaataaacagt

SEQ ID NO: 202773 - DNA, 302 bp, Homo sapiens
aaatacacattttacaatgatttcatttctataaaaattcaaaaacaggcaatctgatctatggtactggaaattacaatagcagttctcacgaggagcaggtagtggctcttggtagcactgtttcttaatctaggtattagttacacaaaatgtttgttcattttgtaaaatgatttgtgctcttctgtatgttatacttcagtaaaaacaacgtttttctaagttccatatcaaaacacaccatagtgaaatttatggggatagagaggagatgcaaaaagctttggttgtggctgggt

SEQ ID NO: 202774 - DNA, 534 bp, Homo sapiens
tggatagaggcaggttgctatttttaggccatagaatgacagtttcacaatttatatttgatattattacctgccatggggtagaataaaagcttggaggcagctgtgtggggacatttaaaatctaaaattaaacaaattaatttatgtttaattcaactaaggcctttgctaattttcaagtgacattaggcctaaaagctaaatcacagtgagccatcttcactttttgcagatgaggaattttctaacattagaagtatttttagcagtcttaaaattcagtttgaaagattaataagtgaccacaatttgtcaggtaattgctttaattgttaattagccagtgacaaagcaagttgctgttgtcctaatggcagcagtatgagtacttgttagttttaaggtagaaagagaacacttttgcacggtaatcttttagtgcagtagttactgattgcttccatgctgctaccattattacctttacttaattttgcttgcatcaggaatagcaaagatcctttcaatcac

SEQ ID NO: 202775 - DNA, 765 bp, Homo sapiens
gcctgcaggactcagcccagccctcaaaacctggcacccagctggcacccaggccacatccctcagcggcacagttaattgaaaatgcagctttgaggagtgcaatgtctggggaaagactgttcccagaggggcaggagcatctggggcctctggtggctcccagggtccccatgggaggagccctgtgccctccactcccaagtctcagttgtgccatctgtaaagtgggggccgccagggaggctggaggaaggtgacgggacttcaggccttggaatggggctgagtgaggggttcacatggccaccccatccctctccacgctccacccgctggctgcatccaccaggcggtgtttctgggtcacatttgctgcaattcaggtgctaatgggggcaggaggctgcagggggaggggccggtgtctagtggggcagatgtttctcaatggagaatgctcacagcggcctgcagagggggtctggtgtggcctggggctcctggggttgggatttacacagtgagcctgggctttggggcacagctgctgctgacagagggtcttggggtctgggaaggtgcttaaagcccggcccccatgcctgagctcccacacccctgtttagggacacccagatagggtgtctcctgcaggaaattccccacataattcatttatttaaaaaatattttttgccgggcacggtggttcatgcctgtaatcccagcactttgggaggccaaggtgggcggatcatgagg

SEQ ID NO: 202776 - DNA, 532 bp, Homo sapiens
ttcaccaaaggggcttgcagtggtttattaaaatggctgcatgtcctctggcactctcttcatggagaagcggggtctatgtgccttctcttggagttggatgggcctgtgctggttttcatccatggtcagaacatgctgtggaagcccaggctccccaggaagtccctgtcttggtggccctgtcaacagcctccactgagctgagcttttcagtctacccagcctgggtgccagatgtggggaagtttccagcagggaagccttcagccccagccaatgaattcttcccagctgaggcccagacatcggggagcagagacaagccatcctcatgccctgtgtcaacctgaaataagtgaaaggattggaatcagctttaaagagtttattcaagtaaaaagctgggaatgaccattcagaaaacaaggattccacagaaacggagttagtgctctgaagtgaaaagttaaggtctggcttatataggaggaaaataaagaaatttaacaggattaaaacattttctata

SEQ ID NO: 202777 - DNA, 506 bp, Homo sapiens
caatctagaccagaaatctcaaactcctaagtaaaacaattataagcacttaacacctatcttatcctgaagtcctggaatgtcagagttggaagagatcttagagctcattttgttttatctcctcattgtatggataaagtgtagtgcaaaagagtgagttctaggccagaggtaggccaataatttaattttcccaactcacgggccaaggttctttccactgcaccataatactgatccccaattttaaggttccttgtctgtccttctaaaccatcaattcactcaacaactgcttaagtgtatatagtatgtgcacatctgtgccatttgttgggtatgcaaagtctaaaagacagggtgcctgccctgagatgctcatgacctaattcaaatgcatccttcctgtccctctccccacttctcctggatcttctcatctgtatctttttccacgtttgtaaatataaattcaatagaaataaacagttttatatatggca

SEQ ID NO: 202778 - DNA, 694 bp, Homo sapiens
gtcaaaaaactttattgtgcttttggagatattttgaatttttgtagtagcattttttagttattctaaattgtagaagctgcttctgtttttattttgtcttctatcttttcttggagtgatcacgcagaattttaccttctatgactccaaagcagcatttccccaagtatgttccatggaatatgaacagatatcatatgatgtaaaagattttgtggttgacacacttgtaaaacacgtagacaaaattaaacattttttagctgtagaatgtcttaatcatttaaaccaactaatctgtacctcctcattaactggtccaaaagatttctgtggctttttggtatcagagattgctttgacattattatattctagattatagagtatattaagcagattcttgaggaaattagttgtttctacagttactaattattgacttatatgtgtttaactcaaatataaagtttgttttaaataggatatttttatatgtgtaatgagcaactataatagtatattgattacacttcagataatccagaaagaatgactgtagggccagccatggtggctcatgcctgtaaatctcagcacattaggaggccaaggcaggtagattgcttgagcccaggagctggagatcagcctggggcacatggtaaaatcccatatctacaaaaaatac

SEQ ID NO: 202779 - DNA, 788 bp, Homo sapiens
gaggtcacctgctgcaagaagcactgtgttttctgtgcagcttaatgagagggagcatatcatttcaggactctcacaggatgcagtgttactgagaatctcatgaggcaaatcctaaatgccaggataaatttgcagagatagaactactactttttttttttaaatttccttttgttatgacttgaacgtgtaaggtcatgcttcgagcctgctatcctatagctctcaattctaaactagttgcaagtatattggacttcttgccctgacccctgtccctttgataggccaggtgaatccaaatatgcccgagtgcatctcacagaatacatctgattctaggatgggactagaggtctcctggtatttagaactgcaaaatgaggtagcaaaagctctagtcatatgcctcccatttatttgacatatcatcacaaacatgtccataatttaccaaggttgatccactgcctactacatttgtgtgtgaaaatgtgtcatgctttgtggaaaaagtgaaaatagttatctgtatggtgggtgcactttgagtgactggggtggggtatgagcactgtcttacaaaaaagtcaagagtaatatctgacaaagatactgtcctttaccctggataccaacagatgttcttgttttcattcaaaattacaattatcattgaagtgcacagtggcttttaattgagacagataaaacgtaacttcaagtattgaagtaatttttttttactgtttttaagacaactgaagatctgagcaattcttggc

SEQ ID NO: 202780 - DNA, 594 bp, Homo sapiens
ccatacttgttgttcatgtctatttaatactaacagaaagctgtgatgatcatcctgaatatggatgtccaaatatgacttttataagaatattccaggcagcaagcaccactccttgttgtagcctttctaccccttcttatgaatggaatcatgctgcaaaaatcaaagttcttaccaattttcagtcctaatgtcacacagctaaataattacattcatgtcatctttggaatgcaacatattgctaactttttttttaaatcctggtgaaatagctcaaatattggtaaaggggagaaacttccaagcaagtagctgcaagagaaacatgaaaacagtgtaattctgatagttaccaggtaataaagttagtggtctctataaagaaattatacctttcttcaagaaagttaatgcaaatgatttttttttgcctcactttgttttctctaattagctgacatttaagtgggttgatcttactctccactttccctttgacttggagaaaaagaatttgtcagacactgctgacttttcaaagttatcaccttacaacttccaaattaagcttccggattaagcttggtc

SEQ ID NO: 202781 - DNA, 703 bp, Homo sapiens
catcctgggagccggaaggggcgttgcccccacagggcaaaccttcccccggcctcctggtcggctgtttagagctgagcaaggccaagtgggtgcagctgccccaaccctccggatcctcgtctcccggaggcctgcagacccgttggctttccctgtaacccaaaacaaggagagagtgggaggtctctcgggcgttctccagatgtggttgagactttcccagtgctggggtggcgggtgacatttgtaaataaatgccagttggtccgggtacaaggagaacactatttaaaccccaaagacatcttttctccctgccccacctgaaggcgatattttagatcgccggggccaggattgaagcggggatgatggcagcaaatttgttctgcacaggtgacccggcctgtacgggcgccaagtcccagatcccgcaatcagagcggccagagagcagagaagagacctagaggatctgcaagctgacctatccacccgagactctccgctctgagcgaccccagggtgcaggcgccctccacgcgccacctcctctagcggtcccccagggtcccttcccagtcctcgcactgccctagggcttgcttggttcccagaccagcgtggaaggccgctgggccccggaacccaaggtccctctgcttctgctccactccccagtgcccagcgcctgggaatt

SEQ ID NO: 202782 - DNA, 1201 bp, Homo sapiens
gtgggaggaggcgacacaagatgggaggtggccctgtctcttgggagcaaaggcagaaggaggtggaggcagctcagggctcggaggagaggggtccgggctccttggctgtgtccctgctgtctctcgctgtgggtattcaccgaatctctcccatcctcggttttcacatctgctgcatgcaggtcctcatggttctcaagtgaggcaggtggtgagcccatcaggccagtgcccagggcttattctggggacagctcctggagaggaagggctgcctccctaaggactcctgccctgccctgggtgcaaggggttccacctgctgcccctcccccactccccagctcgcctcaggcggatagttcccctctcactccaaataagagccacaatgctgacagtggcccccaaggccctgcccagcggtccccagcttcctctagctacatctcccggccctccccttcacccactcctgtaggcgcctcgaacgcgcctcagccctgctcctcccctgcctgcagcgttcctccccaggtctcccccggctctctcacctgcttccggttttgctcagactgcgctgcctcagtgcgcccttctgtcaccatcctgtgtatagtcggaaacccctgctccctttccctgcactgaatcttccgtgtgctccttttctccatggcatttgttagctttggctatcctgtctaatttgcgtatgtatttattttttattttgctgcctgttccctcattcccccaactccccaatggcagggagttctgttttggtcactgctgaatccctggtgacctgagcagtgatgatgcagagttgttgtgatatttgtggaatgaatgaatgcaggattttttgttttaccttcacttggcacaaatgctgtggttctgttcaccactcccccctgaagtaatgaaagctatgggcccatccctgtgctgagtggagctggggacacagtgggggctaggacagactgtatccctgccttgtggaacccacagtccagtgggagaggcgacattacccacatagtcatgcaggtgacagaggcaagtgctgtgaggggaagggaaggctgagctctgagagtccgctgctcgtgggagaggggtggtcagggaaggcctccgtgaagaagatgggtgaacagagtgccaggcaaggggtacagca

SEQ ID NO: 202783 - DNA, 511 bp, Homo sapiens
agggtaagatgcctgtaggatttctaagtagaaattccagtagggaggtggaagtcaaggaatggaactggaatcaaaagaaaagtggaggctagtgggggaattcagctcaaaaaatcaaggcgtggaaaatcctgataagagcggcagttctcacttagcttgcatcacgatcacctacctaaagggcttgtttaccagagtttctcctttactcggtgtggagtagggaccaagaatttgcatttctaaccagttcccaggtaatactgatgcattaataaccactggggtagagcaaaagaagaggagccctaagaggaaccctgaagaatgctgtggcgaggagcaaagtctgagttgcttggtaactcttaaaatcagaataaccctgtaactccaggcacagtggggagacaagctaagttccaaatcacagcccaaaccgcagtaagaggaaaaatactgtccagggctttacttcattttgctgcctatcaatgaagagtta

SEQ ID NO: 202784 - DNA, 390 bp, Homo sapiens
aacaactgtggctggtgctagcgcaggcgctagatgggatcttagctggtgagtctttctagtgacatttcggactccgaatcagagcacaggctggcagctggtgcctgtctccccagcaggaggcgcctttccccaccttccccgtatccttgccacctcccgccattcctcagcctgtggtttcaggcacctaaaaacaagacaaaaagccagggtgctttagtctctgtcagcgaaagcaggggtttcagagacttcagcccagatccagtccgcgtccagccctcagcctgtgtgctgacaatgctttacattttgaaatggttggaaaaagtcaaaagaataattatattcggtggcacgtggaaattacatgaaattcacatt

SEQ ID NO: 202785 - DNA, 527 bp, Homo sapiens
aggtcatcagggagtgcaccttgagatcatcgttggtttggtccgcgagccgaatgcacatgtagaggatgtaggcggagagacagggcactgtgtccaacagcatctggggcttcaagtctgtcaccaggttgaggatgaggagggcctcgccctctttgcggcactccaacatgccctggaaatccttttctttccactgaactgggacctgcctgttgaactcatggcgcttcctctcactctgggccaacgcctgggcagcttcttcatgtaaatcttcagttgcttttagagcttcctctcattcttttcctcttactttatttttcaccacagagcttcctatcaactagtatgttgaatattttgcttattaactttgtttattgtcttctccctcgattagaatattagctacttgagtacaaggatttgagcctgttacattcactgctgaattttaggctcctggaagatacccagcattcaatagagaccacacaataaatatatgtcaaataaat

SEQ ID NO: 202786 - DNA, 593 bp, Homo sapiens
aatagctatttggagactcattggccaattaaatattgaaggaaaatttttaaatgttttataacaaatcaaaaagttcatcaggctctttagtgtcatattaccatattatctttccatctttgattcttctagacattatacatatatttgctttgtgaaattcttaattatctttttatttttcatattgtttcttcccggatcattcaatagatttagtagcttgtatttaagagagggttagtagcttagtagccgggcctggtgacacacatgtgtaatcctagccactcaggaggccgaggcaggaggatcacttgaccccaggagttcgaggctacggtgagctataattgtaccactgcactccagccctgggtgacagagtgaaactcctctaaaaattttaaaagaaaaaagagagagagggtgagtaaagttgctgcaaaggaaaatagtatatataaaaattcttggggcaattgtgtatgtaataaaggtgttgttgatgtctgttttggtggcacagtgtagcttgttcctaaatagttggtcctcggttagcaggactcagatggtgggttgcaagc

SEQ ID NO: 202787 - DNA, 519 bp, Homo sapiens
catggaggccatgcttcccaaagactacatccagccaatgactagaaagaacagagatattaaagcaggtctttttctgctagacatgagatttctcccataaaatttggctcaaaaattctgtcagtctttccatcagcctgaccagtttgctagctctttcggcttctttcagctccctccctattttccctgacaggtgttaaatatctaatcttgtcttaatatctgcttttcagaggacttggaccaatgcaagtgataataaatgtgatccaatcaaaagtaccataaaataagaactagagactgactcaactgattgtcttgtgggtgaagagattgcaatcctagctgataggttggacatggatagtgcctggcacacagtgactgcttaattgctaaagatttcttggggaccacctaagaatatatccctgtggatagtaacacagttgtaggtggactgattaaaaccattgaaaataataccttcagaggcaaaagaattgactg

SEQ ID NO: 202788 - DNA, 252 bp, Homo sapiens
tcctcacgccttcaagggacagcgtttgatcacaaagatgcgtattctaaagcaagctttcttttgagctgtaatttaccaaaaaaaaaaaaagaagaagaagaagaagaagaagaaagaaagataagacatctaccttaatatcagccaaacacatcactgccagtttggaaacattgcgtttaaagtgaagtatattccacggtgaacaggaaggagccgccgaagtattcagcagttcatattttccca

SEQ ID NO: 202789 - DNA, 531 bp, Homo sapiens
catctctgaatcaccacatagaagactgctcatcaggaacaccagcactggattgttatatgagtgagagataaaattctattgtgtcaaagtacacataacttggggtgtatttgttacagcaaccagcattattaccctaactagtacataagcctatcctggaggagccagaaagcaaatcaagggattctagctccagagtccacatttgtaaccactctgctcagctgcttctcagcaaaggaggcagtaagtgcttcactccagttcattcatggcagaaatgcaaagagagatagagctgagaccaagtctaaagtgttcttttgaggagagtgtctcactgcgttgtatttatctttggccattttgtgtcaaaaaacttctacattatcttgaaatgctgctcacaggaagttaacatttcttttcattctttaaatacaatgtcagctcagatttctgaaaacccaccaaaaatggcatgatttgagaaagtaaaataaaatacttattcgatgtatattc

SEQ ID NO: 202790 - DNA, 398 bp, Homo sapiens
gtttctagtctttggtacgtattagaatcatctaagatcttttaaaaatatgatgttcagtctatactccagacaaataaatcataatctctggggataggactcaggaatcaatatttttaaagctctcaaaataattcaaatgtgcagaaaatttgagaaccagtgcattagtccagtgtctctcaaattttaatgtgcatttggatcactgagtgatcatcttaaaatgcaaattcagatgcagtaggtctggatagtacctaaaagtctacatttctttttttttccttttcttccttctgatcttccttctgacagggtctcactgtttgactgtttgacccaggctggtctcgaacttctggtctcaagagatcctcctgtctcagcatctc

SEQ ID NO: 202791 - DNA, 551 bp, Homo sapiens
tgactatcctttgtattttgcaataaaaagttagctccataggcctaaatgtattttctttttaatgttcacctaattaaattccagatccagacactagccttaataatgattgtctttataattaactaaaggaatctaagtttccttttggctgtggggggagagagtccaatctccatcataaagtttgtttacaccatctgatttggtgaagtgttgaattgagaaactttgacaagaatgtctgtcttgagtccctgtacaactacagaaccctctgaaatgcccaggatcgttaccaacgccatctccattaagtcaagtctgtccacagtggggagagcaaaaggttggttaacaaatacaaaagtacagctataggccaggccaggctgctcttgcctgtaatcccagcgctttgggaggatcacttgagcccaggagttcaagagcagcccgtgaaacatggtgagatcttgtcttcaataaaaaataaaggccgggcgtggtggctcacgcctgtaatcccagcactttgggaggccgag

SEQ ID NO: 202792 - DNA, 912 bp, Homo sapiens
agctcggtaccccacgccgagcgtccacactgggtcatttgtctgtagagtctctcacagtgtggattttgtagattgcattcttgtggtatcatttaatatgttcctctgtgctttaatttgttgctcggcttttattggggtatggctgattgacagtaaactgcatctatttagagtgtacagttttataaactttcacagatgtatacatccacgaaaccattaccacaattgagatagtgaacatagcctttgtcccaacggtgtcctcttgactgtcatcactcccccatggatgccaccctcccataagaaagcactgttctgatttgtgttactataatttagtttgcatttcttagtgttttagctagaatcatagaatatgtacttttttgtctggcttctttcactcagcataattattttgagattatgttgttgtttgcataaatatttcattcctgtttattgctaaataatatccaattgaatggctatatcatgatttgttgttagccatttgaattttttccagtttttggcttttacaaacaaagctgctctgaacatttgggtacaagtttttacatggatatatatttccttttctcttgggaatttcctaagagtggaacggctggatcatattgtaagcatgtgtttaactgcacccaccatgagagtgccatttcctctacattctcaccaatacttgttatggtcagtctttttcactgaaaccattctattaggttggtacaaaagtaattgcagttttgctctcaaaagtaatggcaaaaaccccaattacttttgcacacacctaataatatgtgagtagtgtgtgtgtgtgtgtgaattctagctcctttgctagaattttaaaattagcttgctaatttgtac

SEQ ID NO: 202793 - DNA, 997 bp, Homo sapiens
cagagccggttcctggaaagagctggttccctggcaggctggagggcaggagctggggccacgctggtctgggatagttgggcagggaggctgtctacctggtctccagaatggacggccctgtggcagagcatgccaagcaggagccctttcacgtggtcacacctctgttggagagctgggcgctgtcccaggtggcgggcatgcctgtcttcctcaagtgtgagaatgtgcagcccagcggctccttcaagattcggggcattgggcatttctgccaggagatggccaagaagggatgcagacacctggtgtgctcctcagggggtaatgcgggcatcgctgctgcctatgctgctaggaagctgggcattcctgccaccatcgtgctccccgagagcacctccctgcaggtggtgcagaggctgcagggggagggggccgaggttcagctgactggaaaggtctgggacgaggccaatctgagggcgcaagagttggccaagagggacggctgggagaatgtccccccgtttgaccaccccctaatatggaaaggccacgccagcctggtgcaggagctgaaagcagtgctgaggaccccaccaggtgccctggtgctggcagttgggggtgggggtctcctggccggggtggtggctggcctgctggaggtgggctggcagcatgtacccatcattgccatggagacccatggggcacactgcttcaatgcggccatcacagcggcaagctggtcacacttccagacatcaccagtgtggccaagagcctgggtgcaagacggtggccgctcgggccctggagtgcatgcaggtgtgcaagattcactctgaagttggtggaggacaccgagggttgtgaacgctgtgacagagtcctggatgaaaagcgtatagacggatgaacctgctgtggggacaccttagaggcatttaatcaggcccaggggaggcccaggcgagggtgcttgccc

SEQ ID NO: 202794 - DNA, 1119 bp, Homo sapiens
cagagccggttcctggaaagagctggttccctggcaggctggagggcaggagctggggccacgctggtctgggatagttgggcagggagacggagtctcgatctgtcacccaggctggagtgcagtggcacaaccttggctcactgcaacctccgcctcccaggttcaagtgattctcctgcctcagccttctgagtagctggaattacaagctgtctacctggtctccagaatggacggccctgtggcagagcatgccaagcaggagccctttcacgtggtcacacctctgttggagagctgggcgctgtcccaggtggcgggcatgcctgtcttcctcaagtgtgagaatgtgcagcccagcggctccttcaagattcggggcattgggcatttctgccaggagatggccaagaagggatgcagacacctggtgtgctcctcagggggtaatgcgggcatcgctgctgcctatgctgctaggaagctgggcattcctgccaccatcgtgctccccgagagcacctccctgcaggtggtgcagaggctgcagggggagggggccgaggttcagctgactggaaaggtctgggacgaggccaatctgagggcgcaagagttggccaagagggacggctgggagaatgtccccccgtttgaccaccccctaatatggaaaggccacgccagcctggtgcaggagctgaaagcagtgctgaggaccccaccaggtgccctggtgctggcagttgggggtgggggtctcctggccggggtggtggctggcctgctggaggtgggctggcagcatgtacccatcattgccatggagacccatggggcacactgcttcaatgcggccatcacagcggcaagctggtcacacttccagacatcaccagtgtggccaagagcctgggtgcaagacggtggccgctcgggccctggagtgcatgcaggtgtgcaagattcactctgaagttggtggaggacaccgagggttgtgaacgctgtgacagagtcctggatgaaaagcgtatagacggatgaacctgctgtggggacaccttagaggcatttaatcaggcccaggggaggcccaggcgagggtgcttgccc

SEQ ID NO: 202795 - DNA, 591 bp, Homo sapiens
agcgattctacttcctcagcatcctgaggagctaggattacagacatgtgcccccaggcctggctaattgttgcattttcagtaaagactggctttcaccatgttgtccagactggtctggaactccttacctcaggtgatccccctggtacagcctttcaaattgctagtattgcaggagtgagccaccgggaccgcctaaggatagctttaaatcaacaaaataataagttttgttagactgtcagcagaccggcaggtagacatatcttagtttttacctaggcgcctatgtaagaaaaacaggccaggtgcagtggctcacgcctgtaatcccagcactttgggaggccgaggcgggagcatcacaaggtcaggagatcgagaccatcctggctaacacggtgaaaccccgtctctactaaaaattccaaaaattagccgggcgtggtggcgggcgcctgtagtcccagctactctggaggctgaggcaggagaatggcgtgaacccgggaggcggagcttgcagtgagcggatattgcgccactgcattccagcctgggtgacagagcgatacaccgtctcaaaaa

SEQ ID NO: 202796 - DNA, 202 bp, Homo sapiens
tgctgtcctgccagaaacaaggactttggagaatgtcacaaagaagcaaagctagactgaaaagttatgtgtcccaggctagagctataggcttagggatctatttccaactggaatatttcagtcacctttgaatcgtgctataggaaactcacgttattcccttactttgattgtgaatgttatataatgctaattatag

SEQ ID NO: 202797 - DNA, 702 bp, Homo sapiens
aaaggttaagatagtaaatattagtattttaccacaattaaaaacaatttttaaaaattagtaaaggattcgatgtgagtatgataaaatatgactgcaggaggttaaaaaatattagagattaaaatagttaaagcaatgttgacattttgtatgttgcagtcttagaatttaaaaaattttaattttgaaacctagttttatgaaatttcatttgggatcatttttagtagcattatgaaaaggatacatttggttcaagattatttcagataagaccaacgtaaggcacgtaaagtgttagtaaatgaaaatatcctttcttagatcctagttgctggataaagaatatcagctactactagtaagtggttttatgtagtattgcttatggctattttagttgcacttatatcattttaaatacagtttatgaacattgtactactccattatattattaatttatcttcgatgatatttatagtatcaatttaaaagctgtaaaacttcatgaaaagtagcttaaacaaggattttgataaacaaaagctttcagttttaaaagcaaatcatggaaacaacttcttaaagaagatttgaagtttttgttgttgctgttgatagaattatgaaccttataaactcagtattttttagttaacctaaatacataaatctatttgaattcatcttatgaaa

SEQ ID NO: 202798 - DNA, 169 bp, Homo sapiens
attgaggattgttccactcagcagaaggtggtgtgatctgtattatcatgttggatgcaaaaatttctaaggtataggcacctttgaatatgaaatatgaaagatgtgcagtcgtgggcaagatgttctggtcacttctttgaaagagggaataaaagagaattaacta

SEQ ID NO: 202799 - DNA, 426 bp, Homo sapiens
taaaagaaaaaaaaaaagattcatttctctaattaattcatctaggaaaaaaagggttggagggcagatgaaattcaggagaaaaaaactaagaatggaaatgatgtatagttgcaagtagggaaggacaaaataaaccttagtaatttaatttacaaatcatcccctgaaaattgatatatatttgttatatgaattgtctctatgccctctccattacaaaaatagaaaagcaaaaggcaactaataatgaaaataagttgggtgaggtgacagctttgtcatttttttaattggattcgcgctctccttcccttctgaaatgacgcactcaagactctgcctccacagctgtcagtttagttccctcagacattattaaaccctgcaatgaagcttccattggaataaatctaccaaaagtgg

SEQ ID NO: 202800 - DNA, 189 bp, Homo sapiens
agagaagtggtgaaacatgggtgtaaggtgaaggccagaggtgagggtggcaaggggctaacaaactagaaatgatatatcttcgtgtcaagaacaggaaaggacagatagaaacgctgtgtggccactggccctggaaacaaacactgatgtgaacagttaatgttgccagttttgaacccagctttg

SEQ ID NO: 202801 - DNA, 308 bp, Homo sapiens
cttgaaaggcttcttctcagaccaaacttagcttcaaaatggctaggtgcttccgtctgtcatttttctgaacagaatctcagacatcattagaaaagttggagaaggatgggcatgagacccctcaggaaagcgacagataggcaggcaacacaaatgagcaaggaacccaagcccaagaggtccttacccactgaacaggctttttatcttgaagtctttgtatttgatctggaggttcacagaggaaggtcccactcatttaatgcatttttttaagtacaataaattgccacacaaaagtctca

SEQ ID NO: 202802 - DNA, 608 bp, Homo sapiens
tccccactgctcgccttttctctgcaccacaagcaggttctgtaagaaaccatggtaggcatgcgtacaggcccctgttggggaaatagaattgaaaacaaaatctcttgccaacccagaaaagctctttgcaaaagtagaagagaaaaacagcttttaaaagattgaatgtgcatgaaaccagaatgtggtgcgcaccatggacaatcccccgagcaactgcaaagacgggagctctgagcctgcaataccccaagcgactgcaaagacgggagctctgagcctgcaataccccgagtgactgcaaagacgggagctctgagcctgcaataccccgaatgactgcaaagacgggagctctgagcctgcaatccctgagtaactgcaaagacggaagctctcagcctgcatgtagccggcaggtgcagcccgttacagacatgttctcaggataaacagcaaccagccctccagcaagaggactggacattaccatttgtcacacgcaggcaggtcgtcctaaattcacctcataattggagtgaccatctgtgttagctaattgcctttacccacaggaaaaataaagttcttatatttttatgaca

SEQ ID NO: 202803 - DNA, 593 bp, Homo sapiens
ggattcatatgtatctggttttctgttttggaatataacttaaaatatttttgaagaaatatggtaaagtgattatccttctggaactagatacaccgacactgtcacattaactcacagcttgttaaatactgtgcaatctttctataacattctttgttatgagactagaatcagcatatgggaattgctcttttcctgctaaactgaagtcattactaactactcatctgtgacatgtactctttcttgtaaccagggattttagcttcacaaaatttagaaactgccgcattgtttcttggcattgctttcaaatgtgacatcatttaaattttggaatattccattttagcaaatacactagtgggtgccaggttaaagatgactgcccaaaaaggggcagcagcgtctctgtagggaacaaccacagattattctttcaacctataccatcccacgcctttcaccagaggcatactgaattacaatgagctcaataaatacatttcaaaaatgggttatcaaattaccagcctatagcaatggcttccagtcactgaagacctatattgaaaaacaactgtgatata

SEQ ID NO: 202804 - DNA, 525 bp, Homo sapiens
gctttgaactgaagtctgtctcctcaatttcctctcttagccactatgctaaacggcattgataaattagagatgggcaggtgaggggtgttggaggacaggggactatttcaagcagtgagaacaccttgggtgaagaccttgaggaaactgagaccatttcaggaagtttttctaaaagaaggttgagagagctggggctgagaatcctgagaggagagaggcaatagataagactagagaaatgtaggcagggggccagatcccacaggcccttgagtctacagtaagagtttgtttatcctaaggacagtgggaagtcgttgaaagattttaagcagtagagtgtcatgatcaagtttgtacttaggacagtttactctggcattttggagaatggatgtggaggtagcaactcaggaggttgggagaccagcaggagactggtgatggtaaaccaggcattgggtggtggtggcttggattaaggaaactgagacagggactgggagagggagtcagaca

SEQ ID NO: 202805 - DNA, 621 bp, Homo sapiens
ggtggctcgcacctgtaatcccagcactttgggaggccgaggcgcgtagatcaggaggtcaggaggtcaggatttcaagaccagcctggccaagatggtgaaaccccatctctactaaaaatacaaaaattagctgggcatggtggctcgcgcctgtagtcccatctactcaggaggctgaggcaggagaatcgcttgaacccgggaggtggaggttgcagtgagccgagatcgtgccactgcactccagcctgagagacagagtgagactctgtgtcaaaaaggaaaaattgccagtggagataaaggtgtccatttgggtaggtcaggaagctgtggtattcatgcctcatggccttcattttcttagagcgtagggtaaaatcatgccattttttgcctctgtgcctcataagtttgtactccttcctcctttaaaaatcagctgtaagagctggatgtgctgtaagggctggacgtggtggcacatgcctgtagttcctacttgggaagctgagatgggaggaccacttgagtccgggaggttgaggctgcagtgagctatgattgcaccactgctctccagcctgggtgacagagcaacaccttgtctcttgggaa

SEQ ID NO: 202806 - DNA, 668 bp, Homo sapiens
cgatgcccagtcaccgctgccgcgctgccgccgcagtcagccgcgccgccgccgctgccgcagcgcgggcggccgcgcgccggtagcaggggcttggcgaggaagccgctgagcctcgcgcgctccgcgctcctggcggtcgcagcgctgcctattaattgattctcttattgatttatttaatttttaggagcggctgctcggaggcacgggtcttctcctaaacctgcagcgacgcccccggcgtgggcacaaaggctccgacggcggccggcgggggctgcccagcgcccgggagccggcgccagaggtcgcctgcgcgcgccctagccgagccccgggcaccatgccgcggcgcctgcagccccggggcgcgggcacaaaaggccctccggccccggccccggcagcttcgggggccgcccggaactcccactctgccgcctcccgggaccccccagcgtctgccaagccgctgctgcgctgggacgaggtgcccgacgacttcgtggagtgcttcatcctgtcgggctaccggcgtctgccgtgcacggcccaggagtgcctagcctcggtgctgaagcctaccaacgagacgctcaacttctggacgcacttcatcccgctgctgctgttcctgagcaagttctgccgtctgttcttcctga

SEQ ID NO: 202807 - DNA, 644 bp, Homo sapiens
tcacaaagtgcacccaggactctggctccccagctctcatagcccccatgcagaccctcgctggccctgatgtaccaggcaggaggctggctgggatgaccttgggcaaggccagatgaactgcactggggcagcttgcccacctccgtgggccaagccgggagtgactcaggccttggctgcgtgcttatgctaggagaggaggttggctgtttgccgcccctgccgggcctggattccttcacaggggaggtggagggccactgtgatcctggcttcctgggacctggaggaggacaggtgtggggtttctgcttcccagtctccaggtcatccacaaccatgagttcaggggagcctttgagtcagcctccgagaggtctgatgagcccagtgggttgtttgcttcctttttcagaagccagtcaggggttatgtccctctgtttccctgccagtgctcagcagctggggttctgagaggtggtatggtttctccaaggtcacagagccagctctggagcagagccaagagaccttgctaccatgctgtctgggtcatgtttcctgtgctgaaatgtcctctgggctgtgcccagtctcctgagcctggggcacacatggctgaatttcttatgctccttg

SEQ ID NO: 202808 - DNA, 461 bp, Homo sapiens
cccaggaaactgagtcaacttcaagtgggataaactcaaagaaatccatgctaagacacaccataattaaaattttgaaatctaaaaaataaaaagaaataaacgcatattactaatagggaacatcaattcaaaaggccaagaatttctgttctgaaattgtaaaggccaatagaaagggcacaatatttttcaaagtgttcaaagtaaacaactgcaaataataaaatgaaaaaatacaccatacaaacatcaactgcatgtttactgcagtacaattcacaattgcaaaaatatagaaccaacctaagtgcccatcagtgggtgagtagataaagaaaatgtggtggccgggcacggtggctcacacctgtaatccctgcgctttgggaggccgaggcaggcggattatgaggtcaggagttcgagacgagcctaaccaacatggtgaaaccccatcc

SEQ ID NO: 202809 - DNA, 294 bp, Homo sapiens
cattaagaatctgaaacaattgggtttttaaaattttctagactcagattttctttctggggagtccaaagcctagataagagaaaagtactcttctcacagcagcagggtgtgcctgttaaaatgtaagtcggatcctgataaagttctaactccagaacacatcagtggctccacattcttactgtgcctaaagggcacagtccagacccaccctctccaacctcacctcctacttgttacacccttttgcagtcagccccagccactctggcctcttccatgctccctcca

SEQ ID NO: 202810 - DNA, 804 bp, Homo sapiens
ttgcaggtagaaagatgcctctcctccctttccgtatgatggtgaggggcacaggggtcctaaactcagccccgccttttccagccctacaggcctgcaccctcagctgtccaccttcatcccccccaacccttggcttaattaaacccaaacgcttgctggtttcccctattccctggatcatgaggaggccacttttggtctcttcaccggattccttaccttcctaaactaaaccaacaggggccagatctgtgcgtggttttccctttggtgagatggagcacacaggcagccccttctcaaaccccagctgtactgtcctgtttagagcccatggcaggtgtggtaagcaggactgtatacctctgcacatgctgacaaatgtgcacataggagaagtgggggcacaggtgggacttggagggcagctattcctgtaggacgctgacattggcacattttttttttttttttttttgagttggagtcttgctctgtcacccaggctgcgatcttggctcactgcaacctctgcttcccaggttcaagcgattctcctgcctcagcctcccgagtagctgggattacaggcgtgcaccaccatgcctggctaatttttgtattttttggtagagatggggttttcgtcatgttggccaggctggtctcaaactcctgacctcaggtgatccacccacctcgacctcgcaaagtgctgggattacaggcgtgagccactgtgcccggccaacactgccagattttgagactaaccaggaagttcatctcgggcaggcaggg

SEQ ID NO: 202811 - DNA, 664 bp, Homo sapiens
agtttatttctccttcgcatcacagttcagtgtagttggcagctgtgatggtggtgggagtgtcagtcacttcatgtggtcattcagggacccaggctccttccaccctttgacaccattatctttaaatgtggtttccaaggtcactgcaagggagaatggggtttcatattaaggatatttatattggccaggcctgaaggtggaattcacttccacccatattccattaactgcagggacactactgttgaaactgaactgcagaaaacttgagaaatattgtccaggaagtaagcaaaatggatttggtgcacacagagcattttatgtggccactgcgaacatttacacatgtcattttcctcatatacctccattagaaaatctgtaaatttcttaactaatgtttttttatattcttacttctccttacatccagggtcttgaacacgataagagtccccattgaaaaactgtccacagaatgcctaaagatcagatcgtacccaccatgcttcagtggacaagcatacagtgagactgaccttgtgtgtatgtgtaactcatttttacagtcaacagtggagaggaatgagtcagctgggtgattgccattcagcgggcttcgtatacagcaggccttggccatttcactttctgt

SEQ ID NO: 202812 - DNA, 458 bp, Homo sapiens
acctcctgtctcctctttccttttgggactctaattacacatatgttaagtttcttgatgttgtcccatagtttgccgaaactttgttaattttgctttaaattatcttttctgtgtttcattttggttagtttctgttgctgtgagttttagttcactaatcttttcttttgaaatgtctaatctgctattaatcctattcattatgtttttgcctcatgtttttgttttcatctatacatatacatatagaacttttcaatatctggaatatagttataatgcctactttaatgcctttggcaattctaatattgtatttctgggttagttttattttattgatttttctcattacggattgtgttttcctgtttcattgcatgctttgcagtatttattggatgccagatgtaacttttaccttgttgagtgctagctatgttactgtaagtaga

SEQ ID NO: 202813 - DNA, 467 bp, Homo sapiens
ggtttacactctgggtgacattaaggaacttctcaaggattccatcctacatgatggaagaacaggaagaataaacagcattccatgggcacagcaaatccacctgtcagtcaccacccattcttcaccagcaaggacaaaatgtaaaactgtgtcaaacacacacacgtgtgtacacacacacatgtgtacacacacatgaccctcctcatttctgcttcatctggagacctacacaagttttgtgcttccttttattactggagatgaaaacatgacccagcctcctttaggagtctctgcaagcaaggccgactcatctgagtcgtgaccgctatttcttccctcagctggaaatccaaatgtgattggtacactctaagagtaccgttctaaagacacaggcacctccgtcttttcagagaaatgttgtatttttaatcaagtgaacgttttaattactaacc

SEQ ID NO: 202814 - DNA, 172 bp, Homo sapiens
tggccaagtgaggctctgctgggagctccctgtttggtggaggatcaagacagaactttgaggacagtgttccacccatattctgcacccttcttggctgaggccacagggcagacccccacccaccggccctgttcttccaagcccgatcccatatgagcaggcgtcccat

SEQ ID NO: 202815 - DNA, 527 bp, Homo sapiens
aacatggcacatgtatacatatgtaacaaacctgcacgttgtgcacatgtaccctagaacttaaagtataataaaaaaaaaagtacaagtagaaacacatattaagacagtagaataaatacagatatatcagcaaccatagtaaattttataaatgcgctaaactctaaacggtaaaaattgtcagacattatttaaagaaaactataaatatttgagttttacaagagatacacctttaacataaagatgcaatgatcgaaagtccaaggataaaaaatatgctatgcaaattctaactgaaggaactatagtaactgtattaacatcaggcaagtagacttaaagacagaaggtgttactaggtatagagggttacccatagtaatggaaattcaattcctgagaaagatatactaattttgacttgtttttgtctgaaaatgtagcttcataatatgtaaagcaaacatttccagatctatatgtagaaatagaaaaataaaagtaccttgtacttgagaaac

SEQ ID NO: 202816 - DNA, 1137 bp, Homo sapiens
gtacactttcagctgtcacagagggtaactcagatcaggcttagaaatcacttgacttaactcagcagcactttttcttttctttgtgtctgtattattttagcagccttctctaaatactggaggcattggatttcatgtcgccaaaaggaatttaaaaatgacaaaagtgtaatctgttagaaatagttaatttgtagaattttactctataaggaggtttagtttcaatttgttttgaaatgaaggaattaagttgtgtttttaaccaaatgaattggcatctttatatttaggagaagtaacattggtgattatttatttcaagaatcatgactggaaaaagcttggaagtttagtagaggagtatatgttgtacatgcaaagacaagatctgcatgaatctatgtatttctgggtgtctggtgaaggccactttaggtgactggccagagaaggaggtgccctagtgatccttgagtcacagccatactgctaggaccatgactaccataccaagaaaaggcagcagccacctgcctggcagtttgcacacctgtaaactgaagctgcaggaggaccggcgacagcaagaaaaatctgtcattgctcaacccatatttgtttttgaaaagggagaacaaacttttaagagacctgcagaagacaccctgtatgaagcagcagaaccagaatgtaatggttttccaagaaagcgtgtacggtcttcatcttttacttttcatattacagattctcagtcccagggagtgtcaaccttgtctcagaagcaaatgagatgttcatccgtcactaacctcccaaccttcccccattctgggccagtgaggaaaaacaatgtttttatgacatcagctcttgtgcaaagtagtgttgatataaagagtgctgaacaaggtcctgtgaaacattctaaacatgttattagacctgctattttgcagctacctcaagctcgaagttgtgcaaaagtaagaaaaacatttggacacaaggcactggaatcttgcaagactaaagaaaaaacaaataataagatttctgagggaaattcctatttgttaagtgaaaatttatcaagggctagaatttcagtccagctgtctactaaccagg

SEQ ID NO: 202817 - DNA, 1062 bp, Homo sapiens
gtacactttcagctgtcacagagggtaactcagatcaggcttagaaatcacttgacttaactcagcagcactttttcttttctttgtgtctgtattattttagcagccttctctaaatactggaggcattggatttcatgtcgccaaaaggaatttaaaaatgacaaaagtgtaatctgttagaaatagttaatttgtagaattttactctataaggaggtttagtttcaatttgttttgaaatgaaggaattaagttgtgtttttaaccaaatgaattggcatctttatatttaggagaagtaacattggtgattatttatttcaagaatcatgactggaaaaagcttggaagtttagtagaggagtatatgttgtacatgcaaagacaagatctgcatgaatctatgtatttctgggtgtctggtgaaggccactttaggtgactggccagagaaggaggtgccctagtgatccttgagtcacagccatactgctaggaccatgactaccataccaagaaaaggcagcagccacctgcctggcagtttgcacacctgtaaactgaagctgcaggaggaccggcgacagcaagaaaaatctgtcattgctcaacccatatttgtttttgaaaagggagaacaaacttttaagagacctgcagaagacaccctgtatgaagcagcagaaccagaatgtaatggttttccaagaaagcgtgtacggtcttcatcttttacttttcatattacagattctcagtcccagggagtgaggaaaaacaatgtttttatgacatcagctcttgtgcaaagtagtgttgatataaagagtgctgaacaaggtcctgtgaaacattctaaacatgttattagacctgctattttgcagctacctcaagctcgaagttgtgcaaaagtaagaaaaacatttggacacaaggcactggaatcttgcaagactaaagaaaaaacaaataataagatttctgagggaaattcctatttgttaagtgaaaatttatcaagggctagaatttcagtccagctgtctactaaccagg

SEQ ID NO: 202818 - DNA, 729 bp, Homo sapiens
tgaagaaataatgcaagtaagccaggtttcatgatcaaaatgaatagttattgggcaaaagctaggcagggtgtgaatgttggggaactcaatggttattttgacttggattaattaacgctagtccctcatttaaacatgactttagaaaataagaattatattaattaaaaatagggagtaaaggaatatttcagtaaacatatatttatcctttaattctattcttttaaggtcctgtgaaacattctaaacatgttattagacctgctattttgcagctacctcaagctcgaagttgtgcaaaagtaagaaaaacatttggacacaaggcactggaatcttgcaagactaaagaaaaaacaaataataaggtgagaaagcccaggataacggaactgacctcaatccctcatctttctttttgcaggttgtttggggcccccatatccagaaataggagttgtctgagctttgttttgttgttgggctagatagcataaagcccttggtaaacttttcaaagttgtactctgacattggagagttgtagtctcacaaatctgtggtctctctaaagttgtaaagttgagtactgggtagtggaaatctgggggtcttgtgccagagcaatgaccctgtgtgagaatggggacagcaatgagggagccaggggccagagtcagtagtcaaaaaagaggcagggattttctctacatcgccaactgg

SEQ ID NO: 202819 - DNA, 380 bp, Homo sapiens
tttctcaaatcaaccaggaattactcaactaggattatcctcataaatttttcattccgattcaaagtggttaagccatctgttcactgcctttctccttatatggtcatatcaattcagttattactcttccttatcgagtcttccctttgtgaggattgcattcctgtgtttatagactttaaataactaatgtataatttctttatgtgccaagaatattattttaaatgatatgtgtatgtctatccttatttgaattcaatagaatggcttctaaacacagtgacatgacagttttctcacaagagccatacacattaactatttaattatagtgaagcagctgatcgattctggcatttaaatgtgttactatt

SEQ ID NO: 202820 - DNA, 488 bp, Homo sapiens
tgagcccagccaacacatagaattatgaaatagtaaaatgattattgtttaaagtcatgaaattttgcagtttttttaatatagcaatagataaccaaaatcaagattaaataaaatatcagatgattaaaatggagcatgaaaatggagttaactttgtaagaagaaccacaaccccaatgatcatgacttagaggaaagttcagtaaataaaacagaaaatattgaaaaaggctgtttcattttaaacctgtgtcaagctcctagacctaaaatgacacttgaaattgtcctccattagaattcattgtgctacagattttctctcattctgttacatatatttatttaatgaagtagagaaattcttctctcataagctaatgctgcaaggtgtttttatatgtattatatgtatatgtacatacatatattttttatattaacataacagtttataataaatgtttaagtgttttataataata

SEQ ID NO: 202821 - DNA, 415 bp, Homo sapiens
ggggtttgaggaataaagttgggttgtgagggtcgattggaagcttggaagccaggctaaggagttggagtaggtctgctagacaggaaggaaccacaaaatcaggaacataatggtggaagggcctcctgtaaattgtcgatacttaactattttggcctatgaatggcaatagcacatggttccactaaacaggtgccctggtattgttttctgtgagaggataatggagagggttgcttatagtttgtagatatctagcaaatggtctgttttgctagtccagctagtcagaaaccagtcctctttttgaagaatagagatcaaacctgctctacaagcttatatgtttaccacaatttgggtggcatgataaagactaaatgcacagaaaggccacataccacattacatt

SEQ ID NO: 202822 - DNA, 642 bp, Homo sapiens
actttcaaatgcagacataaggctgaagagagttttattttgaaaactagaaggggtaagaattgagagttcatactggctgcaaggcactgaccaaactccatagctacagctacaaaaaaggagaagaaaaaaatggcatcgcactggctgaagatgctagaacttggagtggagagctggaaaaagagctgaaaatttaaaggaaaaatgttagcaccaagctaatcacagaaggcacgagactcaaattcagagcacaagctacacaaattcctagctgacaacaaaatttacacatgagcaagggaggcctatgaagcctagtgaaaaagcaggaagagaaaaaaaaaaaacaagattttagaatctgtgattcttttattaactgagaacatttttcaatcatttacagcttgagtggtagaaagatgaatctagacaggcttgatgtgtcagagtatagggcccaaagctggcatggctactgtcaattaggaggaaattctgagacacaaagaaacaacaaagaagatgagcatctgccaaatctttgggctaccacactgtgcatatacaagggggacctataggtgttcaggctaacaaagcagcagaggaaaggtgtaagctgaatacctc

SEQ ID NO: 202823 - DNA, 280 bp, Homo sapiens
tggttaggtgtcccatcagaacgtggtacccagaatgagggttggttacatgtctagtcagaatgtggtgcccagagtgaggactggttaggtgtccaatcaaaacatgatacccagggtgaggggctggttgggtgtggtgttgacagcctggctcctaagctagcccgagtgcaggtgtaacccttgtgaaggcctggtcaattgtcccatacatccctggagagaagatagtgcctttatcagctgtgcagggactgaaccagaggaaatggggaag

SEQ ID NO: 202824 - DNA, 430 bp, Homo sapiens
aaaattctggagatggataatagtgatggttgcacaaccattaagtatgaatgtacttaatgtcactcagttgtacacttaaaaatggttaaaatagcaaattttgttacatatattttaccacaataaaaataagtcattgaggccagctgtcgtggctcacgcctgtcatcccagtgctttggaaggacaaagcgagtggatcacttgaggtcaggagtctgagaccagactggccaacaaagcaaaacctcatctttactaaaaatacaaaagttatctgggttgattggcgcatgcctgtaatcccagctactcaggagactgagacatgagaatcacatgaacccaggaggtgtggaagttgcagtgagccgagatcgtgcccactgtactccagcctgggtgacagagactccatctcaaaaaa

SEQ ID NO: 202825 - DNA, 256 bp, Homo sapiens
catgacccttctagctgtggatagagactactgttggggcgacagtggaagcagtggatgagtgaggggaggaggctgcaatcgcagccgaggtgagagagacgggggcctggaccagctttgtccccaggcaggtgggcaggtgaagttgtaacagataagttgtggacccagaagctacagaggaccctgggtttctgtcctccatgtttgggtgaatggtgatgctttctgtgatggagggccagggtcggga

SEQ ID NO: 202826 - DNA, 537 bp, Homo sapiens
cttccttcgctaccaaaagggctgactatgggcttaggaaattttgttccctccaaagctttagcagcagctgtgtgtttgacctttttaataccagttcactcagctccccattgctgatttccaagtgtcagcagtactgtaaattcctagaaatgaaaagtgtgagctctcaaattcatgaaacctgacattgactgtaatatgtcacttgaaccttgaacactttctatggtcatggtttaagaggcctggtcttatcttgataattcatcctgtcatccccttcttatccttttttgttgttttttataaacaacaacaaaaaaaagagattgtgtgtgtatgcactgaaatttttttttttttttaagagacacagtctcactctgtccccaggttagagtgcagtggtgtgatcttggctcaatgcaacctccacctcctgggttcaagaaattctcctgcctcagtctcccgagtagctgggattacaggcacctgccaccatgcccggctaatttctgtacttttagt

SEQ ID NO: 202827 - DNA, 291 bp, Homo sapiens
tggctcaactcacatggtgaatatgaattgtccaaggtcacccaagaatgaatgagagagctgaaatctaaactcagagcctcggaattgtcagtccctctttggcaaagaaaggaaaatgaagagcaacctgcaacctatgcccctgtccatataagcaaatgcaccaacggccacggacaaggatgcccccattttcgggtgatggctcctgcctatttctaggcaacttcttcctaatctccttgtaattttgtattttcatagattaaatctctctctctgaacatg

SEQ ID NO: 202828 - DNA, 409 bp, Homo sapiens
cgagtgggtctgcaaggcagcagtgagctagatcatgccactgcactccagcctgggtgaggaatagagaccccgtctctgaaaattaataataatcatatagtaataataagacaattggggcagtacctcctttatattgatcagatactcgatttgtctataccctccagaggaagacaaagtattctactttgtttcctgagaaaatactgtgtatttatatatgaaaaaaatccattaaaatactgggcattctaaagcatctaaatgtcataagtaatatcatttaaagtggaaacagaggcagtggtgtctatcaaggatgcttatcagtgagggaaacaaaaggaatcattaagcacccttggatacctgaagggcccctctgccaaaaatctcagtaatt

SEQ ID NO: 202829 - DNA, 360 bp, Homo sapiens
ctagggagtgccagtgccaggatttgaaagcaggcagtctggtaccagagcttctgttcataacccccaggcaataatgccttcctatacattgcctctaaatccatcgcaaagatgcacacagaagagatgtttttctccttccttgtgtggctatatctagtttttaggtaatgttgagtaggataaacatatttgttaggactcctcacctccagtccatccctgcttttttactctctgccgcaggcccacccgagtctaattctcccacttttgctctcaggaaaagagctgataaattcagtcaaatgaccagtgaggcatagtgctctcttccaatgtcccttttacagcaga

SEQ ID NO: 202830 - DNA, 414 bp, Homo sapiens
ccatcgagagtttttctcaaaggttttcaatgactcctcttgtgttctctggcctatcctactccagctctcaattctgctaggcttgagttccagcgtcagagcctttctgagcctctcttctcagtcttagccttccctccttccctctctctccacccaccttctggccgtctgggaagcttcagcttcatcctgcttccccagcactgctcctccatccacctttttttcttccatagattcgttaaaaacatcttgtctgaaggcagttctcccctttctacatcaccatgggttttttttgcagaattttcttccattacaatcactgattgtaatcaattctctttcccccaggtctctgcctcctctctgtcaggaaggagagagagaagttaaccacacagaact

SEQ ID NO: 202831 - DNA, 338 bp, Homo sapiens
tgatatttacagtaattctttaatatcagtaaatatccagtgagggttcaaacttccaattgcctcataaatgctacttgttttattatttttaattagtagaatcccgtaaatctcctaagtgtcttcttaatccgtatgtttccctttcatctttctttttttccttgcgattttgtttatgaaatgaggttgtttcacatgtagcatttgccacaatttaagttttgctaattgcatccctatggtaatgtttgctttcctctatcctctgtttctttaatttgctagttatgtctagagacttgatgagattgaaacatggcttttggcatgaa

SEQ ID NO: 202832 - DNA, 2026 bp, Homo sapiens
ctaacatatgttatggttggagtgcatataacactgtgcagccgaataactagacctagaaaataaaactgatcacggtaaagttattttccaggcaggggatgcctcatgatactggctggggcccaaccacacccaaggcctcgtcggtttctgttctcatgctgttgtcatatacccagaagtaggggaagcccaggagccatggagcctcagtgtcagttccctgacaagccatcctccaaaaaagcctttcctttgcaaaatgaacaggtactccgtgaaaacagggagagaaatttctgtttttcaccgatgcatttctcacgttcatctgacaatgtgcaaaacaaaaagtctacattagaaatttatcatgaagttatactctacttcaactcacttcttttcagtccctgtgaaaacttaatactcttggtgttgtactgaaatacccagtggatttggggtgcacctgtacccttgatctccacttctgcgtgtttctaggccaaagggaaaaccaactctctacctaattggaacttctggttttattgcatatcctggaggtcttgcttcgtttttattttcccgggttgatggtctttcccatgtgcacctacgttagcccactatgtagaacgccttggcagttttcacagagtaagaggttgaaggaagccaccaatgtgaaaatcatatttgctgtaaagaaagaaccattgtgagttgttggaaaccagattaaaattccataattggagattgatgacttttatttcatgagttttacttagttaggtgttttatcttctgtgttttgtggctccaaattacgaagactgttggccttgcaagaaactgatcacggcaaagttattttccttactgaacacgtgtcctatatatttgcttggcctcgggttttgtttaatcccttcaaaggccctttgaactgatgtttcaacatgactccttctctgtgagctctccgctaggaagcggccatcatgtcaagccccttcacagctaaagtagtgagttcacatagtcgaagaatcttctgggttgcatcttatgaaaaaaagaaatccactgcctttttataagagaacagaacatttacaccgtcttgttgagcaaatgaacgttcaaatggccagcacaaaagaaatccccaatctctaacctcacaatgaaatcgccacggacaaaagatcacgggataccgggagcactaaactggaagtgacacaaaaccacagcagaatccgctcacacctgccgaggttcctgggggatgatctttgtgtaaaggatcctggtgccgcagtcagcctgaaacactccaaggagcagagacgctcccctctgcaacagtgacatttatactgatggcgtctttttaaataaattaatacatgtctgatgtggacagagtagtgctgtctgacaaggtgatcatttgacttttcttagaggtacaaatttacgctcccttctatgaatagagagggctatttgtttcattcaaagacaagacattgttagaaatgagtggcacacctcttcaacccatccccttcctccatggaggtaaaaagatcctattagttctcataattgattctgagggctgcagcgtgcctcatttagccgtccctgctcggttcacgccaaggatgtaattcatgcacacttggacgtccaacatggctgacgcgccttggacacacagcctcggcgctgcatcattttttaatcagctatctgaggaatatttatctgatcaacaaagagtgttgtcaggaggagaccagaggtgacattaataagcctgtggtttcctggtacaatgatggaggaagagtttggaataaaaccctgctcgtttgagcatgccagcagactaaagaatatttttattctgcttacaaagagccagtcaaaagagtctcagtttgaagtgttcagttaagtttaagtctcagtgataagttttcaggcattcacatgtgttagt

SEQ ID NO: 202833 - DNA, 2456 bp, Homo sapiens
  misc_feature (1035)..(1035): n is a, c, g, or t
  misc_feature (1174)..(1174): n is a, c, g, or t
  misc_feature (1350)..(1350): n is a, c, g, or t
  misc_feature (1495)..(1495): n is a, c, g, or t
  misc_feature (1523)..(1523): n is a, c, g, or t
aaattagagtaaatcactgtcctgaagaaggtacccttgggagagtgggttggcctgtctttccaccctttcttgactctgccctcaccttcaagcctctttctggcctgtgttcaaggtccagaggcatgcttaagacctctctgtgtggctcttcttgaagagtcaggaaccccatacttcctgttcagcgggcagagaagcttcaagccgcacagttttgggtatgctaggatcccacaaggcacagatgtgcagtggcccacgaagtgagtttgtgggtctccagttacctgcagccctttctgctcctgtaggttaaagggcaattgcctttttttttctgtccaggaaggaccccagaatgttctgagtcagaaagacagtgaatcctctcctctgggtcagtggggagggagagagagagaattcagagggaagaaagcagaaaaagatgtcacaaaattgcctaatcaaaagttaccatgatgcctgcctcatctggaactgggctcccagtctctagtgagggagacatagtccagtccagtcccagtctccagtctgagccaaagcagaacaaagctggacactgcagcctggcatccaacgaacattttgtcactttccccagggtgggagcatttgaactttggatgtgaaggaaacatggtaaccactgcagtaagaaaagcaactgctggagaaaatggcactttcttccccaaatttgtttttacactcatgtctaaggaacaccttagaaaccacattaacatctttcagcaaaaggaaattctgcctgttgatcttttgctgtgagacaaacttgaaaagttcacagacactgcctttctctgaaaactgcccttacctctttgttataattcacttcaagatctgttgagtaggaacatcaaaaatgcaaataaaaagtttcaagtattatgaaagaatgcaataaaactgcctttaaaaaaaatctcaagatggaggtggagatcctgtgatcatgaaatctgaataggctgctcntgtgtccttcagtggtgatggctctgaaacccttgtgttttatgaacttcatgccctggtcttcaaacgaattcagtgcaggccaagaagcacagtttggcctgggttggatgctctatattttcaaagagtgaaatgncttgagacacagcctttgctatagtacctgctaaaacttcaacgtgtggataaatatagcttacattgaatcgaatagactcagcgagagtggcagtgaaggatgccctctggaagattcgaggtgctgaggccaaagggctagcaaggaaagagcgtgcgggtcaggcccttcancctggtggaagagcaggcagggagggtcctatggttcctgggaggacccgaagcatgatcgcctgtcaagagccaagagccctaatggccagcgccggggaaagggcccccgaggggcagtcagcagccctgcaggggcggcgtncacactcctgtgtggcacgggacactcntggctccaccagctcctgaagcttctgggagccagagagtcagcagggagaatcccacacacgggcactcagttcctggaaaccctgcatgagatgcgggatcccgaagccagattgggggtccctagggtcttggcttcggggctaggcgcggaaccgtaaatgagggttcagcctgtctgcctgagggattgtgtttcctgccgtatttatcactcaaattttgaaaagcagtcgaatttgttatattggaaaccctagtagttaaaaacagcagatggtaacatttcaggaatatgtcttgtgccaggaactgtgaggggtttctgtagtgtagtgattacatgttcgcttcacatgtgaaaggtctcaggtttgggacctttcatcatcaacatgatgaaaccccgtctccagtaaaaatacaaaaattagccaggcgtggtggtgcatgcctgtaatcccagctcctcgggaggctgaggcaggagaattgcttaattccaagaggtagatgttgcagtgagctgagattgtgccattgcactccagcctaggcagcaagagtgagactacgtcttaaaaaaaaaaaaaagaaagaaagaaaagaaaacagaggactttaaaaccgttattatgtcaatattctatgggtccaaagaattaagcagaggtatcaaacatataaaaatggtcagaatcaaactttggagattaaaaactacaacatctgagataataaattcactggatgcaattaacagcagattagacactgcagaaaaaaagattatgaaacacaaagccgccgggcaccgtggctcaggcctgtaatcccagcactttgggaggcggaggcgggtggatcacgatgtccagagatagagcccatcctggctaaaacagtgagacccccgtctttacaaaaaaaaa

SEQ ID NO: 202834 - DNA, 574 bp, Homo sapiens
tctatactttgctacttccatgcctttgcctgtgttctctcttctggtaacataatttatcttattccatttcccacctgtctatggtttacttatccttggaattataaccaaaattcttcactctttccctaacttaagttttcttgtatttctgcatcttgaaagtatctttgccttcctggattccagtatgctttatacttctattatagtgcacaacagtctgcctggggttgattaattgtgtttacatggtttcttggaaaagtatacaaaaacaagaaatagaaaagagacctgtaaacaactaaaatacagagcaggatgaaagaaatgtcaaaccagtagcatgcaaggagtaattctgagtagcattggagaatacagaagacttttattaattagattacttttgatctgaatcttgagaagtgaaaataattcagctatatagaatttagggagaaggagcattagcatagacatgaaggagtggcctgtggggagagatgcattgggaatgagactaggaaggcagattgggaccagatctagagagcccatgctacag

SEQ ID NO: 202835 - DNA, 500 bp, Homo sapiens
atctgttgtatcaaggcctcactcagttctgagggatttgcagatgttactgcatttaatcctcacaatacagtgaggtagatgccactgtaatcccttttatacagatgtgaaaactaagaatcagagagggtcagtaacttgtctgtggtcaccaagctagtaagtggggggatcaccacttgaatccatcactgcctaactccagaaactgggtcttaaccatcacaatacactgtccctagagtctgtcccgctccaaaccctctgcttgttgaagggaaacaaacagaaatgaggcctgaactctgttgttttcacgcccctgtctcatgaccaagcggacctgccagtttcttgcagctagcgatcagatgtggaatcggttagagcctcctacctctgcccagccatcttgtcccctctcctgctcagtgctggggcttgacgatgggggctggctgacccactgacccactgcccgcctagctggttgacca

SEQ ID NO: 202836 - DNA, 206 bp, Homo sapiens
cttatatgctggcgacatttttaatattatgttgtaagacttcatcaaaatcctctgaaggatgttgatttttgtttatcaggcagtcagtttggttaacgtcaggatgcgagttctgtcttgcctttttgtggtggttccagtgtcagttcagttctcaaagcatttcttttgaggtgcgcacagcatactttccactccagtta

SEQ ID NO: 202837 - DNA, 400 bp, Homo sapiens
gtccacatctttcaaaaccaagcccttgcccattcccattaccatctcccatcccgactcaccccaactatttcctctccctgttcagaacttctagccacacaagccatttgatgatcctgaattcatccttccacttacttgcactcctctgcctatactttcctctgcctaaaacattcttttcattctaaccctcaaaagtttggatcaaaactgttttttgttttttttttttaaatcaagaaaccctgatttcaacaatgcacagagggaaagaaaagtaatctgctccagtgatgttcaaagaggagcaggtgccatttcacttaccaaagagaggatccattatgaactcatcagtcctcctgctttgttcattcccattgtggcctatttg

SEQ ID NO: 202838 - DNA, 361 bp, Homo sapiens
agtttgagaacatcctggccaaaatggtgaaaccccgtctctactaaaaattaaccgagagtggtggcgcatgcctgtaataccagctactcaggaagctgaggccggagaatcgctagaacctgggtggcggaggttgcagtgagccaagatcgcgccactgcactccagcctgggcgacagagcgagactccacctaaaaatataaagaaagaaagaaagaaagaaaataaaagcaaattagaccaatatccttatatccttgatgaacacagctgcaaaaacctcaccagaactagcaaaccaaattcagcacattaaaaggctcattcaccaggatcaagtgggatttatcccagtc

SEQ ID NO: 202839 - DNA, 566 bp, Homo sapiens
gtgaaaggtaaaggggacaataagtagtcaaggccggataaagtaattttataggggcttaagattagaaagaaaagttgtatagatagctgcgagtcttaaaatgtcaattcaaatgaagagatgagacttgatgcttcatctttaaaattctgttagatgaacaaataaattttctttttaaattaagagctggctctctgcaacttgcagaggcctaacacgctccaaaattcttaattgggtgttcttatttgcaaaatggacaaataatgccttcattgagcatttgagaacagtactgagagaatgcatgctttcaaataaacaaaatattgcaaaacaaaaagtatattaaaagattttaaaaggcaaaaaaagtattaaaacattattcatgctatttgatatattttagaatacaaatgcttgtaattaaaggaaaagccaagtcaaatattccaaatgaaacgcaaatctgtattgacgtaaactaaaattattcaaggtctatggttgatgattcatagtcatctttgcatttcacacagctttcacataaagcc

SEQ ID NO: 202840 - DNA, 375 bp, Homo sapiens
tcactctacaggatccgaaaatgacatagaggcaggtttggagcagcgggaaaactgtggttctgacatcagttggtaaagacgtgtcatgttggcctttaggccctggggacaatgaaatataaagatggggtgacatgcatcacactcagacctgccactagcaccgccatgtacagttgtggaggttcttcattgcacaaaggcactggctgaaagggtgagtggaggctgaaatgtagccgttgatctacatgccaagatctacattcttccacaaggctgagtgcctttctctaattcacagataggcattgtatgggcttgcgcagccctgcctctatgtcattttccgggatcctctagaacgctatc

SEQ ID NO: 202841 - DNA, 595 bp, Homo sapiens
agaatgttgcctatgttcttagatcaaagtcttaatgtccatttgacaccaccatagaaaagtaatttatctatgctggaaatttggcaaacacttactctcttgactgtcaatcagcattaccttttgaactgccctaaatacacatttagaaattctgggccccatccctagagattctgtgtcagtgggtatacagtacaataaattaagaagaaaataacctgcatgctcacctcccctattgtagacattatccatggtatgggagaaccagaaaagatatatctgaggaagattgcaatgttatgttccttgaaggttgctggttcagtcactgggtttactgaggcagccaggaatcatgaacaaataaggtgttgaacctcagttgtgctgccttagtcaggggctcagtcctgatcaaggtagcacgtcatccagttatattcttcactggttcatttttcttgaggctgtctttctgaaccattgagcatgtggtttcttagtactaaaccagttcagcaaagggtggaacttagtattgtcatcctattttatttataatgttttggaacaaaaatctttattt

SEQ ID NO: 202842 - DNA, 622 bp, Homo sapiens
acgtgctactggaatttttctaggcttgaagagaaaggctgatctgagaggattcgtggaaatatgacttaaaaggggagaaatgctgagagaaaaaagtttgttttagtctcatgggttgtataaggcatggtttgtgttaagtaattgcaagagcaaaatctaattagatgccgggcttctcgtaacacccactcctttttcttgacgtggctctcctgactttgcctgcggtggctttcatcatacaaaaatgggaggaaaacttctggtcccttttataaaaagtgaaaagaggggacttgattttcgttgaaaataagaaactttaaggccgggcgtggtggcttatgcctgtaatcccagcactttgggaggccgaggagggcggatcacctgaggtcaggagtttgagacctgcctgaccaatgtgatgaaaccccatctctactaaaaatacaaaaattagccagagctggtggcatgcgcctgtaatcccagctattcgggaggctgaggcaggagaatcgcttgaacctaggaggcggaggttgcagtgagccgagatcgcgccattgcactccagcctgggcaacaagagcgaaactccatcttaaaaaaa

SEQ ID NO: 202843 - DNA, 494 bp, Homo sapiens
  misc_feature (38)..(38): n is a, c, g, or t
caatatggtcagactccgtctctactaataacacaaanaattagccagccatggtggtgcttgccagtaattccagctgcttgggaggctgaggcactagaatcacttgaacccaggagacggaggtgcagtggcactatctcggctcactgcaacctccgccttccgggttcactctgggcctggggctgttgagaggttccttgctaagggggttctctctcctaagagctctaggaatccaaggtggaatcagaggtggaaaacagaaatggttgggatattctgagaagaggtcagaatgtggtcagaggggaaagaaccagaggattgaccgtacgtcagggttgtttagcatcttagaaatcatttagggcagggcacagtggctcacgcctgtaatcccagcactttgggaggcataggtgggaggatctcttgagcccaggagttcgagaccagcctgggcaatacaatgcgactcccatctctac

SEQ ID NO: 202844 - DNA, 112 bp, Homo sapiens
agggttctttgtgattcttcaatgccaaaaataaagttggaaacttggattcctgtttgactctactgtattaagtgatcagaataaaattatggtaaggctaatcttcaac

SEQ ID NO: 202845 - DNA, 606 bp, Homo sapiens
tagaacttcctttcttgagggccatgtgagtgagaaagctatagaggaccaactttcccagggcacatttttgtgatgtaatagggcaaattataaaagagaaggaagtaagagttgaagttgatgtatatgtgcttgagagagattgtcttacatgaaagtcgagatctggaacaggtgacatattgagagaaggatgttaggagtatgtggtacatctgggaagccctagagaagactggggctggccacaagtgtggccacctatgtgtactgggcattgggtgttggagggaacagggatgtcatgaaccatagcttatgttgcagctttggatggtagtaattttcactaggtattgtaaagagttttctttttaagactattatgcaaaagtggtaatgtatatactctaacctttcttttccaaaagttttttttttttaaattctgttagaaaactatttaatgtttgggaggaaagactatcttgaaactgctcttatgtaaaaagcttttactttggtattgctgtgtattttacaagtaaagatcttcaggcatattcctgttaaatccatacatcacaagaagaaatctcacaa

SEQ ID NO: 202846 - DNA, 409 bp, Homo sapiens
tgaagcatggcttaaatatcccaaacaaattaacagggaaagtctccatacgagcattgaaggtgcattaccaaaggaaaaccatagtgagtggcagcaccactgcacttcagcctgggcgagagagtgagaccctatttcaaaataaattcaaatttgaatattttacttgagtaacattttttttctcctgaaaataattttctacagtgttctactgtggttgaggttttcatgtttaaatcagatctctagcctcatgggactcatagtctctcatggaagacagataattgggcaactacaatggattatgccgagttcggtgctttgggagctcagagcacaagccccttcctcatctgccctgtagggctggggaggtgctgtcaaggaaggcttcccagcg

SEQ ID NO: 202847 - DNA, 389 bp, Homo sapiens
atatttgaaggtcttggcccaaaagttgaacggccatttgcagttttagaaagcaacagaatgcctaggaaatagatgaaaccaaagaaagctgacaactacagcagtctgctagtgtaactctccaagaaaggtattctaggcaatactgtgtacacaggagttatgattaggcctcatcagcacagtagctagttagattaagcaaactagtggaagagatcagcatgtaaatccttcattcttaaagatcactcatgcatacacatctaattaaatgtcactcaagaggtgcatgagtagaaaagtcattcagcaaagtcaatttctctgcattacttgaaaagcagagctccacatggagtgtgtaagtcccccaaagcaggagc

SEQ ID NO: 202848 - DNA, 484 bp, Homo sapiens
cacactggctatggtatgctcttccatgctcagagcctccaagggtcatctcaatgtcaaaaaggggcagacagctgagtgtctttctgcatgatgtgcctccatgggctataacatcttctgaagcaatgctccaggtgacaaagagtttaaacctcatttcttttacctttatatggcatacctagattttatccacctctatcccagaagacgccataatcatgagctctgaaatcacacagaactgggtgtaaatcctggctctgccactctctagctacatgcttcagggatgccgctcataacctctttaaaccaaagtttcttcatctataaactgaggctgttataaactccaactttagttgtgagaactgaagccaatacagataaaatcctgcaaagtacaattggtacttgttctttcaacaaatacttattgcatagattctctatgccttggggtacagagaggatggga

SEQ ID NO: 202849 - DNA, 663 bp, Homo sapiens
cgcctgtaatctcagctacttgggaggctgaggaaggagaatcgcctgaacccgggaagcggaggttgcagtgagccgagatcacggcattacactccaacctgggcagcaggagcaaaactgtgtcttaaaaacggaaaaaaaaaaactgaactataactgtggctggtggcaacttaagtattcatgacatcctcccactttgagcacatttgattgcttccccaaatcactagttcctggcagaaggaccaaagcagcagagtcaaggcaggcctgctgtcgtgagttgtcatatgcctcaagggaccctctttcccatccccatccattttatggcggcgcttcactttgttttccaacttattcaggtaagtaatttatttccctgtcttatatacccatctgattgggaagaggtgaataacctaaacctgtgaataagatagcaaacatttgcaattagggacatttatcatgcttttgcttgtttcacactttaagaaatttaaggctgggtgcagtggctcactcctgtaatcctttgggagcactttgggaggccgaggcaggcagatcacctgaggtcaggagttcgagaccagcctggccaatatggcgaaaccctgtctctactaaaaatacaaaaaaaaaaaaaaaaaa

SEQ ID NO: 202850 - DNA, 468 bp, Homo sapiens
agctcgtatcatagtacggcgcagtagtgctggaatatcggcttagcggcgccctttttttccagcagagtcaaggcaggcctgctgtcgtgagttgtcatatgcctcaagggaccctctttcccatccccatccattttatggcggcgcttcactttgttttccaacttattcaggtaagtaatttatttccctgtcttatatacccatctgattgggaagaggtgaataacctaaacctgtgaataagatagcaaacatttgcaattagggacatttatcatgcttttgcttgtttcacactttaagaaatttaaggctgggtgcagtggctcactcctgtaatcctttgggagcactttgggaggccgaggcaggcagatcacctgaggtcaggagttcgagaccagcctggccaatatggcgaaaccctgtctctactaaaaatacaaaaaaaaaaaaaaaaaa

SEQ ID NO: 202851 - DNA, 198 bp, Homo sapiens
agtgtacagatagcaaagactgggaccacagtggagggatacctaatccagacaagggcaggaataggcagggaaggcttcctagaggaagtgatttccaagctgaaacttgacagatggaacagaagttagccagagatgggaaaactatttttggtcaatggaagagcaggtggttgagatagaatctgacacatg

SEQ ID NO: 202852 - DNA, 421 bp, Homo sapiens
agagagaagtagctggacttcatgctgcctgcatatgcaccacctcggacagaccttgtacacacagttggggggctgaacaaacggccggggctgaggctgcctctctgttcttgcatccaggagagggatgtccgggagtccaattgccaagctcttacacagtgcgatggagaaaggcctgagctctcctccgtggccttttcacaggagagggaagagattcctacagtggaaaagcaggctggagcactgcgaatttctctggccatgccttgtttacccagctttaaaatgatgcagataaaaagcagagtcaataaggaaagtggtttatattcaaggatctgaattttattattggtaaattgtaatatatcttacatccttgcagggataaaacattcataaaccacatttc

SEQ ID NO: 202853 - DNA, 485 bp, Homo sapiens
gtgcatgcagtccgcgtgtaatcaatttgccgagactatatttcgtcattggacagggatcataataatactttgtaagatacgcaatcaacgggtcatcgtttgcgtgcgtcatgactgcgagaaacctaacagcatatgcattaaataaacaaaaagcaacttaggaagccctactgtaatgcaccttattctatcactgattctattagtgccacacattatagtatatcctgaagatcgtaaaatgatgagctcatcatttaaaataaactgatttttaaacgaaaattagaacatacaactttctactttgattccactcctactcactgttgtggctttttaaccaagagtttattgggaaaaaaaatgctaaatggctgctccacaggacatcaacaagtaccacaaagtagtaatgagcaactctattttttttttggagacagggtctcacttttgtcacctacgctgggatgcag

SEQ ID NO: 202854 - DNA, 517 bp, Homo sapiens
tctcggatcactgcaacctctgcctcccaggttcaagcgattctcctgtctcagcctcctgagtagctgggactacaggcccacacgatcacatctggcaaatttgtaaatttgtaaatttttagtaaagacggaatttcattatattggtcacagtgatctcaaactcttgacctcaggtgacccacctacctcgccctcccacagtgctgggattacaggtgtgagcgacctcgcccagccaaaagataacttttgaaataaaattcatcagtgcaataaatcaattttgttaaacacagattgacgtttacatatttaaacatgatgtaaaagcaatgctagcttattttatcagtaaatatgtataagtttaagaaaaaaatatacaagcagaataaaaatgtatgcttgcattatacaataatatgggtgtacatttccagagttcttgtattcatacactgtataagaagatgacaaacaattttgcaatgaaaaatcttgttcatacatt

SEQ ID NO: 202855 - DNA, 586 bp, Homo sapiens
aggaaatatacatggcctttaattctatcacataaagacaacgagcttctgccaaggttttctgtgtttgcatctcattgtgagtacactccatgcagtttgcatcctgctttcccacttagcacttaacttagggcgttaacaccgttcttcttaaacaacggccacagaatcttccactactacatagcttgttcccctgtttggagctctgagggtatttccatttttttctcattactcctaatgcttgtatgtgtattattattattttcttcaaacagaatatcattgtctgtggaatcatagattgaaatataatcaattttaggtaaatgatcactgaataccttctccagcagtgagcaagagtttccgtttcagggtacccttgacacttctaaaagtctgggggttttttgctttttgtttttttgagatggagtttcactcttgttgcccaggctggagtgcagtggctcgatctcggctcactgcaacctccgcctcccgagttcaagcgattctcttgcctcagcctcccgagcagctgggactacaggcttgtgccaccacgcccggctaa

SEQ ID NO: 202856 - DNA, 410 bp, Homo sapiens
agaccttgtctctactgaaaaaaaaaaattagctgggtgtgctggtgtgcacctgtagccccagctactgggggatttaaagtaggaggctcactttagcctgggatggggaggctgcagtcagctgtaatcatgccactgcactccagcctgtgtgacagaacaagactctgtctccaaaaaaaaatttttttaatttaaattttaaaaatgtgatggacctctgtaataaatggggcctttgtttctccactgactttctcactctaagagggtctgaaccacgtggacttgtgtttagagcttgcagcaggccaggaacaatgtacttgaatgaaccttgtgttaatctaatactggttgaggttcaccaagaggatacaagcgtatggcttcaagtcctcttgaat

SEQ ID NO: 202857 - DNA, 315 bp, Homo sapiens
tagatacagtagtattgagcaaaactaactaaattgactggattgcttttgtaattgcagattgatgacatatcagatccatttagagtggaaaaaatatgttggccatttaaaaatagtcattggaaggcctatgcacctaagagaacctcatgtatcttctgctactgaagtctaatattactaaattcaaaaaggctttaatgcattatgacaaagcatatgaagaaagccttaaggtgaagaaagccttaatagtctactgactgtggacagtaaaaccctttattatctagaacccagagattgagtctg

SEQ ID NO: 202858 - DNA, 590 bp, Homo sapiens
tctctgtatccttgacagcatctgttattttttctttttaataataaccattctaagtggggtaagatgatatctcactgtggttttgatttgcatttccctgatgattagcaatgttgagcattttttcatatgcctgttggtcattttatgttttcttttaagaaatgtctgtttagatcctttgctcactttttaatgggattatttgtttttatctggtaaatttaagtcccatgtaaattctggatcttagacctttgtccataggtaaattgcaaaaattttctctcattcaatatagtcctatttgtctatttctgttcttattatctgtacttctgaggtcttagctataaaatctttgtctaaaccaacattctgaagtgtttctcctatattttattctagtagttttctagtttcaggtctctgtttaagcctttaatccattttgagttgatttttgtatatggtaagacagaggggtccagtttcatttttcccagcaccatttattgaaaagggtgtccttttccccaatgtatattcttggcaccttttcaaaaatcaattggctgcaaacatat

SEQ ID NO: 202859 - DNA, 314 bp, Homo sapiens
gaaacctatgtctctctcacacacatgtcccccacctgcttcagtgagcatgatcttctaaaattggctccgtggaatcttccctaggtgacactggctggactctgacacattcaaattcattctttctacttatctcaactttcaagcactaattcagtctttaagattcccctaatctcaggttgtaattcatttctaacatgtttgtcatgacatcagtggttgcatgtcttcatatgtttatcactgccccctcttgggaatttatattaattaaacattttggaaaagctcagacttaaaatgactga

SEQ ID NO: 202860 - DNA, 534 bp, Homo sapiens
tcttaggacaagtttctgactttgctaaattaaaacattttcccagcatatttcatatatatttcaacctgctgcaccaaaatgaaaacactggcaaaaatttctccaaaaaagagatttcaccatcattctagtaaactttgggacagttaatcaaaacggaacaaaattcaggaccaagagccattcatttatttattcaataaatatttaccaaacaccaaataaccactgtccctgtctctccaagtgcttacagacttctggtaggagtattaagacttctattggccgggcgcggtggctcacccctgtaaatccagcactttgggaggctgggtgggtgcatcacctgaggtcaggagttcgagactagcctggccaacatagtgaaaccccatctctactaaaaatacaaaaattggcctggtgcagtggctcatgcctgtaatctagcttttctttctagccagtaaaagtattttattttgccttatctgaaaaataacaaaggaagaaaacaacagaattcta

SEQ ID NO: 202861 - DNA, 585 bp, Homo sapiens
tgtatatgttatgtttcacaattttattttctaaatactttcagattgcaactgcatttccatataatttattttataattcgttgtgtttcaagttatgcatttacacatgtaattctaaaaagaagtccatagacttgaccacatttccaaaagagttcacagtaaacaaattattaaaaatctctgttaattcatagatactcattccagaaaatacagcaatggctgcatatcaggaatatctttttccagaaaaaaaaatatccgaagttactagatattctgtagtttctgtatgtggagtttctggggtaaatcctttgagttcaatatgttgactatgtgctatgtcatctcaaatatttgaccttattctgtttttcttctctgggtcattgtaatgcttgtacagttgatgtcgatgctcactgcttctgctttttctttctttttattttaaatctgaaggttctggtaacctgtggtgtatttttattttcctgtgactgtttttgttttgtttttttcctttttcctcccctttgaccctattcatgtctctacccactatgcacagattat

SEQ ID NO: 202862 - DNA, 643 bp, Homo sapiens
atcctgtcccagctatgtgttgctgaggctggattccaggcatgtgatgtccaagtaaagattcccttctggccaaccgcacttacgggatggagactttatcttgggtgtgatgccactgaaaatactggggccttgatcactcttgcccactcataatgtggaggtcttatgctgggagaggcaagctagagagacctgaggctactccttccctccaccaaatgcttatctcctaaagcagaagtgtcgctcaagagagaagcatgctatcgcccagaactctggctcagagattttgcccagtgggagaagcaaattattattaacaacaacaaaagctctgaatctcttcttcccagaggaactgatttatctgcaacggagtgtagacacattaaagcccaaaatgttcttgaaaacaatggaggacttgctgttttatgatagtgtcaaaaaaagaaaacaacataaatggtggaggttgtggtgcaaactaatgtttaggagactggtaggttcattaagctaaactgtaaactggctagatttttttcaggggaagaaagagcaaagagccttcctgggatcagaacaaatctcaaacacatcaaaagctattcctttcaaggagttcatgttt

SEQ ID NO: 202863 - DNA, 445 bp, Homo sapiens
aaaacagcataccatgattacggttcactggccgtcagttacatcatgaaacagctacaccgagagtaggtggggtgcccagaactttacatcaggaatcccgcttaaccgtggatgcaaattattattaacaacaacaaaagctctgaatctcttcttcccagaggaactgatttatctgcaacggagtgtagacacattaaagcccaaaatgttcttgaaaacaatggaggacttgctgttttatgatagtgtcaaaaaaagaaaacaacataaatggtggaggttgtggtgcaaactaatgtttaggagactggtaggttcattaagctaaactgtaaactggctagatttttttcaggggaagaaagagcaaagagccttcctgggatcagaacaaatctcaaacacatcaaaagctattcctttcaaggagttcatgttt

SEQ ID NO: 202864 - DNA, 138 bp, Homo sapiens
cttggaatggaatcctactccacactggcaatgatgctatggctgttgatgagatggggcactggggagtgtatttgtctggtggggctgtcataaacaaatacctaacgctaggtcatttatacacaacagaaatgt

SEQ ID NO: 202865 - DNA, 326 bp, Homo sapiens
tcaggcaaaattaaaaaaaaaaatgtttaaaaatcagaataatgtcctttaatttggtatccactataaatatttttagggctcccaaacaatccagtttaaaaaataggggataattaatcaaaatatctaaaaactcaatgtaagttttcttttagtgaacttaggtatgtattaccaagtggaattgctgaattaaaataccaggtgttaaaaaaatcaatcatctgtcgtaacgagtaattggcctggtttacacctgtgatggagactggtaaactgaggaagtcaaattcaatttttatttaaaacactatgtggatgac

SEQ ID NO: 202866 - DNA, 838 bp, Homo sapiens
tttttttggagacagagtcttgttctgtcgccaaggttggagtgcagtgatgtgatctcagctcactgcaacctctgcctcctgggttcaagcaattctcctgcctcagcctctcaagtagctgggtttacaggtgcgcaccacgacacctggctaatttttgtatttttaatagagataggggtttcaccatgttggttaggctggtatggaactcctgacctctaatgatcctcccacctcagcctcccaaagtgttgggattacaggtgtgagccaccatgcctggccacctcaactgcttttcgtttttgtttttgttttttttaatagtccacattgtgattggttgtcttcaaagtgttttaatgcattttaggtttccctccctccctctctttttcttggcaatttatttgttgaagatactgattgttggttatagggtttcccactctggatttgcagattacatcccgttggtgtagttttacatgttctgcattctgtgaatcttctgtaagttgttagttgaatctagagacttcatcagactcaagtttgacgctcttttggcaagagtacttcatagatgatgacgtattcttccattaggaagcacatactattttgtgatgtaacggtttttgaatctttactgaattcttggtattttgattactaagcatttagcaggcattatcttacttagtattcagaaataaccctgtgcagtgataattatatttcaacttggtagttgaagaaacgagactcaaagtaagtggcaagacttaaattcgagactaggcaatttgatgccagagcctttattcta

SEQ ID NO: 202867 - DNA, 534 bp, Homo sapiens
gaggtggctgcttcttgcaagatcaagaacccagggcaaggggaacttgactcttagggcacttccggttcagagggcgcataagttcaagtgagaggcactgcagtttccagcagccaccaggggccaaagaggcttggggcaggggggtggcccaggaggccttcgtttctcctgcccaggttccttgaagccccaaggaagggcttttgcctggtggtccagtgggcacctaatcagcctcgcgtgcctccccccggttgactccaacctcagagtggtggtcactttggattgctggggctgattttgacctgcttggaggcaggggcctggacaggatgaaaaggtcccgaccagcacacctgtccaatgctgtctcattacttttgccaaatgctggaaggaaacagtaaatctggacatacggtgattttcccccttccatccatctttaatatgtcttttttctctgatacaaatatcaagtaaacagggacaaccttagatttacggctccaaatgaaaacatag

SEQ ID NO: 202868 - DNA, 263 bp, Homo sapiens
aaaaccaggagtcctactcaagtaagccttcttatgcgagttggaagctcaggtttgtcagctgcaaaaagtacttactgctctgagcaaactgcatatcatttcctactgggcaactgttcttcacagagtctaacagaaggcaatatattgatatagcattaagataaccttccctacatttccctaccatatacttcatttctaggagctaaatttcaaatttctattggattttatagacttttcattgtttccattta

SEQ ID NO: 202869 - DNA, 703 bp, Homo sapiens
ggcgcctgagcccctgcaggtgggtttttagccagctctcagagagggtttggtatgcgctgggcagaccccagaatgtccattaaaccaaccgatgtgtagaggacacattaatattctctccatgtagggtgtgttgattagcttcctaaaaaataattagtaaagacttttttgacactttcgtagctcaaacattgcctgaaacatggccctgttttcattaagaccaaatatcaaaacaacagggacatacgattttatctttctgaaaaatctctcccttcggaatagaaagaccttgagcaatatctaattattcttgtgcctcttaatttgatagtttgaaaaatgttttgtaggctttaagaacatttatggaaatttcctgtccttgccacagatcaaattgtttaaatgatggacggcaattttatattgagctgtgataatagtatctcatttgctgctgcttaaatgatttcctttcctcttaacacatgtaggtcaagttactccttcagcctaaaaaaattgtgaacaaaaaaggatggcaaatggaagaaagccaattatacaacaattttagacttttgaagtaagaccgttgcatttcccatattgattacttttcacttgattatagtgactctcttcagctgtttattacaatatagaccataactcacagactgtacttgtt

SEQ ID NO: 202870 - DNA, 460 bp, Homo sapiens
aatgctacatcaaactggacttcattcttgtcaaaatgtggtaggctcccatttaccagcaccctgccacatgataatgcaacaaatccacaccctctaaacccatgaatctgaaagttggcatcataaaaaagtgctttcacacattgtggttttagaatcaatttattttaagaaaactttttttaaaatttttctttcatgaatatttcattattcatcactctattttctctgctgtagctaagcagaataatgctgagaaaacagttcaaaagttattgtagaagaatcaaatctccactgccagcttaaaatccataacattttcccttttgttgtttaaagtaaaggtaaatgttgactgcattctttggaatcatacccagaatatagctgctgaaggtgagaatacaaagtacaaatttctgctcagaaggtagagaaagccagcaaaaaa

SEQ ID NO: 202871 - DNA, 583 bp, Homo sapiens
gggggaaacattaccataaccttcctttggggaattcatgtgtgtattagcatattaaaggctctcataaggcctgcaatgcagaaatctatttaagttttatctgtttaacccaatgtttcccttaattccagaacattttctttgttcataacacctgttaacacctcctgaaagtgttcacgtagtagacttatctgagaaaagcaatttttgagccgttaaagcttctagattggacaaactaggcaattaatgatactagatcaattcagaatgcaatttgagcctcttccccctgggaaacaaagtgaaaagagtggatctcatggaattaggggagaagtagacccagaattcatggggggtgggtggctgtgaacaggacctgcagaagaggctcggctgtgaatatttccaaggccccttgacctgtgagattctgtagtgaacggttccagctttggccagcttaacaatgtgctgggccccaaggtcttgagagcattgccttttcttccattgaaataagttcgcttgtttgggaccattcaaaggatcaaaataaaatttacttaccaaa

SEQ ID NO: 202872 - DNA, 465 bp, Homo sapiens
agcttcacacattatctctcaccctcttgttctcctgtgattgctgagacaagaacattttttagctagtcagccaccgtgcgaaacagagctgtcctagacattgtggcttgaggcagagctgcctcacctgccctgcaaacttgtaagtgagaactaaatgcttacctttatatgctactgagatttgaagattgctgtacaagcaagagctgactgacacaaatgaaaagcaaggaagaaaggccgggaagaactcagggtgttctgaagagacgagagaagcctcagcttgttaaaatttatattcaaagcctatatctgtaactattttactattttgtctccaaagttttctactgtatgcatgtaccataatttatttcaccaacttctcttcatgaacatgtaggttatttctaattttttactgtgtgaccagtaaaaaagactgcttactaccaa

SEQ ID NO: 202873 - DNA, 531 bp, Homo sapiens
actgcttgaggccaggggtttgagaccagcctgggctgtcaacataacaagaccctctctggggttaaatctgtcagataagtcagtcaagaactagctgagaacaggaaggacagatgaattcacagaatgggaaaggggtgcttttgggcaacagaaaggagttaaaaaaaaaaaaaaaagaggacattgacaaggagaggcagcggcgtactcaaaaggaacgtgactcattctatttaggactggtgctgtgtaataagtgcctgtcccatcctgtgcttcagacgtgccgcctattcacatcccactctacatggtcatactctttgttttgtctggaatattcttccttcttatctcataattttagatccttttcattatttctgctcaaatgtcatcttcttaaagaagtcttcctagaccactctttctaaatcagggcaaccaactcctatcattcttttttttttttttttgggagatggagttttgctcttgttgcccaggctggagtgcaatggcatg

SEQ ID NO: 202874 - DNA, 467 bp, Homo sapiens
aggccacggctaagctcagtgcgtgattaagcctcataaccctccaaggcagttactagtgtgattcccattttacagatgaggaagatggggacagagaggtgaataactggccccaaatcacacaccatccataattcgggctcaggcacctggctccagtccccaaactcttgaacctggccctagtgtcactgtttctcttgggtctcaggcgctggatggggaacaggaaacctgggctggacttgaggcctctctgatgctcggtgacttcagacagttgctcaacctctctgttctcttgggcaaaacatgataacctttgacttctgtcccctcccctcaccccacccgaccttgatctctgaagtgttggaaggatttaatttttcctgcactgagttttggagacaggtcaaaaagatgaccaaggccaaggtggccagtttcctatagaacgcctc

SEQ ID NO: 202875 - DNA, 310 bp, Homo sapiens
ttggcccaaaatggaacaatccctttgtagaaattgttacctcttcacttcattgaaggtttgcaacagtttattcagactgtttctgtccagttttaaccatgtgttttatactaacattgtcctgtctactgcataataaaatccaagaataggtcaggcattctgttttctataggccaaaggccatcgtaagttcagatgtactactcaaaacaaattagcatgagtttttgtaccaaaaatatgtagcattttagaagttatctctttatacaataaaaagataataaacttttttatcaattta

SEQ ID NO: 202876 - DNA, 414 bp, Homo sapiens
ctgaatagcgtcaaactcagggatgtgagctgactgactgcctttttatgtaatggaggccatgtgatagggctttatgaggccacaaatagcactttctgggtcctttcacagtctagtcagtggcccaaccaacatatctggttgttctgcaatctcagtcatctgagaagataacctccaaaatacatgcagtggcatcaggtgtttccttggtaggtgtgcatcttttaatgatggaggacttaggatgaagaacaggtgtgtttaaaaacatcaaacccccacatcattactatttgctgtaaggatctatgcagtttgtattttaagtccttgacatatggaagagcatttgtgagagtaacaggtttgctttgtaatgccaactaaaaagtgtgtatttatactcga

SEQ ID NO: 202877 - DNA, 686 bp, Homo sapiens
tttacctaaggcagaggcctgggcaatggcgggcgcccctcccccagtctcgttgccgccttgcagttgatctcagactgctgtgctagcaatcagcgagactccctgggcgtaggaccctctgagccaggtgtgggatatagtctcgtggtgcgccgtttcttaagccggtctgaaaagcgcaatattcgggtgggagtgacccgattttccagcatcaccaaatgccccaaaacttggacccatggagctggccatcattattactgtgcctgtttgcctcctgtccatagctgcgatgctgacagtatgggcatgccagggtcgacagtgctcctacaggaagaaaaagagaccaaatgtggaggaaccactctctgagtgcaatctggtaaatgctggaaaaactctgaaagatctgatttatgatgtgaccgcctctggatctggctctggtctacctctgttggttcaaaggacaattgcaaggacgattgtgcttcaggaaatagtaggaaaaggtagatttggtgaggtgtggcatggaagatggtgtggggaagatgtggctgtgaaaatattctcctccagagatgaaagatcttggtttcgtgaggcagaaatttaccagacggtcatgctgcgacatgaaaacatccttggtttcattgctgctgacaacaaag

SEQ ID NO: 202878 - DNA, 507 bp, Homo sapiens
accaattctagatgaaaaagagagtccactttggctgggaggaggagaaactgcacagtgaatggaagccaacatcccagggattcaatatctttggtgtgtctaggtagccgtgataccagaggcagccttgccgaaaaatatccatcctccaagcatggcccagatgccagagagagcatcctgactggtgtgatgaacgtctccccgtaacccaacaggctgtacatccttccagagagctgccccctcttccctccaaacaccttgggctggagtactttctagatccctggctcaaccttagggaaagaggaccccgtaaaagattaaaattgaagccttctgtttgccctgatagaaatagaaattaacttgaagtctagaaaataaaagtggtcttatttgtagatctttcgtttttttgtcctaaaacatactcaactagatgctactgctgatgatgttgatgacaataatgtcatgatggttgttgatgatagagga

SEQ ID NO: 202879 - DNA, 218 bp, Homo sapiens
agaattactatataaaagacagggacagcaggaagtagcagtatacccctctgtgaaattttagggtgtatctcccattgaaactttaaacaggctattggaggagggctctgagaggcagactgaccagtcagtgctgggcacagagaggagcaaggcaacctccagtccccacagaatgtgacaaaatcccaagagaaagatcatcagcctggctg

SEQ ID NO: 202880 - DNA, 487 bp, Homo sapiens
gaaagacaaatgaattcccctttacaggagtattatgtggactacaagcctacaaactctgagaccatggatatatcggttaatggatctgggccctgcacatataccatctctggctccagggaatgtgagatgccacaccacatgaagcccttgccatattacagctatgaccagcctgtgatcgggtactgccaggcccaccagccactccatgtcaccaagggctatgagacagtgtctccagagcaggacgaaagccccggcctggagctgggccgagaccacagcttcatcgccaccatcgccaggtcggcagcaccggccatctacctagagagaattgcaaactaacgctgaagccaactcctcactggggagctccatgggggggagggagggccttcatcttaaaggagaatgggtgtccacaatcgcgcaatcgagcaagctcatcgttcctgttaaaacatttatggcatagaga

SEQ ID NO: 202881 - DNA, 496 bp, Homo sapiens
atatctgccaatgtctcatttattcagcaaacgttcatggtctgccatatggcagcattaatacagtgcataggaggcaaacatgaacagaatcaatctatatctggcattgtacatgccatttaaaatatctacatagctaccgatgaaatattgcatttccttatcttctgttgcagtgtttacagttttaacatatttatgtatactgtatacttccatggtgatatgtgattatttgcatctaatatttctctttattagtgctgtgactttttatctcatttccatttatttttctcagtcatcatttgacttcatccctgttatttcttataatttcattataggattatagtctcctttgtttcactgtcatttattttatgatttctcagtcttcatgttcagctggtttcttcttaaaacttttcaacctataagttaatctaaaaagataatttttttaaatgggcatcttcaagccttttgttgt

SEQ ID NO: 202882 - DNA, 499 bp, Homo sapiens
  misc_feature (20)..(21): n is a, c, g, or t
tctagagttaccccccgcannggcgtaacgcactacagtccagaactcccggactcaagcgatcctccagcctcagcctcccgagtagctgggattacaggtatgcaccaccacgcccggctaattgttgcatttttagtagagtcgggattttaccacgttggttagactggtcttgaactcctgacctcaagtgattgtcccgccttggcctcccaaagtgctgggattacaggagtgagccaccatgcttggctgcacactattttttgtgtcttgcttccttggctcagcattgtttgtgagattcatccatgttgtgggacccgtagttcatttttaggaactatatacttgtgtgattacgccacatttatccattctattcttgatggatattacattatttttagtttgggaccattgtaagtattactgctgagaacactcttgtggttttgttttgagacagcatatggggatcctgctagagtcgccc

SEQ ID NO: 202883 - DNA, 558 bp, Homo sapiens
aggggggaacaatcacttacaattttttttttttgaggtggagtttcgctctgtttcccaggctagagtgcagtggcatgatctcggctcagtgcaacttccacctcccggactcaagcgatcctccagcctcagcctcccgagtagctgggattacaggtatgcaccaccacgcccggctaattgttgcatttttagtagagtcgggattttaccacgttggttagactggtcttgaactcctgacctcaagtgattgtcccgccttggcctcccaaagtgctgggattacaggagtgagccaccatgcttggctgcacactattttttgtgtcttgcttccttggctcagcattgtttgtgagattcatccatgttgtgggacccgtagttcatttttaggaactatatacttgtgtgattacgccacatttatccattctattcttgatggatattacattatttttagtttgggaccattgtaagtattactgctgagaacactcttgtggttttgttttgagacagcatatggggatcctgctagagtcgccc

SEQ ID NO: 202884 - DNA, 490 bp, Homo sapiens
tatcctattcactgactttaatatctatccctaggtaagatagggataaatctcctatcctataaattcttacctgtaaattatttgagggaaggagaaataacaaggggtagtgactcttggcggtgttaaagatggcatagcaaaaggcagtgcagtggtaatttttgacagattaagatcagatgttttcggggcaaagcgctatttgttttttgacttccagtggtctgttttttgacatctgtttgtgctgtagtaaaattaatttatttacttttataatgttttaaacacttagccatagtttgggttgcttccagctctcataagtaaatcactttgatgagagtttatgagaatctttaaataatttagggaccaataaaatactgttcttgccagaagatagaaatgatacccatcaatggtactcatgctaaaacttagtgagttaaaagtatttgttttcagagttttaaaaaaaaaa

SEQ ID NO: 202885 - DNA, 586 bp, Homo sapiens
gaaggttgcactgaaagcattctcaattgaaattgtgccatttggctgtagtgtttctgatgctcatttagaactttggaagttgtgggatggtgggcaagtgtgtgacctgggatggagattctctacctctttaagagtgaaaccctggctgggcgccgtggctcactcctgtcatcccagcactttgggaggccaaggcgggtggatcacctgaggtcaggagtttgagaccatcctggccataatggtgaaaccccgtctctactaaaaatacaaaaaaatagctgggcgtggtggcaggtgcttgtaatcccagctacttgggaggctgacgtgagagaatcacttgaacccggcaggcggtggttgcagtgagctgagattgtgccactgcactccagcctgggtgacagagtgagactccacctcaaaaaaagaaaagaaaaagaaaaactttaaaaaatgccgggcacggtggctcccgcctgtaatcccagcactttgggaggctgaggtgggtggattgcctgagcttaggagtttgagaccagcctgggcaacatggtgaaaccccgtctctcct

SEQ ID NO: 202886 - DNA, 728 bp, Homo sapiens
gctgggattacaggcatgagccaccaggcccggcgacaaatactacttctaggccattttgcaagtgagaagggcattcgtgggcacatacgtagatgcagtagagcatatgaaatcagagtaaacaccttcttagatgtcttataattagtgcaaagaagtaacccttaggcaatgtggtatgggtttcaggaggctgcacgtaagtactagcctcattattattaaccagttttttctgtcatgtctctggtcctcagtttcattgtctgttagatgaggtggttggcccagatcacctaaagaacttggaacaaaaatcaatcccttagctccatgtcccagagtctgtaatctggggtgggaccgtgcattggaaattattttcaaattccccagagttcttaatggacagcctcagtggggacccaccagcctagcctagctctgagatttcagctccagcggcctagtgtatgtgtgtgagtgtgaggcatgtgtgctgcagtaaactgctgacatttggcttcttgatggtgtgtgacgagtaactctttgcagctttactgaaggagacccaagttgaaaggcaagcttggtgtgccttgcttagggggacagtcatctgcctggattttctgactttggtaacatgaaatggagccttaagcaggtcggggtcctgttgtgaaacagaaaccaccctagatgaacgtgaaaaagaaaaa

SEQ ID NO: 202887 - DNA, 356 bp, Homo sapiens
ttctttctcacactatctttagcctaatggcattgagtgccctctggaagtgagggttggtgtaaatagcgttcatatatctagttccagtgacttggctataaagttcaggttgaaataggggacagtgaaaaaggaggtgatatactccatctgtttgtttagtcttgtttagggacttctgataagtgcatactctggacacagaacatctagggattattctagccaccatgatctcaggttctgggctcaggaaatggacaatcattggatcagtgtggaaaggatagtgtacaacaggattgagttgggacaagatttgggttatatcataagggccatctctaagacct

SEQ ID NO: 202888 - DNA, 634 bp, Homo sapiens
aaagaacagaaattttactcaatgaaaagcatacgcaccaagccaaaatacaacagtgcttaggcatatagtccagggacccttctagtgctggatgggggaacccaggccctcggcgaggggttggtggggctcaggctggagggaggctgcctatgttcccagcatatgacttagctcaaagcacaagagcaaattctagaatacagaaaaaggcagatatataatgccatgccaatagtagtaagtgcttgaagagacttgaagcagaaccaggagctcaagcagtgggactcaacctggagccaatgctgtaaatacctgagagctttaaaacatcctgtcaccttggttctacttggagggattctattccagttggtttggaaaacagcttggaaatatggatttttaagcactttgggtggttctaatgtacagccagcattgagaaccactaggttggagaatgacaaaacacactattttaggtgggaaggtagactgggtaacatgaggagaggtatgaatgaagagagagaatgagctaagagcatatctcaagtgcattcagctaggtggaccgcacagacaagtcctggagtgagtggatgcttggcttgccctgggaaga

SEQ ID NO: 202889 - DNA, 441 bp, Homo sapiens
catgcagcgcttggtgcttttgagggcattggtgcaggaaggcttgatgcagaatctctgcttatcatttgctgtctgtgtgacctacatcagcggcgcctcagtctgtcttcctgcagaataagaatacagtcagccctctgcatctgtgggttgggcatccatggatccaaccaactgtggactgaaaatatttggaaaaatacaataaaaagagacaacccggcgtatggtggtggagcacctgggagacagaggcagagatctcgttcctcgatcccggcgcgttggttgtaaagtaggaacagtaatagcacctacctctagggccacggagaccgaatgaaataatgcctgtcaagtcacttagtacacagtaagcactcagtaatgctaggttgttgttattataataaatttttagcgaacgggaagaccaag

SEQ ID NO: 202890 - DNA, 239 bp, Homo sapiens
gaggcaaaatagacacacagagacatgaggggcgagtcctatgtgacaatggaggtagagtgtggaggtagactgaagtgctggcaacaatcagcagctaggaattcacaaggaatgattctcctcaacaggtttctgagggagtgtggcccagtcaacatcttgattatgaaattaaggacttcaagcctccagaaattgtgagacaatacatttctgttgttttaatccacactgct

SEQ ID NO: 202891 - DNA, 412 bp, Homo sapiens
tggattttagaatatctgcattatatcaattgatcatccccaaccccaaaattcaaaatcttaaatgctccagtgagcatttcctttgagcatcatgtcagcacagaaaaaatttcagattttggagcatttcagatttcaggttttcagattaaaaatactcagcctataatacatgaccaggtcagaacttccaagaaaattctggaaatactagttttcctagagatgttctatgagaaataaaaatgttcatgttcttctagagtttgaatctttaaaaggatgagtacaattgattgttctacatgacagtcaccctcaagaaatgtgtgctatgtcccagttggctccctaagaaatgatgaagcagaaagtgagaacagatccacagatggcatttaccaactac

SEQ ID NO: 202892 - DNA, 671 bp, Homo sapiens
cattcggtgtggtcaccgcccatggccatggtctctactggtgttttgatttcccgcctctttcagcagacactcggtgagctcctgacttccaactagatcaccagtactaattgcaacaaaccacctcctcctcccagtcagctagcctcatctctccctgcatgtggaaaagatacagaagccagggagaaaaaggagtttggtttgggggtggcttttttttaatatgtaaagtaaaattacattcagggaattaaaagtctgtgtgtggtttaacaggctcctaaagagctccacggggacaaacatgttatgcaaatgccatggaagcagaggtgctctgaattgcctaggccgttgatccaaaagtttccattctcctctgcaacccaatctttaaaatttcattttgcttcttccctcagccttgattccagcacccaccacagtgtcatgctcagtgtttattgatctgaaatgaagctgggctgaggcctggccaggagatgaaactctcttagaaagtttcctaggagcggagattctagcttcagtgtaaaggaggggtctcggttctctgtgtctagtctactgagtctcaggctagttattaccacaattacttttgcaccagcctaatagttttctctgggggcctggtgggttct

SEQ ID NO: 202893 - DNA, 778 bp, Homo sapiens
ctgagtctgaggcagcctctccagtcagagatttctaatcagcttatctagttcttttaaaaccccacagctgatctactttgcctgacttccccggggcctagaaaatgaccctggacacctttctctaactgattagctctggctgatttgtcttaatgctaaaccactgtgtaacagtactaaattatacttaatgacacagtctactgttttgaagagtgctgtgtatgactgactgagctaaaaggattgctggctatgagtgagttttagttttagaattcattttcaaagactcacaggctcaagaagcttgaaaaccacagatgatgtatacagtagctggagttccctggaggctcctttctagggtctctcatttgaattggtgcagaactgaaagcagagagtcagaaagtaactctgcttgtaaaaatggcttaggaaaaggaacttaagattgtgggttatatgtgtgtatgtgtgcacacacatgtatgtttcctgaattctaacctgaaaatatcacatttgtggatacttaaaatactcatatgcattttgatacacaaaagcaattcaaagtatgtaaaaggaggctggaaatgtaagcttaacagtgatattctggagaaaaatgttgtaactgtcactccaggcctcccttaggagaaaccaaacttgtcagatattttggaatggtagctctttttcaggaattagaataactgaagtatgatactgtgttccgtgtgctttaaaatctgtgaccctc

SEQ ID NO: 202894 - DNA, 457 bp, Homo sapiens
cacttgcccagtgctttctatgcctctcatggctcctcatccactaggcttccatctacccagccccaccactggctgctttcccagaactccctaaaactgggctccaccaactgatagccaaggtgcccagacatgcaaagtgcccgagccagggcaatcccagcagggtggggccgtggtactctctcctcacctgttcagggaggtggcaccgtggtggctgtcaaagctccgcccaagtggcataaccatccccagcggcctcaccctccacccttgccctcgagaggaacatttgtagtggtggggaacacagattgtggagaaacagtcagaattcaaatcctggctctcccaagcactcactccataaccttgggcaaatcacttaatccctctctatggctcagcttactcatctgtaaagtggatctattaataaattgttacaagg

SEQ ID NO: 202895 - DNA, 526 bp, Homo sapiens
ggtgggaaacagggcaggtcaaaactcctgtgctgatcagtagtgggatcacgcctgcgagtggccactgcactctagcctgagcaacatagtgagaaccccatctctaattttttaattaagaaaaaatgtaaagtaaaacaagactctccccacagattggggaaatataaaatacttcataataccaaatgttcagaacactgtaaactggtagacactctagaaatatgtctggccctacctggtagaactgaaaccctgcaaaactctcagtggggaaaccccactcgaagtatgtactttatggagactcttgctaatgcacacaaaaagaaacacaaaaatgttaccatgtgcctgtgtagaagaagaaaaaacttcagcgtccatcagcaaagtcagagtggtggaaagtaatgtcaaggagatagagcacagttataaggctgagaaaaactgtcaggtacagaatatacacagtataatacataggtagtttttttttttttttttttttttgaga

SEQ ID NO: 202896 - DNA, 166 bp, Homo sapiens
aagagcagaggtgtgctttgtgaggttctgggggtctgtgtgggtgggagtaacatcctagcctggagagggctggtttcttcttgttctttttgttttgttttgttttagagacaattgcagtgcagtggcacaattgtagctcactgtaacctttaattcctgg

SEQ ID NO: 202897 - DNA, 507 bp, Homo sapiens
aatagcctatagtgcatccacctaaaaatatggcagagtggctccaatatctattaatgataaaaaactttcagtaagctagtaatagaggatatcttgataaagaatatctacaaaaagcctacaactaacatcatacttaatggtgagaaatttgaagcttccccagtaagatcaggaacaagacaaggttgtccccttttaccacttcttttcaacatcatactgaaagttctagctgcatgcaaaaagacaagaaaaggaagtaaaaggcagaaagactgggaagaaggaacaactgcttttcttggtaggtgacccaattcagaaatccagatattttcccaaagtcctacttctctcttaccacccaaatcttccataactagccaattcccctatcttctaccctttctctcactatatgtatttctgctgcgacaacccaaaaccattttttttctgcccaaccaaagtgaactgtcttactatcttcctcccccactt

SEQ ID NO: 202898 - DNA, 255 bp, Homo sapiens
caagtgtatgtgtaaaatggtctttatggtctttttgtgcacaattacgtcaaggaaatttcagagcccaaaggtcaacctgcaactataaggttcctaagttatctatctctttcttttctgcctgctttaagtctgctgttacttttttgctgagatagaatccactgtttgtattcaaccatttcgtttttgttattgttaattgtttttgcaaaccaatgagtttgtattaatatctcctgactagagtgg

SEQ ID NO: 202899 - DNA, 312 bp, Homo sapiens
gcgtcctttgcccactcctgttggccgcggcggctccaaagcgaggtaagctggtcctctacccctcaaactcttcacaaccttcaccccgtttactagcacctgcaaaccacagcctcccttcctgtcccattagtgaatttaaatcggattttgtttttcctcttagttgaaagaaaaaaatctttttgtattcttttgtgtaacctatctcggatttggagaaaattttaattcaaattaatacacttatattggggggggtgagtggtactttcctccttttcaataaatttctatacttgctacttt

SEQ ID NO: 202900 - DNA, 604 bp, Homo sapiens
ctgcttcctgggttcaagcaattcttctgcctcatcctcccaagtagctaggattgcaggcatgcaccaccacagctggctaatagttagtagagacggggtttcaccgtgttggccaggctagccgtgttcttttttaacagtctttgaaggcttcggaaataggtgctttgggagggagagcagttatgggggattgtgagacggccttcagctcagttgagggcaggtccctatctggatttataacttagtttggttgaagtgtcaaggcttttgggtaagagttgaagcctttgtgagaactctctgaaggcaggaactttagcatacattcatcttagtaagccagtgcctggcatactacctgacacacagttaagtttttgtatcagtaaatcaatggataaattgatccttcaaaaaagaaatcaaaggctttaaatcaagatggctgagaattttgtccagagaatttcaagaatagtcagatgcttctgataagtacttttagaatgttaagattgaaagctgagagactttattcctataactccactcctagatggaaaaaactcaccatgtcgtcctcctcatgtttgac

SEQ ID NO: 202901 - DNA, 561 bp, Homo sapiens
  misc_feature (419)..(419): n is a, c, g, or t
gccttggcctcccaaagtgctgggattgcaggcgtgaaccaccacacctggcctatgaacattttaaaatgtcaaagatgacttccaggtttctggaatgagcttgcttatttatttatttatttatttatttatttatttatttatttatttatttattttgagacaggttctctgttgccaaggctggagtgcagtggtgtgatcttggctcactgcaatctggacttcccaggctcaagcaatcctcccacctcagccttgagagtagctgggactacaggcatgtgccaccatgcccagctaatttttgcattttgtggttttgccgtgttgcccaggctggtcttgaattcctgggctcaagcgatcccacccgtcttggcctcccaaagtgctgctattataggcgtgaaccnacacacctggcctatgaacattttaaaatgtcaaagatgacttccaggtttctggaatgagcttgcttatttatttatttatttatttatttatttatttatttattttgagacaggttctctgttgccaaggcttggagtg

SEQ ID NO: 202902 - DNA, 702 bp, Homo sapiens
gccttggcctcccaaagtgctgggattgcaggcgtgaaccaccacacctggcctatgaacattttaaaatgtcaaagatgacttccaggtttctggaatgagcttgcttatttatttatttatttatttatttatttatttatttatttatttatttattttgagacaggttctctgttgccaaggctggagtgcagtggtgtgatcttggctcactgcaatctggacttcccaggctcaagcaatcctcccacctcagccttgagagtagctgggactacaggcatgtgccaccatgcccagctaatttttgcattttgtggttttgccgtgttgcccaggctggtcttgaattcctgggctcaagcgatcccacccgtcttggcctcccaaagtgctgctattataggcgtgagccaccgtgcccggcgctttgtttaggttttggaggaccctccattactgttttccactgccgtgcaccgtttcacattcccaccagtggtgcacagggctccattttccccgcttcctcgccagcacttgttttctgtttcataatcagtgtgtggtagaatctcattgtggttttgattttcatttctcttatgattagtgacatggagcatcttttcctgtgctttttgatcatttgtatatcttctttgaagaaatgtctatttaggctgggcgctgtgtctc

SEQ ID NO: 202903 - DNA, 251 bp, Homo sapiens
aaaaaaaaaaccaccaccaccaccaacagaaaacatcagtcattggatttcaggtctgtcttcaatccaagattatctcatcttcaaagactctcgatccaaataaggtcacattcctaagtaccaggggttacttgagggccaatattcaacccactacaccaattaatatccatcaggttgggctcctaaaataatgtgtgtttgcctctcatggcaatcatcacattcctcctggaatccaacctgac

SEQ ID NO: 202904 - DNA, 445 bp, Homo sapiens
gaggttgattctgtggctccaggctgcagcatcagtggaagtgaaaagctgtttggctttaaaattgtcaacattttgaaaataatattttgggaataaaatctggaatttaaacaaccttcaattcacaaaatcataaaaatcagagatcctggttcactttcttagcaactgcaaatctgtagtatcagactactgtgatataagtatcaggggaagacaagagaggtagttagtgaagtgggtgggccttgggccaacagatcaaagtttgaatcctacttttcacttcctagtaggagtaaaacacattttctgagcctcagtctcctctgtaaaatgaggacaataatacctaccttcctgctagaactgctgtgaaaattaaaatgtgacaagtcttgttgaacacttatcctagcatacagtaatgatcatgacctag

SEQ ID NO: 202905 - DNA, 486 bp, Homo sapiens
aataaagatgctgtgaacattatacctgagcacctattttgagtatatatccagggatagagttactggataatggagccacatgtatatttagtttttcctgcagcattttactacagaaattttcaaaaataaacaagagttgacagaattgtttgaatacccatattcattcctaccacctagattctgcagtaaacgttttgctgtatttgctttcacacatacctattcgtcgttcttctgtcaatctatcctgttgatgtgtttcaaaaataagttgccaaatagttttccaagtggttgcactaattttctgcttgtactgacaatatgagagtttcatttgtgccacgtcttcaccagtatctggtattgtcaatctttatttttgaaactttttttagctttgaagtataattgatataattatatatacttatgatgtacaccatggtgttttaatatatgtatacatcatgaaat

SEQ ID NO: 202906 - DNA, 164 bp, Homo sapiens
tgaattcacttcttcacatcgattcacactgagtagctattatggcgcaggttgtaaactgggtctatttgttcaagtacagagaaatggaaatacagcagaaaacacgtaaacaatatgggactctcaatcttcttgctataaatggaggtacatcatcttat

SEQ ID NO: 202907 - DNA, 937 bp, Homo sapiens
gacattcaattttggacactggataaataagcctactccaccagaccagagttttccttcttttctgggaggaaggcaaagagcaggcaggggagacatataaataataagtagcaaatgaaaaaccctacaaacaaaacgaaacaaagaaaaaccctacaaacatttaaactcaaagacaaggatatggaagtccaatccagatcatggaaacaggtatgcaagtatacaggtataagaaagtgtatctaaagaagattaaggaccaggcatggtggctcacggctgtaatccctgcactttaggaggatgaggtgggaggatcacctgaggttgggcgttagaaaccagcctaaccaatatggtgaaaccctgtctctactaaaaatacaaaaattagctggggtgtggtggtgcatgcctataatcgcagctactcaggaggctgaggcgagagaattgcctgaacgcaggaggaggaggttgaacccaggaggcggaggttgtggtgagccgagatcgtgccactgcgctccagcctgggcaacagagggagaccctgtctcagacaaaaaaaaaaaagaagaagattaagaagtgtaatgtggtagctcatgctgaaattctgtagggacaggaaagagccaataaaataaaataaaataaaataacatgtatggtctcttctttttaaaaaaaagttaaattttttgttggtgaaaaattctaattatatatatttatgaggtataaagggatgctatgatatagtatacaatgtggaatgatttaatgaagctaggtaacatatccataacctcaaatagttatcacttattcctcctaactaaaacactgtaccttttgttcaatatctccctcaccaaagcccataataataataaattattactacacatttcaattacgcgcgcga

SEQ ID NO: 202908 - DNA, 230 bp, Homo sapiens
aaaaatggattgcaccacatattacaccgcctgcctttctcagaccgtcctggtgcaactttatcaagtaagaggccacaaggacattatttttgtttttaacgtgtggcaagatagaccctctttttcaggagttattttcttttcgtcaagatttcatatccaaatatatttaacaagatgactaaatctagggcataagacactacaaaagaaaaaacatcagacaa

SEQ ID NO: 202909 - DNA, 300 bp, Homo sapiens
gaagagacccgcgcttctgtgactcctgcaactcacatactgcacacatgtaaggttagcgataaaattaatgagaagactaaagtctctgaaatgaaacatttttggcatgtgataacctgatatgctcccctcaaaagtcccttggaattagcctagctatctcagcatagcttttcttacatcatgggtattacattagccaagccaacttgtctatttgtccttgtctcacatcacttttcaccctcaacttttactccatttatgccaatctccttatccacagcaagatgctac

SEQ ID NO: 202910 - DNA, 442 bp, Homo sapiens
ctataaagtatgaatcagtatgtgcatcataaatggtaattattgatattgcatgaggtcagaccagcttcctctaatcactcttcccatgacttgatctctttggattatctcctcaaagttttttggttcctgtatttaaaattaaaagtcagctggggtcgagagtaggggctcacacctgtaatcccagcactttgggaagccaaggcaggcagatcacctgaaggtcaggagttcgagaccagcctggccaacatggcgaaaccctgtctctcctaaaaatacaaaaattagccaggtatcatggtgggtgcctataatcccagctacttcagaggctgaggcaggagaatcacttgaacctgggaggcggaagttgcagtgagctgaatcatgccactgaactccagcctggttaacagagcatgactccgtctca

SEQ ID NO: 202911 - DNA, 544 bp, Homo sapiens
tgcagtataatgtagtggtaattttaaaatacatgttgaggttaatatgagcgaaatgatggagcagcagctccaagctttcatcctcctaaagaagcattaaaaaaaaagcagaaactgtcaaaagtaattttgtcaaaactcagaaaaagagtcaaaggtttacagcaaccaagtaaacactgattaaaaaaaatagtaaaaaagtgacttcaaaatggtaaaaatctttgaggagttttttacttgtcctacccaatcctgttcctggctctatggcagtcttcagacaccaacaattagtgttcttagaacagagtcctggcccctggttccagaggaagcagagaagaccttatgcacaaattattgtatgtgtctcttgtaacctgtctggagactacgtgaaagaaaagatgctcttctctgtttcatctgtctcagaactctagccataaaatcttcctggaaaatggaatggaattgctcaaaaaacaatgcaagctgaattaatgacagacagatgttaggttaaaagattaaa

SEQ ID NO: 202912 - DNA, 457 bp, Homo sapiens
  misc_feature (27)..(27): n is a, c, g, or t
ggagcttcaaagtgcactcttctatanctacacacacacacacacacacacaaaacaaaagaataaaagaataaacttgatgagcatgttggcaagccaccaagtgcctgctccctctaaagagaggtccagcttacacatggagtgtaggctttaaagcgtacctgcccagtgctgctatgactctgtcccatttgcctaactgctcggtgctacggtttcctcatctgtgaaatagggataacaacactatctacctcatggggtggttattaggattaaatgagtagaaacgtataaagcatttagcacggcacctggctccaagtgagcaagacattccaagccacattttaaaaatatgtgatgcaaaccttgaaaggcatcatttatacaaaatgtccagagttggcaaatccatagagacagaaagtagatatagaagagtgcacttggg

SEQ ID NO: 202913 - DNA, 672 bp, Homo sapiens
ttgtcttgtgctggaataagggttaaagaatgatgtagaaagagaagccaactcaggttagaatacagacaattccaaattcatttgcatattccaaaggtgtatctagaggcaagaaatggatagtacaaatgaatcaggaaagaagcacagctagcaaggagcttaaggacatctcagactaacatttcattttgtggttgaggagacaaagaagttaagtgacttgtcaaaggtccaccaacaagttagcagaagagttgagtttagaaatcagtaactaccaacatttagtgggtaaaatcagtacttgtactgaaaactaacattttcagaaaaggttggcatggagaaacagagaccttccctcgaaaccctagtaaattatccataaaaccctctgaaaagaaaatttctcagtgatactcatgagtgttaaaaattgagcatatcccagattctggtagaagtttctataatcacctatattaatgagtggaattaagaaatattcactcatctttcctctcttgtcccatcaaatataataggtataattcaaaagtacaacattataaagtgaaacagattagatattcacagtagtttccacaattcacaattcactgtataaaatcccagggttacttacaaataagtaataagagatca

SEQ ID NO: 202914 - DNA, 508 bp, Homo sapiens
ctgtgatactgaaagtaatatcatcctcttccctccaggatcgtgggaacaatatccttgggggtgtccactttctgccatatgtgtagtcatatcaccccctccgccttggaatattattaagaaccatgtcacacgggggtgtacacttcctacgatgttgggagtaatagcattctcttcttccatgaatattaggaacaaaatcaccgggtggatgcacacccagtgctatattgggagtaatgtcatactccaccccctggagattatattcggatcaatatcaccggctgggtgtgcacctgctgcgatattgaacgtaatatcatgctctctccctccctgaacattaggaacaatatcacaggtgggtgtacacccactgaggtattagggcatactattagtatgaattattccttgttttttattaacatgaatatgaatggccgatattaatattaatattaagaagtaattgctaataaaaagttctcagattatt

SEQ ID NO: 202915 - DNA, 340 bp, Homo sapiens
tacaaatttaaaaaacatattccctgctattacagaactcaaaatctattttaggagacaaaaaaaagtaaggagatattacaatgtgatgtatgctatgatgggttggatggtatgaccatataaagaggacaaattaacccagcctgtaggcaatgataactggtcttgaaagaaatgtaggtgttaaatagataaaagagttagattagagaaggatgggtaggtgggaagagtattttaggcaaaggtaaaaagtacaaagacatggagccatgagcaggtatggcacattctggatttgtaagcaagatggtacagataaaacaggttgcagatg

SEQ ID NO: 202916 - DNA, 405 bp, Homo sapiens
attgttgaaaacattatttttaagaataacaattttagggaaaattgtattttcagagagcctacaggtctaattaattactgccaatgaaaatcaatgtaactgcctataaaattattgattggcacttcctctgttctcatgcagctctaaatcacaaatctgctattttcacataataaaattgaaataaatgggggaagggaaattacagggatgtggctcttacctaacagccaggagactaacttgctcaaggcattaagcccttacttaacctatggtaaataaaccttattaatcaatcagaaaaatattattaagctaagaaaataatattgaggccggggacagtggctcatgcctgtaatctcagcactttgtgaggccaaggcaggcggatca

SEQ ID NO: 202917 - DNA, 544 bp, Homo sapiens
tactgtgccacacttcatttaacataatgtttttggagttcatggatgttacagcatgtgtcagtggtttgttccgttttattatagagtagtattcattgtatggattcactgctatttgtttatccattcaccaattgatagacatttgaattttctccagtttttggctgttatgaagaaagctgttataagcttacatgtacagtctttgtgtaggtatgtgtttacatttctttagtataaataccttggaataagattggcaattgtggattatggaaatataaaattttatggtaactttataagaaactgcaaaatttttctaaaattttctaaaacgcatcattttgcctttttacttgccatgtagaagagttccaggtgctcttcaccatcactttattttttaatgttcgtcctcttgtaggtgtgtatggagtgatactcattgtggttttaagttacataattacagatatgttaagcatcttttcatgtgcttgtttgccattcatatctttggtaaagtgtctgctca

SEQ ID NO: 202918 - DNA, 544 bp, Homo sapiens
aataatatgagcatttaattatatgtttaaaaaaatagataaaacagttacaccaacaaactcaaatctgttcaaaagcaaaaaaatcagggaggaatatggaacctttgaaatggtggagtaaggacttctgaaaatcttctccataaaagcaatgagaacacttgcaaaaaaactgtcacaataaactttttcagaattctgggaattaatcaaaggcttttcacaatccaagagtgcttttcccaagcactctttgcttgactgaacttcagtcaggctcctaaacctgactaaacctcctaaaaatgactgaattttgctaagaacagtgaccttttttcttgccctaattccatctccatctcttatactctacaaaagatgtgaaagccaagagctttataactatctgttttaaaaagcagtagcttagcagccagtgcaagatacagaacagatttggagctccctaaaagccccatctctagagaactggcattatttaacctgtttagcagcttctgaaaagcttcattctcag

SEQ ID NO: 202919 - DNA, 546 bp, Homo sapiens
caggacagtccgttcagaggggggtaagcaaaagaacttcactaattcccatctcccagcagtgccacctccctaccctcctggttgcacatggctgagcatccatggggtcctgggagtcttgcccctcagagtcaacagggagccccagggtggcagacatgaggctaggagctgtggcatttgtccacatgaggacagttttcacagggactgagccaagactcctgagttgattacagtcaagaggacctgaggcagcacaggaaagatgtctcatacagtgtctagctcgtaattaaaactctcattccaacttccagcaacatttagctatcttcctaaaagatagagttgattttatattcaaaaagcagtactaataaacagagacctcttccagctggggatttgtccatcgagtgttatatttccttctgcagaaatcccccatgcagaagaccgtggatccccggaaggtcttggtattgttgtcagagaagcctgaacccatacactgcacaaactctacaagcttgttatgta

SEQ ID NO: 202920 - DNA, 762 bp, Homo sapiens
cgttttgagtctttgttgcttgatgttttgtttttttgcttttggttttggtttggtagtgttggtcttctcttttcggtagcagcactcttgatatgctgtaggttgtcttctgcctgatttttggtcctgcagcccatccgatgttctgtggtgcgtccgacatttactacactggtttcatttcgggtgtgataggcgtttctggatcagagctggttgtgtcattgtgctaggcgagggttggttagattttcgtcagttagttctgttggtgggctgttgagcagacaaggggcttgcagggtcatgaggtgcgatcatgcactgtagatatcaacatttcaagaagcggcactgaaatcccttgaaattgaaaagtcagcctacatgaatgcttaggagcaaaggtttgaaacataataagtctgtatatattcagctgagagaattttcagaaacatttgcagtccattgctaccatttatggatacctatagattcatttgcatacttctcacgagttcttatttaggtggtcaatttgagttatctaaaatggtaacaaaactccccaaggttacttaaaatattttatgtcttttgaaaacacagtcattcgtacaataacctttccttaaaaataaagccaattaaaatgaagaaatatcttttgatttccccctatttccgtctatacgaagacaaacgacatctctttcgaccctggcctccatgaccctctgtgctgcttggtcataa

SEQ ID NO: 202921 - DNA, 442 bp, Homo sapiens
tgtgagccactgcacctggcccaaataagcatttattaagtgttttactttttcttgtcattaatacataattgagtggataagttctagaattttcagatctaacagggacatgaattgtatatagttgataaacagtgggaatgattttgaaagtgcagtttattagctaacgtgaagcatgtgctagttcttctgtgttagatttagtggtaaatataagaaatctgtctttgacagtcaaataactaatcaagaatagttcaccatttaatgttgtttgtttgttttttaacattgaagaacctcagtatcaacaagtatctttggttcagaaggtcactgagcttgttgaattctttttattttctgctggagggcgttttttgaatggaagcatggtgctatacgtgaaggggcagaagtcttacatgattgaata

SEQ ID NO: 202922 - DNA, 468 bp, Homo sapiens
gatgttttgaaacgtatcagaccaattaatataccttagttcatacagtcatcatttttttggtgaaaacccatttaattaagttttaatcttttagcagctttcaagtgtatttatcattaactgtagtcaccatgctgtacagatctacagaatgtattcattctatgtaaactttgtaccctttaaccagcatctatccatttcccctcagtcctctcccttccacgcactaagcacctagtaaccactattctactctgcttccatgagtttgacattttagatttccacatataagtgagatcacatatttgtctttctgtgcctggctggtttcctttagcataatgtcatccaggtttattcatgttgtcacaaatgacaaaattaccttcttagaggctgaatagtatccagttatatatagatacactacagtttctttatccattcatcacatagacg

SEQ ID NO: 202923 - DNA, 707 bp, Homo sapiens
gagccggacgtcccctgcagaagtagaggacgcctaacgagatcgaatgtgtcggagctttcggacatgtctatgcggacgccctcatcgctgggtggaataagagggactcttcctcctcttcctcctctttggaaatatagaatctgtgaataatgaagactgaatattgaaagtctttaaaatgtttgttactaactttatagtaattttggtgtttatttctcatttaacgaagacagtattcaaggtaagattttgtatcttttcaaatgtttggcaatttaagaaatagaatttgggggaatagtctaaaattttgtggcttaggatgtagtttaatatctaacagataattttggaaatagaaaatgtgaattttgattgcaattattttgaaatctttaccagattgtcccagaagaggttcaaacaattggtagagagattgctgcaatttatttctttacgcctgtttcctgcaaagcctgaagaatttccacctataacaaagtgttcctggtggattccatcagccgctaaagtgttggctttacttaatactgcaaacaatttagttcaccctccccttattccttatactgatttctataattctacattggatcacattgatctcatggaagaatatcatacttggcaaaactttggaaactctcacaggttttccttctgtcaagtacccc

SEQ ID NO: 202924 - DNA, 636 bp, Homo sapiens
ttttgttacattttagggatatttcttaaggatttcaaaagactatagaggcattcttaaattttaaaccatttctgtgaaggaaagagttgtaatttattttctactttgataatagatttcataatttataagcatgaaaaaagctttatgtcttttagtggacagtgttctgtattatggcaattaagtgcatatgagctaggacccctaagagagaacacacagaaataggagtaaatggccatctgcatattccctttaatactattataatcctcaccacaagttttcttttttaagcaagaaactattggctgcattttaaccacaatttttaaattacccctttcatttggagctacatttatttaaaataggagtttctaggtcaaggctgtcttgtagacattaaaatgatgtttttattattagaatgaatcttgtacatgttggaaaaagtctttatgttagaatttatctttacagatactgcaaacaatttagttcaccctccccttattccttatactgatttctataattctacattggatcacattgatctcatggaagaatatcatacttggcaaaactttggaaactctcacaggttttccttctgtcaagtacccc

SEQ ID NO: 202925 - DNA, 609 bp, Homo sapiens
ggggtttcaccgttaaccaggatggtctcgatctcctgacctcgtgatctgcctgcctcggcctcccaaagtgctgggattgcaggcagtgagccaccgtgcctggcctcaagctttctttttctctcttgtttgtttcaaatttggtgaataggtcccattcacagggtcaaaatagaaagcacccaagaccacacatgaaggttctccctcctctgcctggtcacccagttcccctttttggcgacatcactgttaccaactttccagggacattctgttcataaacatacacgccaaaccacaccgcttaggagttggcaaactgcagtccacaggcctgctgtggtccgctgccggctttgactaatagttttattgggacgtggtcacacccatttttatcttattacctgtggttgcttttgtgttataagagcagagttgtgtagttgcaacagagactatgcggcctacaaagctgaaaatccttcctatttggccatttgcagaatcattttgcaaagcctgttctttctcccttgcctctttgtgtgtgtgtgtgcgtgtgtgtgtgtgtgtgtgtgtgtgataaaatgtatgtaacag

SEQ ID NO: 202926 - DNA, 604 bp, Homo sapiens
ctagcagtggacctttaggctggttgtttaactcaccaggaaaaatgacaggactcacttccctaccccatcaggttttgtgatggttgaaagggggttaccacacataaacatatgaaaaagcacttggcaaataatcttctttcagtaagtgttagagatgctgctgttacattactggcctacacagtgctgagaaaaaatatgtcttttcgtctatacttagtggcagcaaagagttgcatggaaattaattcatgggagaagtgaggctgaatgcaggacttggattgagggcagaaacaatggaaggcataggtcagttaccaaagccaggcctgggcttgcaggaaacagcagagatctgagttacttggtgcttatcagtgagctgacacaaaaagaatatttttgaaaaaaaaggtaacatggttgaaaaggaggagaaggaatttaatactaaggaaaccagaatggatcttcaaataggaacagagaaggctgaaaagaatgaaggtaggatggatgcagaaaaggtggaaaagatggcagcaatgaaagaaaagcctgcagaaaacactttattcaaggcatacccaaataa

SEQ ID NO: 202927 - DNA, 405 bp, Homo sapiens
tgggaatgatgatggtgagcttcttcctcacagagttgttctgaataataaatgtgtgtgtgtgtgtgtgtgtgtgtgtgtgtacatgtgtattacaaatgatgcagcagggtgtggtagctcacgcctataatctcagcactttgggaggctgatgtgggaggaacatttgagcccaggagttcgagaccagcctggggaaacaaagcaagacctcatctccactaaaaaacaaaaacattagctaggcgtgatggtgtgcacctgtagccccagctacttgggaagctgaggtgggaggctctcttgagtcccaggaggtcaaggctgcggtgagctgtgattgcgccactacactccagcctgggtgacagagtaagaccctgtctcaaacaacaacaacaa

SEQ ID NO: 202928 - DNA, 617 bp, Homo sapiens
tggcactggagttgaacctgggacttctctggaagggagaagtgaggagaaggcagcttttcttgggtagagcaaacaacacgtgcaaagggacatcagacagcaagtaagagcaggagactttgctttggagaaagaaccgaattcgatcacaactcactctccctagctaggtaaccctgggcaagccaaagaatcttttctcatcgacaaaatggaaatcacaatgtctacttcacaggaaggattaaacatgatcatgcatataaagcacgaagtaaaagctggaaaaatagtagctactgtgattaggtgcaagaactgtgggaaaccaaagggcaggaggtgaggctcaagggattgctttcagccagtctcagaaaggtcctgcatgccaagtaagaggttaggattaactgctgaggacaataacaccatagaggtttttaacaggagtgaaagaattgagttatctgctttaaaagaactctggtgtccgtcaggggtagtctggggaggagagcacttgggagggcacctgagagatgaggatatagattcagagtaatttcagtaacattagaaagcaaggcatgcactccagaaatctttttttt

SEQ ID NO: 202929 - DNA, 460 bp, Homo sapiens
ggaatcccaggctgatgcctagggaagtagccaaaacagggtggcacagaggaagtggctgatcacccatcttgattccacaaggctacccagagccttctctggcccaggaaggtccagggaagaggcccgtctagtgggcatgggagccatgtggataccttggagcttccaggtcaagaacagagatgggctatgttgatggaggtttgttttgtagcagttagaagtgagttggacctcacttttggcacagaatttccagtaaacctgcatttgtagtccttgggtatggacagaaactcacgccatcccaaagctcttagggggtaggttcatcttgaggcccagccagtaccccaatcctccttcctctgagaggcctggcctcctagagcagagcctctcaacctcagtactactgacattttgggctgggtaactggttgtgatgggggct

SEQ ID NO: 202930 - DNA, 1315 bp, Homo sapiens
ccgcttctgtggtcaggaatctggtgcagctcagctgggtcacaggcctctcacaggctgcagtcaaggtgtcagtcgaggccgcactgtcatcttaaggcccagcagggaaagcgtttgcttccaagctcgctcacgtggttttgggcatgattctgttcctcgtggctgttggacagaggtcactctcattttctttccacgtaggcctctgcatagttcacatctttgcagttgcttcattgaagccagcaaacgtgattgtggcaagatagcagtcatagttttaattccagaaatgatcccatcccttggctgggtcttcagagtagaagtcacaagtcctgtccgcactaagtggagggtgtggataccaggaggcaaggatcattgagagccatcttagaagtctacctggccggggtgcagtggctcacgcctgtaatcccagcactctgagaggctgaggtgggccgatcacgaggccaacagatgaagaccatccgggccaacaaggtgaaaccccgcctcttctaaaaattagctgggtgtggtggtgggcacctgtagtcccagctactcgggaggctgaggcaggagaatcgcttgaacccaggaggcagaggttgcagtgagccgagattgtgccactgcactccagcctggcaacaaagcaagacttcgtctcaaaacaagtctacctgtgtattagcttgctagggctgctgtaacaagtgaccacacactgggtgctttaaaccacctgaatgtatttattctctcccagttctagaggctggacatctgaaatcaagatgccagtagggccatgctccttccagagggtctaggccagaatccttgccacttcaggcttctggtggccccgagcattccttggtgtgtggcagcatcacgccaatctctgcctcctccctgtgtttccatgtgtgtcctctcctttccttattaggatgcccatcattggatttaggccccaccctaaatccaggaggatattatctgcaaatgccctatttccaaataagatcacattcacaggtgtcgggggttaggacttgaacatacttttttgggagacacagttcacccactatgtctacctgctacaaggcccatcagtaagggatggattatataaatttaggcatatctggtggaatactagatctctggggaaaacaatgaaaaagaagctctttatatattgataagggataagggatggtccccaaactatcaaggacaggtagcaaggtacagaacaaagtgtatatataatatgttctctttg

SEQ ID NO: 202931 - DNA, 517 bp, Homo sapiens
cattaacactttaccccacaaacatattctagccaccaatatcagatatactttctttaaactctaccttacaaagggcattccttttctcataagcatcactcatgtttcattaacaaaagcaaggtcagttaagtacattagcacattctctggcctctacctacctatttgactttctctctcacagttatcattcttcaaagactcttctttccaaccaaattgctaagagcactgatcctcatacctagagcagaagttcccaaagggaacttcgaggagtctcagagattgaagctattttcataacactcagatgttatttacaacccttttcactgtgttgacatttaagtgatagggcacaaaaaataaatgataacattgctggcatctcagcatgaagcaagacagtagcataagctatattagtggttattgtgttccccaatgtaataacgtccttgaagcggtaaaaattattaattttattaaatctcaaccccaaagtatt

SEQ ID NO: 202932 - DNA, 540 bp, Homo sapiens
cattaacactttaccccacaaacatattctagccaccaatatcagatatactttctttaaactctaccttacaaagggcattccttttctcataagcatcactcatgtttcattaacaaaagcaaggtcagttaagtacattagcacattctctggcctctacctacctatttgactttctctctcacagttatcattcttcaaagactcttctttccaaccaaattgctaagagcactgatcctcatacctagagcagaagttcccaaagggaacttcgaggagtctcagagattgaagctattttcataacactcagatgttatttacaacccttttcactgtgttgacatttaagtgatagggcacaaaaaataaatgataacattgctggcatttgatcattgccaacaaatagtgtcagttgttttccttgaagtgacaggtccacctcatttatttttgtgaaaatgtctacccatacccaaatttgaataaccatagtttgtctgtcagtgttctttgcacgtaaatgaggca

SEQ ID NO: 202933 - DNA, 599 bp, Homo sapiens
tttgtgacagaaatgtttggatgctacattatagaatggcttttgaagaccattttaaaatttgaataatctgagaatattcagagtatttggcattaacaaatatttctactttcagacatgttttccaaaacttccatttatataagcaaatttttaaagagtctctgtacttattagtctaattctactcctgcttatttaggatgtttatccagccagaggaccacgaaacaaaaatattgcatttttctggaataataggaattaggaagccagaacaaaccctaagtggtggcagctttttaaaatgagggaatagcaggcccagtttttttaacctgtgagaaaacaggtgaaattagagaactggcctggtactgaaaagagacctggaggaggagagggtaaaggtgttgatttgacatgggggggtttctcatataacctgtgctagcatataggttccctggccagtctacaaaaacccgtgtaatagctgaaagaagtggtggttctgttgttttaaaaatgtaggcaacaagatcactgcacacaagtgcaatagtaattgaataaaacaggattcctgcactgag

SEQ ID NO: 202934 - DNA, 433 bp, Homo sapiens
cttccttttcttctgccctgtggtctgattggaggaacggggagggcacatgagagggcggtgcacagtgtaggataggaaataagtcagtgctaaattgcatcataggaatttgtataaattctgtcatgcggagaaagaagaaacattagggtatgcttagttggagaggccttgacagagaagtgggattaaagagggttatgaagaaccaaaaggtgtaagctgcagagggttctgagaaagtctctcttcctttcctgtttctccctttctggttagcacttccttggtagactgtaaaagatgtagtctctcctaagctgctttacagagcacatgttaccgctagatcaagtgtgtttatgggcaggaggagactgtgttgacagataagggaggttcctctcatttcctttgcctatctccaaaa

SEQ ID NO: 202935 - DNA, 375 bp, Homo sapiens
ggccaagatcaacccattcttcttcacattcctatcatctattcagaagtgcagatattcacatggaaatgaggttggttgaactgtttagcttatattgggaaacatatctgctaagcagctgagaaatgtattcatttcagtctttccatttgacaaggctcattctcccaagtaaaatactaagaatgcaatgacagcaactgaagccgttccatttcctctcctgactttaatctctccctaagaaaaatatttcttgaaatgctataatgtgtgtgcattgacactcttacttagatatttaaataggcttgtcctatttattctctatgtctggccttggccttgccatatgcaagggtaccgagctcg

SEQ ID NO: 202936 - DNA, 410 bp, Homo sapiens
ctcccctggctgcggtgagcgctgggcccaacccccggcctggagcagcgccccaactccgagcaccgtggagcaccggctgccagctgagaccccagaggggtaactaacggcctgaggaaggcatttcttcggggaacatggcgtgcccgtcgtggctacgttctgccaagccctgtgacgttggaggggagccgcctgcatcccccgctcagccagtgtttctagactccgagacatctggaactcggaagtgaggccagggctccaggaagactccctgatgacgcactggcccgcagcccaggctcaggtagtgggggctgtcaggatgatctgtgggatcccccagtgtccgaagaaagaagccacaattgtgtttttttttctttctttctttttcttttttt

SEQ ID NO: 202937 - DNA, 219 bp, Homo sapiens
ggggggcaggagtgtgtggattgtttacggccttcatacatttcgtgtcgaatttattttctgaagtttctcaagataatccaatttattaaagtttatcccacttgatcatgaggctcagaaatgcatttaggcaccatttggaagttaaatattattaacttgggacttaagaattagtacttaggttggaacgaaggtcaacgcagcatatttgca

SEQ ID NO: 202938 - DNA, 1253 bp, Homo sapiens
acggcctatgggaagtatgaataacaggggctccgcaatctcacacggcgacagagggccagaggtgaggtcggacgggcccagctcaccactctcgcacaagtgtcctaagctttctggcctcagcagtgcgtctgtgtacaggatcgctgcaggacgaactgagatgatgcacctcagacactccgcactctgtgggacacacatgctcaacagagcagctgtatcatgggacaaagtggggaaccctgacccatcttcccaggtcccccaaacactggggctgagatactactaaggggtcctggaatctccctgtggaaatgcccttaagaagtgcagggcagggttctcctgccaagtgccaggccagtggagagcctgggtttcctctcatcggccacctggtggggatggaggcttgtgggctggctgagggctcaacctcagaggaaggccaaccttcccggcgatgcgtgggaacctgggaatcgggccgcctggctgaatgagctggctgggctatcactcacatcacggtcctgctgctggcaagctgaattacgatgtgtgactgctaagagaggctttatccttgaaagaagaacaagctttattgaacaagaaaggcagttaattcatctacctcaatgccatcaacccccgatggacttttctaaggagaaccagaggggaaactaacacacgctgttcagactggaggcgagatggctctcaggctcatttctgggcatggtggctgcggaggctccagagacgacacagctgtgtggctacatttcacagcatgccatgccccataggacatcccagaaacctgatcagataaatctggaacaatcagcaatgcttccttaaactctagtgatttgggggtgaagggaggggggaataaacctctcaatgtacaaaacaaaaattggggaaaaaaaaactgttctcttctgacaagctagtgttttaaaacaagactgagggcaaaatcacctgtatcccatgcctacaaacaggattacggatctgtttttatttgggagccttggtgggcctttcaactaaaatatgtttagtccatcgttaagagattttacaacccagacccacctccacgcgctctgaaataagcattagccaaaacatccttcccctggacaggctgcacctcactccaacagcaaaaattcctgagattgccagaaaacagtgaagttttgagtagggtgcagccaaat

SEQ ID NO: 202939 - DNA, 655 bp, Homo sapiens
tcatgggtcagggtccctacggtgatagctgttacggctgctctgttgagcatgtgtgtcccacagagtgcggagtgtctgaggagaaccagaggggaaactaacacacgctgttcagactggaggcgagatggctctcaggctcatttctgggcatggtggctgcggaggctccagagacgacacagctgtgtggctacatttcacagcatgccatgccccataggacatcccagaaacctgatcagataaatctggaacaatcagcaatgcttccttaaactctagtgatttgggggtgaagggaggggggaataaacctctcaatgtacaaaacaaaaattggggaaaaaaaaactgttctcttctgacaagctagtgttttaaaacaagactgagggcaaaatcacctgtatcccatgcctacaaacaggattacggatctgtttttatttgggagccttggtgggcctttcaactaaaatatgtttagtccatcgttaagagattttacaacccagacccacctccacgcgctctgaaataagcattagccaaaacatccttcccctggacaggctgcacctcactccaacagcaaaaattcctgagattgccagaaaacagtgaagttttgagtagggtgcagccaaat

SEQ ID NO: 202940 - DNA, 335 bp, Homo sapiens
cctcctgggttcaagcaattctcctgcttcagcctcccaagcagctgggactacagacatgcgccactatgcccagctaatttttgtatttttatgagagacggggtttcaccatgttggccaggctggtctcgaactcttgacctcaggtgatctgcccgccttggcctcccagagtgctgggattacaggtatgagccacggtgcccggcctaggagactttttgaaatgcaaaaaaacaaaaacacaattacaacagctctaccctgtgtacgtgctttagaaaataatgctatttaccttaattttcacattttcaacaaagagcaggcac

SEQ ID NO: 202941 - DNA, 439 bp, Homo sapiens
tgagaactggggggatatatggttcgatactttacctggattactgcccttcacctggctgaatgccacctccttaagtctcagcttaactttcacttcctctgggaaagtagttctgattttcccccacaaaactagaaaacataagtccacaggaatcccactgttgaatgaactaaggaaaatgggtgatttttagtagagacggggtttcaccatgttggccaggctggtctcgaactcttgacctcaggtgatctgcccgccttggcctcccagagtgctgggattacaggtatgagccacggtgcccggcctaggagactttttgaaatgcaaaaaaacaaaaacacaattacaacagctctaccctgtgtacgtgctttagaaaataatgctatttaccttaattttcacattttcaacaaagagcaggcac

SEQ ID NO: 202942 - DNA, 550 bp, Homo sapiens
gtcaactgctactagatggagggccaaggacaggaggagggatcagctctgtgtagggagggagacagggagggcgggcagggtgcatgcagagaatcctggaatctttgccctggaagggacaccaggaagcaaaagccaaccctctcattttgtggatggagaaactgaggcccagactggggaagtgacgtggccagggtcactcggtgagatagaggcaggctctcagactcctgaatcccaaccagggcccttttgatggtgccagatgcccttcctggttttctgtgtcccaatccttgtgtcctaactccacttttggaaaaacatttgccacctctatccagcggtcacctaagagttgcccactcaggagccgggcgctgccagcccttcctccagaggcggcgtggcctcttctcaggcctagaatggggtggttgcgtttctctctctctctctctgtctctccctctttcctctttctgtctctgtctctgtctctttctttcaatctctctctcccgtctgtctcctctcttctctc

SEQ ID NO: 202943 - DNA, 613 bp, Homo sapiens
gtcaactgctactagatggagggccaaggacaggaggagggatcagctctgtgtagggagggagacagggagggcgggcagggtgcatgcagagaatcctggaatctttgccctggaagggacaccaggaagcaaaagccaaccctctcattttgtggatggagaaactgaggcccagactggggaagtgacgtggccagggtcactcggtgagatagaggcaggctctcagactcctgaatcccaaccagggcccttttgatggtgccagatgcccttcctggttttctgtgtcccaatccttgtgtcctaactccacttttggaaaaacatttgccacctctatccagcggtcacctaagagttgcccactcaggagccgggcgctgccagcccttcctccagaggcggcgtggcctcttctcaggcctagaatggggtggttgcgtttctctctctctctctctatctctcttgcatttttgtgaatctaatgatgaacttatactaccacacttttcccttctcttacacaccttacctactaaaggaggaagtgccactttattggtaagtggacgttaaccaagagggacttaaaaatcagaactta

SEQ ID NO: 202944 - DNA, 442 bp, Homo sapiens
ctacaaatcccgacacccccaccctcttttttttggagacggagcctcactctgtcacccaggatggagtacaatggtgcgatcttggctcgctgcaacctctgcctcctgggttcaagcgattctgcctgcttcagcctccttaagtattgggattacaggcatgagccaccatgcttagcttgtgatggctcttagtgtacatacctgggacatataactgtgccttcttaaaagtagttatctcagaatgcttagcaagcctctctttgacttgactttaaaagctttgaacactagatcctaactttttgaagtaaacttttgattttgaaatggttgaaagtcatttgaagccaagtctttggaaataataattgatatgagttgtgtgtttggtcacagtgccaatttaaactgggttgatctgtcttacatggct

SEQ ID NO: 202945 - DNA, 465 bp, Homo sapiens
gaaacgttctcgccagaaagttaaatctaaatgtggtggaacctctacatctaactacaaaattacaggaaacataggggttagaagtacatctttaacaacaccatgagggtgcaattagcaaaatctagattatgggaaattttacaggatgaaagtttcttcattaaaaattgcaagggtggctgggcacggaggctcacatctgtaatcccagcactttgggagaccgaagtatgtggatcacctgaggtcagttcgagaccaccctggccaacatggtgaaaccccatctctgctaaaaatacaaaagttagccaggcatagtggcatgtgcctgtaatcccagctacttgggagcctgaggcaggagaatcccttgaacctgggaggcagaggttgcagtgagccaagatcaggccactgcactttatcctgggtaacagagtgaatgagactccatct

SEQ ID NO: 202946 - DNA, 522 bp, Homo sapiens
ggttaaaaggcccaccccttcccgggtctcaattctgggctgatttccccaggacagcattcttgtgtcaactcgctgttaccccagctgacggcctcacatctgctgaggcaatgccacctctccagagtgaaaagctcctaagacagagccattctccccgagttgattattcccttgaattgttataaatctccccttgctatttctctctgaacatcatttatgagcaccttgcgtctccgtcgatgagaaagtgcattaaccctgcaggctgtgtctgggaaggctctgccctaatccgttcagaaccaaggcctcggcacctacagcttcgtttctggtcctttttcagaccattcccagtgccttcctctccctcccagccctgggccctcccagccgccctccgcgcaggcagcctggagccacctccaggagggctggccgccactgtaattacaggcgcctctccgcgccctggggctcggctctgcaaattaaactgttttctgcttttta

SEQ ID NO: 202947 - DNA, 260 bp, Homo sapiens
gctctagaggttccccccgcatggcgtacaagacagctctcaaaaaaaagtaaaataaaataaaataaggtaattaagaaacaaaactaaaattaagacaatatgagggatatgaagctgatgagaaaatgtaagttggtttttatcccctcagaaaccaggcaacatatatatttaaattatcaccccagttattttattggtcatttataacgattcttatggcttgtacttaaatgctgccattacgccgatgcggg

SEQ ID NO: 202948 - DNA, 301 bp, Homo sapiens
ccacccccataatccaaacacctcctaccaagtaccacctccaacattggggatcaaatctcagcatgaggtttaggaggacaaacacccaaaccatagcgaagcttaacacgccaaaatgatagagctcaaagaatctatagacccagatctctatgtttaatattgaaaaacaaattataaataagacagtagcaaatagaatcaagcagcatatcaaaaaaataatatgccatggccaagtatggtttatttcaggaatacaaggatacctacataccattgcaattcattagctcaa

SEQ ID NO: 202949 - DNA, 232 bp, Homo sapiens
ctctttttcatggaactctacttaaagctgttaaaggctaccaggtgccaattattaaaataaacctctgaatcctgacatgatagggtgtgggcaagcctaactttcctgctttaccttccactttgcctatgtcctgcaccctgaggttactctcaaccacctgacatgacttggctgtcccccacatccttgcattctaggggcccatcccctctgtatgagtactcta

SEQ ID NO: 202950 - DNA, 556 bp, Homo sapiens
ttttaaggtgctttttatttaattttaatgagtgtaataggcactaaaatgaaactcgactgggtactattactgaaaaaatttgactcaaaccaatagttttgcatgctctttagttctttttctgtcttacttctttcaccagttcagtactgtttgggtagctctgaattctggcttttccaggcagctgcttgatgatacaaatgaggtggaccatcagcagttttgcctggacactaatgactctaaaagggtgtgtatttaactcttctttttcatactagatctctaccttgtattccccccttgcaaaccagaaactacactttttttctctggaaagacttctcactgtgctatgcgcttaggaactgcacggtcccgttgccatgctgtggcattcgaggctcgtcacctaggggctggtttcccatgttgtcatccttgctaacactgggatctcagatgtttgcagaacatttctattcatgacggttcttcaaagaagggctagaatatttgccttctacctagagcaaagtaaacctaattg

SEQ ID NO: 202951 - DNA, 441 bp, Homo sapiens
agacaggaggacagtcagagagcgtcagggagttttgcctaggtttcagatcattctgtatcgccagctagcttgcctccttggacttacccaccagtctaacagcaggtgtatgtttagaatatttgtgctcggcacagtgtagggacacgggcaggtgtgatatggtttctgctcagaagcttcttatagtccaattgggtaaacgagactagaacacataaaacgaccatggcaacatgaaaatagggttgaagttttatggtgtcagctgtgccagccatagaactaaggagcaagagtagattcagggatggggtagtttaggaaggcttcccggaatgtgattatctcctgatatttattgagtacctggggtgtgcaaagctctgtgctgaatctgagaatgagaagtgaataagtgatggccactgtcctgag

SEQ ID NO: 202952 - DNA, 323 bp, Homo sapiens
aaaagtgtagtagagttcatgtaatgtttttattttgaaaattatcaaataactgcaattcaatgtatgtaatactccttctaaattagtaaaaaatttttctttattttatcatgtggacattattccagtgagctggttaacagataattaccattgaagagcattcatattatctatcaagagcattcagaatttgagcaaagatctcttgacttctaagtactttacaaattgtgagcccctaaaaccttaataccgtaaaatgatttctaaaaaggtaccttaagtcttcaggatgaataaaccatataaaacattta

SEQ ID NO: 202953 - DNA, 226 bp, Homo sapiens
aaaaaggtcagaaaaataatagtggaaatgaaagacagaaaaatatttgtatcattgcacatcttatcaaaaacaaaactgggccaggtgcggtggctcatgcctataatcccagcactttgggaggctggggccaggagttcgagaccagcctagaaaacatgacaaaagctcatttctaataaaaattagccaggtgtggtggcacaggcctgtagttccagct

SEQ ID NO: 202954 - DNA, 796 bp, Homo sapiens
tcccagaacttccttggcaccttgctcattggtttataatagtgtttggagaaggcaagatatggagaggatcatcttggggcttagagaaacaaggacaagtttagaagcaaggacagtgtcagatatatgaaaccaaatatgagactgaatatttgtaaatactagaatatgtggctaaaacagtatttgtagaatggaagctgagttggaattgttctctgctgcctgctgagtccaggaaggtactggcccatggggtggctacttagttatttgcttccaactgagaattaaatctacaatagctatgagccaaccccctgcttttgcctgtttcaggggcctggtacccttcctaacttctgaccctcagcctctttctttctaggtcctatggtggtctccttttccattcatgactcttcccctttggctagcagacgtttaaacatttcccttaggtctctcctctgcttttgctgaggttctcaggcctctaggaaggcagaaggaggattcaggattggcagagagagcacctccatatctacctttttgtctgtagagcaggaggagtggcatctggaattgattcatggtcttagcaaccaccagctccttaaagggtctcaagttcctagactagcctgtgtgtgtgcatgtccagtgtgcggtggcatgtctccataactcagccttgcaaagaagcctcttgcgaccggcccgtacataggcctttcagcttggcaggcctcatcatcttcattcccacaataatttctacatttccaag

SEQ ID NO: 202955 - DNA, 394 bp, Homo sapiens
atgaccctggagagcttgagttccatagttgtctcagacaggcaagctaccttggtctccatgtttcatctcatcggtgggtggattgcctagaatgagcagtaggccactgtgatgggcctagtcttctaagacaggtggtgtcacatttcctctgcacttcctgtctcattcttgagaaatattctctcctctgctcccgggtggactgactccctgaatcttttagccccctcctggatcctggtgttctttgattttccttgacattgatggaaaggtcacttgtgccccccttccatctggcacatgcctgaacaccatcttgtgtttcgccattgccccatatgcctttggtaacaaacattcacaccatctgctctgggatatgcca

SEQ ID NO: 202956 - DNA, 326 bp, Homo sapiens
ctaaagtttgtttagcatttaaggggaaaaatttacgtttttgcttcacacttcatactaaaatatgtttaaatgcaaaggttaaaacataaaagcctgagaataaagtacaagcaattaagtagagatggcctttgttagctatgacattagagctagaaaaattagaacatattgggacccagactacatactcgtttttcaaaacattacccagctgggcgtagtagctcatgcctgtaatctcagcactttgggaggccgaggcaggtggatcatttgaggttaggagttgaagaccatcctggccaacacggcgaaacccc

SEQ ID NO: 202957 - DNA, 370 bp, Homo sapiens
tctgactctggccacaagatcaagactgacaaatttcctttctctgtttatggagggagacttcacaacattcactgaaagaggagcaaaggacctggtttttgccatgactggctttggccccgtgaatgaatgtttttctggcattggaaagcggatagcaaagagagcagaaccacaaatgggctatgaggaaatgtgttcaatgaagaaaacaaaatctctgacaagatccaacataggacaacatctcagcatcttctgtgatttgtgaacccaagtaaagcacttcttagagttatctggcacattcgcaactaatagctttctgtgaataaatactgtggcaaccacgttaactgtacaaaaa

SEQ ID NO: 202958 - DNA, 851 bp, Homo sapiens
ggtcccagctatttgggaagctgaggtgggaggattgcttgagcccaggagtttgaggctgaagtgagctatgatggtgccactgtactccagcctgggtgacagagcaaggccctgtctccaaaagcaaaagagtagagaaagggctttatgtgaccagggagagtatgaagagctatggctgtcccattcccattctagtaggtccgagagcaagcagggccagactgccaggggccccaataaagcattgtaggggcccaggcagtgtcacttggggccaaggtagtacaaagtggttttgaaggagttgaagatgaatccaaggatctgaatgaggagggccagagctggtgaagctacggcattcacaggttttgggaaggactggagccaggtcctgaaattgttgagtggaggtgtctggggtgtgtgcgagtctggcattcacagggaagtccgggccaaagactccagtgggggaggcatcagtgaatagatggtgcttcaggcctgtcttagtcagctcaagctgccacacaacaaaatatcacagactgggtggcttaaacaacagacatttatatttcagagtgctgggggctggcagtctagatgagagtgccagcgtggtcaggttctggtgagggctctcttcatggcttgcagacagctgccttcttaataccaccgttatgacctcaattaaccttaattagctcccaaaggttttatctccagatacaggcacattggggctcagagtttcaatctgtgaatttggagggacatactttgtccatagcagagccctgagactgagcccagtcccctggaggtgaaaacccttt

SEQ ID NO: 202959 - DNA, 241 bp, Homo sapiens
tctttgcactgttcagaaaagcaccccctccttcccgcccctccccctcctcactggtagggcccgcacaaagtccacagggctgaggctggcttcttgaactgagctctttgtgaggagccttcctttctggggctctgctgccatctagtggaagacatgcacaaggttgggggaggaattgccgagaatgtggagaggggcctgaatgacttcacctttgaaccgctgccaggtttta

SEQ ID NO: 202960 - DNA, 364 bp, Homo sapiens
ggtggatgtagaggctgctagggagcccctcgagcttcaggaatcatttctcaagtccccaaattgataatgaccttcttttcagtgtccactgcttggggaaatgcatcatgtctaacgcagagttcaaaaccaagtaaaaccaaacactatatcttttagatgtacatacctgtgagaaaactgaaaaaaaatatgagccagagaatgacaaatgcaatagtcaagggaatgttccctctggggaaggagaatagaaataaatagataagtgactggtaatgatgtagtttccaattgggtggtaggcttattatattgtctactacatacaataaaaagactaaataaaataaagactaaa

SEQ ID NO: 202961 - DNA, 166 bp, Homo sapiens
gcagggttccccattgattttctaaatgtttgtagtccttttgtaaagtggacccttgccttctaaggtaatggtgaatgatacatattcccttcatttttctgctttgaagcttcaatcttcttcattttctcttttgatctgtcaacacaatcagaacatttag

SEQ ID NO: 202962 - DNA, 666 bp, Homo sapiens
gattctgatgtgcaactggtttgaaaatacaaaggaaagtcgaccgtctcatgctgaggaactatgaaatcagaatattccaatggtgctggagacactgaaaatgatagcaagaaaaaaaggagagaaaaaaatatgatgcaataggtctgggtccctgtgggcagtaaatgatgacactaaagttttacagaaactgctataattgcatggcaataccttccatgaggattagagtgacagtggtagatcaatgatctggacatagtaaaggaaaacaaaaaagcagtttattcctttttctcttccacatagtcacggaaaacagaaaacagcttttagtgacaaggtaaggtaagatgtgatacctggattttcacggagtcagggtaaagaaaatgattaagagtaaagagaagtatactggataagtagtattttcaaaacacacattaaaagttggtaattcatgaaggagctactgggtagagaacagaaggaaagaggtagtaccactttaaattgtgaggttggggagaagtagcagcaacctgggttgtcatcagataccataaaataggtgggctgaggtgtaaggaacatggaaagcagcagagcaagaagcaaaatggcacattttaaaacaccgtgtgtaccaaggcacag

SEQ ID NO: 202963 - DNA, 224 bp, Homo sapiens
cccacatgatgaagacccccaggcagtgacatatgccccggtgaaacactccagacctaggagagaaatggcctctcctccctccccactgtccggggaattcctggacacaaaggacagacaggcagaagaggacagacagatggacactgagagagtcctttcctctccaggcccccaggcctcccccacccccaccacgttccttacctctcactctcccc

SEQ ID NO: 202964 - DNA, 321 bp, Homo sapiens
attactggccttggccaaccccatcccagtcaaactggaatctttggaacctgaacatgggtatatttgaaagcttatattagtgaggatggagaagaactatagcagataggaaacattcatacaacttctgaagacatccgaaactacagactggtaaccactggtgtcactggtttgctttattgctttgctttacttccaagatttacttaacaaatatttcagtgctttcctttgccaagcactgtgctaagaagagcaaagacagacttggtatctgcttcataaaatttacagtagaggaagagacaaatatta

SEQ ID NO: 202965 - DNA, 479 bp, Homo sapiens
aacgtgcatatttttatcattttacaaatcaagagttaatggatcaaaatgtaaaatatcttttcctaaattactcaattatatttgaaaagttcctggaatttactactcttctttacattctaaccatgtcctcccttttgctttctttactgtatcatatttctccataactgattaaaacaaaacaaaacaaactttggaatacaatattttataaattgtctatgtataaactaacagttttatacttagtgacaaatatgtatctatgttaccaataaaacttcacttaataaatgtcagggtgattcttatagtcagctgtgatagatgatgctgctactattgcatgcaaattatttagtgagatcactgccaaatcaacgttctttccaatgtatcatttaggaagtctgaaacagattacaaaataaagtatctatgcttttagagtgttatcattatgatacttgtgt

SEQ ID NO: 202966 - DNA, 342 bp, Homo sapiens
catcaccagcctgagttcattgtcatatgcacacatcatggcctaatcctgcctacaactttacaaagagcatttccttcttttaactctaaattactcctttgggtgcatcatctgcttcctctgaagttctgatgaatacacagaacaaacatttagacctgccaatgttataatgttttcaagaatttaaaaccttcaagatcctgatagtatctaatattcatgtgattcatgccttccttaaaaacgagaatgagttactattaatatgattcatcaaaatcattttacctctaaaaaaccctaaataaacacagcaactcaactgtatctatgcat

SEQ ID NO: 202967 - DNA, 377 bp, Homo sapiens
ttcaagagggctgcctagagataagaatttaagggccatgtgttgtatttttgctagtaccttgaaagaagtttttgctttgtttttaatggcaatacaaataaaatccaaaaatcctggacacatatgataagttcagttgtttatttgaaaagtaaatgcctcacatgccttgctcataccactttaaaatgggattgattgataaacacaaactctaactctcttacattaaagagtatcaacactctgaatttttaattatctttgataatccccatgaacatttttaggactcacacgtaaaatagtcaagtctatttcaagttatgtcagacaatgctttttaatatactgttcagtgcagcaccctacca

SEQ ID NO: 202968 - DNA, 384 bp, Homo sapiens
taagtgtgcgggctcccggggcctgtcccccagagcctacagggggcacgcatggcccttaccagtcactctgaggtctaacctgcaacccagtgaaaacaggcaggcagtgtcctgaacagtgccgccatagggagtgtggcccaatagcagcgatcacatgagaaggggctcaagacattggtcattaggcgatgccaattaaaggtaacgtgaacatacttaacactgctgaattgtacccttaaaaatggtttagccaggctccacgtggctcactcacgcctgtaatcccagcactttgggaggccaaggtggaggattgcatgggcccaagagttcaagaccagcctgggcagcatagtgagacctcatctctacaaa

SEQ ID NO: 202969 - DNA, 627 bp, Homo sapiens
tcctgcggtgactctagaggaccccgtcaatttctacacactgatacgttttctgaccctagttttggcctttcctggagtatcctataaatggaattattcggtatgtagttttttgtgtttggcttgttttacttagcataatacttttgacagtcatcgagttgtgcatttatcaatagcacattcctttttattgcaagtagtattcctaatatgttttacccttttacattgaacaatatttggggtgtttacagttttggtctgttgtgaacgaagttactatgaacatttgcatatgggtctatgtgtagatatgttttcatttctcttgagtaaataggactgggttgcctgtcatatggtaagtatgtgtttaaactcctaagaagctgtctggtttccaaagtggctatgctgttttgcattcctcttagcaatggttgagagtttcaggttgttcgtatccttgtaaggacttggtatttgttttaaactaatgccaacttgacactgactgcataaacaacaagcaaaaagaaaattaataacaactctacatattaacttaatccccctgctttttaactttttattctttctatttatatcttatcgtactgt

SEQ ID NO: 202970 - DNA, 590 bp, Homo sapiens
tgagacggagtctcactctgttgcccaggctggagtgcagtggcgcgatctcagctcactgcaagctccgcctcccaggttcacgccattctcctgcctcagcctcccgagtagctgggactacaggcacctgccaccacgcccggctactttttttgtatttttagtagagacggggtttcaccgtgttagccaggatggtctcgatctcctgacctcgtgatctgcccgcctcggcctcccaaagtgctgggattacaggcttaagccactgtgcctggcctataagtttttacataaattatctcattttatcctcacaactctccaagaaggtggtagtgcctgattttacagatcaggctcagagaggtttggaaatagggcagctctgtttccaacccaggcctgtctgcatatggagcttaggctgggcctcaccaccctgcttctcccagggatgtttgccctcagccttgaccaaatgggagcccagggcagccaagagaggccaggggccactgtgcctgggacacagaggccaggccacacatggcagactgctgaccccagccagttggcagtgatgg

SEQ ID NO: 202971 - DNA, 443 bp, Homo sapiens
tggaatagagaacccagaaataaagccgtgcacctacagccatctaatctttgacaaagttgacaaaaataagcaatgggaataaactccctattcaatcaatgtgaaactgaacccctacctttcaccatattcaaaaactaactcaaggtggattacagattttttttttttgatatggggtcttattctgtcacccaggccagactgcagtggtgtgatcatagctcactaaagcctcaaccagctgtgttcaagtgactctctcacctcagcatcccgagtagctgggaccacaggtggaagcaacattcccagctattttttttattattatttatagagacaaggtcttactctgttgcccaggttggtcttgaatcactgggctcaagtgatcctccagccttggcctcataagtggtggaatcacaggtatcagc

SEQ ID NO: 202972 - DNA, 640 bp, Homo sapiens
ttcctcttattgagggaatggcaaggtcacattgcagaagagcatgtgggatgagcgataactgttgtggccatctttggaaaatacagttggctgcagcatgactatctggttccccatcggacatttacctaagagctttaattacagttgatgatccttgccagaatcattcattatgatttgcaaagtgattttttttataattctaccttttaggggcattattaaatgatattttataaagtagagctaggccaggcatggtggctcaaacctgtaatcccagtgggaggatgacttgagcctaggagtttgagaccaacatgggcaacacagggagaccctgtctctacaaaaattaaaaagaaattttaaacagacttgtttaatcgtgttctcaaagcatacagtcaagaggtgggactgactgatgctttataggtgtgtgtagggtggtagaggccaaggtgctgccagcaatcctttccatactaggtactggtgaaaattgtttttgtttatgctgtcggcacatttgtgtgggtctctcattgtcccttaacagtgccgcatctcagcctggaagtcagctttaagtcattcaagagaacctcaggctgttttctgacagtgatga

SEQ ID NO: 202973 - DNA, 455 bp, Homo sapiens
aattcatccctaacattttgcagaaactgaccagctgctcttaaaattcatgtggaaatgcacaggacccagaatagaaaaaaaaaaaatcctgagaaagaagaacaaagttggaagactgaaactttcccaatttcaaaacttactccaaagcgaaggtaatcaagacagtgtggtactgccataaggatagagatatatacatcaatggaaaagaatgggaagttcagaaataaactctcacaatttttccttttttttttgagacgaagtctcactcttgcactccagcctgggcaacaagagtgaaactccgtctcaaaaacaaacaaacaaacaaaaaaacccagaaaacaaacaaaaaacccaggaagcggaggttgcagtgagacaagatggcatcattgcacttcagcctgggcgagagtgagactccatttcaaaaacaaacaaac

SEQ ID NO: 202974 - DNA, 454 bp, Homo sapiens
gtatttagctcccttgtctgttcagtcggtcttttccaattctcattctctcttaggtatctgttatccacactccttctgttatatgcattcatctctctcatatctttgatgagcattggagaggagctggaatctctctgacagcagtgatgcatggaggacctgaggaggtgggatgaatggctctcagtccctgcatttggataagagacgctgcatgctattgggagacttggcataggtagtctttttttttcactcctagcagtgtctgagttcattggtttatttactaccccccacagtattaaacatgctctccaccactgtacgatttttcagtactcaggaaacactacaacatgtgtgacagctaagaattcaccaaatattagcactttttgaatagtctattaaatcaccaggtaaaatgcacatacattttaattaa

SEQ ID NO: 202975 - DNA, 365 bp, Homo sapiens
gagtggactgggatatggtgtagaccaagagtcacaagaatgattttgttcccaactatgtgatctgtgtgacctgtggaaagccctttaaccccccaggggtcaggctcaatatctgtaaatttatgtggttagaagacataaactctatggttcttttaggtatagtatgattaatagggatccaacctccagtaatgagcagtaaaaagttgaattctggctggaagcaaaatttccccagaaaacataggttgctatgtataaaaaatatacatatggcaaatcaacttcacagtaatgaattaagcatattctgatgagaaaaatgaaccatctgtgtatttcttcaatgagagtttgga

SEQ ID NO: 202976 - DNA, 400 bp, Homo sapiens
aaaaaaggagagagggtcagaagagatgcccagcagactgccacatggtagacaagagttccctttctggtaaaatggccattactgtcaagttttctcaagcaagaaattcaggaatcttgccaggggcaaagctatccagatccaaaaattgggtgcaacctagttttgtgctcccggaagacatccagatggcaaggaaggcgtgtaaccaagcccctgaaataatcgattctatgaatagttgaaacatatcttctatgggaggacatgtttggaaaaaatatgagactcatcgatgctgaccactatttttaggctgctgggtcaaggtttctgatacatcatcctataaagtacactgcaagtgggccccaagaaagaataaataccacaggca

SEQ ID NO: 202977 - DNA, 603 bp, Homo sapiens
  misc_feature (28)..(28): n is a, c, g, or t
ttttgggggggggggggggggtttttanccccccccccttcttcctaaaaaaaagggcccaaagaggccccctgggccagcagaacagcactcctgggcggctcctgtgggcttcaggactggccggctccagccgcaagggcgatgctgtggacgtttgtgtggatggtgcagtgttcttggaatctgtagaccagatcggtggaggtatagaagtgcaagagtctaaaggctgattttacacacacacacacacacacacacacaaaatcactgctgtgtgttttcttccgcctgaggcatcagcgtcacctcggtgtggtcgtcgcctcccaggcccttggcctggcctcctctcagtttgggttttgccctcacccacatgagcccccccatgccctgccccccttgcggccttttgtgttccccgatgtctgggctgtgtccctgccgggattcccagccttcggggtcagccgtcgagccacttgctttgctcagttctgtgtttcagccacatttccacggtggaccctgtttgttttaaatattctgttcccatgtcaatcagtgacgataaatacagccttgatttggatgaaa

SEQ ID NO: 202978 - DNA, 347 bp, Homo sapiens
aagctgtctctttctccagcctaagacttcaagccccattgaggtggcccgccgggctggtgcggttcacacactcctgcagaaagcgcctggggtgtctgacccgtaccgggcggtggtcaagaagccggggaggtggtgtgccgtgcacgtgcagatcgcctggcagatctaccgtcaccagcagaagataaaggagatgcagctggacccccacaagctggaggtgggtgcaaagctggacctgttcggcagaccccctgccccgggcgtgtttgcaggcttccactacccacaggacctggcccggcccctcttccccagcacaggtgagactggagtcgggc

SEQ ID NO: 202979 - DNA, 3938 bp, Homo sapiens
  misc_feature (1831)..(1831): n is a, c, g, or t
  misc_feature (1902)..(1902): n is a, c, g, or t
gagcgcgcagagccggcgcggcggacatgcgcgtccccggcccgagctccggctgagcagggcacgcggggagaggggtcgcctggacgggccagggccacccggggctcgcgctccacgcccgcgtccatgcagcccggctccggccccgggactagtggcgactgcctggggcgccggcgaggcatccgtgggctctgagaagctctttgcgccgggaaccgataaaggcccagcgcttgagaagtcggaggccaaggccgggccggtgcccaaggtgtcaggcctggagcgcagccgcgagctcagcgccgagagcttcctgcccactgccagccccgcgccccatgccgcgccctgcccggggcccccgcccggctcccgcgccaatcccttggtgaagaaggaaccccccgccccgcaccgccacaccccgcagccgccacccccgcagccccgcggcctgctcccgacacacgtgcctgcatccctgggcgccttcgcgggccacagccaggcggcagccaacggcctgcacggcctcagcaggagcagcagcgcccccctgggcctggggaagcacgtgtcgctgtcgccacacgggccgggcccccacctgtctacctcacacctggcgctccggtcccaggcgcagcaccagctccacgcggccatgtttgccgcacccccgacactgcccccgcccccggcgctgccggccagcagcctggtcctcccaggacacccggccgatcacgagctgctcaggcaagagctgaacacgcggtttctggtgcagagcgccgagcggcctggcgcctccctgggcccgggggctctgctgcgggcggagttccatcagcaccagcacacacaccagcacacgcaccaacacacacaccagcaccaacacacattcgcccccttccccgcagggctgcccccgacgccgcccgccgcacccccgccgtttgacaagtatgcgcccaagctggacagcccctacttccgacattccagcgtgagtttcttcccgtccttccctcctgccatcccgggactgcccaccctgctcccacaccccggccccttcgggtccctgcagggcgcttttcagcctaaggtgtctgacccgtaccgggcggtggtcaagaagccggggaggtggtgtgccgtgcacgtgcagatcgcctggcagatctaccgtcaccagcagaagataaaggagatgcagctggacccccacaagctggaggtgggtgcaaagctggacctgttcggcagaccccctgccccgggcgtgtttgcaggcttccactacccacaggacctggcccggcccctcttccccagcacaggtgccgcccatcctgcctccaacccatttggaccctcagcccatcctggcagcttcctgcccactggccccctgacagaccctttcagcagaccgagcacctttgggggcctgggcagcctgagcagccacgcctttgggggcctgggcagccatgcactggctcccggtggcagcatctttgcccccaaggagggctcctccgtgcacggcctgcccagcccccatgaggcctggaaccgactgcaccgggcaccgccctccttcccggctccgcccccgtggcccaagtccgtggacgcggagcgggtgtcagccctgaccaaccatgaccgagagccggacaatggcaaggaggagcaggaacgggacctcctggagaagacgcgcctgctgagccgggcctcgcccgccacccccgctggccaccccgtcagcggcctcctgctccgggcccagagcgagctgggccgntccggggcccccgcggagcgcgaggccgaacctcgggtcaaggagagccgctccccggccaaggaggaggncgccaagatgcccgcgcgcgcatccccgccccacagcaaggcggcccctggagacgtgaaggtcaaggaggagcgcggggaggacgaggcctccgagcccccggcgggcggcctgcaccccgcgcccctgcagctcggcctgggccgcgagcgcctgggcgcgccgggcttcgcgtgggagcctttccgcggcctggagctgccacgtcgcgccttccccgctgccgcccccgccccgggctccgccgccctcttggagcccccggagcgcccctaccgcgaccgcgagccccacggctacagccccgagcgcctgcgcggggagctggagcgcgcgcgggccccgcacctgccgcccgccgcccccgccttggacggcgcgctgctgccctcgctgggagccctgcacttcccgcgcctctcgcccgccgcgctgcacaatgggctcctggcgcggaccccgcccgccgccgccgccctcggcgcaccgccccccctggtgacggcggccgggccccccacgccccccgggccgccgcggagccggactactccgctggggggcctcgggccgggcgaggcgcgcgactactccccgtcccgaaatcccccggaggtggaggcgcggtagccccggggccgcagacgcctctccgagcggagcgcaccgctgtccgtctctccatcagttcctagaactcaagcacagctcccgccgatcctggggcggcgccgcctctccacccgcagcctgcggaggcggggacttgggtgtcggcttttctgagggtgatcttttgttttccgagtttgggattcggctgttgggaaaaaaaaatcgcgtttgtaccttttccccccacagatgagaagtgtttgtaatggatttgtatttttcttaattttatgctctttagacgtttaaaagaaccaaaaaagaaacttttgcttcttcgttttcggttgggatttgcagtttaatggcctcagatccttctccagatccccagggtttctttgtcttatttatggagaaaaaccggtcactttgtccagcgcactgtgaggcccccactcaggccagccctggcccccccttggtacttggaaccgaagttacagattatattaaaataataatgtacaaaactttgtttttttgccttattatgcagaagtgtaatttcttttttggtttgtttttttaaaagcaaacgaaacgtgtaaatagtctgttgatataaatatatgacgttactaaattcttaatctagatagactttataaaaaccgtttccagaaacccctctggttgtttgtctaacatggtcacaaaaacccaggcgctgctggctgtaaacattatcagaagtttaatggcagcaactttccttcaactatgcaagcgcttcccggcggctctgctggttgggggaggaaggttccgccagcgacctcccagcccctgggtccgtggaggggttgggtccccccagcagagcccctgggccagcagaacagcactcctgggcggctcctgtgggcttcaggactggccggctccagccgcaagggcgatgctgtggacgtttgtgtggatggtgcagtgttcttggaatctgtagaccagatcggtggaggtatagaagtgcaagagtctaaaggctgattttacacacacacacacacacacacacacaaaatcactgctgtgtgttttcttccgcctgaggcatcagcgtcacctcggtgtggtcgtcgcctcccaggcccttggcctggcctcctctcagtttgggttttgccctcacccacatgagcccccccatgccctgccccccttgcggccttttgtgttccccgatgtctgggctgtgtccctgccgggattcccagccttcggggtcagccgtcgagccacttgctttgctcagttctgtgtttcagccacatttccacggtggaccctgtttgttttaaatattctgttcccatgtcaatcagtgacgataaatacagccttgatttggatgaaa

SEQ ID NO: 202980 - DNA, 2909 bp, Homo sapiens
  misc_feature (802)..(802): n is a, c, g, or t
  misc_feature (873)..(873): n is a, c, g, or t
aagctgtctctttctccagcctaagacttcaagccccattgaggtggcccgccgggctggtgcggttcacacactcctgcagaaagcgcctggggtgtctgacccgtaccgggcggtggtcaagaagccggggaggtggtgtgccgtgcacgtgcagatcgcctggcagatctaccgtcaccagcagaagataaaggagatgcagctggacccccacaagctggaggtgggtgcaaagctggacctgttcggcagaccccctgccccgggcgtgtttgcaggcttccactacccacaggacctggcccggcccctcttccccagcacaggtgccgcccatcctgcctccaacccatttggaccctcagcccatcctggcagcttcctgcccactggccccctgacagaccctttcagcagaccgagcacctttgggggcctgggcagcctgagcagccacgcctttgggggcctgggcagccatgcactggctcccggtggcagcatctttgcccccaaggagggctcctccgtgcacggcctgcccagcccccatgaggcctggaaccgactgcaccgggcaccgccctccttcccggctccgcccccgtggcccaagtccgtggacgcggagcgggtgtcagccctgaccaaccatgaccgagagccggacaatggcaaggaggagcaggaacgggacctcctggagaagacgcgcctgctgagccgggcctcgcccgccacccccgctggccaccccgtcagcggcctcctgctccgggcccagagcgagctgggccgntccggggcccccgcggagcgcgaggccgaacctcgggtcaaggagagccgctccccggccaaggaggaggncgccaagatgcccgcgcgcgcatccccgccccacagcaaggcggcccctggagacgtgaaggtcaaggaggagcgcggggaggacgaggcctccgagcccccggcgggcggcctgcaccccgcgcccctgcagctcggcctgggccgcgagcgcctgggcgcgccgggcttcgcgtgggagcctttccgcggcctggagctgccacgtcgcgccttccccgctgccgcccccgccccgggctccgccgccctcttggagcccccggagcgcccctaccgcgaccgcgagccccacggctacagccccgagcgcctgcgcggggagctggagcgcgcgcgggccccgcacctgccgcccgccgcccccgccttggacggcgcgctgctgccctcgctgggagccctgcacttcccgcgcctctcgcccgccgcgctgcacaatgggctcctggcgcggaccccgcccgccgccgccgccctcggcgcaccgccccccctggtgacggcggccgggccccccacgccccccgggccgccgcggagccggactactccgctggggggcctcgggccgggcgaggcgcgcgactactccccgtcccgaaatcccccggaggtggaggcgcggtagccccggggccgcagacgcctctccgagcggagcgcaccgctgtccgtctctccatcagttcctagaactcaagcacagctcccgccgatcctggggcggcgccgcctctccacccgcagcctgcggaggcggggacttgggtgtcggcttttctgagggtgatcttttgttttccgagtttgggattcggctgttgggaaaaaaaaatcgcgtttgtaccttttccccccacagatgagaagtgtttgtaatggatttgtatttttcttaattttatgctctttagacgtttaaaagaaccaaaaaagaaacttttgcttcttcgttttcggttgggatttgcagtttaatggcctcagatccttctccagatccccagggtttctttgtcttatttatggagaaaaaccggtcactttgtccagcgcactgtgaggcccccactcaggccagccctggcccccccttggtacttggaaccgaagttacagattatattaaaataataatgtacaaaactttgtttttttgccttattatgcagaagtgtaatttcttttttggtttgtttttttaaaagcaaacgaaacgtgtaaatagtctgttgatataaatatatgacgttactaaattcttaatctagatagactttataaaaaccgtttccagaaacccctctggttgtttgtctaacatggtcacaaaaacccaggcgctgctggctgtaaacattatcagaagtttaatggcagcaactttccttcaactatgcaagcgcttcccggcggctctgctggttgggggaggaaggttccgccagcgacctcccagcccctgggtccgtggaggggttgggtccccccagcagagcccctgggccagcagaacagcactcctgggcggctcctgtgggcttcaggactggccggctccagccgcaagggcgatgctgtggacgtttgtgtggatggtgcagtgttcttggaatctgtagaccagatcggtggaggtatagaagtgcaagagtctaaaggctgattttacacacacacacacacacacacacacaaaatcactgctgtgtgttttcttccgcctgaggcatcagcgtcacctcggtgtggtcgtcgcctcccaggcccttggcctggcctcctctcagtttgggttttgccctcacccacatgagcccccccatgccctgccccccttgcggccttttgtgttccccgatgtctgggctgtgtccctgccgggattcccagccttcggggtcagccgtcgagccacttgctttgctcagttctgtgtttcagccacatttccacggtggaccctgtttgttttaaatattctgttcccatgtcaatcagtgacgataaatacagccttgatttggatgaaa

SEQ ID NO: 202981 - DNA, 2708 bp, Homo sapiens
  misc_feature (601)..(601): n is a, c, g, or t
  misc_feature (672)..(672): n is a, c, g, or t
cagctcggtccagggtgagctgcagctcagggcgagctgctgcttcaggtgggtctttgctgcttcatcagctcacacatcctctgggactctactgcctctttcaggagaaaatccttctcccgctggtgccgcccatcctgcctccaacccatttggaccctcagcccatcctggcagcttcctgcccactggccccctgacagaccctttcagcagaccgagcacctttgggggcctgggcagcctgagcagccacgcctttgggggcctgggcagccatgcactggctcccggtggcagcatctttgcccccaaggagggctcctccgtgcacggcctgcccagcccccatgaggcctggaaccgactgcaccgggcaccgccctccttcccggctccgcccccgtggcccaagtccgtggacgcggagcgggtgtcagccctgaccaaccatgaccgagagccggacaatggcaaggaggagcaggaacgggacctcctggagaagacgcgcctgctgagccgggcctcgcccgccacccccgctggccaccccgtcagcggcctcctgctccgggcccagagcgagctgggccgntccggggcccccgcggagcgcgaggccgaacctcgggtcaaggagagccgctccccggccaaggaggaggncgccaagatgcccgcgcgcgcatccccgccccacagcaaggcggcccctggagacgtgaaggtcaaggaggagcgcggggaggacgaggcctccgagcccccggcgggcggcctgcaccccgcgcccctgcagctcggcctgggccgcgagcgcctgggcgcgccgggcttcgcgtgggagcctttccgcggcctggagctgccacgtcgcgccttccccgctgccgcccccgccccgggctccgccgccctcttggagcccccggagcgcccctaccgcgaccgcgagccccacggctacagccccgagcgcctgcgcggggagctggagcgcgcgcgggccccgcacctgccgcccgccgcccccgccttggacggcgcgctgctgccctcgctgggagccctgcacttcccgcgcctctcgcccgccgcgctgcacaatgggctcctggcgcggaccccgcccgccgccgccgccctcggcgcaccgccccccctggtgacggcggccgggccccccacgccccccgggccgccgcggagccggactactccgctggggggcctcgggccgggcgaggcgcgcgactactccccgtcccgaaatcccccggaggtggaggcgcggtagccccggggccgcagacgcctctccgagcggagcgcaccgctgtccgtctctccatcagttcctagaactcaagcacagctcccgccgatcctggggcggcgccgcctctccacccgcagcctgcggaggcggggacttgggtgtcggcttttctgagggtgatcttttgttttccgagtttgggattcggctgttgggaaaaaaaaatcgcgtttgtaccttttccccccacagatgagaagtgtttgtaatggatttgtatttttcttaattttatgctctttagacgtttaaaagaaccaaaaaagaaacttttgcttcttcgttttcggttgggatttgcagtttaatggcctcagatccttctccagatccccagggtttctttgtcttatttatggagaaaaaccggtcactttgtccagcgcactgtgaggcccccactcaggccagccctggcccccccttggtacttggaaccgaagttacagattatattaaaataataatgtacaaaactttgtttttttgccttattatgcagaagtgtaatttcttttttggtttgtttttttaaaagcaaacgaaacgtgtaaatagtctgttgatataaatatatgacgttactaaattcttaatctagatagactttataaaaaccgtttccagaaacccctctggttgtttgtctaacatggtcacaaaaacccaggcgctgctggctgtaaacattatcagaagtttaatggcagcaactttccttcaactatgcaagcgcttcccggcggctctgctggttgggggaggaaggttccgccagcgacctcccagcccctgggtccgtggaggggttgggtccccccagcagagcccctgggccagcagaacagcactcctgggcggctcctgtgggcttcaggactggccggctccagccgcaagggcgatgctgtggacgtttgtgtggatggtgcagtgttcttggaatctgtagaccagatcggtggaggtatagaagtgcaagagtctaaaggctgattttacacacacacacacacacacacacacaaaatcactgctgtgtgttttcttccgcctgaggcatcagcgtcacctcggtgtggtcgtcgcctcccaggcccttggcctggcctcctctcagtttgggttttgccctcacccacatgagcccccccatgccctgccccccttgcggccttttgtgttccccgatgtctgggctgtgtccctgccgggattcccagccttcggggtcagccgtcgagccacttgctttgctcagttctgtgtttcagccacatttccacggtggaccctgtttgttttaaatattctgttcccatgtcaatcagtgacgataaatacagccttgatttggatgaaa

SEQ ID NO: 202982 - DNA, 3946 bp, Homo sapiens
  misc_feature (1831)..(1831): n is a, c, g, or t
  misc_feature (1902)..(1902): n is a, c, g, or t
gagcgcgcagagccggcgcggcggacatgcgcgtccccggcccgagctccggctgagcagggcacgcggggagaggggtcgcctggacgggccagggccacccggggctcgcgctccacgcccgcgtccatgcagcccggctccggccccgggactagtggcgactgcctggggcgccggcgaggcatccgtgggctctgagaagctctttgcgccgggaaccgataaaggcccagcgcttgagaagtcggaggccaaggccgggccggtgcccaaggtgtcaggcctggagcgcagccgcgagctcagcgccgagagcttcctgcccactgccagccccgcgccccatgccgcgccctgcccggggcccccgcccggctcccgcgccaatcccttggtgaagaaggaaccccccgccccgcaccgccacaccccgcagccgccacccccgcagccccgcggcctgctcccgacacacgtgcctgcatccctgggcgccttcgcgggccacagccaggcggcagccaacggcctgcacggcctcagcaggagcagcagcgcccccctgggcctggggaagcacgtgtcgctgtcgccacacgggccgggcccccacctgtctacctcacacctggcgctccggtcccaggcgcagcaccagctccacgcggccatgtttgccgcacccccgacactgcccccgcccccggcgctgccggccagcagcctggtcctcccaggacacccggccgatcacgagctgctcaggcaagagctgaacacgcggtttctggtgcagagcgccgagcggcctggcgcctccctgggcccgggggctctgctgcgggcggagttccatcagcaccagcacacacaccagcacacgcaccaacacacacaccagcaccaacacacattcgcccccttccccgcagggctgcccccgacgccgcccgccgcacccccgccgtttgacaagtatgcgcccaagctggacagcccctacttccgacattccagcgtgagtttcttcccgtccttccctcctgccatcccgggactgcccaccctgctcccacaccccggccccttcgggtccctgcagggcgcttttcagcctaaggtgtctgacccgtaccgggcggtggtcaagaagccggggaggtggtgtgccgtgcacgtgcagatcgcctggcagatctaccgtcaccagcagaagataaaggagatgcagctggacccccacaagctggaggtgggtgcaaagctggacctgttcggcagaccccctgccccgggcgtgtttgcaggcttccactacccacaggacctggcccggcccctcttccccagcacaggtgccgcccatcctgcctccaacccatttggaccctcagcccatcctggcagcttcctgcccactggccccctgacagaccctttcagcagaccgagcacctttgggggcctgggcagcctgagcagccacgcctttgggggcctgggcagccatgcactggctcccggtggcagcatctttgcccccaaggagggctcctccgtgcacggcctgcccagcccccatgaggcctggaaccgactgcaccgggcaccgccctccttcccggctccgcccccgtggcccaagtccgtggacgcggagcgggtgtcagccctgaccaaccatgaccgagagccggacaatggcaaggaggagcaggaacgggacctcctggagaagacgcgcctgctgagccgggcctcgcccgccacccccgctggccaccccgtcagcggcctcctgctccgggcccagagcgagctgggccgntccggggcccccgcggagcgcgaggccgaacctcgggtcaaggagagccgctccccggccaaggaggaggncgccaagatgcccgcgcgcgcatccccgccccacagcaaggcggcccctggagacgtgaaggtcaaggaggagcgcggggaggacgaggcctccgagcccccggcgggcggcctgcaccccgcgcccctgcagctcggcctgggccgcgagcgcctgggcgcgccgggcttcgcgtgggagcctttccgcggcctggagctgccacgtcgcgccttccccgctgccgcccccgccccgggctccgccgccctcttggagcccccggagcgcccctaccgcgaccgcgagccccacggctacagccccgagcgcctgcgcggggagctggagcgcgcgcgggccccgcacctgccgcccgccgcccccgccttggacggcgcgctgctgccctcgctgggagccctgcacttcccgcgcctctcgcccgccgcgctgcacaatgggctcctggcgcggaccccgcccgccgccgccgccctcggcgcaccgccccccctggtgacggcggccgggccccccacgccccccgggccgccgcggagccggactactccgctggggggcctcgggccgggcgaggcgcgcgactactccccgtcccgaaatcccccggaggtggaggcgcggtagccccggggccgcagacgcctctccgagcggagcgcaccgctgtccgtctctccatcagttcctagaactcaagcacagctcccgccgatcctggggcggcgccgcctctccacccgcagcctgcggaggcggggacttgggtgtcggcttttctgagggtgatcttttgttttccgagtttgggattcggctgttgggaaaaaaaaatcgcgtttgtaccttttccccccacagatgagaagtgtttgtaatggatttgtatttttcttaattttatgctctttagacgtttaaaagaaccaaaaaagaaacttttgcttcttcgttttcggttgggatttgcagtttaatggcctcagatccttctccagatccccagggtttctttgtcttatttatggagaaaaaccggtcactttgtccagcgcactgtgaggcccccactcaggccagccctggcccccccttggtacttggaaccgaagttacagattatattaaaataataatgtacaaaactttgtttttttgccttattatgcagaagtgtaatttcttttttggtttgtttttttaaaagcaaacgaaacgtgtaaatagtctgttgatataaatatatgacgttactaaattcttaatctagatagactttataaaaaccgtttccagaaacccctctggttgtttgtctaacatggtcacaaaaacccaggcgctgctggctgtaaacattatcagaagtttaatggcagcaactttccttcaactatgcaagcgcttcccggcggctctgctggttgggggaggaaggttccgccagcgacctcccagcccctgggtccgtggaggggttgggtccccccagcagagcccctgggccagcagaacagcactcctgggcggctcctgtgggcttcaggactggccggctccagccgcaagggcgatgctgtggacgtttgtgtggatggtgcagtgttcttggaatctgtagaccagatcggtggaggtatagaagtgcaagagtctaaaggctgattcacacacacacacacacacacaaaatcactgctgtgtgttttcttccgcctgaggcatcagcgtcacctcggtgtggtcgtcgcctcccaggcccttggcctggcctcctctcagtttgggttttgccctcacccacatgagccccccccgtatgcattcggcgggggtatgaagtcagttgtttcgtttgtttttacatagcaacagtaaagaccattcactaggtccccccgtgagtgtgagcatacccagtatgctagagaattgacacgaaacctttaaatcaaggcctcttttattaccaaaacaaaacaaaaaaaagggaacaaaatacgatgggtgagggaagagatgatgccgaagtgtcatcct

SEQ ID NO: 202983 - DNA, 3048 bp, Homo sapiens
  misc_feature (1831)..(1831): n is a, c, g, or t
  misc_feature (1902)..(1902): n is a, c, g, or t
gagcgcgcagagccggcgcggcggacatgcgcgtccccggcccgagctccggctgagcagggcacgcggggagaggggtcgcctggacgggccagggccacccggggctcgcgctccacgcccgcgtccatgcagcccggctccggccccgggactagtggcgactgcctggggcgccggcgaggcatccgtgggctctgagaagctctttgcgccgggaaccgataaaggcccagcgcttgagaagtcggaggccaaggccgggccggtgcccaaggtgtcaggcctggagcgcagccgcgagctcagcgccgagagcttcctgcccactgccagccccgcgccccatgccgcgccctgcccggggcccccgcccggctcccgcgccaatcccttggtgaagaaggaaccccccgccccgcaccgccacaccccgcagccgccacccccgcagccccgcggcctgctcccgacacacgtgcctgcatccctgggcgccttcgcgggccacagccaggcggcagccaacggcctgcacggcctcagcaggagcagcagcgcccccctgggcctggggaagcacgtgtcgctgtcgccacacgggccgggcccccacctgtctacctcacacctggcgctccggtcccaggcgcagcaccagctccacgcggccatgtttgccgcacccccgacactgcccccgcccccggcgctgccggccagcagcctggtcctcccaggacacccggccgatcacgagctgctcaggcaagagctgaacacgcggtttctggtgcagagcgccgagcggcctggcgcctccctgggcccgggggctctgctgcgggcggagttccatcagcaccagcacacacaccagcacacgcaccaacacacacaccagcaccaacacacattcgcccccttccccgcagggctgcccccgacgccgcccgccgcacccccgccgtttgacaagtatgcgcccaagctggacagcccctacttccgacattccagcgtgagtttcttcccgtccttccctcctgccatcccgggactgcccaccctgctcccacaccccggccccttcgggtccctgcagggcgcttttcagcctaaggtgtctgacccgtaccgggcggtggtcaagaagccggggaggtggtgtgccgtgcacgtgcagatcgcctggcagatctaccgtcaccagcagaagataaaggagatgcagctggacccccacaagctggaggtgggtgcaaagctggacctgttcggcagaccccctgccccgggcgtgtttgcaggcttccactacccacaggacctggcccggcccctcttccccagcacaggtgccgcccatcctgcctccaacccatttggaccctcagcccatcctggcagcttcctgcccactggccccctgacagaccctttcagcagaccgagcacctttgggggcctgggcagcctgagcagccacgcctttgggggcctgggcagccatgcactggctcccggtggcagcatctttgcccccaaggagggctcctccgtgcacggcctgcccagcccccatgaggcctggaaccgactgcaccgggcaccgccctccttcccggctccgcccccgtggcccaagtccgtggacgcggagcgggtgtcagccctgaccaaccatgaccgagagccggacaatggcaaggaggagcaggaacgggacctcctggagaagacgcgcctgctgagccgggcctcgcccgccacccccgctggccaccccgtcagcggcctcctgctccgggcccagagcgagctgggccgntccggggcccccgcggagcgcgaggccgaacctcgggtcaaggagagccgctccccggccaaggaggaggncgccaagatgcccgcgcgcgcatccccgccccacagcaaggcggcccctggagacgtgaaggtcaaggaggagcgcggggaggacgaggcctccgagcccccggcgggcggcctgcaccccgcgcccctgcagctcggcctgggccgcgagcgcctgggcgcgccgggcttcgcgtgggagcctttccgcggcctggagctgccacgtcgcgccttccccgctgccgcccccgccccgggctccgccgccctcttggagcccccggagcgcccctaccgcgaccgcgagccccacggctacagccccgagcgcctgcgcggggagctggagcgcgcgcgggccccgcacctgccgcccgccgcccccgccttggacggcgcgctgctgccctcgctgggagccctgcacttcccgcgcctctcgcccgccgcgctgcacaatgggctcctggcgcggaccccgcccgccgccgccgccctcggcgcaccgccccccctggtgacggcggccgggccccccacgccccccgggccgccgcggagccggactactccgctggggggcctcgggccgggcgaggcgcgcgactactccccgtcccgaaatcccccggaggtggaggcgcggtagccccggggccgcagacgcctctccgagcggagcgcaccgctgtccgtctctccatcagttcctagaactcaagcacagctcccgccgatcctggggcggcgccgcctctccacccgcagcctgcggaggcggggacttgggtgtcggcttttctgagggtgatcttttgttttccgagtttgggattcggctgttgggaaaaaaaaatcgcgtttgtaccttttccccccacagatgagaagtgtttgtaatggatttgtatttttcttaattttatgctctttagacgtttaaaagaaccaaaaaagaaacttttgcttcttcgttttcggttgggatttgcagtttaatggcctcagatccttctccagatccccagggtttctttgtcttatttatggagaaaaaccggtcactttgtccagcgcactgtgaggcccccactcaggccagccctggcccccccttggtacttggaaccgaagttacagattatattaaaataataatgtaca

SEQ ID NO: 202984 - DNA, 441 bp, Homo sapiens
  misc_feature (25)..(25): n is a, c, g, or t
cgactgcagcattcaaagcccccanggaggttgaagccgggcacagaaacacagcagcgggagcagcaacaccagcactgccacacacacacacacacacacacaaaatcactgctgtgtgttttcttccgcctgaggcatcagcgtcacctcggtgtggtcgtcgcctcccaggcccttggcctggcctcctctcagtttgggttttgccctcacccacatgagcccccccatgccctgccccccttgcggccttttgtgttccccgatgtctgggctgtgtccctgccgggattcccagccttcggggtcagccgtcgagccacttgctttgctcagttctgtgtttcagccacatttccacggtggaccctgtttgttttaaatattctgttcccatgtcaatcagtgacgataaatacagccttgatttggatgaaa

SEQ ID NO: 202985 - DNA, 4082 bp, Homo sapiens
  misc_feature (1975)..(1975): n is a, c, g, or t
  misc_feature (2046)..(2046): n is a, c, g, or t
gagcgcgcagagccggcgcggcggacatgcgcgtccccggcccgagctccggctgagcagggcacgcggggagaggggtcgcctggacgggccagggccacccggggctcgcgctccacgcccgcgtccatgcagcccggctccggccccgggactagtggcgactgcctggggcgccggcgaggcatccgtgggctctgagaagctctttgcgccgggaaccgataaaggcccagcgcttgagaagtcggaggccaaggccgggccggtgcccaaggtgtcaggcctggagcgcagccgcgagctcagcgccgagagcttcctgcccactgccagccccgcgccccatgccgcgccctgcccggggcccccgcccggctcccgcgccaatcccttggtgaagaaggaaccccccgccccgcaccgccacaccccgcagccgccacccccgcagccccgcggcctgctcccgacacacgtgcctgcatccctgggcgccttcgcgggccacagccaggcggcagccaacggcctgcacggcctcagcaggagcagcagcgcccccctgggcctggggaagcacgtgtcgctgtcgccacacgggccgggcccccacctgtctacctcacacctggcgctccggtcccaggcgcagcaccagctccacgcggccatgtttgccgcacccccgacactgcccccgcccccggcgctgccggccagcagcctggtcctcccaggacacccggccgatcacgagctgctcaggcaagagctgaacacgcggtttctggtgcagagcgccgagcggcctggcgcctccctgggcccgggggctctgctgcgggcggagttccatcagcaccagcacacacaccagcacacgcaccaacacacacaccagcaccaacacacattcgcccccttccccgcagggctgcccccgacgccgcccgccgcacccccgccgtttgacaagtatgcgcccaagctggacagcccctacttccgacattccagcgtgagtttcttcccgtccttccctcctgccatcccgggactgcccaccctgctcccacaccccggccccttcgggtccctgcagggcgcttttcagcctaaggtgtctgacccgtaccgggcggtggtcaaggtgagcacgtgttgggaaggcccgtggcaagggaggactctggtgcccccggggcggcctcggggggcccgtgacagcaggagtctgcagaaaacatgggtgggggtggcaccagccccactgagcgcttccatcctgtcgcagaagccggggaggtggtgtgccgtgcacgtgcagatcgcctggcagatctaccgtcaccagcagaagataaaggagatgcagctggacccccacaagctggaggtgggtgcaaagctggacctgttcggcagaccccctgccccgggcgtgtttgcaggcttccactacccacaggacctggcccggcccctcttccccagcacaggtgccgcccatcctgcctccaacccatttggaccctcagcccatcctggcagcttcctgcccactggccccctgacagaccctttcagcagaccgagcacctttgggggcctgggcagcctgagcagccacgcctttgggggcctgggcagccatgcactggctcccggtggcagcatctttgcccccaaggagggctcctccgtgcacggcctgcccagcccccatgaggcctggaaccgactgcaccgggcaccgccctccttcccggctccgcccccgtggcccaagtccgtggacgcggagcgggtgtcagccctgaccaaccatgaccgagagccggacaatggcaaggaggagcaggaacgggacctcctggagaagacgcgcctgctgagccgggcctcgcccgccacccccgctggccaccccgtcagcggcctcctgctccgggcccagagcgagctgggccgntccggggcccccgcggagcgcgaggccgaacctcgggtcaaggagagccgctccccggccaaggaggaggncgccaagatgcccgcgcgcgcatccccgccccacagcaaggcggcccctggagacgtgaaggtcaaggaggagcgcggggaggacgaggcctccgagcccccggcgggcggcctgcaccccgcgcccctgcagctcggcctgggccgcgagcgcctgggcgcgccgggcttcgcgtgggagcctttccgcggcctggagctgccacgtcgcgccttccccgctgccgcccccgccccgggctccgccgccctcttggagcccccggagcgcccctaccgcgaccgcgagccccacggctacagccccgagcgcctgcgcggggagctggagcgcgcgcgggccccgcacctgccgcccgccgcccccgccttggacggcgcgctgctgccctcgctgggagccctgcacttcccgcgcctctcgcccgccgcgctgcacaatgggctcctggcgcggaccccgcccgccgccgccgccctcggcgcaccgccccccctggtgacggcggccgggccccccacgccccccgggccgccgcggagccggactactccgctggggggcctcgggccgggcgaggcgcgcgactactccccgtcccgaaatcccccggaggtggaggcgcggtagccccggggccgcagacgcctctccgagcggagcgcaccgctgtccgtctctccatcagttcctagaactcaagcacagctcccgccgatcctggggcggcgccgcctctccacccgcagcctgcggaggcggggacttgggtgtcggcttttctgagggtgatcttttgttttccgagtttgggattcggctgttgggaaaaaaaaatcgcgtttgtaccttttccccccacagatgagaagtgtttgtaatggatttgtatttttcttaattttatgctctttagacgtttaaaagaaccaaaaaagaaacttttgcttcttcgttttcggttgggatttgcagtttaatggcctcagatccttctccagatccccagggtttctttgtcttatttatggagaaaaaccggtcactttgtccagcgcactgtgaggcccccactcaggccagccctggcccccccttggtacttggaaccgaagttacagattatattaaaataataatgtacaaaactttgtttttttgccttattatgcagaagtgtaatttcttttttggtttgtttttttaaaagcaaacgaaacgtgtaaatagtctgttgatataaatatatgacgttactaaattcttaatctagatagactttataaaaaccgtttccagaaacccctctggttgtttgtctaacatggtcacaaaaacccaggcgctgctggctgtaaacattatcagaagtttaatggcagcaactttccttcaactatgcaagcgcttcccggcggctctgctggttgggggaggaaggttccgccagcgacctcccagcccctgggtccgtggaggggttgggtccccccagcagagcccctgggccagcagaacagcactcctgggcggctcctgtgggcttcaggactggccggctccagccgcaagggcgatgctgtggacgtttgtgtggatggtgcagtgttcttggaatctgtagaccagatcggtggaggtatagaagtgcaagagtctaaaggctgattttacacacacacacacacacacacacacaaaatcactgctgtgtgttttcttccgcctgaggcatcagcgtcacctcggtgtggtcgtcgcctcccaggcccttggcctggcctcctctcagtttgggttttgccctcacccacatgagcccccccatgccctgccccccttgcggccttttgtgttccccgatgtctgggctgtgtccctgccgggattcccagccttcggggtcagccgtcgagccacttgctttgctcagttctgtgtttcagccacatttccacggtggaccctgtttgttttaaatattctgttcccatgtcaatcagtgacgataaatacagccttgatttggatgaaa

SEQ ID NO: 202986 - DNA, 4227 bp, Homo sapiens
  misc_feature (1831)..(1831): n is a, c, g, or t
  misc_feature (1902)..(1902): n is a, c, g, or t
gagcgcgcagagccggcgcggcggacatgcgcgtccccggcccgagctccggctgagcagggcacgcggggagaggggtcgcctggacgggccagggccacccggggctcgcgctccacgcccgcgtccatgcagcccggctccggccccgggactagtggcgactgcctggggcgccggcgaggcatccgtgggctctgagaagctctttgcgccgggaaccgataaaggcccagcgcttgagaagtcggaggccaaggccgggccggtgcccaaggtgtcaggcctggagcgcagccgcgagctcagcgccgagagcttcctgcccactgccagccccgcgccccatgccgcgccctgcccggggcccccgcccggctcccgcgccaatcccttggtgaagaaggaaccccccgccccgcaccgccacaccccgcagccgccacccccgcagccccgcggcctgctcccgacacacgtgcctgcatccctgggcgccttcgcgggccacagccaggcggcagccaacggcctgcacggcctcagcaggagcagcagcgcccccctgggcctggggaagcacgtgtcgctgtcgccacacgggccgggcccccacctgtctacctcacacctggcgctccggtcccaggcgcagcaccagctccacgcggccatgtttgccgcacccccgacactgcccccgcccccggcgctgccggccagcagcctggtcctcccaggacacccggccgatcacgagctgctcaggcaagagctgaacacgcggtttctggtgcagagcgccgagcggcctggcgcctccctgggcccgggggctctgctgcgggcggagttccatcagcaccagcacacacaccagcacacgcaccaacacacacaccagcaccaacacacattcgcccccttccccgcagggctgcccccgacgccgcccgccgcacccccgccgtttgacaagtatgcgcccaagctggacagcccctacttccgacattccagcgtgagtttcttcccgtccttccctcctgccatcccgggactgcccaccctgctcccacaccccggccccttcgggtccctgcagggcgcttttcagcctaaggtgtctgacccgtaccgggcggtggtcaagaagccggggaggtggtgtgccgtgcacgtgcagatcgcctggcagatctaccgtcaccagcagaagataaaggagatgcagctggacccccacaagctggaggtgggtgcaaagctggacctgttcggcagaccccctgccccgggcgtgtttgcaggcttccactacccacaggacctggcccggcccctcttccccagcacaggtgccgcccatcctgcctccaacccatttggaccctcagcccatcctggcagcttcctgcccactggccccctgacagaccctttcagcagaccgagcacctttgggggcctgggcagcctgagcagccacgcctttgggggcctgggcagccatgcactggctcccggtggcagcatctttgcccccaaggagggctcctccgtgcacggcctgcccagcccccatgaggcctggaaccgactgcaccgggcaccgccctccttcccggctccgcccccgtggcccaagtccgtggacgcggagcgggtgtcagccctgaccaaccatgaccgagagccggacaatggcaaggaggagcaggaacgggacctcctggagaagacgcgcctgctgagccgggcctcgcccgccacccccgctggccaccccgtcagcggcctcctgctccgggcccagagcgagctgggccgntccggggcccccgcggagcgcgaggccgaacctcgggtcaaggagagccgctccccggccaaggaggaggncgccaagatgcccgcgcgcgcatccccgccccacagcaaggcggcccctggagacgtgaaggtcaaggaggagcgcggggaggacgaggcctccgagcccccggcgggcggcctgcaccccgcgcccctgcagctcggcctgggccgcgagcgcctgggcgcgccgggcttcgcgtgggagcctttccgcggcctggagctgccacgtcgcgccttccccgctgccgcccccgccccgggctccgccgccctcttggagcccccggagcgcccctaccgcgaccgcgagccccacggctacagccccgagcgcctgcgcggggagctggagcgcgcgcgggccccgcacctgccgcccgccgcccccgccttggacggcgcgctgctgccctcgctgggagccctgcacttcccgcgcctctcgcccgccgcgctgcacaatgggctcctggcgcggaccccgcccgccgccgccgccctcggcgcaccgccccccctggtgacggcggccgggccccccacgccccccgggccgccgcggagccggactactccgctggggggcctcgggccgggcgaggcgcgcgactactccccgtcccgaaatcccccggaggtggaggcgcggtagccccggggccgcagacgcctctccgagcggagcgcaccgctgtccgtctctccatcagttcctagaactcaagcacagctcccgccgatcctggggcggcgccgcctctccacccgcagcctgcggaggcggggacttgggtgtcggcttttctgagggtgatcttttgttttccgagtttgggattcggctgttgggaaaaaaaaatcgcgtttgtaccttttccccccacagatgagaagtgtttgtaatggatttgtatttttcttaattttatgctctttagacgtttaaaagaaccaaaaaagaaacttttgcttcttcgttttcggttgggatttgcagtttaatggcctcagatccttctccagatccccagggtttctttgtcttatttatggagaaaaaccggtcactttgtccagcgcactgtgaggcccccactcaggccagccctggcccccccttggtacttggaaccgaagttacagattatattaaaataataatgtacaaaactttgtttttttgccttattatgcagaagtgtaatttcttttttggtttgtttttttaaaagcaaacgaaacgtgtaaatagtctgttgatataaatatatgacgttactaaattcttaatctagatagactttataaaaaccgtttccagaaacccctctggttgtttgtctaacatggtcacaaaaacccaggcgctgctggctgtaaacattatcagaagtttaatggcagcaactttccttcaactatgcaagcgcttcccggcggctctgctggttgggggaggaaggttccgccagcgacctcccagcccctgggtccgtggaggggttgggtccccccagcagagcccctgggccagcagaacagcactcctgggcggctcctgtgggcttcaggactggccggctccagccgcaagggcgatgctgtggacgtttgtgtggatggtgcagtgttcttggaatctgtagaccagatcggtggaggtatagaagtgcaagagtctaaaggctgattttacacacacacacacacacacacacacaaaatcactgctgtgtgttttcttccgcctgaggcatcagcgtcacctcggtgtggtcgtcgcctcccaggcccttggcctggcctcctctcagtttgggttttgccctcacccacatgagcccccccatgccctgccccccttgcggccttttgtgttccccgatgtctgggctgtgtccctgccgggattcccagccttcggggtcagccgtcgagccacttgctttgctcagttctgtgtttcagccacatttccacggtggaccctgtttgttttaaatattctgttcccatgtcaatcagtgacgataaatacagccttgatttggatgaaaaaaaaaaaagaatgaaacacacacagcacacataccacccacccatacacaaccgacaccgacagaccacagagacaaaagaaagaccagacgagcaggggacgcccacagtggcgcgcgggcgagcaaaaaaaagcgcagcacaacaaccggagcagacacgacgacagaagcacggccccaacgccgagcccacactgcgcggaacacagacggcggagaacaaaccgggggccaccaccagtagcgagccgcaaacacacagcaaagacgggggcacccgcgagag

SEQ ID NO: 202987 - DNA, 3647 bp, Homo sapiens
  misc_feature (1831)..(1831): n is a, c, g, or t
  misc_feature (1902)..(1902): n is a, c, g, or t
gagcgcgcagagccggcgcggcggacatgcgcgtccccggcccgagctccggctgagcagggcacgcggggagaggggtcgcctggacgggccagggccacccggggctcgcgctccacgcccgcgtccatgcagcccggctccggccccgggactagtggcgactgcctggggcgccggcgaggcatccgtgggctctgagaagctctttgcgccgggaaccgataaaggcccagcgcttgagaagtcggaggccaaggccgggccggtgcccaaggtgtcaggcctggagcgcagccgcgagctcagcgccgagagcttcctgcccactgccagccccgcgccccatgccgcgccctgcccggggcccccgcccggctcccgcgccaatcccttggtgaagaaggaaccccccgccccgcaccgccacaccccgcagccgccacccccgcagccccgcggcctgctcccgacacacgtgcctgcatccctgggcgccttcgcgggccacagccaggcggcagccaacggcctgcacggcctcagcaggagcagcagcgcccccctgggcctggggaagcacgtgtcgctgtcgccacacgggccgggcccccacctgtctacctcacacctggcgctccggtcccaggcgcagcaccagctccacgcggccatgtttgccgcacccccgacactgcccccgcccccggcgctgccggccagcagcctggtcctcccaggacacccggccgatcacgagctgctcaggcaagagctgaacacgcggtttctggtgcagagcgccgagcggcctggcgcctccctgggcccgggggctctgctgcgggcggagttccatcagcaccagcacacacaccagcacacgcaccaacacacacaccagcaccaacacacattcgcccccttccccgcagggctgcccccgacgccgcccgccgcacccccgccgtttgacaagtatgcgcccaagctggacagcccctacttccgacattccagcgtgagtttcttcccgtccttccctcctgccatcccgggactgcccaccctgctcccacaccccggccccttcgggtccctgcagggcgcttttcagcctaaggtgtctgacccgtaccgggcggtggtcaagaagccggggaggtggtgtgccgtgcacgtgcagatcgcctggcagatctaccgtcaccagcagaagataaaggagatgcagctggacccccacaagctggaggtgggtgcaaagctggacctgttcggcagaccccctgccccgggcgtgtttgcaggcttccactacccacaggacctggcccggcccctcttccccagcacaggtgccgcccatcctgcctccaacccatttggaccctcagcccatcctggcagcttcctgcccactggccccctgacagaccctttcagcagaccgagcacctttgggggcctgggcagcctgagcagccacgcctttgggggcctgggcagccatgcactggctcccggtggcagcatctttgcccccaaggagggctcctccgtgcacggcctgcccagcccccatgaggcctggaaccgactgcaccgggcaccgccctccttcccggctccgcccccgtggcccaagtccgtggacgcggagcgggtgtcagccctgaccaaccatgaccgagagccggacaatggcaaggaggagcaggaacgggacctcctggagaagacgcgcctgctgagccgggcctcgcccgccacccccgctggccaccccgtcagcggcctcctgctccgggcccagagcgagctgggccgntccggggcccccgcggagcgcgaggccgaacctcgggtcaaggagagccgctccccggccaaggaggaggncgccaagatgcccgcgcgcgcatccccgccccacagcaaggcggcccctggagacgtgaaggtcaaggaggagcgcggggaggacgaggcctccgagcccccggcgggcggcctgcaccccgcgcccctgcagctcggcctgggccgcgagcgcctgggcgcgccgggcttcgcgtgggagcctttccgcggcctggagctgccacgtcgcgccttccccgctgccgcccccgccccgggctccgccgccctcttggagcccccggagcgcccctaccgcgaccgcgagccccacggctacagccccgagcgcctgcgcggggagctggagcgcgcgcgggccccgcacctgccgcccgccgcccccgccttggacggcgcgctgctgccctcgctgggagccctgcacttcccgcgcctctcgcccgccgcgctgcacaatgggctcctggcgcggaccccgcccgccgccgccgccctcggcgcaccgccccccctggtgacggcggccgggccccccacgccccccgggccgccgcggagccggactactccgctggggggcctcgggccgggcgaggcgcgcgactactccccgtcccgaaatcccccggaggtggaggcgcggtagccccggggccgcagacgcctctccgagcggagcgcaccgctgtccgtctctccatcagttcctagaactcaagcacagctcccgccgatcctggggcggcgccgcctctccacccgcagcctgcggaggcggggacttgggtgtcggcttttctgagggtgatcttttgttttccgagtttgggattcggctgttgggaaaaaaaaatcgcgtttgtaccttttccccccacagatgagaagtgtttgtaatggatttgtatttttcttaattttatgctctttagacgtttaaaagaaccaaaaaagaaacttttgcttcttcgttttcggttgggatttgcagtttaatggcctcagatccttctccagatccccagggtttctttgtcttatttatggagaaaaaccggtcactttgtccagcgcactgtgaggcccccactcaggccagccctggcccccccttggtacttggaaccgaagttacagattatattaaaataataatgtacaaaactttgtttttttgccttattatgcagaagtgtaatttcttttttggtttgtttttttaaaagcaaacgaaacgtgtaaatagtctgttgatataaatatatgacgttactaaattcttaatctagatagactttataaaaaccgtttccagaaacccctctggttgtttgtctaacatggtcacaaaaacccaggcgctgctggctgtaaacattatcagaagtttaatggcagcaactttccttcaactatgcaagcgcttcccggcggctctgctggttgggggaggaaggttccgccagcgacctcccagcccctgggtccgtggaggggttgggtccccccagcagagcccctgggccagcagaacagcactcctgggcggctcctgtgggcttcaggactggccttttgtgttccccgatgtctgggctgtgtccctgccgggattcccagccttcggggtcagccgtcgagccacttgctttgctcagttctgtgtttcagccacatttccacggtggaccctgtttgttttaaatattctgttcccatgtcaatcagtgacgataaatacagccttgatttggatgaaa

SEQ ID NO: 202988 - DNA, 366 bp, Homo sapiens
acccccactgacaggtcccaatgtgtgttgttcccttccctgtgccaatgtgttctcattgttcagttcccacttacaagtgagaacatgctgtgtttggttttctgtttctgcgttagtttgctgaggataatggcttccagctccatccatgttcctgcaaaggacatgatctcattccttttatggctgcatagtattccatggtatatatgtaccacattttctttatccagtttatcactgatggacatttgggtagattccatgtattcactattatgaatagtggtgatgcacattttccttgtggctggcacgtatcagattataaatcttatctgaatctgactaatgaagattttt

SEQ ID NO: 202989 - DNA, 733 bp, Homo sapiens
gatttcagagttgactttggggtcacagatcagagtgaccctgtgattgtagcttgcccacactcatactttctctgagtgacgtccttgcagctcttggtctatgaagtgcccagaacttcacattgtaaaggatgttcagtctgtggttccccatgggaatgattttcacctgaaatgtttatatttgcgtaaacttaatactaacgaatgggtttctaccgtgagatcctctagaagccatctggagggcttgtctgcagaaagccagcttttcttttccttgtgaatttgaagagaggtccgtaggctggccctggagcaggcctttcctctgttccctggccccagaagagtcatgtcccgagcccctcctcgatccgtcttctcgctgccattgttttaaatgtgctgtgacatcacccgtccctgaatccttgctcgactgagtgaactggctgggttttctgtgtctcagcggaagattccctttctcactgaaaagagaactgtgttttttttttttctttttttcactgtataatctatataccatcctaggggacttggtggaggtggggggcaatgcttgcaatatagataagggaaaatatcaaaagtgaacattaccttttatgaccagcattttttctgatcacttttattgaggtagactgtatataactcaataaataaagctcagcagttgtgagtgaacagtttcgtgagtttt

SEQ ID NO: 202990 - DNA, 314 bp, Homo sapiens
tggaagctattgctggagcctgcagccgcagctggtagtccatctgtgcgtcgattcctgcagagatgcagcgccgggctgtgtgggtgctgtggtaccagcccaccaggacaggccccgcaggaacaggctctggtagatctgtaatcctgttggctggcgacacgtgtcgccagccaacaggatgggaggaagggcagactgtggtggccaaacaccagcatgcaggagggttgttctagatgcatccatccttctgtgggtgcacggatgaggttctggatgtaattcatgggcttcatgaacttggctga

SEQ ID NO: 202991 - DNA, 105 bp, Homo sapiens
atcatgtcatctgaaaagagacagagtttttcatcgtttctcttttttttttgagacggagtctcactctgtcccccgatctggagtgcagtggcgcaatctcgg

SEQ ID NO: 202992 - DNA, 405 bp, Homo sapiens
acacacaccccaacagaaacaaacacaccccacacccacacacccaccccagtaaaaaccaaaccaataaaacaccactcagaagctctccctttcccctgagctgctgctttagatgtgtggccccgacaggtaccttaccctcagagcagaaatccaggcatccctggcagccttccttcctcacccctcagtcttgctggtgcccagatgggagctggcagagatgtctcctggatgggcgctcactttgctcttctgtagccttggtggcttagccccagaccactcctccttacaacagcctctggaccctgagtctacccctcactcttctgctcgtccgtagcggccggccgctacggacgcgggcgggggatatagggtcgaagccgcactcgtaag

SEQ ID NO: 202993 - DNA, 643 bp, Homo sapiens
gcaaacagactcaagattttgggccaatcatgtgcctctctttttacctggatggagagtttcaaagaaggcataggcatgttagtgtgcacaggagagccccaagacaagcataaatttccaaaacatcaaaaggagcagttgcgttgtttacaagcgctcagttggctcaccagttctgaccttcttgctgcaataatcagttctatggctgaattacaagacgtcattggtaaagcagatccaaattccagaatttgtggacatttactcataggtgcagccaagaattcttttgcaaaactcatggataaaattagtctggtaatggaatgtatacctctgcacagtagcaggagtattacatatgtagaaaaagattccctggttcagaggctggcccatggacttcataaagtaaacacactggccctgaaatatggtttgcgtggccatgtgcccattacgaaaagcacagcatcgttgcagaagcaaatacttggatttacacaaagactgcatgctgcagaagtggagcgccgctcactacgcttagaggtcacagaattcaaacgaagtgtgaatgaaatgaaaaaggagcttgacaaagcccagggtctgcaaatgcaattaaatgaattta

SEQ ID NO: 202994 - DNA, 678 bp, Homo sapiens
cagcttcttgggaaaccaacacacaatcacttgaaccaaggaggcagaggttgcggcgagccaagatcgcaccactgcactccagcttgggccacagagtgagaccctgtctcaaaaaaaaaaaaaaaaaaaaaaagggtaagggaacaaaaggagctggtagaagtgcagttctctaggtgggcatagtggtgcgtgcttgagtcctagctacttaggagactgagatgggaggatcacttgagcccaggaattcgaaaccagccaccgcggcatagtgagaccccacctcaaaaaaaaaaacaacaaagaaaaaccttccatgatgcgattattacgcattgcacgcctgtaccaaaatatctcatgcacccctactatgtacccacaaaaattttaaaaagaaaattttaatgcagcaagtatatttaaaaaaaaaaagaaaaaagtgcagtccttagcctaaagggaaaggacttttaccacgcttcaggcagttgactttcccctctgggtccctgcaagtccaagaggaggaaagcagccctcagggaggttctgagctcccctaggaagaatgatgcatctagcccagtcggcatctggtattaattaacctactgtactagagcaggctgagatatagtaagaggagcggggtaccgccgcgtctcgata

SEQ ID NO: 202995 - DNA, 1414 bp, Homo sapiens
gtgaacctgtcactacagggaaaacatctgactgtattggttgacagtgataaaatttgagcttcaagtgaaattataagtaagtaaacttgaatcggccaccatgagcataacagccttttattactttcctgatgagatgggtggtgacattaatgaatgtgggttaaaaaaattgtgtaatgaaatgtaccagcatttgaaagatctactttaactcagtgaaccagtattatctaaatgacccggtgtttgattatacagtgatgcatgggttaaagatctgttcagagtgcaagttagatccaatgcattttaatgagacagcatgaaaattcatttatatggtttcagattccactttgcaactgtaggagactagaatataccaccctaaaatatgcctgtttggtgtaaggattattttgagaagcagacacaggagaagttctgaaaacagagtagaagttacccttttgtaagggaaaatttatatctataaaggaaatctcccttgtaagggtgtcttcctcattaccaggaaaaggatgactcaatcactagaaacttactaatggagaaggcatagacttaaatctgtataacaagccttactgttgtttaccatgcttttcttggtcacctctccataactattgctccctagcccctgtgcccttctttatttgtttcagctgaagatgatatttaagtctgaattctaagccacctcttagaaatgaaaagatttactcatttctctgggtatctctcatggatacatgagatatatttattatatttctgattttctcttgttaatttgtcttttgttaaggggtctgacccaacttagaactcagatagggtagaggaaaaattatttttttctctcctataaaactcacctttaagaaattaccagttgttttagtgtaatatcaagaaatatccataattatttataaaagtttattaaaatagtccttccttttacaagtacatgtctttgtgaggccagattttctttatatccttaaatcaagataacattgcaccggattgaatgcagaagtaaataactgttttctattaagtcaggtaattatatgcaaatatatgtttttaattattttataattctcattgtttcagaagttttgttttttgcaaaaattgttatttatgttaatatatgatgggctttaaaaagtgaatgagggccaggtatagtggctcatgcctgtaatcccagcactttaggaggccaggcaggtatatcacctgaggtcaggagtttgagactagcctggccaacatggtgaaaccctgtctctactaaaaatacaaaaattagccgggcatggtggcgggcacctgtaatcccaactacttgggaggctggggcaggaga

SEQ ID NO: 202996 - DNA, 530 bp, Homo sapiens
gctcaatggaaatagcagtgtgatgtggctgcccaaaaatgccatgaggtttctgctgttttaataggactgggatgtctcagataagacaagacagtgccactgtactcttcactgggcatatcttaccacacatgatttcctttcttatcacctcgtttttagaaggatgtgcacaaaccggaacaaggtcagagagcaaggagacgagtgagggaaattgacatcatgtcttaaaaggaagaaatggggttgggcctgatggctcacacctataattccagcactttcagaggccggggcgggtagatcatttgaggccaggagttcgagaccagcctggccatggtgaaaccccatctccactaaacatacaaaaattagccaggcatggcagcacatgcctgtaatcccagctactctggaggctgtaacacaagagtcacttaaacctgggaagtggagtttgcaatgagccaagatcacgtcacttcactccagcctgggcaacagagcgagactccatctca

SEQ ID NO: 202997 - DNA, 527 bp, Homo sapiens
cagatcactgtaagattttctgcttgtgtatagcaacttaggtattctaggtattcaagccgttaatttactcactcaattagttgtcttttcatacaaatagtttccaagaagcccttcagaaacactaaaggaattttgaagtgccataagtggaccagggagggtgatgtaaagattatttttggcagtgctcctccttgaacccatttcagcttccctcctcctccctcttttggggaaaacaagcaacctgctcaggctgcccagtcttagtcacaccttccctactgatgttaacatttttaatggtggcagggtaattgtggaggtggtggtggtttttaaacaaagcaatactttgctagaggttgtgtctgtggcaccagtggctcacaccaggccttgccaggaccccttccagtatgtccaacaccttctctgcctgacccagtgagacagtcaactgaagtgtctctggagaccctaaaatatgggcataaccagactcgacaggtttcggggtc

SEQ ID NO: 202998 - DNA, 555 bp, Homo sapiens
ttttttatttgtacacatttatgggctacatgagaaactttgttacatgtttataatgcatagtgatcaagtcagggcatttagggtttctcactgtaccccagggcagccccagggctctccttgggcttctggcagcctgagtggtgtctcatcacagggaattttactgagcaaaggcagcttggcgtatactgagggtgtacagtccaggacccacagcattgatctcacctgggaacttattagaaatccagattctcaggccaaccctaggcccactgaattagaaagtctgggagaaaggcctggaatttgggttttaacaaacgctgcaggtgattctgatgcacgctggagaaccactggatggacaaaggctgcaggacttgaggtcagtccatttgacccccaatctctcactattttgtgaccttgggaaggttactaagccccgtgaacctcatcatctccctgtgaattgctttgttacgatgtccatgtctggaatgcagctggccctccataaatgttagctctctttccttctcactt

SEQ ID NO: 202999 - DNA, 521 bp, Homo sapiens
aaaatgagttaaagttacaaggaagctgattttggcatccataagaaaaatgggcacaacgatcgttgctttttgcgtggattgccacaagaatgtttttggattcacagatgtttaatactacacatcactttctccttctcctacttttcccataggttttcattcaacagatatctgttgattatcttgtggtgtttcaagatgtgtccatctgcattttagctgggcatatgcccaaacagcatagatttcaagctgtcacaacccaccatgggacagatacttcttaaagtgtgtgtgggttgcgttactgggacccccaattgccacaccgctagcatttgtccacttgtaaagattttcttacttgtcttccttgttgaatcaggaagtggacttttacatggtgcatgcagtttttgatgcgcttcctctccctgctccctggaggtgccgcatgaaagcgcttttccctggacgttcagttccctctccactccttgtctctgtgcatcctg

SEQ ID NO: 203000 - DNA, 190 bp, Homo sapiens
caatctactattctgcatggagacatattcctattattctctgctaaaaatactttattggctgcccaggtcttgaaaataggaaatttcacatattcgtcacagtttgagtggagaaacattgtctatttttaccttattcattttctctcctcctttgaaaccgtatggtttatactttcacaacata

SEQ ID NO: 203001 - DNA, 277 bp, Homo sapiens
ggttttacagactcaaatttgaaactctaacagctctgccacctactgtgtggccctgggcaatttaccctctgagaatcagtttcctcatctatataaatgagggtataaataatatatatcttaaaagtgatctgaagagtagatgagaactgctgacatagaagacactcacagctggattccttaattcttcttctggggattgcatcaatgcatcaccctcatcaaagcagcttacatgaattaaagccttactgagtcttgcactgctctg

SEQ ID NO: 203002 - DNA, 378 bp, Homo sapiens
acctgctaaaacatctgtatataatttgaagaaattacatactttatgatttcattttattgctgtaaatatttatgttttttactaatttctgtctcaagtgccataatatataagaaatatacaatggataaagagagaacatgcaaaataaagggaatgtggagaagaaagctgagggatataactcaaatattttcctcaagtccttggattctgtgaactataaattgctcatgatggattaatgttttaatttcagtaatacaatcaggattaagagaagcttagatagcatctttaaagggattcttctgctacatacataccacaagacagatacataataacgtatcaggtggatgaatacctgtatct

SEQ ID NO: 203003 - DNA, 684 bp, Homo sapiens
aatgagaggttctaagagatgggctagtggcttgtaatatggggaaatggggtgaatgtcaggtggatcagagagatgcagtcatggggatcaggtgtggtatcaggaataatgtgggaggccagattgaagtctgggccaggaacaatggtaattgtgggacttaacaaagaatgagtacagctgaaggagccggggagcagaaagtatatgcgtcaggtatgaggaagaaaatagattttggaagttatgagaaatgtagagagtgagttgaacatagtttgtgatttttagggcctctaaaattattaaagcagcggcagctgctgcatgcagacatgagggctaggctaaaacagtaaggtcaaattgtttggtgaataagctaataagacacttgctagttattctgtaatttttatttttaaagttgacattcaaaagagagctgaaagcttcaaagtttgggggccacttgcagttctgtaatgagagagcaaagtcacggtttatacggagctaggaaaacctgacgtccaaagaaattgacaaagggatccattccacaaacatttgtggccaaggcagtattactggagcccttagggtggggccagcatttctcataaacaagctcctgtcagtttggaccacctaaaatgtggcctgggttaaacctctaac

SEQ ID NO: 203004 - DNA, 657 bp, Homo sapiens
tggtctccaagacaattcccgctgggatcaagtcaggaaggctcaccaggacactaaagcctaaaagtatgtgtcagaaaaagagacattttataagctttgaaggagcttctttctatcactttcaagtgatctacaattgcatctttaatgaatgtttcatctctgggaatagccggatgatctgataagacttaagacaatgaaggaaaagaatggaattccattaaaaaaaaaaaagtccatcctgaagacatcatagcctttggtagaataaatggcatcagcaataaaactgtttgctttgtcaaagactggaacagaaaatttaacaagggagtaacaggaaaataggtgcatttcagctacaaaagatcttagcagaacttctcttggttattaagtttactccagaattaaatattgactctgtacgatgtaaatgaataattcataaactgcaaagttatgcatacatgaaaatgaacataagggaaaagataagtcagtttcacacttcttgaagaagtttcattttatgtagggtagtaaaatcagtttgtctttttttaagctttttaacaaccacctccccatcctcctaccctcatagtcccaacacaaagactggatttgcttgtagtgcagtaatcagct

SEQ ID NO: 203005 - DNA, 492 bp, Homo sapiens
taaaaatacaaaaattttagctgggcgtggtggcgggcgcctgtagtctcagctacttgggagactgaggcaggagaatggcgtgaacgtggaaggtggagcttgcagtgagccgagatcgcgccactgcactccggcctgggcgacagagtgagactccatctcaaaaaaaaaaaaaaaaaaaaagataaaaggtcacctttactgagcacaccctatctcagtccatccctacatcagccctttatttcaccagtggggaagctgggacacagagtagttaggtgggatgcccaaggtgggaccactcgtgtgaagtttccacaccctaatgtgagaccctccatgacctagcccctctctttctccagcctcatttcctgattctctcgcttggcctgcaggcttcagccacacaaacttctttaaagtcccttaaatctggctgagcgcagtggctcacacctgtaatctcagcactttgggaagctg

SEQ ID NO: 203006 - DNA, 614 bp, Homo sapiens
ttttatggctgcatagtattccatggtggtatatgcatttatttcacttcctccaaataaaataacagtaaagggatttttaaatgcagaaagccagtgagacaaagggactctataaagcctgtggataattgtgattaacctagaagtccttacatgctgaaacctaagctactattgagagacattgagaagcaaccttattttcatttcagaacctccaactgactcaacagtgagagtgaggctaagaatagtaggatttattagtcatgtgtttaaagtgaacttggatcccagatgcctcctcacactccagtaaaaccagtagtttattctgtggagaatgtgaactagagaactcggttggggataccaaggtacagacagagggtgaaagatgaaatgaaatgcttagtaaacagtaagacaaccctggctgacttcttccacttattgccaaagttttggcagtcagctttacattctctaaacatggaatgggaagatacttccttggagaacctgactgatctatgcaaaagaccgatagacactgatggctggggtctgccagcaggacttctgtgcagtgaagcccacttgttcacaag

SEQ ID NO: 203007 - DNA, 470 bp, Homo sapiens
agaaataataatgttttagagcagagataatacaaaatagagaacagaaaaacaatggagcaaatcaaggaaaccaaaagttggacccttaaaaagacaaataatattggcatgccttacctagactgaccaagagaaaagttactaaattactaaaatcagaaataaaaatgaggacattactactaaccttacagaaataaaaacaattataagaaaatgagcaatgggatatcaacaagtcacataacttagataaaatagatgaattcctagaaacacacaaactaccaacactgactgaaaaagaaacacaaaatctgaaatctataacgagaaaagaatgaatcagtatcaaaaaacttccagataagaaaagtccaggcccagaaagtttcactgatgaattctgccaaatgtttaaagaattaacactaatctctctcaaattcttgaaaaaaaatgaagag

SEQ ID NO: 203008 - DNA, 715 bp, Homo sapiens
tccatggtgctggcgcgggtggcgcgccggccggcggggtctgcggaggcccaggcgtccctggcggggaaggcggcgcttccgggtctggggagcgagggtccccgctctaggggcacggaggatatttagactggggcgcccgtgggcctggtgctgccgcctcgggcgccggcatcctgcgatatcccctctccccggctctgggagggaaccgaggcagccccgcgccaggcctccccggacacctggggcaaattcgctcctcagagcctcgtgttccttccccaaacctgaggtagcgacccctccacccctaagggcggccgtgaggtcgaatcatgtgccgaccccagccggcccttgcaaacgttgtgatgtcggcctccggaggccgcgccttctgatcatgggcacatgatgggggtcaccggctgtgggtgcctcctctgtggagggcccggcctcaccttccaggacccgaatgatactctggggagggggagatggtacagagggtggagctggggctcctgccattagggcaggaaggactttaaacccaaagctgggttctcagccacgagggccacgtgttctggcgagacccctggtcccggctccggtctacaccccctccccagatgtggaccggtggcaaggctggccctgtctggggcttggaagccagtgtggggacctgctgctgggaaga

SEQ ID NO: 203009 - DNA, 919 bp, Homo sapiens
tatggacttggatgatcacttggttaatattcaggctatcttgacagtctccacacccgtgagcaatgtcccagggcagcctgcaggcctgatagaaactccacaaacctgcctatcacggggaagaggccttatccttcgccacataacctggctcgcctctgggttatgggtggggaatcagtaagtcctactgctgttcaggccctgaccccagttcccaggaaagcacaaggctagtgccaccagaggtccaggccctttgctggaggctccatcaactccactaccagtgggctaccagcagctccactagggttcctagaggaggcagcccagctgcagaagaggacaggaggatctacggtgtggcagcagccctgtcttagatcactggtggcctgcaaagaaggctggtccttaacacacaaggttcccccagggcctctggagcacaagacctggcagaagtggtatccagcttagaggtgactgcctcagttttcccagcccatggactgatgggaaggtcaagaccctaatgatgctccatgggagaagaggacatgcttgaggcaaaggccagcccatgcttagcccctggccacgagccaggattgcctctgctgcttgccctgtggccctgcagatgaacttaggccctctccagagcagagcatttgttgcccttcctgctcctttagcctcagggcaggaggctgccgggtttcctcacacgcagggcctcttctctctgaggtcttggccctgagggctatatatgaagggccatgcccatggagactgagatctgacccctgcagtaggtctcagggatgaggaccccagcatcagacactctgggttgcttggggcacttccttccccaacagaagcttcagtcccaacccaggtccca

SEQ ID NO: 203010 - DNA, 568 bp, Homo sapiens
catggccagctagtcttttaataataacaataaattatcagcattggagctctggatgtgggaaatgcaaaacagtcctgctgggtcatcatctcaaacctggactcttgggagagataccctgtggatcattacatcttttcaattccttccactcctgtttcctcaccccatttgtggtactcaggcaacagagatgtcctctggctggaaatccagaggatgaggtgggcacccttggactgtccctggttaaatgtcacctcctctccccaccccctttcctggctctctcaacgcacatggggatgtttaatgacattctccttttcccctcgtttaggccttgggagcagtgatattaactcactcagtccacacaactttccatggagattactgtaatctgttattcccgctgtacagatgaggaaactgagtcaaaataaattatttgcccaaagccacacaggaactgctagagctgagactggaactcaaaccatcaggctctcaaatcctccttttagccaccatgccctaatgcaactcgaaacagaaaaaggac

SEQ ID NO: 203011 - DNA, 424 bp, Homo sapiens
gtatgattggcatacttagatgttttttaaaaatttggaatgagggagttggtcatatagactagctcttgtaaatataattataaaattgtatacgtacttgaagtttgccctaatattcaattcaaaatatatatttgaggctgggcatggtagctgacacttgtaatcccagcactttgggaggctgaggcaggaggatcacttgaagccaggagtttgagaccagcctgagcagcatagaccctgcctctgcaaaaataaaagtaattagctgggcatggtggttacatgcatgtagtcccagctacttggggggctgaggtgggagggtcgcttgagcctggaagttcgtggctgcagtgagccacgattgtgccactgtactccagcctaagcaacagagtaagactctgtctcaaaa

SEQ ID NO: 203012 - DNA, 542 bp, Homo sapiens
  misc_feature (1)..(1): n is a, c, g, or t
ncaatgtctctcacctgaactcagatggaactttatgattgcctcaagaaatggccttgcgtgacttccgggacaaggtgataaaggtattatgacttccacctgcttcttgttctctcttgggcctctagtccgtggaaatcgccaccatgctgtgaggaagctcagattagcccaagctgagcaaccgtatggagaggcccctcaaccctcacatcaaaaccctgtggtgctgtcattgtgcccattttatggatcaggggagaaccaattcacacagctagtaagtggcaatcatgtctacagaaaagcacaaagaaaattatcgtggggaattctcaatctagtaggagagatagaacataaactatgaaaaacaacaatggaaggcaatggttaaataaatattaaagcaacatgacaaggcagtctaggataaagtgccaaattggtgccaacagacttcagcagaatggaggttcttatgctgggctggagtgagcagggagacttcctggaggaggcagaatgtgaggtgttca

SEQ ID NO: 203013 - DNA, 425 bp, Homo sapiens
tttaggtcaaatagtaggcacacgttgaaggctttgaatatgtatttcatgtaacccttcagaacagtttcacacaatcacttacacatcagcaatttccctgaactttgccaatttttatcttttctttttaaaatatctttgccattttgataggtgaagaatgaccttctgctggatgtggtggctcacacctgtagtcccagctacttgggaggctgaggcaggagaattgcttgaacccaggaggtggaggttgcagtgagctgagattgcaccattgcactccagcctgggcgacagagagagactgtctcaaaaattaattaattaattaattaattgaggataccattggatgcattcttttcttacacatattgcaactgtcagtatacaaggtttcctgccagggtatttggatg

SEQ ID NO: 203014 - DNA, 349 bp, Homo sapiens
gaataatagcagttattctcaaagcatttccaaaaattgaagcagagggaattctttctaactcattctacaaagccagcataaccttggtaccaaaaccagacaaggacacaacaaaaatataagccaactccctgtaagccaatatccctgatgaatataaacataaaaatcctcaacaaaatactagcaaactgaatccaacaacatatcaaaaagataaatacattatgagcaagtgagatttatcataagaatacaaggatggtttaatatatataaatcaataaatattatacatcatatctatagaatgaagaagaaaaaacatatcatctcaatagatgct

SEQ ID NO: 203015 - DNA, 228 bp, Homo sapiens
caatggcatggtgtgagccccttgaatgcacagcctctaacacctgtccgtttctaacacttctgctcacgatgggcttgcaaagaaaagttgtaatcggctgggcgcggtggctcatgcctgtaatcccagcactttgggaggctgaggcgggtggatcacctgaggtcaggagttcaagaccagcctggccaacatggtgaaaccccgtctcaactaaaaatacaa

SEQ ID NO: 203016 - DNA, 339 bp, Homo sapiens
aagtactgggattacaggtcagagctaccccgcccggcctcatttgttaaaattctaatactctctaaaacagtgaactcattttctttttttaacccattataaatacatgtaaatgttgcatttatgggtagacagaactaaaagaacaaaatttggcctacttttgagatgcaagatttatctggcataatgcattgaacaggttattattgaagtctacaccagtcacttgaacaagcattcatgaaatgtccatgatacccaggacacaagaatgtttccttttagagtatagagccatgcatatcatctcttaattgtttagatgtgtttcga

SEQ ID NO: 203017 - DNA, 487 bp, Homo sapiens
tctaagatgtcattgatatcactgatgctaggctggtatgatgaaactgtgataaaatcctttctttttatcactatttgctttatattaattgagtgttcttttaattttatttacacatagttttttttccattgtgtatcacttgtgtgcatccttaaaaagaaccacataaacaggagactattattctaggtaaggtaactcaggaatggaaaaccaaacattgtatgttctcataagtgggagctaagctatgaggatgcagaggcatgagaatgacacactgggctttggggactcggggaaagatgggaagggtgtgagggatcaaagactacaaatcaggttcagtgtttactgctcgggtgatgggcgcaccaaaatctcacagatcaccactaaagaacctactcatgtaaccaaataccacctgttccccccaaacttatggaaataaaaaaattaaagaaaaatttatacaaaa

SEQ ID NO: 203018 - DNA, 240 bp, Homo sapiens
gcgcccggccgaggtgtctttctatgtcagtggttctcaaccttgaccgcatgttagagtcgttagaggagcttaaaatgtccagactgtgccccagagcagaatccctcgggatagggtcgatggattaggactttttttaagctgataattttatatctatgtaagatcttctgtttcctgaacttcgtgtgaacaggtcaggcgcctgttggacccctggagcctggttaatgggaa

SEQ ID NO: 203019 - DNA, 468 bp, Homo sapiens
gaaggaaggaaggaaagacgggaggaaaccagacagaaaaaataacttacaaaggaacaaaaagtagactaacaggagacttcatgcatgcaaaaataaaggccagaagacaatcaaataatatctatagattgaggagagaaaagtatttccagctaagctatcattcaagaggaagagtaaataaaaacactttcaaggccaggcatggtggctcacacctgtaatctcagcactttgggaggccaaggcaggcggatcacctgaggtcaggagttcgagaccagcctggccaacatggtgaaaccccgtctctactaaaaatacaaaatgtagccaggcgtggtggcgcgtgtctgtaatcccagctactagggaggctgaggcaggagaatcacttgaacccgggaggcgaaggttgcagtgagccaagatcccaccactgcactccagcgagactctgtctca

SEQ ID NO: 203020 - DNA, 401 bp, Homo sapiens
atgttaggaatgatcaaaatggtatgttacatctacttttccaaaaccggaaaaaagtgtaaatgcattagcacaaagtgagagaaatgtatcttgtcatcagcacaagtaaaaattttgccataggtgtcaccaatgtgttctggctgcctggaatgtttccaccgttgttgggtagtcagatgtttgggatgaggaaaacagtctgtccccgttgccagcagccagcccacacctgctgggctacactgccacctacaaaggggctagaccagtggtgtgccccacagcagaggaccctaaaagcaaaagtgatttgctcttgtcgataccatgtcaagggcccagtcagagggccagcggttgaatttgttgaagacaacattcagaatatactaggg

SEQ ID NO: 203021 - DNA, 571 bp, Homo sapiens
gtagattttattgcaagtttcaaaaggggaaaaacagtggagagcctagaactgacagacccggcttttccttctttgaaacacagcaagaaggaaggaaagacttagggaattttacaccattcagccagacagggctgcagagcggaagcaggggggctcccaatctggcccccgccttcaggacaggcctggggccataaggtggccggccagcaacctagcagggccaaagttctcttctctggaaaaagatggatgctgagctgccttcaacctgcccagggaccagactgagagagcgggagagcgttctgtgcgtgtgcgtgtgaatgcgagtgccgcctcctgcctcctgagcccctgagcttgggccgggatgcccacgctgctcccagtttgcccagcgtcatacaactcccagcacctgtgaacagaaagcaggtgctgcacagacagcaagacagccaacccagcgacgacagaaccaaggcagagtgaagaacagatcaggagggagggaacgggggatggagagaagcatttatgtttacagaagaaaatgtgcaag

SEQ ID NO: 203022 - DNA, 493 bp, Homo sapiens
tgaaaagtcacaaatgacttgaaacactataaatgtgtaggtatttcagtatataagtcacaaaacaaaaaaatattcagttcaaattgttctaaagctcaagttcaaatttccctttctagttgacatttgctgaatttctggaatccaccaattgtctttaaattctaaacagggaaaaactacttccttaggagtaaggaaaaaaaaaactgatgaaaattaaatcactttttaaagcaatcacaaaccagccatcaactatcattactagggaaatatgtagttaggattaggaagtgagaactctttgagtgggaccctgaaggcatatatataaatataaactacacaccacaccttggctgtacttgccagctgaggcttcaaaaattacatggtttctaataagtaaattacattcatatttttcccataatcaaaggatatagatcaaagtttggattcacaatcttgttgccttctgaagagg

SEQ ID NO: 203023 - DNA, 387 bp, Homo sapiens
atcttatcatgttgtccaggctggtctccaactcctgacctcaggtgatccgcccacctcggcctcccaaagtgctgggattacaggtatgagccactgggcaccacatggagctgtggtcaatggggtcgggaaaggtggggagcaggggagtgcaggggaggggcagaggcagagagaagatgctgctacccggggaggtaagaggagctggttggtaggaaaccaattccttgaagaggcaaatgtgtgtgtttgtttgtttttgttttcagacagggagacagggttttgctttgtcacccagggcagagtgcagtgtcgcaaacacagctcactacagcctcaaattcctaggctcaagggatcctcctgcctcagcctccc

SEQ ID NO: 203024 - DNA, 471 bp, Homo sapiens
tggtggcgcttactggaagccgcaccgaggcgtgtgctgtattttaaaaatcccatttctggtcaatttctccacgtaatcagacacccgcagagaaactgcatataactctttgcctcaaggcttttagacaagcagagggccaaaacttgcataaaaaaaaaaacatcatcattaatatcagtaccatctaaattaagagcttctaattgttttaagggaaggtggaagctaaaatgaaccggcacatccaacagagggcactatctgtggaggaccaacaaaggaaaacagagcggaaaatatgggcgcacatgtgcctccagttcatgaagttatttggagggaggggggaagaattaaacttacattattgattaaaaaaaaagttgaaaatctgttagagtgaaaacagccatggtaatctacagaagaaaagggagaatggaaagtaaagatcattcatgtctt

SEQ ID NO: 203025 - DNA, 634 bp, Homo sapiens
gcgcccggcctctcatatgtagtttttaatgagagttaccacataagcaaactgggttctaagtggtgaaatttaaggttatgcaacctcagtttcttttaacccctcttcatccctaaccctggtcggatacttgattgacagtagaccattgggatctctgagctcctgtccttctaacctgattgcctctttaaaggattttgaaaaactatgtcccttgcacatttgtattgttttgagacacggtctcactctgcactccagcctggatgacagatggagaccctgtctcaaacaaacacacaaaaagacatgaaaagtaacttattgaaaatgcatctcttggccaggcgtggtggtttacacctgtaatcctagcactttgggaggccaaggcaagcagatcccatgagatcaggaattcgagaccagcctggccaacatggcaaaatcccatctctactaaaaatagaaaacttatctgggtgtggtggcacacacctgtaatcccagctactcgggaggttgaggcaggagaatcacttgaatccaggaggcgaagcttgcagtgagctgatatctgtcgtgccactgcactccagcctgggcgacagagagataatacgtctca

SEQ ID NO: 203026 - DNA, 311 bp, Homo sapiens
cacaagaacaacagaccgataaggcaaaatatacagtacgttagaggagaaaaactaaagcaggaaaatgaaatgttcatgtctttgatgggaagagtagtgggaaagttaggatggccagaaaagtccctgctgagaaagagatttttctttaatatgaagaaacttttatttgtacatcaaagactctaaaaaatgatgatgttaacagagttgatgtcaagacacaaataggtttgaagttagagatgataaatcactttgtttcattgaaccttccctcaattacgttagagagcatccctggtatg

SEQ ID NO: 203027 - DNA, 594 bp, Homo sapiens
tctgtagggacggggtttcgccatgttgcccaggctgttcttgaactcctgggctcgagtgatccacctgcctcagcctcccaatgcgctggggttacaggcaggaaccactgcacccagccccctgacctcatcttttaagcaaggctgacattgctatgcaggcttgttgggtggacttggtgagggcacgcgtgtgaagtggctggcaggtgcctagttctgttaagcacctgccatatgataacctgaggtcccactgtgtggcagatgaaggggaaacagaggtggaaggcacccgtgccacctgggtggagcacagtggaaggcctggtgttggctctgggcgtcctcctggcaccagcctgaccactctgcctctcttactaacccatctctccctcacgtgtcccctgggaggtgacttctcaaagcgctaacaggctccgctgggtgagtccacagctgtccctcttgtgatcatgggactcagcagcactgaccacgtccttccacgctctctcacctgcccccaactgggggcccatgacttggcattagcatgttccaaataaagtgatactggcaacaaaa

SEQ ID NO: 203028 - DNA, 414 bp, Homo sapiens
tcaccaaagggacctgttacctggaccaggtagaagtgagctactgcagtgggtactgcccatccagcacccatgtcatgccagaggagccatacctgcagagccagtgtgactgctgcagctaccgtctagacccggagagccctgtgcggatcctgaacctgcgctgtctgggtggccacacagagcccgtggtgctgccggtcatccacagctgccagtgcagctcctgccagggaggtgacttctcaaagcgctaacaggctccgctgggtgagtccacagctgtccctcttgtgatcatgggactcagcagcactgaccacgtccttccacgctctctcacctgcccccaactgggggcccatgacttggcattagcatgttccaaataaagtgatactggcaacaaaa

SEQ ID NO: 203029 - DNA, 341 bp, Homo sapiens
actggctgtaatgcagtttactcagagtgccatttttttttgttgaaatgaaatttactctagctttgagaatttgagagaccctcttaagaaaataccacagctggaaatttgagacctaaaagtaatacaatttgagtatctcatatctgaaatgcttgggaccagaagtgttttggattttggattttttcagactttggaatatttgcgtttacataatgagatctcttggggatgggacccaagtctaaacacgaaattcattaatgttttatatacgccttatacacatagccatttaggtaacagccatttaggtaacagccatttagggggta

SEQ ID NO: 203030 - DNA, 545 bp, Homo sapiens
tcctgagttgaaatgtgtttgttcagtagaaatggagttggcctattggccaggctgtcttgaactcctgacctcaggtgatccgccctcctcggtctaccaaagtgctgggattataggcgtgagccaccatgcccagtggcccagccagcccattttttaaaaattatcactttttgtagagatggggtcttgctatgttgcccaggctcgtctcaaactcctgacctcaaagcaatccacctgtctcagcctcccgatgtgctgggattacaggtgtgagccactgcactgtaccgggccttaaatggatttttaaaccaaagatttatgaatgcaaatgaattagtagcatgtatgctgttctttttgaggaggggaccttttttttttaattaatttttgttttttgagatggagtctcgctctgtcgcccaggctggatgtgcagtggcgccatctcggcccactgcaagctctgcctcccgggttcacgccattctcctgactcagtctcccgagtagctaggattgcaggcacgcgc

SEQ ID NO: 203031 - DNA, 1325 bp, Homo sapiens
gggtctccgcctgagggccccggagcagtgcgcgtatcccgggagcggatcttgatgctagctctgtgtgcagtgtaattttatgaagagtcccgccccctccatacgggaggaaacgtgtgtccctggggccctcagccaagcctccactatcttttggcccagacggatttcccaggtcacaagtggctggagacttcctcttgaaaaacatttgccgtcgtttttccctggcagagcccctttgaccctggctaacaaggacagcctgacttggatcccactatgcaggaaggaaggcgactcttccccgcacctcttgctacgattaggacttgcgacttggtgaaaacaggaatcaaaacttgggcctatttctcctgaggtctgcttgcctagaacaattcgtaacgatgaatcttattaaaaagagaaagtcctccccgactttatctttttccgcccagaatccgataaggaagacttgttctggccccctcagctctctgacctcatctaccagaggagagagtgggatcctctaacactcgagccgtcatcccagcactaggggacagtgaccagtgtggctcccgtggccagaacccttctgaagtttgggttgccctgtggtcttcgccttcaaagcaggccgccacttgaatccttctggaacggacagtgttgctgtaaacgccgcggaatagtatcttctaagtattcgtagcttctttcttgagggatctcgggaacgttccgtgtattaaccactaacgtattccaaagttaacttcgtggtaaagtcgctggggaaaaaaataactgctccagttccacaggtgattgaaacaaaagtgatctgtttcccaaacttccttgatggtaaagaatgacttggggtactaattaaaaataaaaataattgcgtcatttccaacctactaaatcggagtctttaagggcaggtcctgggaagccatccatgtaatgggggtcctaagtgggctcttatcggcgagggcggggactcagcgagagggctggcagcgatgggacaaaccccagacggctgcgcggatgcgtttgttcctggagcttgcgagcacttgcaatgcatggacacctccacagggtggtggcctgccaccacgagagcaccagctccgccagcgtcctctccagaggacactttagagcagaaagaaacggacagttcagtcttcccctcagcttgaaggcagcattcttttgcttctctttgagtcaggtaattgttttgtcttccttccactcagtcagcaggtattaaacagcaaccgcattgc

SEQ ID NO: 203032 - DNA, 451 bp, Homo sapiens
attctaaattgacttcacttccacttcaataatacagtgggaaattatagttaataatttattatatatttcaaagtagctcgaagagaagatctgtaatgctaccaacataaagataaatgtttgagatgatggatatcccaattatccccatttgatcattatacatcatataaaggtatcatatatcacatgtatctcaaaaacatgtataactatatcaataaaaatttaaaaaataataaaacagctctgctgaagtcacctccaagagacaacaatcaataaagattatccagtcctcaacttacctggcacacctatgaaatactttctacctcaggtttccatgacatacaacctctttgttttcttccaatctctcaggttagtccttctcagccttgcttgctcatgtagccctctctaatcaatcactgaaagttgacct

SEQ ID NO: 203033 - DNA, 581 bp, Homo sapiens
gctccgcctcccaggttcacaccattctcctgcctcagcctcccaagtagctgggactacaggcgcccgcacgcccggctaattttttatttttagtagagacggggtttcaccctgttagccaggatggtctcgatctcctgacctcatgatccgcccgcctcggccccccaaagtgctgggattacaggcgtgagccaccgcgcccagcctacaaacaattttgaatctgttcctatttagaaattttccaatgcaaatattgctaaatgatctacttttttctttttaaagaaatggggtttcgttacgttgcctaggctggtctcaaatttctgggctaaagtgatcctcctgccttagcatcctgagtacctagaactacaggttactgattttttatttcccttgaaaactattaataaccttatgggagagttcatttgattctattgaaagaaaattcaccaagttttagaagtgattataattccccttgcaaacaaaacccctattatctggaatgttttaattgccagttacatccctttagatgttaacttcggataagaacaaagttc

SEQ ID NO: 203034 - DNA, 254 bp, Homo sapiens
gaaaaatcagagctggggttttgtgcaaaataccaccttactacgaaaatctcaaagacaagcccacatcaagcaaacagtaacaccagtccccatgtgcccatcatgcgctttcaatgagtatcaactctcggccaggcttgtttcatttactgtattaattgttgcaaatctcagatatcaagtcatttgatccagaaatatctcagtgtgaattctctaaaagataaggatcctttaaaaaaaaaaaaaaa

SEQ ID NO: 203035 - DNA, 288 bp, Homo sapiens
aaggatcccccgtgggtccctgcatgctttctgctgcttccccctagctctctgggtagttactagaaactgcacccacttattttcattttatatattaatgttgagggaaaataaaaagttttctgtgtgcaaccccttcattgaatcagggcagttactcatttatgatgtaattgaatttccttccggattctgttctggctcattgatctgtctgtctcttccttcatcagggcccacccagctttaattaccaatttctgttacttttcattatccaaacat

SEQ ID NO: 203036 - DNA, 315 bp, Homo sapiens
tggtcttgaactcctggcttcaggtgatctgcccgactcggcctcccaaagagctgggattacaggtgtgagccaccatgtccggccagatttttgtattttttgtagaagacggggttttgccatgttgcccaggctggtcttgagctcacagactcaaacgatcctcccacttcagcctcccaaagtgctgggcttacaggcataagccaccatgcctggccagattctaattaaaagttgagtgcttactatgagtcctaaattaggatatagaactggcattgatgtagtgagaagaatagatacaaaata

SEQ ID NO: 203037 - DNA, 673 bp, Homo sapiens
agcaggggccagcaaactttctgtgaaaaactagatatttttggctttgcagggcatccagtctattgtaggtactcacctctgtggctgtagcacaaacacagccacaggcaatacgtaaacaaatggtcatgcctgttccagtaaaactttgttgacaaaccccggcctagtgtgtgaccctgtttatgttatgctatcatctatgtgtgctgggtgtgcagggattgaacctctggtaagaaacacaagaaactagatatagtgacctccagagagaaaatctgggtgtctgggggaaacaggaagatttccttttttctggttatccttaagtatctttggaatcatgtattatgtgtttattacctatcaaaagatgaaaaagacaggacttctataagtgatgttttcacagacagcttcctgtgatgatgtcatcctctcactttatttttattttttagagacagggtcccactttattgtccaggccggagtgcagtggtgcaatcatggctcaactatagcctccacctcttgcctcagtctcccaagtagctgggactacaggcgtgcaccaccacacctggctaatttttgtatttttagtagagatggggtttcactatgttgcccaggctggtctccaactcctgggctcaagtgatcc

SEQ ID NO: 203038 - DNA, 434 bp, Homo sapiens
gaagaatggggagttgttgtttaatgtatacagagattcagtttgggaagatgaaataattctggagatggatggtgatgatggttgcccaacagtgtgaatgtacttcatgccactgaactgtgcacttaaaatggtaaagatggtaccttttgtgttatatgttatactcggttgctcccaccttttggctacagcaaataatgttgctatgaacacggaaatagaaatatctcttccagacccagctttcaattattttggatatatactccacaagtagagttgctgggtcctatggtgaaattgtgttatgtttatttcattgcaattaaaattacctgagcaagaaaagaagtgaaagtgtgatgaaaatatgtttgaattatttagaatgtcacttaaaatcatgattgtcttcagcatgctctggg

SEQ ID NO: 203039 - DNA, 194 bp, Homo sapiens
caaaaaaaagtgcaattatgagtcaaaggatgaggacatcttccaagctcttgattttgccagctgcttcccaaaaggattgtactggtttgcctctcccaccagtgacgtatgaaagctccagttcatttcaccatagcttccccagcaccaagtattataatttttaaagatccttgccaatagagtaggtt

SEQ ID NO: 203040 - DNA, 306 bp, Homo sapiens
cttttctaacccatctgccttcctcactcctctttcttccttggttctaccttactatcttgatccttaactaaagatactttcccaagagtcacttttgtgcactataaacttctgtttacacaagagaagcaggggtggggagggaataagaagaaagacaaagaaggaagaagaaatcttttaactctaaacaacttatcagactttttccacttggacatcccaacatcatcttaaattcaccaagtaaaaattaagtttctggcactgttcaaaaattctctctttaactttccttttcat

SEQ ID NO: 203041 - DNA, 392 bp, Homo sapiens
aatagaaaccgacctggattactccggtctgaactcagatcacgtaggactttaatctgttgaacaaacgaacctttaatagcggctgcgttaggtctacctggccaggtagacctaactcccttggtgtgagctgccaccattcacatgcagaggactcacctgtgtttcctgcgggttgggggtaatggtggcatgacagagggcttgaggactgacctagctgcttctccggaattggacgcctgctgactacctgcgtgtatccagatggccattggcctgtgggggtgcaggatggaggccctgcccacatggagctcactgtcctgggtgggagtgaaataaactctaggtggcagaaggaagtggtgcgttggattatcacctgg

SEQ ID NO: 203042 - DNA, 364 bp, Homo sapiens
agtggctaccatttgaattgagcctggtggaatcagcgggattagtcagatgtggctggagttcagcacagattgaagctggctagggcacaaagaaatgtggttgaaaatctaggctttgactaacaatatgtttatgtatataaaatgtgttatataagttttgaaacaatgtatttgctcccctcctaggttttcttttacttcaattccaaaataatatatttgttaaaactctgaaaaggcccagatagtaatgcactttatgtgatgcacataacacctaatttaggttcagtttagtcaacaaatcattatcctcaagcactgagaaatttctcacttgcagatgaggcacgagggg

SEQ ID NO: 203043 - DNA, 678 bp, Homo sapiens
cccccaaaataacccgagctcttgctctgagaaagtcctataattctttctgaaaaaccctctcctctgacactctctcagaagaccccgccttccccatatactcttttggagactttactcagctttctcctcaactgagatctctgaagagtttttcctaaaaacatccctctgtcatcccactccaggaccagtctcagaagaccacaccttcctcagacactttttagagaattttctcccaaattgccctccatcagccacccactcccagcgcttcctgagacttcctcagaactttccctcagattccacttctgacatccccaagaaacattatttaggaccctatcagatttacccactaactttagaattgctatttacaccctctcatttccccattctctttcctctgaagtcaactcagagacctttctcagggggcccccttttcccattatcccttcagaggtccccaacattctccagactcgttgcccaagagcctctatgtttccttgtaaagattcttgagagacacctttccccgcccccttgaaatcccagtgctccgagatctttctttcagaccatttttcttaggtgccatgctcatagacccctcttcccttcagagatcaagagacccttaacaccctccttagagactta

SEQ ID NO: 203044 - DNA, 276 bp, Homo sapiens
tagccgacttctcccctatttctacattatatctaacattatcacatagtggtatacaaacatccatcaatccttcttactgctacatattactaggagatgaactatgtatttgccacagatataaatttacaaaatattaaattcctacccatatggtttacattttacatgcccagaagcaacgtatgattttccataattccgaacatgttgccaaaaaaaaaaaaatgttgtcaaacttctggacttttgctagtctaatagtagagaaac

SEQ ID NO: 203045 - DNA, 169 bp, Homo sapiens
ccacccagataacctcaaataatctctccatctcaacatcctaatgtagtcacatctgcaatgtactttttgccatataaagtaacatgttcacaagtgtcaggaattaggacacgcacatctttagggggatatctttgggggtacatctttcgggggacattgttca

SEQ ID NO: 203046 - DNA, 559 bp, Homo sapiens
ttgtgaggctctgattagcactcagtgaatctacattttacatgtaaaaagaaaggagtagaggaaaagtcaattatgcattcatctcatgctcagtacatctacattttacataagataaagtaagcatgtgaaattacagctatttgggaacaaatggaaggcagtttttggatgactcagttcccaagcttaatttcccttttgccatagtgagtttggggtcctgagagtctattttttattcacagttctcatgactcccttcttgagttcagtaatttactggaatgactcacagaacttagaaaagtgctttgcttactattaccagtttattgtaaaggatacaactcaggaagagcctaatggaagacatgcataaggtaagatatggggtatatttggcacagagcttccatgccttttctgggtgctccatctgatcagtacatcaatgtattcccaacccagaagctcccgagccccatcatttagggattttaatggaggttttatcgtataggaatgatttatgtaatcattggccactggtaat

SEQ ID NO: 203047 - DNA, 713 bp, Homo sapiens
cggagatcacgccactgcactccagcccgggtgacagagcgagactccgtctcaaaaaaaaaaagaaacaagaattttagaatatagatagtttactgagtgtccccatcttgcttcatttcatttttgtaaacataatcagcttctgtcagacttaggctcaagacttatagacagaggaaagtatctaacacagtgagttttgttttctaacacagtgattttctaaagtatctgtggtgacaaaggaaattatctccagtctagttcagaatagaaatgatcataataatcatctatcaaacctcctcattttatataacaggaaaatgagttccagggtctgagagtttagtagtttaaccaggattaaaattaaatcctcttgattttcagtacagtactcttaccatctcacctggtgacctcttttactctgagagcaggagctcctcaggaatgttttacatatgtaatgctcttttccccttagcttctctcaaatcatttaaatttctaaacaaccactaaatgcttacctcttttcaaaatctttctagattgttcagttgctctaaactggattggtgactcccaaggggctatccccaatccaactaattaagttttccattccaaaactgtatatgcccctgacctacatttgatacatatgtccatggccaattcatgtcttgatttgatgatttgat

SEQ ID NO: 203048 - DNA, 692 bp, Homo sapiens
tcgagtcggtaccttccatttgtcacacaggctggagtgcagaggcgcaatctcagctcactgcaacctccgcccactacaacctccgcctcccaggttcaagtgattctcctgcctcagccgccacagtagttgagattaaaggcatgtgcaaccacgcctggctaatttttgcatttttagtagaaacggggtttcgccatgttgcccaggctggtctcaaactcctggcctcaagtgatccacacactcagcctcccgagtagctgggattataggcatggaccaccatgtccggctaatttttgtatttttagcagagatggggtttcgccatgttggccaggctggtcttgaactcctggcctcatatgatccacccgctgcagcctcccaaagtgctgggattacaagagtgagccactgcacccagcctggctaattttctttttaatggccagatacttgattacacctggttacttgttagaccaataaaattcaagcttacttgaaatgaaagctaatttggtttattaagggaggaaattcttaattagcatagaatgccagttacatttataaaactttatttttttctggttgcagttagagtttggttcttctgtaaaacatctaaagcaaatgggtatgttttgtgacttattttcaggagcgtgtatatttctagt

SEQ ID NO: 203049 - DNA, 274 bp, Homo sapiens
gtctatccctgtgcccatgccacattgtcttagttactatagctttataattagggtgaccttgcttcaagtttactgtggaccagtcgccatctctattttagcatttgtctcatttgtcttttttttttttttttggaaatggaccctcgctctgcccccggcctggggaccagttgggttatttggactaattgaagcctcaacctgtgggaatcagggaattctcttgcctaaccctccaagggggctgagattccggcccccccccacc

SEQ ID NO: 203050 - DNA, 469 bp, Homo sapiens
agttattgaatcttctctttctcttcctcaatctcataacccccatgaacatccttttggttgtcaagatctattaattctacgcttaagtcttgcttctttctctctgctcttttctacccttaccctccctgtcttagcttaggccctacatattgtgtcttttaatgaactgatgatggcctatgggtcagttatgtcataccatatttgtctccttggtgtttagtgcttgggatatagtatcattatcgaattgaaacattttaaaattccattgtaaaggagaaacggtcttgtatatatgactaaatatatgtgcatctgtgcctacattcactataatcattatgacttagataagatgtaaaatagatttaatgactaaaatatatgaacaatatatggcaatttatatgtgaattactgtttgaagtatatgtgaaaatatcagtgggacattttaaaa

SEQ ID NO: 203051 - DNA, 502 bp, Homo sapiens
atttatcctaaggaaatatcgtggatacatgcaaaatgttttacaaattgtcacagcattggctacaatgtttaaaatatttaaacaaaaatgcaatattggactggttaaataaattcacatccatatgatgaaataatacttagcagctagttaaaattttgcatgagacatgtagggcatggagtaaagtttctgatttttttaatatatacaagctgggcatggtggatcacgcctgtaatcctagcactttgggaggctgaggcgggtggatcacctggggtcaggtcagtgtttttgaaacactgtcctccccggcttcaaggacgcctgctcccttgctgaccacttctccctgcccacttctaaaacatggatgtctgctgggcctgtccacagtcccgttctccctcttagatatatatacacacacatatatacacttagtgtatatatatatatatatatatatatatatatatatatatatatatacaca

SEQ ID NO: 203052 - DNA, 203 bp, Homo sapiens
ataaaaaaaaaaaaaaaaaaaaaaaaaaacacattaaaaaaaaaaaaaacaacaaaacaaagcaaacatggaaatgtttgttattttaattgttatgatggtttcatggctgtttgcatgtgtcaaaactcatcaaatttgtgtacgttaaatatgtgaaacttattgtatgctggttacacctcaataaagctgttaaattt

SEQ ID NO: 203053 - DNA, 416 bp, Homo sapiens
taaaattatgtccttcgcagcaacatagatgcagctgaggccattatcttaagcaaattaacacaggaacagaaaaccaaataccacatgttctcacttataagtgggagttaaacactgggtactcatggacacacagatgaaaacaatagatgttggggactactagagggaggagtaagtggggagagagaggcaagggttgaaaaactaactattgagcactatgctcagcaccttggtgacaggatcaatcatactccaaacctcagcatcatggaacatacccaggtaacaaaccagcacatgtacctcctgaatctaaaacaacagatgaaattatattttaaaaagaacacgaagcacaacaaattattttgataggatatagactttttgtttcccaggcagatccc

SEQ ID NO: 203054 - DNA, 308 bp, Homo sapiens
tggaaccagcttctagccagctcagggctgctgcagcaaaggaagtttaaaaaggaaacaaaacaacaacaacaacaacaaaacccttactgtgcaggtaaaaaactggttaggagctccaaggagaaaaaaaaaataaagtagcaatgttttcatgaacctacaagatagatcagcagtggctccgggtgtggtggcgcatgcctttaatcctagcacttgggaggcagaggcaggcggatttctgagttcaaggccagcctggtctacagagtgagttccaggacacccagggctacacagagaaa

SEQ ID NO: 203055 - DNA, 318 bp, Homo sapiens
tagcaatgctaacactagaacaccttttttttttcttatgcagtaagaagctttaataataatttcagggtatgggcaaacaagaggtatgagcaaagcagacagtctggcacatcaagggcagctccatgggtcttttctccccacctcatacatgtattctctgacccagaagctggaacgctatattctgaccccagcttcaaggctttttccattttgatgaagtgagtccctccctttaagtcttaaatcttgtataatactcaatgttacctcatctagtgtgttcagtactgtggtttaacttcagatcta

SEQ ID NO: 203056 - DNA, 559 bp, Homo sapiens
cagtctgcccgcctcggtctcccaaagtgctggaattacaggcgtgagtcaccgcgcccagccaaaaagccattattctaattaatgcatttgtgaacctcaacataaaaaaatccagttatataatcacaagagagttatccctttcaaatgtatacctacaaaagatagaaaaatgatcagaaaacttgtatctgtcgattgaaataaattatttttatgcctgacttgaagccattgttttcactacaaataacagttaaccagcaaagtggtccacacctgtttccagaaaacagtccttaagactcaaagactagatgttttcccctctgtgatttttaactcctgagagacatcttttatttcaacattgagacattcaaaacatgttctgtctcctaaaataaaatctcattcatttcttaaaaggcaaatagcttgataagcacactttaggaacaccaggttttacatccaaataactaaaactatccctagatttagtgttcagcctgctgctgcaattaaaaaaaaattgttttttaagttacatttg

SEQ ID NO: 203057 - DNA, 1475 bp, Homo sapiens
aagaaaagcagagacgattggattacagcaattgctcttataactcctctccgcccaccccctcgatgagaagctggtttgaaggactgagtatcaaatccctactgagctctgaggttccaggtgtggatggagtgtggggcccatgtgtgtgtcagtgtgtgtgggtgtgattgtgtgagcaactgggtgtgtgaggttcaggcccagtcggcttgtccagacgccaggcctgagatgccctgggggtgctaagaggggtagagagaagccaaaggaacacaggctttgaaacgaggcagaattgagttggagtcccaaccccaccaacctcacctctcttcactcttcaggcagcgtagaaaacaatgcctgccttttgccaggcatcctcatggaagtgacatcgtctttaaacctgtgtggcaatccctgacgcaccaccgtgatgcccagggaagacagggtgacctggaaacccaactacttccttaagatcatccagctattggatgattatctgaaatgtttcatcgtgggagcagacaatgtgaactccaagcagatgcagcagatccgcatgtccctctgcggcaaggccgtggtgctgatgggcaagaacgccatgacgcgcaaggccatccgagggcacctggaaaacagcccagctctggagaaactgctgcctcgcatctgggagaatgtgggctttgtgttcaccaaggaggacctcactgagatcagggacctgctgctggccaataaggtgccagctgccacccgtgctggtgccattaccccatgtgaagtcactgtgccagcccagaatactggtctggaccccgagaagacctcctttttccaggctttaggtatcatcactaaaatctccaggggcgccattgaaatcctgagtgatgcgcagctgatcaagacgggagacaaagtgggagccagtgaagccacgctgctgaccatgctcaacatctcccccttctcctctgggctggtcatccagcaggtgttcgacaacggcagcatctacaaccctgaagtgcttgacatcacagaggaaactctgtattctcgcttcctggagggtgtccgcaatgttgccggtgtctgtccgcagatccactacccaactgttgcatcagtgccccattctatcatcgacgggtacaaacgagtcctggccttgtctgtggagactgatgacaacttcctgcttgctgaaaaggtcaaggccttcttggctgatccatctgcctttgtggctgcagcccctgtggctgctgccaccacagctgctcctgctgctgctgctgcagccccagctaaggatgaagccaaggaagagtcggagggaggagtcagacgaggatatgggattgggtctctttgactaatcaccaaaaagcaaccaacttagccagctttatttgcaaaacaaggaaataaaggcttacttcttt

SEQ ID NO: 203058 - DNA, 503 bp, Homo sapiens
gtaccggaccggacttctggtgtctgtgtgttgtgtaagcaagttagtgagtggtaactagtagttttttaaaaaaattaaacagaatacaacaaaatatggctgggtacagtggctcactccttgtaatcctagcactttgggaggccaagatgggaagattgcttgagttcaggaattcgagactagcctgggctatgtagtgagacctcaactctataaaataataataaacaaaatatcaatgcattgcacatagtaagtcttgctttttgatccttttgttttaattatgttcaatctctcaatatgaacataagtatggttttactgtaaaacatacttctcacatttggagttgcaaagaagtggcacttctgttctagggtccctcacagcccctatctctgcaaggaaatgaaggatcaattttccaaagattacaaagcaaatcagcttcctccctaggagcctcaactacaccagaagaaagaaaagcccca

SEQ ID NO: 203059 - DNA, 438 bp, Homo sapiens
gtgaactcactctccaacagatggtgctagctttcctctagtgagagctgccatggcctatcctttcttaaaacaaaccatgaagagtgatgtggggatttgtatagaacacattgtaaacatttttctattacctatgtactttggtttataagacatcatcattccacacaatcagttggagaatctatgattgtatccttttatgaatttgatctcttctgctatagccataagaaatcatgtttttaaaaaggtcatttgtgtgataataatgtaactaggagggatcaaactaactttttcagaaaagtcaacttagaaggcctgtcacttttcctgtatattccctaaaatgatgttgggtattgaaaatcttgggggggtgtttctttctaattaatttgccatttgcttagtgttgatctattgtatgtg

SEQ ID NO: 203060 - DNA, 571 bp, Homo sapiens
gctacactgacgaacgtggtatgactactacatccattgctttagttaccacctaaacctggaagcccagctcagatttctctgtactaagctcatgacttatttgacctagtgtctacttgatatccaccttgatttccacaagcacctcaaaataaagatgccctcttccatctccaaacttgattctcctccagtgttacttattttagtgagtggtagcatcatccagttgctcaagtagaaaacatggatattgtccttgatttatccttcgccttcagcccccttcccccatttagccaaccattggcttccattaattctattacagtgagagaaattgtatccccccagaaagatatgtgaaagtcccagcccccactgcttatgaatgtgatcttacttagggtctttgtagatgtaattcaggatcttgagaggtgattatcccggattagggagggccctaaatccaatgactgatgtccttaaacatgaaaggagagggagatgtgagacaaagacacaggggagaatgccatgtgaagatccctataaggctggagag

SEQ ID NO: 203061 - DNA, 407 bp, Homo sapiens
cagcccacctaactgcagatctcaaatcgcagaactgctcagccagaaaacacatcttttgacccacctgaccacaaaccatcacagtacccagccaggagctccgcctggtggcagagcccagccagtggcctcagcaggaaggggcccagagagcaaacccacccaacattagaaaaaaggcaaccagaaaaatccacaacaagctctgcctgccctgagtcatcatcaggcagcccttccaaaatccaaggctatactaactagagaaggcctatccctgctgaacacctataaagaccagaagagggggctgtctgttatgacttttgatatatatattgacagatttgctttgacatatttttacaaatttgtatatgcccttaaaaatgtatgaaagcttc

SEQ ID NO: 203062 - DNA, 589 bp, Homo sapiens
ctgcctatatcaattatttaaaattctgccttcagtctctctcagtgccttactggaactcagagattgggagctatacccctctgaattgcattttttgtgggaatcttccttagatttgtcaatagctgaatgtgatattgtaatataagaaatatatatttggtctttgccctcagttcctgacatagagctcctaaaatcctagtagataggggtgttaggtgaatcttttctcatagttggtctttgaccccagttcctaacacacaattcttaagactgtaatttcctcagtgctaggagcatctgacacagagcccctaaatcccttggaatttcctgggtaatagaagcatcttttgttctaatgaggctcttgatgggctcctggatagcctcaggatgggggctggttgccaggggaaccaatcttgtgattagaaagctggaactttcagccctagcccccaaactccagggaagcgagaggggctgaaggttgagttgattaccaatggccaatgatgtaatcaccaatggccagtgatgtaccatgtccatgtaatgaagcctccataaaaaccca

SEQ ID NO: 203063 - DNA, 279 bp, Homo sapiens
tgttagtgaaaagagccctggactagccaggaggtcagacaacctgagtgctagtctcgctctgtcattaatgaaagcttctatttgttgagcatttatcttatacatgtattctcctctaactgtttttttgtttatttgtttttgagacaagagtttcgctctattgcctgggctggagtgcaatgtctcgatcttggctcaccgcaacctctgcctcctgggttcaggcaattctcctgccccagcctcctgagtagctgggattacaggtgcctg

SEQ ID NO: 203064 - DNA, 475 bp, Homo sapiens
attgaatgcaaataagattttagcttccatctgcctttgtcacacaatagaagaaagaatatatgaatttggtattattatggccaaagcaaaatgagactatcaagttcctaaaatagaccacagaatttagaagccatcctatcctgcctgggaaatcatgtcttcattttggtggaaagctcgtcagtttagtaggctccgaaatagaatagcagttgtcactcaaagattttcagattatcttcacctctttggcctcagttcccttatctataaagtgtaaggtaggagacttagctgttctctaagaaacattttagctcaaattttttcttctaggaaaatctatgaaagggctccaagtcagaataaaggtcagagtaaaaccaacatttgcagaataagtgttctctaaattataggctatgaattattctgcaaaaatatatttagtagtttgggtcattgctgt

SEQ ID NO: 203065 - DNA, 431 bp, Homo sapiens
agctaacatttattgagtctttacttttgtgttaggcattgttcttagcactttacctaacaaccctatgaagtcaataatattatatcccagatgaggtgatcaagacatagagaaggtaagccacttatacaggttacacagcttgtaagtggagaggacagaatctggatccaggcaatctgtccccagtgcctgagctcttcttaactactacccatactacttcaggccactggaaatgacagaatagaggagcagttttggaagtcaggcagacagctctactatttattgctgtaaccgtaggaccaattcaaaccaagtaatcactgcttaagttacaggtagtgcagagccaaagttacctggcatgctcaggagaaaagctttagcagcctaattgttagcatcaccagcctggctgacca

SEQ ID NO: 203066 - DNA, 678 bp, Homo sapiens
tatgttgctctagcacagtacagtcatcctatttctaggtatttattcaataaaaatgaaaatgtgtctacatgaagacctgtatgcaaatgtctatatagtagctttattcataacagtataaaactatacacaaccgaagtatccatcaactggtaaatggacaaacaaaatgtaatacatgaatgcacatggaatactattcagcagttaaaaaaaagaaggaacagttgatacatgcaacaatgtgaaagacttccaaaagcattatgctaagtgaaagtttccagataatttaaagatactgaatgattccatttatatgatgttctggaaaagataaaactatagggacagaaatcagatcagtggttacctggggctgggggaggaaatctactacataagggctgcgggcatttcgtgaggtgatggaactattctagatctttggtaagggtaaattttactgcatataaattataaatgtgacttttaaaacaaattaattttcttaaaaagtacatgttatggcattattaggatgaaacagagggagtgtccccaaaatgaataaatattacaggcaaaatatactaagaagaatgtgtacatttctcgttttgatacttgactcattaaggaataatttgcagaattggcataaattaatataga

SEQ ID NO: 203067 - DNA, 236 bp, Homo sapiens
agtattttgctcttttccttagtcttatctgagtggcaggttttattttttaaaatctagatgtcaagttgaatgtgtaatttttttatacactgaatctgaaatatattgggtctactccttgccgtaattccttttagttttcagtggtgaaaaaggcaaaatttgtaatatagctattgctattccttattctgaaattcctgttcatcctaggaaatttcagcaaatgcaga

SEQ ID NO: 203068 - DNA, 289 bp, Homo sapiens
atcttgggtttgggatgctgaacttgtatttgcatgtgtggaaagagatcaggagtcaaggcaggagtcaggaaatgtggcttctattcttggctaacttgatggtgtagggcagatcacttcactagcctaagctgcagtttgccactgttcactcctgagggtagctggagaggcttgagaacaaattttaacacactacatagtgcagacaccttttcatctgaatttttcctttgaaggatgagtcattcttatgaaacaattttcttttttttttttttttgag

SEQ ID NO: 203069 - DNA, 422 bp, Homo sapiens
cgcggccatgagcacagcttccatcaagtcggcggtggctccccatgaaggtgcagcaggggtgggggttccagctgctggcgggactatttcttgagtgctgtttggatgaatattcacttaatattgtttgctatacgatgcgtttttgtgtgcatttctctattatatctatgaggttaaaaaaagcaagaatgaatctcagttgtgtttcaccagtgtgtgtgtatgtgtccttgtgtgtgggaagacattctctgaggcagcggttatggactgaatgtgtctcattgaactcagtgtgtagaaggccaaacccccaggggatggtgctgggaggagaggcctttgggccgtgattgagttagatcacccgtgagggtggggctcccacgatgggataggtggcctttgggcggtga

SEQ ID NO: 203070 - DNA, 367 bp, Homo sapiens
gaattgctggatcataaaataggtgaatgtttaactctggaaaacaatgtggcattacttaataacatggttgtgccaaatacactttcacccgccctatgtaagagatcctgccaaatgacctcccaacactcagtattattcttgatatttgccagttgaacaagtgtaaaattatatttcattgtggtcttaatttgtattttcatgtttaagaatgaagttggcatctcttcacatgttaattagctatacatatatataaaatatattttactgtgtaattcctggtcatgtcttttgcctatttttctatttggttctttgtcctttcgtacttatttggtacaggttctttatatatgtt

SEQ ID NO: 203071 - DNA, 333 bp, Homo sapiens
gataacagtcttgggctgactcagatttctataagtatcccccatattttgggaattcccaggccgtcttctttctttctcaagcttgtcttcctttgtcctggaaacatcttcatttgttacctctgttttggagtaaatcttccttctcacccctatcacacacagaagaaactcagcttgttgaaggatttttatcacaaccaacctttctaggggtggagaatgtgttccagtgaatcttctccctttacacaatcttatggctctctccttgctgttccttgtcttccgcaccttctctccctaatcgtcttctgggagcccccaact

SEQ ID NO: 203072 - DNA, 415 bp, Homo sapiens
atcgtgcttagttgtgcttgctcatcgtcctcactgtgtcctgtgccgggatatgagcacaagaatgagttccccaacccacccacaggaacagaagctcctgtgctgggaatcctttcagacctcagcccacctatttatctcttcacccttaaaataccctttgttagctaggcatggtggcggaatgtcgtgtagtcccagctacctgaaaggttgagacacgaggatcgctatgagatctccccagtaattgggaccacaggtgtgcacctgaccaccatgcccggctaattttgtatttttagtagagatggggtttctccgtgttggtcaggctggtctcaaactcctgacctcaggtgatccacccgccttggcctcccaaagtgctaggattacaggtgtgagccac

SEQ ID NO: 203073 - DNA, 162 bp, Homo sapiens
tttatttctgggctctctgttctgttggtgtatgtctttgtttttatgctagtatcatattgttttgattactgtagctttgtaatatagcttgaaattaggaagtatgatgcctccagttgttttttttgtttgttttttctcaagattgcttaggctatt

SEQ ID NO: 203074 - DNA, 591 bp, Homo sapiens
attttattgaggatttttgcatcaatgttcatcaaggatattggtctaaaattctctcttttggttgtgtctctgcccggctttggtatcaggatgatgctggcctcataaaatgagttagggaggattccctctttttctattgattggaatagtttcggaaggaatggtaacagttcctccttgtatctctggtagaattcggctgtgaatccatctggtcctggactctttttggatggtaagctattggttattgccacaatttcagagcctgttattggtctattcagagactcaacttcttcctggtttagtcttgggaggttgtatgtgtcgaggaatttatccatttcttctagattttctagtttatttgcgtagaggtgtttgtagtattctctgatggtagtttgtatttctgtgggatcggtggtgatatcccctttatcattttttattgaaaatgatcatttttattgaaaatgataaaggagatattaacctgttaactttcagccactctgttatcacagtgggaacctctccactgtcacctaataattcatcacagtgggaacctcttcactg

SEQ ID NO: 203075 - DNA, 1372 bp, Homo sapiens
cttccacatcgtggaagctttgttctttcgctctttgcaataaatcttgctactgctcactctttgggtccacgctgcttttatgagctgtaacactcaccgcgaagatctgcagcttcactcccgagccagcgagaccacgaacccaccagaaggaagaaactccgaacacatctgaacatcagaagggcagactccagacacgccaccttaagagctgtaacactcaccgcgagggtccacggcttcattcttgaagtcagtgagaccaagaacccaccaattccggacacaatttcttggctctcagtggcttccatggaagttctgcaatcaaccagcaggagaaccgcttaaacccaggaggcggaggttgcagtgagccaagaatgcatcactgcactccagcctggaagacagagtgagaccctgtctcaacaaaataaattaaaataaaaaataatatatttttctaactatcatcccttttccaaatcaggaattccccttaagttttcctcaatttccatggcaatatctttgcatagattcattaagaatttgtcctttttaaataaaaaatataaagggaactattcattaggcaacaaatgccttgtctgaaatatcacatttgagaatgctgctcatttaatcagaaaggtacgctactttaaagaactgaggtccactttctggagccaaaaactcataaatccctctcagaaaaacctgatttgctttgtagggtctcaggtttagagatgctgaaaaagatattttcgttgcagacaaaggacctcagagtatttggagaactttgagaagagaggaattctcccaaatgtataggtgtcacaggtaaaatacagtcgagagattttcttggactttaattccttaaatcaggatagcaaataataggggcttttacaaattcaatctgtttccttacaaaaattttcagcaaagtaatttcagcaaattaattttcagcaaagtaaatgtaagaagacttatgtgaaaaattaacattctccatgtatctatgaagccaaacctaataaaaccagctttaatttgtgctcaaaaaaaaaaaaaaaaaaaaaaaaaaaaaaaaaaaaaaaaaaaaaaaaaaaaaaaaaaaaaaaaaaaaaaaaaaaaaaaaaaaaacaaacgaaaaaaaaaaaaaaaacaaaagaaaaaaacaacaaacaaagcaacaaacaaacaagaaccaacaaaaaacaaacaaaacacagcaggccgccagccgcacacacacacgacagcacccgaccacacaccacacacacaccagcccgtgccgcgcggaggacgacgagacgcaacgcacccaccggaccaccag

SEQ ID NO: 203076 - DNA, 453 bp, Homo sapiens
ataggtgtcacaggtaaaatacagtcgagagattttcttggactttaattccttaaatcaggatagcaaataataggggcttttacaaattcaatctgtttccttacaaaaattttcagcaaagtaatttcagcaaattaattttcagcaaagtaaatgtaagaagacttatgtgaaaaattaacattctccatgtatctatgaagccaaacctaataaaaccagctttaatttgtgctcaagaatattatttcactgagttttcttaaatcacaaaggggagactgttatgaaaactgatataaaataaaaaaaacaaggaagaaaagtctactagatgtctctaatggaagactgcatttttagaacatatccttataggcgattctagcctttctctgctatttggctctcacactctttaccgtgcagataattcacagcaatgcaaaa

SEQ ID NO: 203077 - DNA, 359 bp, Homo sapiens
cctgatgatgctggaagacagtagatagatgattgatagatagatagatagatagatagatagatagataattgagatagataatagatagctgatcgatatagatagaagatagatagatattcatttaaaccttattcatattcctagacagaagatactgtttttgacccatctcacaaatgaggaagctgaggcacagatttagcagcttattcaaggtcacagctaaggaatgaaattagaaggttgtacccaaacagcctccggcttgagccaagcattttcatgtaagggagtaggtctttgaaggttggagaaaagacagggacacagctctcacaggatccctctggaaa

SEQ ID NO: 203078 - DNA, 703 bp, Homo sapiens
ccttccagtatagaatcagacatggctatggctgtcatgactcatcttgatcttttatgtcattgatatgtattttttttgagacggagtctcgctctgtcacccaggctggagtgcagtggtgcaatctcggctcactgcaatctccgcctcccaggttgaagcgattctcctgcttcagcctccggagtagctgggattacagacgcccgccaccacccccagataatttttttgtatttttagtagagacagggtttcaccatgttggccaggcctgagctcaagtgatccgccatcctctgcctcccaactcctgatctcaagtgatccgccatcctctgcctcccaaactgctaggattacaggtgtgagccaccgcactcagcctcattgatatttttggtgaatgtagccacccccaaccccaccctgtttttttttttttaacagaaaacaactcagtttgatatttcctcatatttagaatcagtttatgtgtttttgcccataatgacttgatatccatctgccccctcattgatagtggtaaattttgatcacttggtcaaggtgtccaacttctctgtatatccccctacctggaacttataaccagtatatgtagactttcagaccatgcaaatctcttgcctatgaaagtgtcccgttaaattagcatgcattgatgtttcttacctgc

SEQ ID NO: 203079 - DNA, 810 bp, Homo sapiens
tagtttcagaaagttagattaaatcgaaatgagctggtgccatcaagtaggtgctgtaaggacagagaaaaagcttcccttctgtcctctctgaaggttccctgaaatgactgacagtagacagattaacaggagaaaaggcatagaaatgtattaatgtgaataagcataggacccacataaaataagagactcaaagaaaggccacatggttgaagtttttataccctttccatggaaaggagggaaatggggaggtgggtaggcaatcatgattagtagtaagtgatttctaggggaaatgaatggatccaggaggtagacgttaccttgttaataattcttaggaactgaacaggacttgtaagttatgggaaggtgaggggtagaactcttactgtgaccaaaggtttcgacaacttttattctcttctctggtggttaagtctttcctggttatttggggaaagcaggagatcagaaagtccctggctctgaagcagcttctaaggcatgcttgtccagcttgcagcctgtgggccacatgcagcccaggacagctttgaatgtggcccaacacaaatttgtaaactttctgaaaacattatgagattttttgtttgtttaagctcatcagctcttgttagtattcatgtatttatgtggcccaagacaattcttcttcttccagtgtggcccaaggaagccaaaagattggacacctctgttctaaggccttccagttgtctttaattcaaaatgctcaggccgggcacgatggctcacgcctgtaatcccagcactttggga

SEQ ID NO: 203080 - DNA, 399 bp, Homo sapiens
atgcatagattgtgccccaggcccattatagccagatgatccatatctaatttgatggtaaaaacaccattttcacaactcatttatttaattcttccaatttatgtgcagcaagtttagatgggattaactaaatggaggaaatatgggcaagtatacttctcttcctggtctattttaagatcttcataagatcttaaaagacttgtttaataacttactccaatatttggaactggtgatcctgaaacagtctaggatatactatgaatgactcagatactattaagatggaatggttgggatacctgggatactaagtgatgatgacaaataccttcaaatatcttcaaatgtttagaaatatatatcctgctttgtctaaaaaaaagtaaatcc

SEQ ID NO: 203081 - DNA, 452 bp, Homo sapiens
agcaaattgttgtggtgaaggagcagaagtaaccatgaagcaacggagaaagataggtaggtagtgagaggagaacacagacgccatggagaaggagaaattctgtgagtgatgtcccggtgcacagtcccgaaaattgtctgaattcctggtaatttacagatccaaccccgaggcatttggaggatcgcaatatgccaccaccattgtgtgaggtgccaccaccagactgcagaggttcaagacccacattcaaacctcagtttaccacaccacctactagccttctgacttgggcaagtcatttaaactctctgagcctcgctcccctaatctgtccaactggcatcatgatagaacttccttcataggattgttgaaagaaccacatgaaatctaagtgctcagcacatagtaagtaccaataaatgagaactattattaattaatac

SEQ ID NO: 203082 - DNA, 253 bp, Homo sapiens
agaatctttcattctacacacaggtttctttgggggttctgttttatcttttttcatacactgcctaccagagagaacaagactggcaaaaggactctgtcctcataaagctcagagacgatgaacagataaacaagtaagtgaacaaaaatacttcagataatgctaaatcctccaaggagaatatgatacagtagatgtaatgggaagctcctttagactgagtggtcagagaggacctttctggggtggg

SEQ ID NO: 203083 - DNA, 560 bp, Homo sapiens
aaaaaattaatgttgttatctgaaaacctaatgattttacggataataaaaatggcaaaaataacacatttttatctctaagtgcttgagcaatacgttaagtatcccaaagtattttaggatagacatttgactaagtacttgcctgttatctttcagaaaaaattaaatatgattttatttgtttccctaattatactgttacagttttttttttaaactgtttttagtttcttaactgttagtttttttcccaaaactaactttactgttttttggagccatctatttaatggaaaatgcaaacctattaatgtaatccaatggaataagacagattacatgccaggaaatggaaagaatcatattgtctagaaagcgattactcctgaaagtttttcactttttgttggaagatggaagagtactagtcatttgaaagcaactgatttctttcctgaattccagtcttgaaatatgcattcatcaataatcaaataaatattcatgatccgtattggtgactcatttgatattttcagtggtttgttgtttgctta

SEQ ID NO: 203084 - DNA, 446 bp, Homo sapiens
gaggcaggagaatcctttgatcccgggaagcagaggttgcagtgagccgagatcacaccagagatgcactccagcctgggcaacagagcaagattccttctcgaaaaacaaacaaacaaacaaacaaaaaaacagttcaaaagacacagaatggactggtggcgatggcccacgcctgtaatcccagcactttgggaagccaaagcggaaggatcgcttgaagtcaggagaacagcctgggcagcatagtgagacctcgtttctacttaaaacaaaaacaaacaaacaaacaaaaaaacaacaggtgtggtgacttagacctgtggtcccagctactcaggaggctgagatgggaggatcacttgggccccagccgttgaggactgcagtgacctatgatcgcaccactgctctccatcctgggtgacagagtgagaccctgtctc

SEQ ID NO: 203085 - DNA, 402 bp, Homo sapiens
agatcacttgagtcagaagctcgagaccaggctggacaacacggcgaaaccccgtctccactaaaaatacaaaaattaaccgggcttggtggtgggcacctacaatcccagctactctggaggctgaggcatgagaatcacttgaacctgggaggtggaggttgccatgagctgagatcgcgccattgccctccagcttgggtgacagagtgagactgtgtctcaaaaaaatgggggggctatgggggcacttagcgtgcgagtaggacaggggcagaccagaaatacctgcaaaacagtaatagctatcactgagccactaccacaggcccaacactttacaaatccaatgttgggatcccactgataaaccagtgatgagagataaaagggatggatgaa

SEQ ID NO: 203086 - DNA, 300 bp, Homo sapiens
tggggtacacatgcaggtttattatataggtaaacttgtggtttagacatttttcaaagccctaatacatagaaatggagctgtgacacataccatcatgactcttgaatgaccttgtcatgggaacactgtgaattggattttacatctgggaattcagtgttcctagatttaagcaatagggggcatcttgggtttgttcttttcacatatttttgtagtctaatctttagggcagttctaatgaaagaaaattctgctttgagcctgctgtgcaaattagccatatggtgaagtgta

SEQ ID NO: 203087 - DNA, 353 bp, Homo sapiens
ggcaatgttttcttggatataacaccaaaagacaggcagcaaaagtaaaaataggtaaattaaagtacttcacaattaagttttgtgcatccagggatacagccagcaagcagagtgaaaagcaccctatgaaatgggaatcttatatttgatcagaggtcaatatccagaatatataaagaactcctacaacaaaacaaaacaaaaataaccccattaaaaaatgaagtacttgaatagacatttctccaaatacatacaaatagacaggaagcttatgaaaagatcaacatcactaatcattagggaaatacaaagcaaaaccacaatgagataccatttcacacccatta

SEQ ID NO: 203088 - DNA, 301 bp, Homo sapiens
gtttctcttgtcactctgcaatcagaagccatggaagttttgtgcagggcagttgcctgacctgacacacattgttcgaggaagaacctgattgagtgacgtgtagggtgttgggatgggaaggaggtctgggtgaaggcaggaggtaggacggaaggtgggtggcaccgtgcaggtgagaggagttgcctcatgtaacagctcatagtcatcaaggtcgctaggttggaggtgtggttagaagacagacatgacgagatgtgctgattcgaagtctccatgcaggcggagaggtggacag

SEQ ID NO: 203089 - DNA, 1329 bp, Homo sapiens
ggagtctgaggggagaaatgtttgggggtgatgaatatgttcactatcttgatggcagtggtggtcctacaggtgttgtataagtcaaaacttataaaatgtcactttaaacatgtgcagtttattgtatgtcaattatacctcaataaagctgttaaaatgcatttattagacttcagactatatacccaatatcatgcattaatatattaatgtatggctgtaccaattacatttatttagaaactctatattttctgtatttgtttttgtgttataagttaaatttttaaagaatttttgagtccctaccatattcctacattgtactgtgcatgtactacagaagctacaaagtaagtatgtaagacatttattcccttcacggtattgatagccttcctaggaagacaagactttttaaacaatgcaatatttccagtatggccaaatgtctatatacaaacagttaagtgaactgggaagtgagagtgtgtaaaactcccaccgcatatgtgtgctaaatgttgtgtggcaggccatccctttcttcaaggagcgtacagctttatggaggaaaagaaaagccattggatagaatgtgataagtgacctggtagataaacggaaaactgcaccaagtgttatatgagagtgcacgggagatacctcatggcaaacttgatttgtggagttcatggctgagctgagtcttgaatgacatgttaggttttgccggagaacggctggtgaagaaaattactcgcagtaaacaaagcaatgtgttcaaaggcatagaaggcatagcagatgtactttgtttctaacacacctgaagattatgtctttattactaatggctcagaatgtgaggtttggaatggcacgagacacagacggggtcaggtatagatcgtatgtgttaccttaaggaaactgtacagtatttgaatggcaaacgtctttgcagcatttggagcagggaaatgacaagatcacacttccactgtgcatgtgtgtgtgtggtggggattgaactagcccttaaataacaagtagactctgaatggaaagaagggacaaaggaggtgccccaggttaggactctatacaccagaaaggcgactttcaaaagtccttccacctgcctccccttatcaagtgcctggcactaagaaggcaaatgcaaacacataaagactgacttactaaaaacaattaggccctggcattagactgccacgccaaggaaacggagaagaggacaaatatttactgagtatctactgagtaaaagacttataaaaaaatacttttttcttttttttt

SEQ ID NO: 203090 - DNA, 352 bp, Homo sapiens
aaccatttatcgtgtgccttaccatgcttatattttacttgatcttttgcataccttctaaaactattttagccaatttaaaatttgacagtttgcattaaattataggtttacaatatgctttatccagctatacctgccccaaattctgacagatgcttttgccacctctaaaggaagacccatgttcatagtgatggagtttgtgtggactaaccatgcaaggttgccaaggaaaaatcgctttacgcttccaaggtacacactaagatgaaagtaattttagtccgtgtccagttggattcttggcacatagttatcttctgctagaacaaactaaaacagctacatg

SEQ ID NO: 203091 - DNA, 203 bp, Homo sapiens
ataagcttgattcgcattgttagcaacactcttcaaaaacttaaagcaattttaaaaccacaacaaataaagcatgcaggaaaaataaccatgcctacaatgtggctctgttgtgaatgatgtttaaaataacatatgtacaggcaagatattataaatactaaatgctgatacgacccgaattaggaatttttttttttttt

SEQ ID NO: 203092 - DNA, 824 bp, Homo sapiens
tgaggttgagttgatagtatgtaacctaaagtccctaccataaatcatattggtagacttatctgtcatggcttaagtcccctagtaaatcattatcaagaggatattcaaagagtttaacattacttcctaagagctaagggcaaatgccagacctctctttgggcaaggttaaattctttactacataccgtgctagttgaagtgttaggcctaactaagaggaaggggaaggggactagtttggagttttttgaactaagaaaatgtattttctgcttaaaaagttaaatatatatatatacacattgaattttttttaaaaagtagatccaagttgatagagcttccaggcacctgagagatgcaaactcagatcatccctggtggaatatacctcaaccctggcttcaaagaattcttaaagatagattaccaacatatgtgagcttataatagtaaccaaaaaaccaaaaaaaaaatcacaaaagaaacacggttctgtgaaccagcatcaacagaaacaactgaatcagacccagagaaactttaggtattggaattattgaatatagaacataaaataaatatatttaatgaaatagaaaagtaaataaagaccaagaataagaaatgagagaataaagcaagactggttggtttgtaaaataagcaattaaattattttagaaataaaaaaataatgattgaaagaaactcagtggaggggaacttacagttctggtgatagctgcgtaacaggaagctgatttatgctgctgtcttaagtgaataattggacaaagtatatgaaaaaatgtttt

SEQ ID NO: 203093 - DNA, 416 bp, Homo sapiens
cccctctgagtccaattattcttttattctaaggtgtttatactgagcacaaagtcatatataataatgtccaaagagcttataatagaaaaagaaatgtctaaatatagaggaagatgacactgtggggaaaaccacagaacaaactatccaggtcatccacaaatacatggttcctaaatatccaacaataaacaacaatgatctcatctgaaccaaggttcttttatctatccagtgaaatagtcattaaaaatgaggcaatcaaaactcagaaaaaaacacaggagttaatctttgtggccacggattaggcaaaactttcttagatatgacaccaaaaacacgagataaaagaaaaataagataaattgcacttcaaattaaaagttttcatccttcagtaataacaccat

SEQ ID NO: 203094 - DNA, 615 bp, Homo sapiens
ctgctctgtgggatcatgattagaccaataaatcaaactggttaccagcctaagcttttaagaatttgacaatcacctacaccacccacctcattttgtaaatgaggaaagtaaggcccagaaaagcaaagtgactagcccaaagccacacagctagtgtaatctcaacactcaaaagcaacagttattactaaactgtactatgtataaatgaatcactaaatagcctcttctattttattctattttaatatgccaaaatataaaataaatggtaaaatttgaggtatgaaattttcaaagttttccttctctgacgatataaaaatatatcatcataagcatttacttaaatgtttttgctcatacttgattcacaccatgtataatggatttcaagacgtatatgtgtctatgtatgtatatgtgtatgtatgtatgtatgtatctatctatcaactcattcaacatcccacactatgtctttcctggcacatattatgagaacattgaatatttgttgagttaatgaattttaaatcatatagatttattgccaaattatactctaatcccaaacaattaaaagggagattttcttaaatgttttttaaa

SEQ ID NO: 203095 - DNA, 554 bp, Homo sapiens
aagaagaagttggttataacttgaagatccaagagcaaaaggtaagctagagcaagttgtcatccaaagacagcagaacaagggccatgtttccaataaaccaggtataagcgccagcgaaggcaaatgaaaccccatcctaacagaagataggcccctaaaaccccagggccagcactgtggggacacttaaaattggctagccagacaatttctggcttatgtcaaaagaaccaacaggaggattcctatggggatacaccagtaatccataaaagcatccaccacccactgacagcgatgaaaatggtactggtcatgtatgaccttttctgctttttctctcatctctgaacccctgcttcccaaccctgtggaaacctatggcagttagtgaacggaagagaagattaaatgaggggagacagaagaagccaaccatgcatcctctcgtagagcaaattccaaggattaagttggcttagcccagtgcttggcacatagaagacattccatcaatgttaactgaatacattcttctttcattcttcatc

SEQ ID NO: 203096 - DNA, 1278 bp, Homo sapiens
attatgggttactggagagaggggtgaataatcagagaacaggttttttagggcaatgaaactattatgtacagtactataatagtgcatacatgtcattatacatatgtcaaagatggtagaatgcacaacatcaagagtgaaccctaatgttaactatggactttggttgataatactgggtcactgtaggttcattgatggtaacaaatgtaccattcttctgtgggagataagtaaatcaataattaaaaaatcataggactgtatgatcagtataataatttgatatatatgtgcagactgccatggagtaacagaagaggtgcacctaactctatcattagtggtcacagaaggcttcctggaggaggaaggtttatattgagccagggctggagaagaagggcttatgcacagttgtggagatgagaaagctaagccaaagcacactgaaggaatggcatgtctgttacagcaggcaagtcccagaggtggagatggaggttccttagaaactaagtccattctgtaggtgtatgggagacagggcagatgagtattgagggacaggtcctagagggtccaaggatcccatgtaaggaactgctggcctggaatataaatccctacttccctttgcatctgttccagtgcctggcaaagttatgtaataaatgttttcagataaaatgaaagtgctgggtaccaggaaggaaatcaaggcagagatttagccttggagaaacatgactccttgcttccctgcttaccctgtccagacctccaatattcatcttcgacatggtctccttccctgattgacataatctgggtcaggggcctctcctacacactcctgacactttctgtgatttccccagcatgggaatgggaatgttcacaccttattatatctgatcacatacctgcctcctctcttcagctttgagctccactgagggcagggacgatgcagccccctctggctagcacagtgctgctgagcacatactcggcccttgctagaagtgtgcagtatgaatggacaatttcccatggcctagaaaatttagtccaccctctaggcctggcctgccacaaaaatgatccagttttgaaaattacttctgtagctcttgctccgttcatggtgtccttaaactcccactcaactccaagctaactagtcttttccaaataagtcttaacgttcataatcatagcaggagctttgcttttactgtttactctgcttggaaaattctttccctattg

SEQ ID NO: 203097 - DNA, 210 bp, Homo sapiens
aggagctcattgtttgcgtgttaacagtgggaaatagttaaggaggtgggaaaagagctacctgtagaaaggtggcctaagtccctggagagctgagcacaggaccccagggcacacacccccttatgcttcccctgtctttcatcttgaaagcacctgcctgtgaacctcaggcttggagggaatctggatgttttcccaggatctacc

SEQ ID NO: 203098 - DNA, 486 bp, Homo sapiens
ccagcatcacatggctgtaagtgttggcaccaggatttaaatcgaggctcatggcaagcacccggttttccaaccaggaaagaagtctctccatcgtccccactgactccctcaatgccgcttcttggagtgctcatcctttggatctctctgtacaccctcaaaactgtagcatttggaattcacgttttggggttccatgataccactccgccagctctcctctaacccctcctcaggttgtcttagtgagctcttccctgcatctacctgctgcatgttggcttctcacttgctctggcctgagctctcttgtcttgttctacgtgtgctctctggacaagcttacctgctctgattctaaccacccccggaacactggtgacccaacatacacatctgcagttcctaccatgctcagcatgtcttgaaatgagctcatggccacctttttcatttcaaatctattctgcaggttggttagca

SEQ ID NO: 203099 - DNA, 256 bp, Homo sapiens
gttaagtaactgagcctggtccatctgctgtggcacctcccattcttgggggtccttagggaagggaaagggaagcagacctcccctgaaaatcatggatgcggtgccctgagtgcctggggtggcttggctggctggtgcctccccttttatattctcatcagctcccacaattaagacaggtccctgagtccccagtggcaactaggaagctcccagttttcttttcttttcttttttttttgtgagatggagt

SEQ ID NO: 203100 - DNA, 327 bp, Homo sapiens
tagtatctatttcctaagaaaaggaaagcaggaaaggaatcatgtcagaaaaatcaactgatggctgggcacagtgcttcatgcctataatcccagcactttggaaagctgaggtgggagaatcaatcacttgagcccagtagttcaagaccagcctaggcatcacagggagaccccatctctacaaataataataataaaaaattagccaggcatagtggcatatgcctgtaatcccagccacttgggaggctgaagtgggaggattgagcctgcatggtagaagctgcagtgagccatgattgtgctactacactccagtctggg

SEQ ID NO: 203101 - DNA, 773 bp, Homo sapiens
ccggggctcaggtgaggggcgcggcggggtggcagggcctcccctgctctcactggctgtgctggttgcaccctctgggagtgagtctcgtcgcaggcgtcagaacaaggcagtttttgcagtgctgtgtgaagggctcgtgtgttcatcctgggaatgacctcgtgagcactcactgtccctgaggactaggacagctcctagctggaagtaggtgccagtcagtcagggtgggcagcccacgttctacacagtagcgtagccccacaagttacgtgagcatcgctaccactgtgggagaccatgcatccacccgcgatcctgactgcatagctcgtctctcagacggaggcgccagcaccctccccgtggctgtttcttcaatacctccattttcctttctttggaattgcccttctggcattccctttttgttttcgtttttctttttttggagacggagtctcgctctgttgcccaggctggagtgcaatggcgtgatcttggctcacagcaacttccagctcctgggtttaagcgattccccttaagcgattctcctgagtagctgggagtacaggtgcacaccaccacacccagttaatttttcaccatgtcagccaggcgaactcctgacctcaggtgatccgcctgcctcggcctgccagagtgctgggatgacaggtgtgagccaccacacctggccgtgttcccattttttatttccatgctgctttcatcttcatttcccagttctttcttttgattaccta

SEQ ID NO: 203102 - DNA, 323 bp, Homo sapiens
gccttgtaccccaataacagcattattcacaatagccaaaagaatatagagacaacccaaatatccataatatccatcaacagatgaatggataaacaacagaatattactcggccttaaaaagaatgaaattctaatacaggctacaatatgaagggaccttgaaaacattataccaagtaaaataagccagacaccaaaggaaaaagaaaaggtacccagaataggcaaattcatagagacagaaaatagaatagaggtttccaagggctgggggaccggggaaaagaagacaatgtttaggccaggcacggtggctcacg

SEQ ID NO: 203103 - DNA, 483 bp, Homo sapiens
tactgttaaatctacagtgatacagttagcactctggaaaatcagatgggcagttttcatttgagttacatatgagggactataacctgcataatcatacatggaatttcttaaaactccttggcattctctatgtggttttttgatttgtaaatccaaatatttgctattgtgcctcagtctttttttcctcattagaaatctaagctctccccgccccctcctggtgctgttccttgaggggctgtgtttttatttctgagcttttcccatttgtgtgtgttccttttgtctggagtatgcccaaccccctcacctttttacctgggcagttcctactatctaaaaaattccctataaatgacattatttttcattcttaaaatctaaagataatgcagaacgagctgataatcagcatttaccaaaatagatttaagggttattatttgtaataactcatgtgtcagtaaccttatgtat

SEQ ID NO: 203104 - DNA, 346 bp, Homo sapiens
ctccatccccataacactggcctgtagcagccctcattccttatgaccaccatagcctcccactgggatctcagaatccaggccttctgcccaaccccaaatccttcctgggcacagcccctgattcaccttttacaaatgccccctaggtctgtcactctggggctcccctcatccacaggcaagtcttagcctgcctttatctctctcctctttcattcctgctctatctccctccatcctctgaaacaaaaactaatttgttgttccctccggattgcatgctgttccctgcatttgaatgcctttctcccacctcaactcatcgaaatctcaaccaatcttc

SEQ ID NO: 203105 - DNA, 566 bp, Homo sapiens
tcatttcattcacaatcataaatgtaaatatctaatattgtataaaaatcatataaaatggtcaggttggctttgtcccagatctgcaaatatattttaatatcagaaaactgatgttatttaccacattaattaattaagtgagaaacagcacatgattatggtaataattgcataaaacatctgattaattccaacacaaattcgtgttacaaaaaatcttaataaattaagggaatttttaaatgtgatatatctgtgggaaaaaaatctttgaaacatccttttaaatagaaggatactagcatttaaaaaattaagtaaaaggaactgaggaactgtactcattatcaccacttttattcaaccatacactagtcttagctgccagctagtgcaataaactaagatgaagatatttatggtataaacattgggatggaggaaataaaactgcctgctttggagatgatctgattattttttttttaaaaaaaatcacaaattaatagaaataatgaaagtcagcaagtttctgaatgtaaaactcaatatataaaatcaat

SEQ ID NO: 203106 - DNA, 592 bp, Homo sapiens
atgtggcccacaggacatagcttggacaagcctgtactaaagtttaacatgtgtataccctatgacccagcaattccactcctgtgtatatacccaggagaaatgcatacatcttttcaccaaaacacatgaataagaatgttcttagcaccattattcataatggtctaaaagtgggaacaacccacaggtcaatagtatagtggataaatgttttgtggtatattccatcaggtgatggaatactatatagcattgaaaatgaacaattattgatatacaacaacatggatgaatatcacaaacacaaaatatgtagtatgatttcatttatataaagtttgaaaactggcaaaggtgatctatgttgttagaaataagaaaggttaccttcagggaaaagagaagggtagtgacttgaaggtggcatgagaaaaacttctggaaagctggtaatgttttccttcttgctatgaatgggtattacacggatttgctcaccttagagtaattcaagctatacacttatgatttgtacattttcctacatgtatgttatgcttcaataaaagttttttaaaagatagcacta

SEQ ID NO: 203107 - DNA, 365 bp, Homo sapiens
acagacaaatccaatgactgctacagccagaaaccacggataaactctgtctgagagggagacatgttctcctcccctcaaagatggggactgatgggagagaagcaacctctgttcttagtgaacacgtagttctattgatgatctgagctacaacctctgttcccagtgaatacagaattccattgatgatttactgatgaactccctagagttctatagggagtcccagagagagagatatgccataccttcctttcttccttcctcttttctttcattaatatatccacatatctaacattaattgagcacctactgtgtgtcaggctttgtgcctggcaggaggtagagtgattaataat

SEQ ID NO: 203108 - DNA, 291 bp, Homo sapiens
aaaaaaaaaaaaaaagttggtttttgaaaagatcaagaaaattgaatagccagactaagaaaaaagagaagactcaaatttactaaaatcaggaatgaaatagaagacattactaatgacattacagaaattaaaagatttatgagggactcttatgaacaatgtgccaaccaattaaataatctaaatgaaatgaacaaattcctggaaagacacaaactactgaaactgactcatgaagacatacaaaatctgaatagacctaacacaaatgaagagattgaagtagga

SEQ ID NO: 203109 - DNA, 635 bp, Homo sapiens
ggtctagggagagagctgcagggagaaaaccttatatgcgttggtgacatcagcattatgtgctatgtagaccaggagtcgtcacccagatttctcataaatccaggccttcactccttcacctgccagcctgtttccctcttccaggcaggcatgtggcccaggggtgagaagaattgttctactgccagactgtgccagttcaagtcctggccctgcatcttgggcaagtaaaacagaaagaatgctactgtctaccatacagggttatgaaagtgatccgagatactgaacgcaaagtgtaagccgaggcttcgtgcgcagtaagccctcgcaaggggggtagcagcagtcatagctgtgattgttactattatattattattattattcctccctcaaagttgctccatctgggctggagacagagatggaccttttttcctttggacagagggagagagtggtatgaactcatcttagtagtatgaatgtcaaggtcaggatttgaggggggcgatgagaatgattctagggctccctcccgcctgcctccacttggctctggtgtgttcataccactctctccctctgtccaaaggaaaaaaggtccatctctgtctccagcccagatg

SEQ ID NO: 203110 - DNA, 530 bp, Homo sapiens
agaaaaactgatgagtttagtttttggtttggttagttttaggaactaggagacctctgagagatttaatggcagttagaaagtgaagccatgtagtacagcagaaagagcacttggcttgtttcttcttctataaaatgaaagatttggatttaaaaggtggttatgttatagtgatagagagcaaaaattttagatccctgcttgttttagcttctcactaactgtttaacttggatatattatttattctccctgggcctcagattctgtaaaatcaggataaccattctatgcctacctcatattgctactgtgaggaatatgtgcacacacacaatttatttagaacagtgcctattgcatagtaagcttaatgttacgtaggtgaagtccttttcagatctgaggatccattgttgcgtggtcagtttctatgagactggcattccaaggtagaagtcagggccagagacctaggttaatcatttcttttctaaagtattatcgaatagctgggatgagatacc

SEQ ID NO: 203111 - DNA, 374 bp, Homo sapiens
atcttctgtatcatatgttctcattgttcaactcccacttctgaatgagaacatgctgtgttggttttcgttcctgtgttatttgctgagaatgatggttccagcttcatccaagtccctgcaaaggacatgaatgcattcttttttatggctgtttgtctttttgttgttgacttttgggaattctgcatacattctagatattagtgttttgtaatgtgttataaatattgcaaatatcttctaagtcttgtatttggcttttaataccattgcagtttttgttgcttagatgtgcctttttctttaatatgtagtcatattgatcaatcttgtcttttctgctaacactttgttcttctggttaacttcta

SEQ ID NO: 203112 - DNA, 233 bp, Homo sapiens
tggtggtgcacacctgtggtcctagctactcgagaggctgaggcagaggatcacttgaacccaggagtttgcgggtgcagggagctgtgatcacgccactgcactccagtctgggcaacagtgtgagaccctgtctcaaggaaaaaaaaaaacaaccaacagagatatgtgggaacttaagattaattcctgtgccaaataaaatgagacatcttgaaatggtgctgaggagg

SEQ ID NO: 203113 - DNA, 425 bp, Homo sapiens
aaattgcaaatccagtaaaaataacacatagtctctttctttctaactggatagagtctatcatatacaaaaggaaatttaaaaatactattttcttaaacatcattcactaattagtactaataagcaatgttttaaaagaaggtaaaaagaaggaactagtggctacttagatgtcttcaaatcatgtgtgcacagtgtgtgtgtgtctgtatatatattaatgtacatgtgtgtatatatatataacaacacatatatactggagactaaaaatagaaaatacatacatatatacactaatgagatctttatttttaattagttggatgcttgatattgtccaactgatagttgggtagtagttgggcacagccttgttttcaagcagttgtaagttagtgtgacttgcagtgatgaaaaag

SEQ ID NO: 203114 - DNA, 241 bp, Homo sapiens
aagcagttcaacaacaaaatcaacaccctcactaaccaagtgaaatcaaactgacagattgtttgtagcagccttataatggtctccttgggtttatgatctggggaatgaagacaaattgttgatttttaaatagaatgccatgtactctttgctaagaaaatttgcctttaatttttagacctttgagtattttattactagtttttttctgtctctgattcagtattattatatcttc

SEQ ID NO: 203115 - DNA, 649 bp, Homo sapiens
cattcacctattgcaggacatcttggtggcttccaggttttggttattctgcttttgctgttttgtcagtttcctttttctagattgttaactgtacataaatgaggtaaagagatcatagggcagtaaaatgttactatttttcaagaaacttatgtagaatccagattagtttggaaaatgtttgtggcctgggaatggcaataagacgtggctcagaataggtttctgatagaaggtagagttataattatttttccactcattgagccctgtaagtaaaaaggtctgccttagaattttctccagtttatgtacattgatattgagactagtagattgatgaagctatagaaatataatctgtcggccgggtgtggtggcttatgcctgtaatcttaacactttcggaggctgggacgggcaggttgcctgagctcaggagtttgagaccagcctaggcaacatggtgaaaccccgtctgtacacaaatacaaaaaatcagctgggtgtggtggtgggtgcctgtaatgccagctactcaggagactgaggcacaagaattgcctgaacctgggagtcggaggttgcagtgagctgagattgtgccactgccctccagcctgggcaacaaagcaaaactctgtct

SEQ ID NO: 203116 - DNA, 489 bp, Homo sapiens
cagttcttgcgtggggtctgtcatgaagttgtagtcacatagtgcctgggactagggtcatctgaaggcttcactgggatggatgcttagtatggtgagcagtgatggtcgaccatcacctgggacctcacctggctatcaggtgaaactcttacccaaggcctctgcttgtggcttgagcttctcacagaatggtggtgggttcccagagggagcatcctaagagctagtgctccaggagacccaaatgtactccacatggcttcttgtaagttatgtgtctcagaatgtcacttccactatattttattggtcaagcaagtcactgaagtcagtccaggttcaaggggagggttgttagatgtcacctcttgaagggaaatggtaagttcatgtcaaaggaattattatcatagttatctttggaatacataatttgcctgaggcctgttagttccataagtgttgaatcagaactttgaacttaac

SEQ ID NO: 203117 - DNA, 338 bp, Homo sapiens
ccaccctcacgacctaaatacctcccaaatgctccagtccctaactaccatcacattgggagtttcacttatagtaaatgctgaaatcacgtagagttcttctaaatgtgttctttttcaaacttgttgtgttcctttcaatagtaacggattttgttctggagtacagttaagttacctggaatctgggtggtccttgtgaggctggcttttgatctttcttaaaatggttccagagaaacctttagtctaggactagcttagctccactgctgaagccacatgttcctgaggattctatctggtgtcctgtgtattatgaggtcttttcagtctgg

SEQ ID NO: 203118 - DNA, 185 bp, Homo sapiens
gttcgactgtacgagtttcgaggttcaagtaagctgtgatcgtgacatggcctccagcctgggtgaccgaatgaggagctgtttaaaaatatgaaattgaggctgagtgtggtagcttgggcctataatctcaacactttgggaagccgaggcgggagggtcacttaaggccaggagttggagac

SEQ ID NO: 203119 - DNA, 450 bp, Homo sapiens
atactaatgctacataactgtttctagacctataaatgtataaattatgtaactacttagaagaaatagtgtgaaacattcatgtgactgttaagaataaaagtaatatgactacctaagttttagtagcattaattataatagattctgatatcagataccttcatagcattaaggtaggattctgccttttaccaactatactcaagtaacagacagaggaccctgatccaggacaagaactctgcagtaatggaacagccccttagaaatgtgggattgaatcaaatgtacctacttaaaacacatgttacatgctctaaatctaaaagctgttttcaaaaggatgtgagtgtcattatttttaattcagaattgtctactcccagtttggagtcaaaactacctaaacatataataattaatagaattttgaataccgctaaattt

SEQ ID NO: 203120 - DNA, 423 bp, Homo sapiens
ttttattcagaataagttaattcttccagaatttatatatttaaagactccaaatatacatccccagtggtatcttggactgttaaatagaaaaatattgttgctcttaaaagaaattcagtgaagtctggttataaagtcagaatgtctaatacttttggtcagagtcaaacagcagttccaatataggcagcaagttaaaggggtagttggtggcctgtgttgaaagcgacttgatgaaaataaatctttaaattaaactttagtagaataagaagaaaaagcagagccaggtgacgcagtggatcatgcctgcagtctcagctactcagggtgctgagggtggaaggatcacttgagtctaggagttttgagaccaacctggacaacatagcatgactctgtctctgaaaaaaaaagtta

SEQ ID NO: 203121 - DNA, 412 bp, Homo sapiens
tagatgactgcttcacttttcacatcttttctcaaacccccaacacctctccccctccttattctcagctgaggatcttgcttcatgtcttattaggaaagcagcaaaaagccttagatgagaaattctgctacatctgcccacccacctgcatttacacctgtaggtgctgcctgtccctcgataacagatgaactgactacattcctaaggccagcctgtacacttgaataccagattccattcctctttccctctcaaagacattctcatctttttttattaattttcccctcttgactggatcattttccctgccatacattgttatttttctcaacttaaaaagcaaaaacaaaaataccctccagcaccgctagattcttctgctcctttgcatcaaaactcctta

SEQ ID NO: 203122 - DNA, 479 bp, Homo sapiens
ggacttccttgggcaatatactggctgctgagcaaactgctggctgctgagcaaactgctggctgctgagtgatatgcggccgttcctgagggcctggcttttaaaggcacagattcccggctccccccacgccacccagagagttcagttctgtgggtgaggcctgtgaacctgtatcttaaaaagctgcccagcttattactccaccataccatgtacacatggtctctgggccccaggctcatatggacagtaattgctgtagattctgaggaggatgtaatagtctgattgaagggtatgttttttagctgcaaagtgaagtatatagcgggttcttttcttactaaagagtgtgcctttatacagatactggacactcagagtcttatgattcctggccagagaggaagcttcaggcttgcagattctcagcacacagacagggtcctgtgcacactgatggcagagaagtggg

SEQ ID NO: 203123 - DNA, 516 bp, Homo sapiens
cactttatcgtgcttcacagagagtgcgtttttgcaaattgaaggtttgtggcaaccctgtgtcaagcaagtctatcagcaccattttcccaatagcacatgctcgcttttgtcctgtgtcacgctttggtaattttcacaatatttcaaaccttgtcattattatgatatctctcatggtgatctgtgatcagtgatctttgatgttattcttggaattgtcgtggggtgccatgaacggcaccatataagatgatgaacttaatggataaacgttgtgtgtgttctgactgctccactgattggccgtttctggtctccctccctctcctggggcctccccattccctgagacacaaaaacaatgttgggtttcaacaacattgaaacccaaccacagcctgtaagtgttcaagtaaaagaagggtcacattatctttcagtttcaatcaaaagctagaaatgattaagcttagtgaggaagccatggtgaaagccaagataggctgaaagctg

SEQ ID NO: 203124 - DNA, 595 bp, Homo sapiens
cgtcctgctgtcactttggtttgtgttaactttgacgcctttcttgtttcttactctgctttcctgcatggagcacacagccccggctccctttcagtctgcatggcagacacctggcctctgcaggtccagttcattctgtgtcccctttcggtcgtccctatgttgccgtcaggtgattgagggtgaaggtcggccttggcagcccagtggaaagtcccttgactcctggccgtcagtggcaggtctccagcctttgggaggaggaaacttctatttaacaaagaaatggaattgactttgccacacacagccagagcgatgatttgtagagccaacctgctgagacattcaaagcatcagtcgtagggtcaggaccgccaggtgaggtgtggctccacctgcagcagcctggggcaggttgcctagcctctggctttagcatccccttctgtgaaatggggaaagtgatgggacctggctttgtagggtggttgtgaggacctacaggggtttttgcaaaatacttagcccagggctgactaaaagattcagagacgctgggcatggtggcacacacctgtagttccaggta

SEQ ID NO: 203125 - DNA, 443 bp, Homo sapiens
aatgaggtaaatgaggctcagagaggttaagtcactttcccaaggaagcacagagaaggagcagactcagagtttgaaggggtttcaaacacttgctctttaaaggccaggtactaattcccaaacttctgagtatcacaattatctgagggggatgttttgttttgttttgttttggagacaaggtcttgtcttgtctctgttacccagctggagtgcagtggtgtgatcagggcttactacagcctcaacctctcagactcaagccatcttgccagcccagcctcctgagtagctggggctacaggcacatgccaccatgtccaactcatttttgtattttttgtagagattgtgtcaccctatgttgcccaagctggtcttgaactcctgggttcaaccaatccacccacctcagcttctcaaactgctgggattgagag

SEQ ID NO: 203126 - DNA, 361 bp, Homo sapiens
gtgtcggcccagtgatccgggagctcagagtgtaggtacctgacggcttgactcgtccccaggacaaggcctgtgagtgggagaggggcactctgagtgtgcgaatctgtgagagtgtgtgtgtgtctgggcacgagtgtgtatgcgtgtgtgtgcatgtatattcacatgtgtgagggtgtgaatgtgtgtgtctgtgggtctgggcacatgagtgtgtgtgtgcatatactacattcacgtgtgagtgtgcaaatgcgagtgtgtctgtaggtctgggcacgtgtatgcgtgtgtgtgcgagtactatattcgcatgtgtgagtgtgcgaatgtgtgtgtctgtgggtctgggcacacg

SEQ ID NO: 203127 - DNA, 385 bp, Homo sapiens
tgattctgaggatcccgaagcgcacgatggcgcgtctgtaatcccagctactcaggaggctgagacaggagaatcgcttgaacctgggaggcagagtttgccatgagccgagatagatcacaccattgcactccagcttagacaccaaaagcaaaactccatctcaaaacaaaacaaaaaactagagaaaaacagagacagaaaagaaagaaagaaaataaagaagaaatgcaggccgggcgcggtggctcacgcctgtaatcccaatgctttgggaggctgaggtgggtggatcacaaggtcaggagattgagaccagcctggctaacacggtgaaaccccgtgtccactaaaaaacacaaaaaattagctgggcgtggtggtg

SEQ ID NO: 203128 - DNA, 448 bp, Homo sapiens
acagttggtgtcccagtctctccattgagtctgtttctgtgctgagtgtccctacagatgtggtaagcctctgaatgtcaggtctgtgctggtctttctttaggtcccatctcctcctagacttccaaagtctctcaagatcctgaatcaggaggacttttcctatctagatctccagtcagtgagcatgatggtcagggcatgtccacagtgtggtatcctcataggccattcgtggaccccacctggtgatcccttttattcatcagctctgtatatgttacaggattagctagtggtcagttgctttatgaaaactgtgggccaggtttggtggctcatacctgcaatcccaccactttgggagaccaaggcaggcggattacctgaggtcaggagttcaagaccagcctggccaatatggtgaaacccatctctacaaaaaata

SEQ ID NO: 203129 - DNA, 639 bp, Homo sapiens
aggccaaatctgtcttatctagtgagtcactactgctcctctttccaactgcattttgatttcagcccacttgtgcagctcatcagggctgcaccatatgttagtaccatgtaggcagaatgtgactaatttttttctcaagccctgtcagagcgacttttaaaatcaccttataatcttgatgtctcttgcggagtcattataacacataacctttggaaaggactataattatttttctgagtgctcaaaggagattcttcagcattttcattcccatttttcagatgaaggaactaaagggaagataagggattaagagacctgggttccacaaccaaccactgggacttggactttcttgagtcacagtgctgtatttggtaaaataaggcagcttgtaaaatgccttttattgggaaactcaaaatattactttgcctctctttattatttacttatttatttttttttagatagagtcttgctctgtcacccagatggagtcttgttctgttgtccaggctggagtgcaagaccttgtttcaaaaaataaaattatttaaaaaatctcttttcctaatttctccccaaatgccccacactggtgtactctcaatccccgtattctctctgtcc

SEQ ID NO: 203130 - DNA, 486 bp, Homo sapiens
ttataattatattgtaatgtgtgtcataattggtaacacatttgaacttggtgtttctttcattagttaatatctagatctatgcaagttgctctaattagattgctttctgaaaataataataaggcaggtttaggaccaggcagaacgtgagcataacgatagtgtctttccttaccatattcggtttaattttaggcatgatcttaccttcctaaagaggggcaatgagctcatcactgaactacagcacattttttaaacagttatttgtcgcattgcaagcaatctagatgagatttcaggaaaagaatgagctaccccactcaaatgcataacaaatatgcttgactggcatttggaaagaagaaactcttattaaaatttaacatcaacttggccagacgttgggctgaattggaagaacaaagtgctgctcagtaaaaagccagggatgggaatgatttgatttctactcatatggct

SEQ ID NO: 203131 - DNA, 539 bp, Homo sapiens
taatgtgcactcttctatactacatgtaagtgagaagtcaacccattcagatattaatatacctataggacatctgataacaagcacctcaactgcagtagatgttaataactgatgtatctgaaactagaaggaagggaggtttgcctttatatttagtgcattcttttgttgtagtcaagatctatcacagagtttcctgttgttatactcttggaaatgttagttgtattcagatgagggcatttaatgtgcccatttttatcactaaattctgtagtagatatagaagagtgcacttttggcaaagtgcctcacatgctagtaatctaccatatttttgaaatggacgatgatttgtacaatactgtgtatgtgcgtattttatactttaaacatttataagccatagaataatattaccagaatagttgtttcaggaaggaagttaatttagtagtcgatatagtagctgtatggagtacgggggttgattgacggttcatatatagaagtagatatagaagagtgcacttttg

SEQ ID NO: 203132 - DNA, 825 bp, Homo sapiens
  misc_feature (10)..(10): n is a, c, g, or t
tgtcgagtanctaacagttttaaaaacatgaataggtataggtttaattaagtgttttctggagtagtatttctggagttctaactgggaacatgggggcatttcctgggccattcctctttgacgggccttgcatatcaatccagtttcagcaactttctgctcaagcctcttagccacttagggctgccccacttatgaactggtggatgacttgggaggaaggttttacagaattcatcacttgccttagtatgtagatatagaagagtgcacttttgggggagcgactacgagtagatctgcaacatgtaagtgagaagtcaacccattcagatattaatatacctataggacatctgataacaagcacctcaactgcagtagatgttaataactgatgtatctgaaactagaaggaagggaggtttgcctttatatttagtgcattcttttgttgtagtcaagatctatcacagagtttcctgttgttatactcttggaaatgttagttgtattcagatgagggcatttaatgtgcccatttttatcactaaattctgtagtagatatagaagagtgcacttttggcaaagtgcctcacatgctagtaatctaccatatttttgaaatggacgatgatttgtacaatactgtgtatgtgcgtattttatactttaaacatttataagccatagaataatattaccagaatagttgtttcaggaaggaagttaatttagtagtcgatatagtagctgtatggagtacgggggttgattgacggttcatatatagaagtagatatagaagagtgcacttttg

SEQ ID NO: 203133 - DNA, 389 bp, Homo sapiens
cgcacttcccagctcatagcagacgatgagaggactacattttgaccccagtaagatgtgacgagtaatagttggaccccacagcagttacttttgtagagaggaaaattatgctccttggcttcaggtgaagacccccagatccaggccagtggatttacaagtgaaagtcagcagcactgggcattttgagcaatagctccgaacaagccctttaccacgcgggtaggtaaaccccagaatatacagatgccccttacaacacgcgggtagggagggtatgtggccgagagagcatgagcttaggaaatagactgggcttgaattccaccaagtttttggctatggacccatggggatgtggcatcgtctgccgctgagccttaatt

SEQ ID NO: 203134 - DNA, 401 bp, Homo sapiens
aacaacaacaaaacccaacaaaatgacaacaacaaaaaacagtaaccaagaggtagaatcaactgaaatgtccgttcaatgtggcatagacatacagtgattattctaccttgaaaaggaaggtaatcctgccacatgctacaacatgggtgaacacaccttgaggacattatgctaagtggaataagccagtcgcaaaaagacaaaacacaatactgtgtgattccacttatatgagatacctggagtaggcaaattcacagagacaaaaagcgaatggtggtggccagaggctggaggtggagggaatagggagatgtttttggttacagggtttcaccatgggttgatgaaaaaattctggacgtggatggtgatgatagttgcaccacaatgtgaat

SEQ ID NO: 203135 - DNA, 364 bp, Homo sapiens
tctctctctctctttctctctctctctccctctctcccccctaatcattgccttgcccaagcctctgctagttctgttctgataagatctcaagcactagagcaaagtagggaggtcacagtgcagtgcagggagctttggtgtaggaggcagaggcctgggatctggctgtcagcagtcgcctctcttagctgctattggtggtgcttcaaatgtgcttgactttggagtcggctactctcagtttcctctcctcactgcaggatccaggctgaccacactttctttggtctttgcctcaacagctaaggagagggagggctcaagaagagagctgcctctgtccccagggagatgagaacta

SEQ ID NO: 203136 - DNA, 197 bp, Homo sapiens
caaggcagacgccatccctgctctctaagagtttaaattctagttggaagggggatattaaattggtaaacaaataagagatgatttccagcagtggtaaaggctacgaagaaaacaacgtgatcaggaatgcctagcagggaggtcagggagtgtcagggctcattaatgtgatcagatgtgattctgagccaaat

SEQ ID NO: 203137 - DNA, 429 bp, Homo sapiens
accactttgatctggaaaaataaatccaacacagcaaaaactgacaggcacctgctcatgaacagcagtagcagtgctgtggatctgcttgctagctgtttcatctgctgagggaattgttttaattttgcaggctgtggcagacctggggaaacatactataatatgcaaagcacagaccccgattaatatttcacccattgcatgtggcttgatggcgttcctgacttgttgcaatcataagtgtgaaactctgggggtttcagttaaattatttcataacatgtagcctaatatttttgtgccctaacctcaccttctattaaaataattttagggtattgcttgtatacagtgacactatacatattatataaactgtgttttatttacaaaaggttttttaaaagtgtaaagacatcccatacc

SEQ ID NO: 203138 - DNA, 668 bp, Homo sapiens
gaagaaaatagtggtacggatgtgctgtaggccagcgctgaacatgctcttcgcgcctccgggagcactgtacgcagaggtccccgtcccctcctccctgatgccagacacagaccagggcttcctgctgggccgggcggtcagcacagccctggtggcccctgtacctgcacccgacaatacggtgttcgaggtgcggctggagaggcgggccagctcagagcaggcgctgtggctgctgcttccggcccgctgctgcttggccctggggctgcagcctgaggcccgcctggtcctggaggtgcagttccagattgacccgatgaccttccgcctctggcaccaggcagtggacacactgcctgaggagcagctggtggtgcccgacttgcccacctgcgccctgcccagaccttggtctgtcccacccttgcggcgtggcaaccgcaagcaggagctggccgtggcgctcatcgcgggctggggccctggggatgggaggcgtgtccccccgctactcatctatggcccctttggcaccggcaagacctacacgctggccatggcctccctggaggtcatccggaggcctgaaaccaaggtgctcatctgcacacacaccaacaggtaagcccgagcctggcctgcccccacctcacctgacgccc

SEQ ID NO: 203139 - DNA, 471 bp, Homo sapiens
cagcatggaaaccacatataattggcaatagccaacatttttgagtccctatttatttgccaagaatattaacaagcattcatttaatacaacaatattgtgaagtaaatacttttattctcatggtatttttagtaggaaacaaagaggagaactatataacttgtgcaattcatacagaatttagacttgagctccagtaatctgatttcataacttttaacgaatcaaccaatataacagactttcttaaggctaataaaagtaaagtgacaaaagaatataaacatagccaaaaatgatataatactctgctgaggaacatgtacttgttcttaatggcataagtggctactgacaaatttttaagacagggcattacatatgttacagaaattattctattccagtggaaagtagatatgactaatggcaccagtggagataaaagatgagagatacctaatgtca

SEQ ID NO: 203140 - DNA, 364 bp, Homo sapiens
aagctatactggtttttgagaactttcttaggttatttgccacatgtacacatgtacacactccacagggatttacaatttataaagctctttttaatacatgatcttgtctggatttcagagtacattatatggagaagtagagtggttgtcaatatctgtattttacagatacgttgaaacttagcaagattatgtaataggtcggtgcaaaagtaattgtggcttttgccattaaaatgccacatacttttgcaccaacctaatacttacagttctcatacattcacatgtagacagagtaactgaatccagactccatggctgtggttcctggtgtggtttccttcctctggcaccaacc

SEQ ID NO: 203141 - DNA, 859 bp, Homo sapiens
agctacttgctgtttttggttttagtcctgccttttttaagggaagaaaagaaataatattaatttgagagtgtattatgaattatgccattatcctaacagtaacttttattgtaatctcaccatgctaaaaagtatccaaaatattttgagatgggaagggatttgagtttggtttctaatgtttatcttttggtaatccctaccaaattttcatagtaatagtagaaagaaggaaagtgaatattggatattatttcctttacttaaaagcttttgatggatactatttgaattggtgtaatatgctgaagtgtatgtaatggaaaaacattattattttctaaattgaataaaatggatttaataaatactgaaagcagaattaactaagcaaaaataagtatgttttgcttagaaaatggatggcagttgcttaagaaaaaaggtttttttactaatttaagaatatacagattgtctggggaaaagaaacttttttttgtattttacttgtacagtctcacatataaccactgttgttctcatgacactctcctatattgatgtgatctttatatggtttgtaccttttttatctcttattccattatttcttaaattctattttattcaccagtttcccaaataaagctatcagggttgacatcagctatttccaggaaaataaaaaggttattactgctgaacactggaataatttgattatgtagattgaagaaaagtcaatctgttataattgctgtaaagaagccatttaattttgtgcctgtttgcattagtctttttttaactagatatgcagattagtgggatgaaaatatatattctttatttg

SEQ ID NO: 203142 - DNA, 644 bp, Homo sapiens
accctgtcaagctttctatgttatattatacgaatagctggttaaaatgaagaaataatgaaatcagaccatcccttcaggggaaacaattgcagtgttcaagagttgtttttttgttttgtttttttgtttttttgagactgagtcttgcgctgttgcccaggctggagtgcaatggcgcaatctcggctcactcaacttccgcctcccaggttcaaatgattctcctgcctcagcctttcaagtagctgggataacaggcatgcactaccacacccacctaattttttgtattttcagtagagacagggtttcaccatgttggtcaagctggtctcatactcctgacctcaggagatccacccaccttggcctcccaaagtgctgggaattacagctgagagccaccatgcctggcatgaatgttgttttaattgtcacagcatctgctactagaggatcattattatgatcatttccagtgaaagcatgtttaaaaacaaacaagaatttagactttaatataaaatgtgtagattgatcaaaatttgatgttatgaaattttagtgtatttttagactagaacccatctaggaaaattccatttcaagttgattctgtgtgctatggttggatgtgttgc

SEQ ID NO: 203143 - DNA, 873 bp, Homo sapiens
gagatgtacataataccaatattaaccttttattagaggaattctccaagtgagtttaagtccacagtacgtggattctgggccagtgtgggccactggcacggttgattggtaccctggtgaatccccaagtttttctttgtccatcccccttccttcagcaaacactgtgtgctgaattaattccacttctgaggttctgatcaaagtacacttatttggtggaagaaagctgtaggagcagcccaggctgcaaatactaaaagatccatctaaaatgtaagctgcctgagggcagggactctttctcactactatatgtccagcacctagcacagtgcctggcatgtagtagactatttttgaatggattagcagtcttataaaaaatatagcatcttcaaaataagtctttactcaagcttagcagctaccaccagtggtaccgaacctttcatttaatgataaccttactaaaatcaaagttaaattatcatttttattatttacaactatttattgatggtcttatgtgaaccaagtaaaatactaaatgttccatgtatgaatcttatgatttaatcttcataataacctttaaaatgtacgttagcttcattttacagataagaaaattgatgattcaaacttaggttggatttagccaaatttccatcactttgcaccatgcaacaacttgtctttgttttctgtttcagagaatccttttaaaatcagaagtaatttttagatttaataatttttgaaaacagaaataaggtaaatgtctggaagtaagatgtggctaactttggcatcagtacagagttacatgacattaacttagccagcgatccatatcccagttcatca

SEQ ID NO: 203144 - DNA, 365 bp, Homo sapiens
cccattatcagcaagtgaccctctcagtccgtctccagccattttaaagaagcaaagaaactactgggcttttgggaggatttgccctcagcgttttaaatgttggcttgctgggccgttcttgggtttgtagcacaaaatattaccattgtgtttccaccgtgggtttgccattcttgtttcagaagagaaatatttctttcatctactttcttctttctggttattgttcttctttttaaaaaaataattctgggctgggtgtcgtggctcacacctgcaatcttagcactttgggaggccaaggcaagtggatcgcttgagctcaggagtttgagaccagcttgggcaacatggtgaaaccc

SEQ ID NO: 203145 - DNA, 505 bp, Homo sapiens
aatccaggtctcatcagggctgcactccttctaaaggcactagaggagaatccatttcttctcttttcccagcttctagaggccacttgcattccttacgtggccccttcctcacatcgccttgatctctgcctctctcatcacattttctctaccatctctgacccccttgcctctctcttataatgacatttgtaattacactgggccccctcagataatccaggataatctctccatctcaagatccctaaattaatcacatctgtaatttcttttactatgtaaggtaacatatttataggttcttggaattaggatgtgaacatctttggggtgtcattattcagtctactacaagtttgtgcagcccttggcctatgagccaccatgtagcccaggacggctttgaatgcagaccaacacaaatttgtaaactatcttaaagcattatgagtttttttgcgattttttttagcttatcagctatcattagtgttagtat

SEQ ID NO: 203146 - DNA, 408 bp, Homo sapiens
gtaacctgaaagacacttcctgtcatttgcctgatatgatgtagtccatatcatgacatccacacccttgatttggggtcactttgcaaatgctcatcactgcctatccccatgaccttggcaagcccatctcacctacaatatatgagtagatgtttgaaataagtgacctttaaggacctcctagctctgaaattctagaattctgagaggtctggggtaaagggaaaggttggcataacttgatcttagggcaaggatgcagctagctggtggtgaataagggaggcagccccaagtagggtgcagggtggggtctgtagggccagaatagagattaagagggaagggactccaagcgtgtaggagggatggtagggttgggtgccgagaagggaaaatggcatt

SEQ ID NO: 203147 - DNA, 408 bp, Homo sapiens
ttctctggctgaaatgagagaatcatttcacatgggaaaagaagttttggggacgatgccctacgaagctggtagtgaaataatgctcctagttttgatagtatttccccactgctccaccaacttagctgaacatcgtttatcttagctcagctgtagcaatgaccaaaatttccatttgctactcatcataaagtgcaggagagaacctgtcttgtatataatttgcagtttcttctttggggctggagcatgggtttgatgtagaggcagatcagtaccttgccaactgaacccaaggagttaagtttaatgttgtgctatttcccagtttgaagttttcaattttgattctgtgtcagagtctactatggaaataattaagaagagtagataagcacaaatatg

SEQ ID NO: 203148 - DNA, 606 bp, Homo sapiens
gttctgacaaagggacctgtattttcccgtaatcagtgagttctgagtccctgctgctccttcagacagggtccatgctccccatcacctccagtcccaccactcataggtaagtgtccttgtgggctcttaaactggcccacttctgtcatgtgagcctgccttgccctgaaagcaggcgaatttctgaccccagccctgtgtgcttctcttttcaggaaggatggtgaacctgtttttttgttttttttttttgagatggagtctcactctgtcgcctcagctggagtgcagtggtgtcttggctcactgcaacctccacctcctgggctcaagcgattctgctgcctcagcttcccaagtagctgggattacaggcatgtggcccagccaatttcactttgtatctaagtattagtgagtgtattagttagctgctgtgtaacactgtcctaaaacagtatctgttttacttaaaacagtaactgtttctttagctcacaaacctgcaaataagtggtttaggccagtctctgctggtaccctcgtctgtcttgttagatgtaggtcagctctgcctggcgttgttgatcttggtgagtcctc

SEQ ID NO: 203149 - DNA, 469 bp, Homo sapiens
tggaattctagcaccctgagtcgtcacttaagccaaaatctgaatcattccaaattgagctgagtaaacccatcccagtccatctaaactttaaaagctaaaaatgaaataatgcagcattttaattttacttcttcaagtcctcatgtagtattttctaattgacacaactgtagatgagggaaaggctagtgaactgagagatttaaaaccatcatcattatgattgctacttatgaatataatagtataaagctcataggtagtgtacacattagcacattttgtgtttggtgctactgtattagcagctattcctctaaactctgggatgttagtgatctaaccgtagatcagaaatagcaagatacttgatcctcatagtcccaaatggggaaggcattgtaaacccatagatctcaattgaaaattaccttgtccccttgagtagttcaggctaatatcttaa

SEQ ID NO: 203150 - DNA, 401 bp, Homo sapiens
ttgtggccttggctggagctactttatcagataaactgtagtcacctccaaggcgtatgtgcatttagatatgaggcattcaggtaagatccagatcttggacagttctggatgggacagtgcaatgggaatgagaagcccagggaggcccaagtggcagcataagggcacatagggacggctgccaaggtttcccatttacaacctctaagtggaaggagtgtgctcttatcatttagcaaatggctggttgggagtacatggtggcagcttgtgtctcactcttattgggagaatttggccaactcagaatgtttgagtgtccccttctatgttaagtcgttttgtaaatctgcactctgatgaagtaatttgtattctcagtgcactgcttttattat

SEQ ID NO: 203151 - DNA, 692 bp, Homo sapiens
cactaggcatcacactctcattcagcagcatcaaagaaatgaaggggaaatgtctcattactatctgagaggaaaacattttccaggacccactacctcatcacgcttccccttggtgtcactggccagaactgggtttcacactgccttgccgcccctacccctctgaactaatcattggcagagaagagtgaaattaacatgatggcaaagaccaatcttgacttggaggggcccatcttccttgagcacactgtggcaagatacctgatcaaatttggggttctattttcaaggaagaagggggaaatgactctttggtaagccaccaacaatgtctgctctaagtcctaatagaagcactggtgttcagcaagctgcagttacccagacattcaagaaacatgaggagcttgaaattccaaatgaaattataagaattatcattttaattttcatgtgtataatatctaaatacacaccaactataattttgataacaaatttatgtaagaagctataaaactgaccacacaactgtaaattccttggagtagttcttagagcctttaccgaatgtcccagaattatgggtattagtcacataggttcttttcaatatgcctaatagcagaaaggaatgttaatgagcaaggctcctattcttagagctctatgactatcttactagc

SEQ ID NO: 203152 - DNA, 357 bp, Homo sapiens
tcatagcttactgcagcctctaactcctgggctcaagcattcctccacttcagtctcccatagctgggactataggtatttgacaccatgcctggttaattttttcatttttaaagaaatggggccttgctgtgttgccctggatggtcttgaatgcctggcctcaagagatctttttgcttcagcctcctgagttgctaggattataagtgtaagccactgctcctggctaacacaaatagattttaaaacaaaaaattattagagatagtgagagacatttataatgatgaaagcgtaaattcatcaggaaaatataacgattataaacatatatgcatctaataacaaagcccc

SEQ ID NO: 203153 - DNA, 397 bp, Homo sapiens
ctggagacatcagtgactgtcatgacagggaagatattactggcaaccagtagtagaggccaggaatgcgagtaaacatcttgccaagcccgggacggtcccccagcaaggagtcacttggcccaaaatgtcaatcaagccgaggttgagaagccctgggttcaaccctcatgctggcaactggcaatgaatttctgatttttttaccatggcaaataataataataatgacaaaacgaaaacaaaggaaaaaatccaacttaaagggcagactccaaagggcctgagagggactaagctgaggggcagtcttctcccatcagaaccagcgtcattgtgtgacacgtcgttgactgatgttttgataaccaacaagaggtcaatgtatagaaatccg

SEQ ID NO: 203154 - DNA, 456 bp, Homo sapiens
agtaagtttaagaatggaaatttggtttggtttaccttttatgatgtgtcccttttgccttttatctttttgtgtatttttcttcataggaagcagattcactaatacagtatacctgataaccgtagttgtaaatttcaaattcttattgttccagctggttggaaactgtcttagactgtcatcatgttctttatcaacttggatgttgctcataaattacttcaaaactaatttatactagaaagataaatttctggctaaattatttattgtcctatgattgcataaaatttctttctccaaaatttcgtgtgtcagaactgctatttatggtaaatatttggatgttactgaggcatcaacaggaagaattggtgcatttgtgtctttagcctgcacttacatttgtgacagcctaaatatttcagatatttgtcattgcaaaaagtgaaa

SEQ ID NO: 203155 - DNA, 381 bp, Homo sapiens
ggcaatgttctaggtgttttccctgaattaagaactattatccccattttacagaagaggaaattgagacacagagggcagttggtacatagaagttgttcagtaagtgggagttatttttactattaccttcacctgagtccctgagtagtttccttgttttctccaaatgtgtatatttcttgcacattaggagtcacaaattatggcccaagggtcaaaaccagcctacagacacatttggtttgggctgtacatggttttagtaaccagagattttcacataaaaatgcccttcacatgtgtgcacccacccccttgcccctctaaacttcctaaatcccacctatttttcaaagcaaagatcaagtgccttcccac

SEQ ID NO: 203156 - DNA, 338 bp, Homo sapiens
tagaaagaacacattgcaatctatagatgatccatggcagctatcttcaaatgctgaaagcttgctcatgtagcaggagtctgtgctgttttagaaaacgaaaaagtattaaaacagtgatggtggggatgtaatttttttacatttaactcccaaggaatgtattaatataaataagttgtacagaattatgctaaggaatagcttggttaaagcaactaatattttgaaagatgccctttaagattatttatggtaatttgcttttcaaatctagaagctttagactttttaagaatatagttcaaagtaggtgatgctggaacttgttaacattt

SEQ ID NO: 203157 - DNA, 377 bp, Homo sapiens
tcttccctttcatttaaaaatgtgtttaaatgatatttttagttcagacgttcccgagggttttacttgatgggcatgtgactctaattaacatccaagacccacataattcaatcacagtatgggtcaaaattaccaattcaattttttaatcttaaaattgatttctatgtctgtgatgctcagagtgaatttcagcagtatccaaagcattctatttttccatgctctctgccttatcatactggcctttgctaacactacagtagttatttttgaatctttgaaaagtcagtgtttaattttttagtttacttttcccctttctacctttccagtttacctttaagaaaaaaaacacactgccgttttcttcc

SEQ ID NO: 203158 - DNA, 374 bp, Homo sapiens
cagagaaacatcttcctaagatgtcaggaggccacagattctctctagcctctgcataggagtcatgaccacagtttaacactctccatgcttcatgaattatcagatgaagaggggccttggattcccctggactgaagaggagggtcacatccaaagcccagaccttcctttttttaatctgaatatttttgtgtgggtcatttcagcttagttagcagtttcgaaagggatctgtacgggtttagtatttaatttcttgaaaaagtaaactatttttactttgttttgttttaaaatgtttaagtttttaaatttatgtaattccaaacttacagaaaagtaacatgaacaatacaaggaacacctatatt

SEQ ID NO: 203159 - DNA, 167 bp, Homo sapiens
ggtcgatgttccacataagaagaatatgccttgtctgggtagaaagaactttaccctggcttttaaaggaatgggatacactgttttttctttactacttccatctctctttctcgttgacttctttgtctcttcctctctttctgactctgactttctgtgtctgt

SEQ ID NO: 203160 - DNA, 200 bp, Homo sapiens
tgccagctgtcctgcacccgctgcttttttgtctcacccttgctatctggatttcctcatcctacctgtggctccggctgcacccatctccgctcaccaccagcctcttatctcaggccggcgtctgccttccagcctccagaattcccagatgtgctcaccaccatctctgcagtgggcctgaccggagagagaaggct

SEQ ID NO: 203161 - DNA, 285 bp, Homo sapiens
aacttctgtggtgcataacagagcactctgcacacaattagcaatcagtacatatatttgagggtaatgaatcaacaaataaattaacataagtattaagaagtgggagggagtctcttcagattcttaaagatggtgatagcttcatatttgctaagcagagaaaaaacaaggagaaagctattcaagcagggcttgtagttgagcctgaagatcacaaatcttttaggcaaactcctgcagcttttctctgcagggaagagatcatgagggaaacaaacaaac

SEQ ID NO: 203162 - DNA, 700 bp, Homo sapiens
ccgcgagtttttaattctgccttctttctagttgggattcatgagtgtgcatgtttccacacatgcactttaggctagccaggctcaggcgtcctgtgttttttcatttgagtcttcctattgagtcttctaagatggaatggttacatttattttatgttttcattattaataatattatttctgtgtatactgtgtgccataatatttttataggtaatatcatttttaagacacataaccttttcccattttacagataaaaaaacttaggctcaggaaaggtacatcactgtctgaggaccagttgatagtgacagagctgagattcaactttcagtataacctcttataaaacttagaactaaaggaatttttaaaaattcccaccagtctaagacaaccaccattaccaactttgttagtgtaatgcctgtctcctcccacacccttcaagcagaggattttgttttctttacgtttttaaccaatctgtccttcattgcccctgtgggatggtgagtccgtgccaaggtggtcatagctcccttgcccttctccagaattgctgaggaacatttgaggaacaaatcacagttgccacctttcctggctgagaagtgaggagaggacacccctctcagtaggtgccccaccaaaatagggccctgcatgcacatctggctctcatcctcatcct

SEQ ID NO: 203163 - DNA, 631 bp, Homo sapiens
cgaccggctgtcttctgctgcttgagcggcgcccgcaccttccctaggagctcgcagcagccggctggcctctgctccacggtaaccatgtgcgaccggaaggcggtgatcaaaaatgcagacatgtcggaagagatgcaacaggactcggtggagtgcgctacccaggcgttggagaagtacaacatcgagaaggatattgcggcccatatcaagaaggagtttgacaagaagtacaaccctacctggcactgcaaaaaaaaccgaaacttcggtagttatgtgacacatgaaaccaaacacttcatctacttctacctgggtcaggtggccattcttctgttcaaatctggttaaaagcatggactgtgccaaacacccagtgatccatccaaaaacaaggactgcatccaaattccaaataccagagactgaatcttcagccttgctaagggaacacctcgtttgaatctgttgtgttgtgtacagggcttcattctctgtacaagtctgtggttataaaattagtaaaacagcttacatttgtatttattttctagtccatacttctgtacccccatttttttctcccttaggtcattcctttaaaaataaatctgttggagatgta

SEQ ID NO: 203164 - DNA, 541 bp, Homo sapiens
ctcccaggctcaagcgatcctcccacctcagcctgtcaagtagctgagaccacaggcatgcaccaccatgactggctaatatttaattttttttgtagagatgcgatctggctatgttgcccagactggtcttgaactcctgggctcaagcagcctcttaaagtgctgggattacaggcatgagccaccaagcccagcctcttttttctctcttatgcacctatgtttttaaagtgacacgggacccagttgtgatggcgcagtcctcacacctcacaccttatcccagctatcctagactctgaggcaaggggattgtttgagcctaggagttctagaaaagcgtgggcaatgtagatcccatctcaagaaaaaaaaaaaaacaaaaacctgtggtaggtggactctgggcatttggtcatggaagggtgagctggagacatccagtgtaccagcagctggggagacgagtgtgtgaccttcagagggaggaggttcctctagtggccgggacattttcctggcccatgaagctcgtctg

SEQ ID NO: 203165 - DNA, 401 bp, Homo sapiens
tgaccacttgagcccacccatggggggacgggtactttacatgtgttatatcttatctggctctctctctccaaccctgcagggcaggtggcatctctacttaaccatgagggaacagaggctcagccagcacattgaggcaccagaattcaaaagcccagtatcctcccaggactccatcaaagcagatgtgcagagggcagtagggcctgagccagaaccaacacccctgggggaggcccatgagacctttaggaaaatgagacaggcacaggaaagagatgtctaaagccaccattctgggtttgggaatgtaaagaacttcaaatcagataaatgaagactgcagaagaaagaggaagaaatggaagttgctctctgacaggacatgaatttggcaa

SEQ ID NO: 203166 - DNA, 362 bp, Homo sapiens
tcagtcatttgtttgctgatttatttagcaaacgttcaagatgcctgagtttctccctctttttcacttttgtcttctagtaattcttttgaagcgtgcacatctgggggccaccagccccacagactggccacagactctatttgccacattccctgaaggcgggagtggccggggtcagtggagaggccaggcttgaggggaggtgtgggttgggcatggtctctgaactgcctggactcctctgtaaggacagttttgtgggctctcttcatgggcacctcgtgcactgttggtgaatttctgggggaaggcatcatccgccctgtggctgttgagagcggaactggcttctcttcggt

SEQ ID NO: 203167 - DNA, 594 bp, Homo sapiens
gtgaggatggcaccaagcattcatgagggatctgcttccatgaccaaaacacctcctattagttcccacctccaaccttggggattaaatttcagtgtgagatttggaggggtcaaagatccaaaccatggcattccatccctgaccccccagatctcatccttctcacatgcaaaatacaatcatctttctcatgcaaaatacaattccaatagtccctaaaattcttaacttgttccagcaccaacttaacggttcaaagtctgagactcaaagcaagttccttctagctatgagcctgtaaaaccaaaaacgaataatttttttccaagatacaatggttgtacggtcattgggtagacattctgtgactgcagcagccaggatgtcggagcagcatgtaggacgttccaggactccttgaggtgtgccaggccagctgtgccccgggcctgtctccccaaaccatgctgtcctcctaggtctctgggcctctgatgggagagacagcctcaaagatgtctgagatgccttcagggtcttttcccattgttctgactattagcacctggctcccttttatccatgccaacc

SEQ ID NO: 203168 - DNA, 360 bp, Homo sapiens
tcccaaagtgctgggatgacaggcatgagccaccgcgcccagccaatttgttcaaatcttttatattgtcctttcttcatctttatcctgtattatttttgtgacgatggttcctgatttctgtatcacagagttttgttgtgttagttatggctactatgaatagcatatttaccctgaatccagatactttagtgaaattgattggtaggtttttaaattgttttattcattgtgtgcaatttcgtcctctacaaattatggtcatttaaaaaaattatgtctgctcagttctgggcagccacttcgtgggcagcgctgcccagaagtgatttaattgtttaatttccactttctctt

SEQ ID NO: 203169 - DNA, 2234 bp, Homo sapiens
ctccgacccgggcttttccttcgtaccctgcggccccctccgcacccctcacggagctcctcgggtcctgccccctcccagcgcttgcccgcgccgccccgcccccgtttttaaacctggcgcgcgggtaggtgagcgcgttagcccgagtggatctaggcgcgctcgtaggccggcgccgcagcaaggggcgcgggctccgccggcaccatggagcccgaagcggcggccggagcccggaaggcgcgggggcgcggctgtcactgccccggggacgctccctggaggcctccgccaccgcgcgggccggagagccccgcgccgtggcgaccttggatccagacacctggagatgctgagctgaccagaactggaaggccgcttgaacctagggctgaccaacacacttttggatcaaagggagcctttgggtttcagcatcctgtaagagtctatttacccatgtcaaagcgtcaagaatacctgcggagttccggggagcaagtactggccagtttcccagtgcaagccacgattgacttctacgacgatgagtctactgagtctgcttccgaagctgaagagccagaggaaggacccccacccctccatcttctgccccaggaggtgggaggtcggcaggaaaatggcccagggggaaagggcagagaccagggcatcaaccaagggcagcgatcctcaggagggggtgaccactggggggagggtccgctccctcaaggtgtctcctcaaggggtggcaagtgctcctcatccaaatgaatcagtctctgtctcctgggccctgctctgggacctgcccctcacgttctcttggggacacccgagccaggacactacgcatccctgctgagtgtgcagaggctagaggcttctcgggcagcccctggcctgcacactactcatgacagaaagtcagcttttacttttctttcccctggcaattcgtttttggtgcactcatgcatgcctttgagaaaggattctaggagaaagagaaggtctatgtcaacagagttgttatctcatagagccagttttcaaagctccttctgcattgtcactcactgatcaggtgatgaattcttcctagatagtcgcccactccacctcctacttaacctgagactcattatttagctatttctgcttttgtaaaaataattcagatattaaactccaattttaatctatcatccaagggtagatgtagttgcttagtagcattttggaaaaaaaagaaaaaaaggtttggtttggttttgtgacggagttttgctcttgtctcccaggctggagtgcagtgacacaatctcggctcactgcaacctccacttcttgggttcaagtgattctcctgtctcagcctcccaagtggctgggattgcaggcatgagctaccacgcctggctaattttttgtatttttagtagagactcggtttcaccatgttggtcaggctggctttgaactcctgacctcaggtgatccacccgccttggcctcccaaagtgctgggattacaggcgtgagccactgagcccggccaaaaaaaaatgtatttattaaaaaaaaatttttttaacccgccgaataattcccataagagtaacaaaaaggaccagcctgaccagcgtggagaaactctgtctctactaaaaatacaaaattagccaggcgtgatggctcatgcctgtgatcccagctactcgggaggctgaggcaggagaatggctggaacccgggaggcggaggttgccgtgagtcgagatcgcaccattgcattccagcctgggcaacaagagcgaaactccgtctcaaaaaaaaaaaaaaaaaaaaaaagaaagaaaagagtaacagaaagatagggatttttaggagacaattagataaaaatgtatgtgatgactgtataaggaggcctgtgtgtatgaatttatagggagtagaaccgtctctcttcttagttggtgactgtttggggcctggtattttaatagatgaacactacttttttaattttttatttttttaaccctacccttaacccatgaacactatttttaattaaagtatctgatgtaaaattattttgagtttttaatattttgataaacgtgtattcctgaaactttttgacttacttatcttacatgtggtgtcttcctgtatatagtacattatatcaatttctacttgaaataaatattttg

SEQ ID NO: 203170 - DNA, 2004 bp, Homo sapiens
caaagcccgaggccgcggggaccacagagggacggagaagccgggactcctcacatcccacatccggcaggggaagcccagcagccccgcgccgtggcgaccttggatccagacacctggagatgctgagctgaccagaactggaaggccgcttgaacctagggctgaccaacacacttttggatcaaagggagcctttgggtttcagcatcctgtaagagtctatttacccatgtcaaagcgtcaagaatacctgcggagttccggggagcaagtactggccagtttcccagtgcaagccacgattgacttctacgacgatgagtctactgagtctgcttccgaagctgaagagccagaggaaggacccccacccctccatcttctgccccaggaggtgggaggtcggcaggaaaatggcccagggggaaagggcagagaccagggcatcaaccaagggcagcgatcctcaggagggggtgaccactggggggagggtccgctccctcaaggtgtctcctcaaggggtggcaagtgctcctcatccaaatgaatcagtctctgtctcctgggccctgctctgggacctgcccctcacgttctcttggggacacccgagccaggacactacgcatccctgctgagtgtgcagaggctagaggcttctcgggcagcccctggcctgcacactactcatgacagaaagtcagcttttacttttctttcccctggcaattcgtttttggtgcactcatgcatgcctttgagaaaggattctaggagaaagagaaggtctatgtcaacagagttgttatctcatagagccagttttcaaagctccttctgcattgtcactcactgatcaggtgatgaattcttcctagatagtcgcccactccacctcctacttaacctgagactcattatttagctatttctgcttttgtaaaaataattcagatattaaactccaattttaatctatcatccaagggtagatgtagttgcttagtagcattttggaaaaaaaagaaaaaaaggtttggtttggttttgtgacggagttttgctcttgtctcccaggctggagtgcagtgacacaatctcggctcactgcaacctccacttcttgggttcaagtgattctcctgtctcagcctcccaagtggctgggattgcaggcatgagctaccacgcctggctaattttttgtatttttagtagagactcggtttcaccatgttggtcaggctggctttgaactcctgacctcaggtgatccacccgccttggcctcccaaagtgctgggattacaggcgtgagccactgagcccggccaaaaaaaaatgtatttattaaaaaaaaatttttttaacccgccgaataattcccataagagtaacaaaaaggaccagcctgaccagcgtggagaaactctgtctctactaaaaatacaaaattagccaggcgtgatggctcatgcctgtgatcccagctactcgggaggctgaggcaggagaatggctggaacccgggaggcggaggttgccgtgagtcgagatcgcaccattgcattccagcctgggcaacaagagcgaaactccgtctcaaaaaaaaaaaaaaaaaaaaaaagaaagaaaagagtaacagaaagatagggatttttaggagacaattagataaaaatgtatgtgatgactgtataaggaggcctgtgtgtatgaatttatagggagtagaaccgtctctcttcttagttggtgactgtttggggcctggtattttaatagatgaacactacttttttaattttttatttttttaaccctacccttaacccatgaacactatttttaattaaagtatctgatgtaaaattattttgagtttttaatattttgataaacgtgtattcctgaaactttttgacttacttatcttacatgtggtgtcttcctgtatatagtacattatatcaatttctacttgaaataaatattttg

SEQ ID NO: 203171 - DNA, 1870 bp, Homo sapiens
ctgcttctgggaaaaagcaccctctagaagcaatttaggacgaggttcaggttgattaatggtatatttgtttcttaaatattagagtctatttacccatgtcaaagcgtcaagaatacctgcggagttccggggagcaagtactggccagtttcccagtgcaagccacgattgacttctacgacgatgagtctactgagtctgcttccgaagctgaagagccagaggaaggacccccacccctccatcttctgccccaggaggtgggaggtcggcaggaaaatggcccagggggaaagggcagagaccagggcatcaaccaagggcagcgatcctcaggagggggtgaccactggggggagggtccgctccctcaaggtgtctcctcaaggggtggcaagtgctcctcatccaaatgaatcagtctctgtctcctgggccctgctctgggacctgcccctcacgttctcttggggacacccgagccaggacactacgcatccctgctgagtgtgcagaggctagaggcttctcgggcagcccctggcctgcacactactcatgacagaaagtcagcttttacttttctttcccctggcaattcgtttttggtgcactcatgcatgcctttgagaaaggattctaggagaaagagaaggtctatgtcaacagagttgttatctcatagagccagttttcaaagctccttctgcattgtcactcactgatcaggtgatgaattcttcctagatagtcgcccactccacctcctacttaacctgagactcattatttagctatttctgcttttgtaaaaataattcagatattaaactccaattttaatctatcatccaagggtagatgtagttgcttagtagcattttggaaaaaaaagaaaaaaaggtttggtttggttttgtgacggagttttgctcttgtctcccaggctggagtgcagtgacacaatctcggctcactgcaacctccacttcttgggttcaagtgattctcctgtctcagcctcccaagtggctgggattgcaggcatgagctaccacgcctggctaattttttgtatttttagtagagactcggtttcaccatgttggtcaggctggctttgaactcctgacctcaggtgatccacccgccttggcctcccaaagtgctgggattacaggcgtgagccactgagcccggccaaaaaaaaatgtatttattaaaaaaaaatttttttaacccgccgaataattcccataagagtaacaaaaaggaccagcctgaccagcgtggagaaactctgtctctactaaaaatacaaaattagccaggcgtgatggctcatgcctgtgatcccagctactcgggaggctgaggcaggagaatggctggaacccgggaggcggaggttgccgtgagtcgagatcgcaccattgcattccagcctgggcaacaagagcgaaactccgtctcaaaaaaaaaaaaaaaaaaaaaaagaaagaaaagagtaacagaaagatagggatttttaggagacaattagataaaaatgtatgtgatgactgtataaggaggcctgtgtgtatgaatttatagggagtagaaccgtctctcttcttagttggtgactgtttggggcctggtattttaatagatgaacactacttttttaattttttatttttttaaccctacccttaacccatgaacactatttttaattaaagtatctgatgtaaaattattttgagtttttaatattttgataaacgtgtattcctgaaactttttgacttacttatcttacatgtggtgtcttcctgtatatagtacattatatcaatttctacttgaaataaatattttg

SEQ ID NO: 203172 - DNA, 1936 bp, Homo sapiens
caaagcccgaggccgcggggaccacagagggacggagaagccgggactcctcacatcccacatccggcaggggaagcccagcagccccgcgccgtggcgaccttggatccagacacctggagatgctgagctgaccagaactggaaggccgagtctatttacccatgtcaaagcgtcaagaatacctgcggagttccggggagcaagtactggccagtttcccagtgcaagccacgattgacttctacgacgatgagtctactgagtctgcttccgaagctgaagagccagaggaaggacccccacccctccatcttctgccccaggaggtgggaggtcggcaggaaaatggcccagggggaaagggcagagaccagggcatcaaccaagggcagcgatcctcaggagggggtgaccactggggggagggtccgctccctcaaggtgtctcctcaaggggtggcaagtgctcctcatccaaatgaatcagtctctgtctcctgggccctgctctgggacctgcccctcacgttctcttggggacacccgagccaggacactacgcatccctgctgagtgtgcagaggctagaggcttctcgggcagcccctggcctgcacactactcatgacagaaagtcagcttttacttttctttcccctggcaattcgtttttggtgcactcatgcatgcctttgagaaaggattctaggagaaagagaaggtctatgtcaacagagttgttatctcatagagccagttttcaaagctccttctgcattgtcactcactgatcaggtgatgaattcttcctagatagtcgcccactccacctcctacttaacctgagactcattatttagctatttctgcttttgtaaaaataattcagatattaaactccaattttaatctatcatccaagggtagatgtagttgcttagtagcattttggaaaaaaaagaaaaaaaggtttggtttggttttgtgacggagttttgctcttgtctcccaggctggagtgcagtgacacaatctcggctcactgcaacctccacttcttgggttcaagtgattctcctgtctcagcctcccaagtggctgggattgcaggcatgagctaccacgcctggctaattttttgtatttttagtagagactcggtttcaccatgttggtcaggctggctttgaactcctgacctcaggtgatccacccgccttggcctcccaaagtgctgggattacaggcgtgagccactgagcccggccaaaaaaaaatgtatttattaaaaaaaaatttttttaacccgccgaataattcccataagagtaacaaaaaggaccagcctgaccagcgtggagaaactctgtctctactaaaaatacaaaattagccaggcgtgatggctcatgcctgtgatcccagctactcgggaggctgaggcaggagaatggctggaacccgggaggcggaggttgccgtgagtcgagatcgcaccattgcattccagcctgggcaacaagagcgaaactccgtctcaaaaaaaaaaaaaaaaaaaaaaagaaagaaaagagtaacagaaagatagggatttttaggagacaattagataaaaatgtatgtgatgactgtataaggaggcctgtgtgtatgaatttatagggagtagaaccgtctctcttcttagttggtgactgtttggggcctggtattttaatagatgaacactacttttttaattttttatttttttaaccctacccttaacccatgaacactatttttaattaaagtatctgatgtaaaattattttgagtttttaatattttgataaacgtgtattcctgaaactttttgacttacttatcttacatgtggtgtcttcctgtatatagtacattatatcaatttctacttgaaataaatattttg

SEQ ID NO: 203173 - DNA, 531 bp, Homo sapiens
gtggctgttcttgagttccccttatgttctgaccaccgtttaaccaccagccgggttcctgcttatcttgcctgggccgggcacctgtccccagagacagagcaggagagaacaaaaagggatactggggagttggaagaggaaatgagagagcaggtgtgcatagtaggggtgggaaggaagtggatgggacaggactgggcaggcatcattcaagagacgggctagggtgcagatggagatgtaggagcaagggtgtctatggcccttagagcactttgctattcagaattctctatctgggcatttttgtggagaaatgggtcatggtcttcatcagattctcacatagccagtaacccaaagaggttaggaagatctaagttagtcataggggcaccagaaaatggatgggattgtccagagggagtgaatgagaaagcctacggcagggaaaagaacatttaagggatctgtgaagggcctaatgtcaggaggatgagtgtggagcacctcttcagaaagggtctg

SEQ ID NO: 203174 - DNA, 422 bp, Homo sapiens
agcatgacttgtattgattgatgtaacccttcctacaactctaagcagtacatactattatcatcccaatttcccagatgaggaaaatgagaaacagagaggttaggcaacttgcccaaagccagacagctagaaaatggtggtgggggagtaacaacctaggcaccgtggctccagttcatgcatccaaccacacactatgctgcctccccaaccacgcactggttgttatggacaaagataccgaacaaacacccacaatacaaaacaaaaaagtcctacaagttttggggaggtacaaaatatattacttttataccacatagagttttcggactagtttgtacagaggtgcatttggtttgggtcccattatttcccccaagatgaactggctgtgtctcttaataaaaaagcagaaa

SEQ ID NO: 203175 - DNA, 232 bp, Homo sapiens
ccgtcaatggcattgccagcttctgaaaatgtgcacctctgactggtgaggcctgcttcacacacctgctgccaagcgaagggagacagactaggaaagtaaattcctgatggcaccacctacccgcttcagccgggacctccctgcggctttaaatggcaccctggtcagctcctagagagaggccattgaactggacttggcaggggaaatagtacctgaagcaaccaaa

SEQ ID NO: 203176 - DNA, 336 bp, Homo sapiens
gaagcatagagatgcccaggatctctatatctctatatctagagatcattctagtctaccctcatttggtaactgatgaagattaattgaaaagggatttgcagtcacaggatggcttggcaaactccaaccgttaggttcatcttaatagtatatttgtttgtattattattacacctttgttattaaatgctgactgtgtctagcccaccaagcctgcctcctggctcagtagcctgagtggaacaggcctcggcacagaggaaggagaacctgcccggaaaaaaagagtgggtggatgtcagtgagggtctggtgtctgtgccgtgaatctcc

SEQ ID NO: 203177 - DNA, 240 bp, Homo sapiens
taacggacctcaggctatccaaatgatcacaacttcctaattaggaaggtctgaattaatgaaggttcaagattgcctccttgggggctaatgtgtatgcaagctgcgacccactggtaacagctttactatttactcttccctgccaggggattagtggaatctaaattgaacagttaggtatttaaaaccactcatgtggttttaaccactaaaagggttgttaagcaagtcttcttt

SEQ ID NO: 203178 - DNA, 558 bp, Homo sapiens
cctggaggaggcggcgccggggcgagacctccagagcgcaaggccggcgggagaaaagctgaggaagtggaaatctgtggctggagctcagcagggaggatttcttctccacgctgtcctcgagggccgccctgaacatgttgtagtggagcttccgtctgtcttcagcttccgtcaacactgaaccagctcatctaagcaccagacacaagattttactgcttttgtcaggtggagtgggaagtcgcacccacgtctggccagttgggtcggctgtaactcagactttggactgacttgtcacccagctcatatagcaaggagttcctgatggcagctgggggagctgacatcagtgtcagctcagactcttaggcagttacctcaatcctcccaatagttcctaatccttacacaatatggagccaagtccctaaagatgctcattggttcacagtattagacttaatgcctaattaaggatgttttcttgtgtatacctttacacctggactcccagtatatttttgcttttgaatgaactgatccagacactca

SEQ ID NO: 203179 - DNA, 1791 bp, Homo sapiens
  misc_feature (1)..(2): n is a, c, g, or t
  misc_feature (4)..(5): n is a, c, g, or t
  misc_feature (463)..(463): n is a, c, g, or t
  misc_feature (512)..(512): n is a, c, g, or t
nngnnagagaggtgttaactgagttgagcgttaaagaatgggtggcagttttgcaggagtgaaagcagaagctcagagaacctggtgtgtttgagaggaaggtgaaaggatttttaatgcacctgtgagccaatttttggtttctgaagaggaggaaggatgcagagtaaaaggaaatgtaaaagtgttgtacaccagctctcagtaaccttagaagatttatatgatgctgcaacaagaaaacaggctctgcaaaataatgtgctttgtgacaggtgtgaagacagaggtggggaaaaaaaaaaggaacagtacagtgctgtcataattgccaaggtattggaatgcaaataagaattcatcagatagaacccggaatagctcagcaaattcaagctgtgtgcatggagacccagggccatggggaacagatcagtcctcaagatagatgtaaaagctgcancagaaagaagatagttttgggagaagacgattctagaaattcatattgncaaaagcatgaaagatggccagaaaataacatctcatgatgaaagagaccaaaaaccaggactggagccaggagatattatcattgcattagatcagaaggaccatgctgtttttacttgacaaagaaaagaccttttcatatgtatggatatacagctggttgtagtattgcatggcttctgaaaaccaatatccactcttgacaactgaaccatagtcatcatctctcatccaggtcaaactgtcaagcatggagccatcaagcatgtgttaaatgaaggcaggccaatttattgtagaccacatgaagagtcacttaatcattgaatttaaggtaaactttcttgataatggctttcccttttttgacaaactccttgctggaaaaactcctacaaaagagtaaagaagtagaagagactgatgagatgaatcaagtagaatttgtggactttgattcaaatcaggaaagatgatgctgatgccactacagtgcagaagcaaatgtgggaccattacaatggaaaagcatgaggatgataaacatcatttcagaggtgttcagtgtcaaacatcttaatgggaccagtgataatactcgctgctggcattttatgggcagtagtgaatgagcaagggactgtaatcctaatatgctcactacttgctattgttttggttttactattcaactagagtagtgttttaaaaattaaaggaagaataaatacaatttttttaaaagttgacaaggatgagcatggccaacaaacctctctccactttggcaacaaatagttttaaatttggtttccagagtaagttaatagaaggtataacacagagaaccagaaatacaaagtgctctattagtgagatatcagaagtgattattgctgattattatctgatattttataaaacaatctcttttgagatattaaatatatactgagattcataaaacggtagatacctaaattatctcatttagtaaatcagtggggctatttaatccagataatttaaaccctaagaataattttattttccagtagattgacttttacttattttatttattttcttttacataaactcagagggaattaccctttttaagaccatgtcatttaatatttccagttttaaaaagaaatagagtatttggcataatgaatgcctattttactatttgtctttatgtcatatgtaatttttcctcttaaagtttattttaaatgtgtttcaaagtccaataaagggaaccctaatcca

SEQ ID NO: 203180 - DNA, 325 bp, Homo sapiens
tgattctatagtaacagtttagttgagaaaataaatcataatttgtgatttcaaacatttaatatgtgcacatgtatattataatatactcatcctttatatttatcatgcttttttgaataaatttgccaccttattgcatatgaagaatatctccatattcttacagctgtttttcttggttgctttctaattcctttcctcccttattggttacctatgaattgctcagttctaacaatgatttgtaaattttaatactatagatatattgctgttaattattacacctaaaaataaattattttacagaggctactaagaa

SEQ ID NO: 203181 - DNA, 625 bp, Homo sapiens
ggcaacagctatacccgtcagacagctgtcccaggaacagcatataacaggagatcagccttgacgtgatacagcttattaaaccgctatagccgtcatacaggcatatacagacatacacgtaaatatagagactaacatttgctaaaaatgctataattgtagacatcttaacagatactgaataccaattttaaaacctgtaataaagtagtggctctcagggagaaaggcagggtgggacagaggaaactaggtgtggctttagtgagtgtgcatggacaagcaggagggatcctgtggtgatgggaaagttctgcatcttgaccatatccacgtcaagatccttagttccaccattgtagtacagtcttgcaagatgtcatcattcggagaatctgagtaacccctccgaatgatctaaaaatgaaaagttaaatttaaaacactgataaataagaattttgaggtatttgctgatacaattatatactgccttaactttcaaatccctatgcttttcttaggccaaccagttctgcctcttctgtgtcagatgttgactttcccaacgttcctccagctgaggaaactcatctatgcaccaaaactttgttattcacgt

SEQ ID NO: 203182 - DNA, 467 bp, Homo sapiens
aggctgtatatctttctggaaatcatcccataggtatcatttttcataactgggcttcgataagaacagggtacagtaagttcaaggttacattttctggcaagatcctaaaatgtaattatatgatgattaaagatgaatttgcatactttggcaattcaaaacagaactcttccacaggaaccgaaggtttaattatattctattcaaagtgctttgaggtcttttgattaaagcattgcctagtattgaagacagagataagatggccacactgatcctagccaagtcagaataattgctcataatgtagagtagactttaacaattaaactaaggccgggcgccgtggttcatgcctgtaatcccagcactttgggaggccaaggagggaggcttgcttgagcccagaagcttgagaccagcctgggcaacatggtgagaccctgcctctacaaaaaatattt

SEQ ID NO: 203183 - DNA, 728 bp, Homo sapiens
actgtctgaaatgtgtatgccagatagagtcatattatccattgaaactgaaattttaaaaaaggatcaaaagtagtattgtgagggaggtcttcaagagttctactgggtaaagcaagcaagctttagttctttcttgttcgcttcattcattagccaatagcatgttttcttctgccctgtttttgggttgttcagataaagtgataccttttcaggctgtgataggcatgctttcttttttctttctttttgtaacatattgataatgtgtttactatattatggtctaaagcaggatttcatagactttttcatttaagttaaacatagtggcaattgatgagtattttggtaacagctttatttgcaatgctttatgcctttaaaggttatagattactgcatttctcttttccttggagaaactgcatagcaaagttccccagattttcctgatttccatcttccattggaaaacaagttcaatatccacaataaaacaaggaagctgaatactgaaaaattaacttatttttaaggagtgatgtgaaccagactgttctgaggtttacgactgcattgtatgggaacaaaaagaagcaacggtgtcattgctgtggcaagctgtatttaaatgatgccttttattttttcaagatgtgtcgtcagactcagttgtgaagattatggaactgaaacaaatgggaaatcagtctctcctgcta

SEQ ID NO: 203184 - DNA, 180 bp, Homo sapiens
aggctgacttgaggacccgaaaatgacatataggaggtgattccatgatttttttgtcacctatgcatttcggcatctttcagttgtttaaggcagttctctacagaagagcccatttgccgttgtgcttcctgagtgcagaaggcaccctcctgtcttcctcctctgatacctgctttc

SEQ ID NO: 203185 - DNA, 183 bp, Homo sapiens
cgtatctgtgctgtccctttctgcggacagagaataatcttgccaaacatccaaactgctagaagccaaaaaagaaagaagcaaaatggacaagctgattccatttcctgtaagtggttagttccctgctttgttaaatctcttacatgtatcactgctaatgcctctgtccagggtggtatg

SEQ ID NO: 203186 - DNA, 411 bp, Homo sapiens
  misc_feature (43)..(43): n is a, c, g, or t
ccaatgtcttatctttcttaagtctagtgtacttccatatttntgaagtaagaagtaataatctcttaagaagattgaataaactccaactgaggaggaaatatttcttgttagagtaatctgagcgcttaattgacatatttggaattaatcagaaaggctaatagttatataaatatattggattgtttgtgtgagactaattcttggtaaatgaacatgaactacaagaaatggtcgacattagtgctgataaattctgaatctttacatgaagaatatgtgtcacagctgagtgcagtggctcacacctgtaatcccaacactttgagaagccaagacaggcaaatcaccagaggtcaggagttgaagaccagtcttgccaacatggtgaagccctgtctctactaa

SEQ ID NO: 203187 - DNA, 364 bp, Homo sapiens
agagaactgaagttacaggaaaaaaaaaaatacagaaatctaaaaaaatggtaggtgcctgcaggggaaaacagaatctgagcatttgattactgggacaaatgccatgaaaatcaatataaaagcaggtagaaagatttaactagaaattacaataaattgctaaaggccaagtgtgggctggcctgagaataggaatcccctcaggtttcaaatatgggggtggggttgcagccacctgcagctgttatcaataggaagccacaggaaagatcagagatcacagagaaagacccctttggtactatctgggggaaaggagtagcagctatggctgaaaatctgccccaatctacctttctta

SEQ ID NO: 203188 - DNA, 262 bp, Homo sapiens
catttaatgaacaggcattgggtgtgtgtgtgagacaagaatgagtttttggtggatcctttagaacattacagttgattgccaaaagtctcattttatcaggtacttatttttgaattggtgacatttcagtgtgactgtgtagtagtacttcacagttccaactggatattgttctttgattagatgaatatgtcatgttaaggtttcattggtttatttatacttgggattaaataggattattgggcaacctaaaata

SEQ ID NO: 203189 - DNA, 444 bp, Homo sapiens
aggtagtcaatatatcggacttggacagtgcccaaacaactattacaattcagaccatgatttctggcccaattctggaaaagtatttgctttccaagataaaaatctgtttggcagaaaagaaatgtttgttttaaaataaaatccatttggttaataattatccacccagttttaggttgctttcctcatttctgtaaataaattttcctacattgcctctcccagtgattgatgaaaagtggacttaaattttgaggaaggaacctgaagaacatatccaagtcctcactaccctgtttggtaatagttgcatctaatgtcttctatttttcttcctgaattaactagatagtatagtgtgtaggaagtacaaagcaggtattcatcaggagttacagagatttaacatgggtcattaaagtgctgtatgttggcctaatt

SEQ ID NO: 203190 - DNA, 172 bp, Homo sapiens
tagaaagtgatccttgactgagtgtggtggctcatgcctgtaatcccagcacttcggtctcagaaaaataaaagtgatccttcaccaaaaacagaacatgctggaaccttggacttggatttctagcctccagaactgtaagaaaataaatttttgttgcttaagcaaaaaa

SEQ ID NO: 203191 - DNA, 197 bp, Homo sapiens
tctgagccctcgttgcaagttggggtgggggagagaggatcctggcagcagagctgtgccctctgagagtgactacatgggctgtgtgcttgggcaggcacaaaaacatgggcacgaggttactcaaggcttggaggggcagtgggcggccagggtgggtttggagcgtctgtctggggagctggctggggagctca

SEQ ID NO: 203192 - DNA, 425 bp, Homo sapiens
ttactgaactcaagaaaatattttgtaaatttttacaagaacagtagcatcacaccaacccaaatcactacatttcttatttttcatgctcaaaacagtacatttgtctgacttgttgatatcatctggctacttgatgaaggtaaattttgagatttgatcctggagagaagacagttttctacaaagtaaggtctatatagtttcagtcctgggttagaaaagagcaacagcctcctgattctattaaaaataacactttcttgatgtattttgataatccgtaaaacactactctgtaagtactgttttagacagttagatataaagaaaaacatacattaaaacattcaaactctgtttaatgctttttactcacacactaacagtccaacccagtggttctcaaaatgtagtatctaaac

SEQ ID NO: 203193 - DNA, 622 bp, Homo sapiens
aagcagttatacagactcagtatagtctcgtccagtcgcccaggctgagtggtgacgcgatctcggctcactgcaagctctgcctcccgggttcatgccgttctcctgcctcagggtggggccctgccggcccctgcactgctggctgttgtggacacagccctttctgtggggctctatatacaagagcactttccctcgcttctctctttgggtatccagtaagagcatttgtatgtgaggctgttgagagaaatttcttgtttttttaagttttagttctgccttatgtaaatctctgtaaacttttccatgtaaggaaagtgtgtctgagtcaggacccatctgcagtttttctccctgcaagcatcgtgcagccagccagggtgtgggcagcctcagtttccccatcctcttcacagtggagtggcccctcgctgtgttgtccacagctgtggtggggaagcctggttggttcctggagccgggacagtttgatggcacagcagtggggtgcagggctgcaccgtcatgactggaccatttctgggccttgtcatctgctgatgggagcctcgcgtgggcctctgccgcactcaggaatgtctggcgccctttgagg

SEQ ID NO: 203194 - DNA, 420 bp, Homo sapiens
gcagatacttactgggtgctggctatggcgagacacttcgttgggtgctgggaagacaaagaagttaagacacagtatatgctcagcatactaagtgttcatcagaagagataaaccactaaccattatgtgctgtgacaaattaatcacttttggaatgaataatgtgctgggggagtagagtgctttggctggagaaaaaactgatagggaacatgttgagaagaaggggatggagcttagctctgagggttaaataaaatttcgccacatgtagaggtggaagagagcattccaggggccagcataagcaaagttgctgaatattaaaattaaatagcgcttttggaaatatcttgagttgtttcttgtgggcaagagaggggagagggctgaactcatctcaagaacccattcctg

SEQ ID NO: 203195 - DNA, 845 bp, Homo sapiens
gtacaatatccaaccctttttaaaggaaggaacattagaaagtatttccctgaggctttacgattacacttggggtatagaaatggcaataatcctggcaggctcctccctcttgctggaattattttggggctgaaggaagggagacactgactatttttcctctacctttcaactcatcaacatatgacggctgatggtagagttttaagcctgtgatttatctgctagcatagactgtttcaggcaagagtggaaagtgttgggggtgtcctaaatagaaacaatgatagggtgtcagaaatctagacaagttgtatattattagtgctggaactttttcttctatgggtcagaaaaagaaagctgacttaaataagttttgctattgaggaaaataaaaattgaatgattgaatgaatgctaaaagatacctgaagttttagtgtcctagaattttcaagcaccgaaagaaaaagttaaatatattttttgatagagagatgagagttaacacttccttggggaaattaggataaatttttctatttttcccccctcacactttgcaaacacattttatccccacttcaactctatgaaggtataagtatcactattcttacttgataaatgagaataccaacacctagagagcttgagtaatttgtctaagagcacatagtggcgtttgctgagatttgaacacagattatctgactaaaggtggtgcccttgatctgagcacatataatagtggttcttaaagtgtgagaattgtggactggcagcatcagcatcacctgggagcttactagctcaggcttcatcccaggcctactgga

SEQ ID NO: 203196 - DNA, 515 bp, Homo sapiens
tctgtcagaagaatgttcatggtagctttattcatagtagccgtaaaaatggaaacaacctccatgtctgtccacagtagagtagataaattttagttcattcaaacagtggaaaactattcagcagtgacgaaacaaatgcctgctataagcagcaacaggtgactctcacagataccatgttgagtgaggagccaaaatcaagaaaacacaccatttatgtcaagttcagaaacaggcagaatgaaggaatcgagatgatggaagtaagaatagtggttatttggggagaacagggaactgtcaactgaaagtgtgggacccacaactgcagatttctctttctgtctgttccaggacacaacctcagctttagtttctctccgaagtccccctccgttttccaaaacaattgactcttggtgcaggcggatttccctgggccccatagatgagagtggatgcctcctctgggctcctggaggaccaggaacttccccttggggccacttacc

SEQ ID NO: 203197 - DNA, 540 bp, Homo sapiens
cgaacatgaggcaggcatgtctggtaatgacaggaagtcaagaaaacttttcaggggattgggaagcttggctgataacagatgatgagaggagtgggaggagcggcaagtggtggtggagtgaagcagtttttttcctttctaggtgtataggacatgggtacattagctaagaagtccaaaatccatgaggttatttgttgactgggggggtgtgtgcgtgcgagagagaaagagatcacatcatattgttaacagccgcaataatggcatattttatggcaggcactgtgcttttcactcattatcctgtttggtccttttaagagttcaatgaggtaaatccattttatagagaaaacaggcttaaggtgattaagtaacatccccaagctgaaatagctagtaaatggtagtggtaggatttgaacctttgtttttgatcattaggctatagttcaagcaagtactatagaactatttatcgataagatatggcctcttctgagaaggcttctgtaaccatcctcccctccctta

SEQ ID NO: 203198 - DNA, 550 bp, Homo sapiens
gacactggatgatatggttttgctatgtccccacccaaatctcatcttgaattgtagctcccataattcccatgtgttgtgggagggacctggtgggagatatttgaatcatgggggtggtttcccccatactgttctcgtggtagtgaacaagtctcacgagatctgatggttttataaggggtttccctctccacttggttccattctctcttgtccaccaccatataagatgtgcctttcaccttctgccatgattgtaaggcttccccaggcccgtggaactgtgagtccattaaacctattaaacctgtttttccttataatttacccagtctcgggtatgtctttatcagcagcatgaggacagactaatacactggatatcaggtaactaggcacaatgatttctgagaatgtggaaaataaagtgagcctgcaattaacccagcttcctttcttgagagggtttccaagctacagtatggacaagggtacccaggtggggcctggcaggctcttcgagttgggaagacagagctgagagtcc

SEQ ID NO: 203199 - DNA, 399 bp, Homo sapiens
catagcaggaccgtttacatttcctctgctcacaggtgccgcccacaccttgcttcctatttcatgtcctcctcgtctctgtagttgagggaagagtattccattcaacagatggaaacaccattgcatctgactgccatgtctttgaaacctgccagaccaagtcttgactttcgttttgttttttttggtggagctgggaggagacagatgggccatacagtctatgtgtgggtgccttggtgtgggacacaagaaagtgaggcaggacgtggagcaccaggtcatcagagctggcagaggctgctccaccgtgcaccgaagacttggcatgtcagtggagccaggaagtctccgatgcagaagcggaagtcagtgtggccacaggagcgaggtggc

SEQ ID NO: 203200 - DNA, 368 bp, Homo sapiens
tgttgggattagaggcgtgagccactgtgcctgggctccaggctttttctatcttgatgctccaatatcctatgatgatgccctcgttcccatggttcacagccatgacacaatcccagtaggtccacttttgtcctggaatccttggaacctacacccaaagccagtttaatttcttttgggtacctgaactgatttgaggaccttctggaccatgtaaggcagcttgagtctggtatggatttatagaattaatcaagttgaacaatttctcactgcttgtctaatccatgccttaccctcaagccttctcaagtgggaaagactaataacttagccttagttgggtatgtatgacaagaatgcca

SEQ ID NO: 203201 - DNA, 351 bp, Homo sapiens
aaaaatattgtgtcatgaaaacgagaaatctgcacttaaatagcaccctaacattaaggtttggcccttcaaaccctatacaaattaaatctataaaaaggaagaaaactataaatcatcaactttaaggaaatgcacattgcaattcccatgaaataaattcaggctttcttaacataaaatattctctcttctgacttaattcttgtgcatgcagtaataatttcctcatcaagaactcagattctgatgtcagactgctggtttaaatccctgttctaccattttctagtagcattacttcagcaaacaactaagctctctgtggtctcttcactataaatggggaca

SEQ ID NO: 203202 - DNA, 639 bp, Homo sapiens
cgaaccaatcactaataagaggggtgagctcacactagcaggctggttgcaaaacctgccatagaggaagggcgggctgggtgctgggattggaaccaggacacacatgccactgtatctgcattctcttcctcacttgttcactccccacctctagatctgcgttattcattctcttatattcagtctgtctttctgctttgtattctactggacaggaagcctggccatcacagactgctgagcaatacacgtttcagtacaggcccccagagagagtcaccgcatgttctctcagcccgagtccaaaacaacccgaggagtggaggatgtctccctccggactaaccggggccgaggaaagggttcttttgacaggctcagctgagtcagatgtcccccacccacccccggccaatcagctacaggcagggatgaagtcattgctccctctgtcccctgcctctatgtcattttcgaaaatgacatagaggcagggtgatcacgaggtcaggagttcaagaccagccgggcaaacatggtgaaaccccgtctctactgaaaatacaacaattagccaggtgtggtggcgtgtgctgtagtcccagctactagggaggctgaggcaggagaattgct

SEQ ID NO: 203203 - DNA, 260 bp, Homo sapiens
atgattcagagactctgggacccactcagggaacagatgaatgtataaatgaatgattatttcttgcttggattacagcaaaagacttttggctggtcttattgcttactccccaccccctttgttttgtctcagtccggcaaccagaatgaatttttttctttttgagacagagtctcactctgtcaccgaggctataatgcagtgtgatcatggctcaccacagcctcgacctcctggggctcaaatgatcctcccac

SEQ ID NO: 203204 - DNA, 552 bp, Homo sapiens
ttattctgggccgatttgagtgaccatggctcagggtacagtctcaagagatcctgagaaagtatgcccaaggcagtcaggttacagtttggttttaagcattttagggaaatagaaattacaggtaaggtatacattggttcagcccaaaaaggcaggacatcttgaagtaagggcttacaagtcatgggtatgttttaggaattctttagttgccaattagttgaaagagtaaaactactgtctaaagacgaggttggtagaaaggaatgcttaggtgaagattagaggatggtggaggtcaaggttcttgttatatacataaagcctcatgggtagcaggcctcagagagaatgatggtaaatgtctctttttagaacttaaagtcatcagactctcaattaatctctcctagatgcaggaaaggcctagaaagggaaggcccagttgcattaacagagattctctacaaatgcaaatttcccccacaaaagatggctttgcagggccatttcaataggttagcactgtggcagccatctgaaaatacg

SEQ ID NO: 203205 - DNA, 319 bp, Homo sapiens
ctagaaatagttttatatatttcatacagttttctagtaatttgtggtaggaggtgaagtctggtgctagttactccattatagacagaatttgaaatttctagatttatattttaacaggatcactttggttcctgtgtttagttgagaataaatgtcctatgtacgctttgtaaattttactttagttccttggaggaaaaacaaacacagataaaatggtttagagcctatttgcgatttttgatgtatattctgaggaatgaggagagacaggtgttcatgctttcatggctttgctattgctatcacataggga

SEQ ID NO: 203206 - DNA, 588 bp, Homo sapiens
tccccaactgctgttgctactcctgcctctacatagaggcaggaagggcacatgcaaaggcacagaagccacagggtggatccagtactctggaaactcccaggagttgggcatggcaggtgcatcagacaagattcggggataggaggagaggcagtttcccatcttggaggagtcttataggagtctcatgggagacaggttttcagacaaaagtcttcaggagtctgattttgtcatgctaaaatgtaaatgtatgaattttgcatgaaaacatttagaaggctctgaaagattttaatatttgatataatcagtttttttgtttgtttgtttgttttttgcaggggggggtggtgggtggacagagttttgctcttgttccccaggctgaagtacagtggcgcaatcttggctcactgcaacctccgcctcccagattcaagtgattctcctgcctcagcctcccgagtagctgagattacaggcatgcgccaccacgcccggctaagttttgtagttttagtagagatggggtttcaccattttggtcaggctggtctcaaactcctgacctcaggtgattcg

SEQ ID NO: 203207 - DNA, 211 bp, Homo sapiens
acagggtaatgagctgagaaactgcccaggagcttccaagttcagtgagacagggtattaatcctatattggatagaccgggccaagtggctcacacctgtaatctcagcactttgagaggccaagggggtggggtggggggtggggagtggattgccaggtcaggagttcgagaccagcctggccaggatggtgaaaccccgtctctact

SEQ ID NO: 203208 - DNA, 640 bp, Homo sapiens
ggcacatgtggcaagcagaggctctcagtatagggagagggcacagaggcagagaggctgcggcgcacatgatgcgcagtgtggcccacatacacgtggagacacttcccatacacagtatgatccacagacacacacagaaggggccagaaagagggggagtcaggcacacatgaggaagagccacacacagtcagagactggaagacagaagtaagcagaaagaagacagagatggaaagtcacgtagaggtgacagagcctgagggtccaagggatgagaaggatagtctcagttaaaaacaaagacataaatagagagaagcccacaatatagaaagggggggataaccagatgaactagtaaagagggacagagaaagaagacaagagagcaaaatcgacaggaaaactggaaaaggaggaggagttagacttagtacagaaatgatgtgggaaccgaagcaagagaattccaaaggccaggttaaaaaaaaaagagatggaaaccaacacccaataaagtgcattagtgtggggagtggaacattaataaagaacattttagcttcataaacaaaaatgtgcgtcatcttcccagtcactaatactttctggttgctgcccacctacccctccc

SEQ ID NO: 203209 - DNA, 493 bp, Homo sapiens
agggcacaaatttccctttgtgaagttgtcacccccagactccctcccttctcccacaggagcaagaggaagtgagatgactcaccactggggacactaccgacttgaatctgcataaacaaacctcacgaaatagccccgtcttccatcagtttcccccatatatttaccgtcccacaatttactgctcctagaagcccgaagccttttcctttgtcttgtcatttctcaaatcatgtattgctttctgttaaaatggtatagaagctcttaggcttaaccatttccttgggctttcatttcttctgtgagattcccctgtacatgtaaaaattaaaatattgacatcaagtgcaagtatggccttttctcctgttaatctgcctttatttcttattttttgagacggagtctcactctgttgcccaggctggagtgcagtggtatgatcttcgctcactgcaacctccgcctcccgggttcaagtgattct

SEQ ID NO: 203210 - DNA, 392 bp, Homo sapiens
ttcttttcattatctacctagaccacatctaaatggtattgggaagcatgccctccttagggggctgtatgggcttcagaatctgccacctgcttgcaggaggttgaatgccagaggttgttttaatttcaaacattctggcaggattctgtaaactatatgtttggtttgtccatccatttcccttaacatttagaagcatgaaaagaaaaatatttggtagacatctaatgtgtttacttctagtcagtgtctcatgccagtatctgtttttcctatacacagttaccagcttgtctcatttctttgtccttatgcatctgcctctctcacctctgtggcagctatgtggaggccatctgaggcagactggttcaaaggctaccttcatt

SEQ ID NO: 203211 - DNA, 475 bp, Homo sapiens
tgggaagagcaggtgacagttgcagactggggcaaagctgtgtctctggatgctcatgggggccggcctcctgagacccgcagagcccaggctaccccacttgcgtgggtcttgtgtctcacagcgcctcctgccaccccataaaagaggatcaatgccctccaggctaggctgctatggggaggtgcaaaaggaaagggcctcccaagagaggggacaaaacagaaagtgagacctgcctgcccagactttcactttcatagcctcccagcatcatccaggtggcccgtagtccccaggcccacgtgggttgagccactgcaagcccaagacctggcccctgcatccctgatggccagaaggaaggaaaggtccccgacggcaggtgacccatggcagagccagaggttccctgtgcctctgggactgggggggcacagattgagagtgggtgctacgtggggttatgctggga

SEQ ID NO: 203212 - DNA, 391 bp, Homo sapiens
tctggtccaagcatggattttactcaaaagggaagacaagctcaaagaggtgctcaatccacccaaatgcacacggccttctcattcctctggtcagccagctataaaaccaaatgaaatttctccacttactgcacaaccctgtttgttttaagagattttattgccaattaccactgggagatctagagacgttaacaaaatcacgaacaatgggggaacaagaacttgtaattaaaattctctgtttttgttactcctgctcttcattcaaatgtcagtggagctaagtcagtagcattcttttctttctcaaatgcttgtcttggtggcctctggggaggtcattcctgttcttgtctcaggaatcaggcctgcactaccttccatg

SEQ ID NO: 203213 - DNA, 359 bp, Homo sapiens
catcatagtttgtaaaaaatgcaagcttggatggcaaaagaagggcatgtctagaacaagattaaaaaggcctattaggaaatccttgtggaaatcatgtacctgtcaaggcaggcatggttgacagtatttgaatatctaatagtaaaagcctatcgtataccacctagcaggactagagggataaatgtccttgatcagatcacaaaaccaatacaggagaaagacctagatgtggcagggggtttcaacctttctggggcaactaccacaggtctattcgagaagtaccatagtaatagaattaaaagctgctatgctgacattataatgtacccagaaggaaaaaaaaagcgaga

SEQ ID NO: 203214 - DNA, 384 bp, Homo sapiens
ccatccctcattcagcaaataatgagtgctttctgggtccctggcactgttgtagctctaggtataccatagtgaatgagacgaatggtgtatctgctctcatggagggcaacattctagcaagactgtattttcactcaggctccaggactccagtttgttcttaggtagataccaaaatatttcgtaaaatgactttctgtttacctaccgtatctcccttcagaaacaaaaaatgtaaatttggtatgacttgttctagtacaaccaggagtatatgaatgaataatctgtttttatctagggattcacattaaatgagttaatgtataataaaagtgcctggcatggcatctgactgaaaataaacatttaatacacgtt

SEQ ID NO: 203215 - DNA, 598 bp, Homo sapiens
agaattttgaagaaactacaacctggtgtgctgtgtaacaaagtctactattaccacaatctgtattcttgttctttgggcacacagctaggtcagatttcctagcctttcttgcaatgaagtaggctatgtgactgagctttagccagtggaatttgagaggaaatgatttacaccacttccaagtcaggcacaagcaagagcctgtcctttcagttgactgtactgaaagcgacctggaaggctacatgatgaaaataagaaaacaggccgagcacagtggctcacctgaggtcaggagttcaagaccagcctggccaacatggtgaaaccccatctctactacaaatacaaaattagctgggcatggtggcggatgcctgtaatcccagctactcgggaggctgaggcaggaggatcactttaggcctggtgtgttcaagatcagcctggtcaacatagtgagacactgtctctaccaaaaaaaggaaggaagggacacatatcagacagatacaataatagatgtagtaagttaggacgtgacaattctacaggaaaagaagtactgggttaaaagtgctaggcttacgtggga

SEQ ID NO: 203216 - DNA, 241 bp, Homo sapiens
atagtatagtttgaagttgggtagtatgatacctccagcttaagttctttctacttatcattgctttggctatttttcatgtctccaaggtcgacataaaaaaaaaaaagaaagaaacagaaaaggcagctagagagaaggggtaaggccacttacaaagggaatcacatcagggtaacagtgaacctttcagcagaaatcctacaaggcagaagagattgggggcctatattcagcattc

SEQ ID NO: 203217 - DNA, 172 bp, Homo sapiens
ttgatttttcactttctgcccttgattgttgagattagagagactgatatcatctttgagttctcaaaacaacatcattaaaacatgagaaattcgtagtgtcatctcattccattcgtattaaaaatgcattccatttttcctctctctctagaatagtttgaattggctg

SEQ ID NO: 203218 - DNA, 591 bp, Homo sapiens
agagagtagacttggatgccacccagccagcaatagagaagttgggaccacccagccagggacaaggccacacctcagccatcaccacccacaagcaacgcagcatgtatgagctgggacaggacaccagaaactacctcatgattgctccggaagaagcagctgcaggtgctcagccatctttatttcctgccacccccaaactatgaagacagcaaagcagcctgtggagaggctgctcacagaggcaaccccacccttacttggtgatggcacgtggaactccacctcccaggtggaaaatggaaaaattgtttccttctctgatctactgcctgagctgtcatcaggattttgaggactgacttaatgaataaaatataaaggcttagcgtgagcctgggatatgcatggtggaagagaataaatagccttttgtatatcaaagatactttctgggtaacccaatctgagaaatagctacttcagccacatctgctgttagggaaggctgagaaaatagtgactataaaatgaaatgaggcttgtaggtgaaccacatgaaatcctgtgaaccggggagaagtcacc

SEQ ID NO: 203219 - DNA, 743 bp, Homo sapiens
tgctggaaacatttggaatcttcttttctaggtattttgaaatatacagtagattattgttaactatagtcactctactgatgtatcaaacactaggtcttattcttctaagtgtatatttgtacccattaatcaacctctcttcatcttcccttcccccaaactcttcctctgataactaccagtctactctctatcttcatgagatccatttttgtagctctcacatatgaatgagaacatgtggtatttgtcttcttcacttatttcgtattcgtaagtagtgaaaagtgtgtccttaagtgagaccttttctgtcttcccagctttaatataaatacaaaagattgtgtgatactagggataaagcaacctccttattttcattccttcaaatgctagtcaaggtaacagatgaagatcagaaagtactaggaaaagaagtcaccatcacatcttgtgttgaaatttgttagggagtttcagtatcaaggaatgagtatgtcatgcagcagatgagcctctaggatgaatttgattaattcttcccagcagcaaaatctcataatcaaataatgttgcttgaggccttcttttgctttggagttagagaatctaaattgtgtaagctctagtggatttccattctgtcgtatcaagtatcgatggtctgtgtgaatggaaagagcagattttctgttgggctatatatatgagctcattggaaagagttaagaattatt

SEQ ID NO: 203220 - DNA, 282 bp, Homo sapiens
ttattaagatggtacatggtagctaaaaatctgattctgaatatacagtgagaacataaaatagaaccagaaccccacataataacaactgggaacaaaagaaagaaaacatatgaagaaaagtgataagtggatgacaggaaaaacagagcggaagcaaaagaaaacagttttgaaggatttgttaacaacagagtgttggttaagtacatacggtttataaggccaaaggatttggcaatttgaaggtcaatcatgaacagaaaacatagtgttctacga

SEQ ID NO: 203221 - DNA, 334 bp, Homo sapiens
tgggcctcagataacaccccaggtgaagatggtgtctgagcctcttccagctgcactttctcaagcttaaactcctacggacaggcctcacttttactcattcctgaatctccaagggcccagctcccaggggcaagttgcaattctgtggtttggcctggaacaccaactgctcagtgtattgaagagaatcttaaagggcatgtagacaagacccctaagatacttctaaggcgttccaagcttgcacatctgcaggaacagagagctcatgctggctcgaggcagctcattgcattcattcagcaaacatttcaggccagccaagcaacac

SEQ ID NO: 203222 - DNA, 177 bp, Homo sapiens
gtagccaattttgatgtattttagtattaaagttataaaactatattgaatttaactttgggataagctcacagatctgaagtaaaattgtcattcatacggcttcactgagtgggcctatcctgggtagatgctaatgtttttcatggaaatttgctgtgtgagtagagatggcaa

SEQ ID NO: 203223 - DNA, 265 bp, Homo sapiens
aatgggaataccaatgtcaccttccatagtctaaatgattattaagaatttgaagctggaagatgcattcacatgctcttgaaaataatgggtttgctggtgactggcccctgccttggaggctggaggtaggagcaaaggcctgcggtgaccagagtcagatcctggagcacaagtcctgctacttttatctgttcttttggggaaaggaagaacctatccagctcgtcctggggctcaacccctcctgaccattcctgcttgt

SEQ ID NO: 203224 - DNA, 1348 bp, Homo sapiens
ggcggaaaggatccccggaacgtataacatgatgaagaaactgacaggacagctctgtatttcatatttatacataaaggacttgaggagagaaaaaacactttaatatgtctctttttttagggaaaaagcacacttataaaaaatattctctgaacaacacataatacctatctaacaatatcttagcgtcgtgtacactaaaattaagacttttgtatttgttacctctgacagagaatgtcattctggcgtagaagttagtttttacgtttgcatacaaattttaagactttcattcctgctcctttctagttttagaactttttctgctgacctacccggtcagttgttaggaagcttagcatgaggtgggctctttaacaccattctgagaactgttgatttagagaggaaggtgaggattttgccttggagaagagactgataaaaccaagtgtttattcttgtaaatcgtctccaagacctacacagtcagctaagcatgaatagcttacatctcatgccagccttcaacacccttgaaaaatatccttttctgtcttgctcattttcttcttataccataagttttatttggtatcattttctcttctcacaaaatgttcctattatatagcattttctgtattcacctcaacattacttctaactatgataacatcttttgaaaacatacaaatttttcagaatggatactaagtggaaatagcagtctttcattttcacctttcaactgaatccttttttcccctaccgaattggtatttaaaaaaaatcacagtcagcaatatgtatcctttctctcaagctcagaaaaattatgtagccacctgctaatatccagcaagctatcaagtctgcattttgggaataaagtagtttttcacatttttgttcagtttatggtattataaaggaaaaaatctctatgcgtcagtggattttaatttctttagaatcattatgctgttaagagtatgccagcaaacgtttctagagctatttaatataccttctgctatttaatataccaaatgcttttcagagaaatgcaatttaaatactgtgcttaacatattttactaagaagcagaaatattgaattattgttctataacgtaattgtgtgttgtgtgttttatatctatacaatatatacccctgtattaatggagaccattgctacactagggagaggcatggcctcttcagagcccacagcaggtggccgggatgtccagttccaatgttgttcccgactctgtgactcaaagcggagcccctcactgcttggcctcgggcttctcttggtaatgtagacggt

SEQ ID NO: 203225 - DNA, 505 bp, Homo sapiens
cagctcaaaggaaagcatgaatgttgtcaggtgacctaggattgaacaataactcctagttagttgcatctggtagccatccttttcattaaagtcttgatttgtaccctgggtagtgtaagtgttaaactgagtgggagcagattagaagtgcatggcgggaggtgaaagacatgtaattactaagtgaatactcatacaggaatgagatgggaaaaactgcagttgctcatctgcagtagttttgccccacgtttctcaagtatttaatgttgggctactcttttagtcactagctttacttgttttttgaatcaggggtatatattttttttttccaaataagcaaggattgagatttatgtccctgaatccatctattatctgcaaaactggcagtaccagggctttgttatagcagttgtatttatagggaaaggaaaaggctggagttaaatgattgtcttcttttatgcattaacatcccttgaaaatcactggtcag

SEQ ID NO: 203226 - DNA, 871 bp, Homo sapiens
ggtctttgtctctccctgcagctggagctccaggtcgtctgttcactgctctctgtcttcttctcctagaggcccagcctctgtggccctgtgtcctgcaggtattgggagatccacagctaagacgccaggaccccctggaagcctagaaatggtgagagtgccggtccagcatcccgagagaggggccattgcaatttagagatgtggccatagaattctctctggaggagtggcattgcctggacatggcacagcggaatttatatagggatgtgatgttagagaactacagaaacctggtctttcttggtattgttgtctcaaagccagacctcatcacccatctggagcaaggaaaaaaaccttcgactatgcagagacatgagatggtagccaacccctcaggtaggtgtgagtgaaaatgaatacaacagacaacacagtaagaagtccaaggtcaaaaagaaagccagtccttaaggtgtgattctggaagctgtgttccaaaggaacttctgggcagctgttttttttgttttttgtttttgtttttgttgttttaaattttgctgtcacaaaggggcatattgtcttatgcttctaaattctctaaaaattctacttttctctcagtgagcttccttcacattcacagtgagagccaaagtcctcttcatgacatataagagacagcacaatccagctgctttttcattgttttggggacacacaaatatcttcctaattttgagaaactgaaactattttttagttttctttttgtatccggtctgaaatttgtgagagtagtagtttctgttgcatttttttttgttcatttttgtgcacagtccattctatttttatt

SEQ ID NO: 203227 - DNA, 741 bp, Homo sapiens
aggtattgggagatccacagctaagacgccaggaccccctggaagcctagaaatggggccattgcaatttagagatgtggccatagaattctctctggaggagtggcattgcctggacatggcacagcggaatttatatagggatgtgatgttagagaactacagaaacctggtctttcttggtattgttgtctcaaagccagacctcatcacccatctggagcaaggaaaaaaaccttcgactatgcagagacatgagatggtagccaacccctcaggtaggtgtgagtgaaaatgaatacaacagacaacacagtaagaagtccaaggtcaaaaagaaagccagtccttaaggtgtgattctggaagctgtgttccaaaggaacttctgggcagctgttttttttgttttttgtttttgtttttgttgttttaaattttgctgtcacaaaggggcatattgtcttatgcttctaaattctctaaaaattctacttttctctcagtgagcttccttcacattcacagtgagagccaaagtcctcttcatgacatataagagacagcacaatccagctgctttttcattgttttggggacacacaaatatcttcctaattttgagaaactgaaactattttttagttttctttttgtatccggtctgaaatttgtgagagtagtagtttctgttgcatttttttttgttcatttttgtgcacagtccattctatttttatt

SEQ ID NO: 203228 - DNA, 289 bp, Homo sapiens
gtagtcccagctacttaggaggtttaggtgggaggatcgcttcagcctaggaggtcaaggctgcagagagctgagatcacaccactgtactccagcctgaccatcagagtgagatcctgtctccaaaaaacaaagatgagatctcacaaaatatgggatgaggactcaaagtcattataattagaacataaaaattaatatgaccttattttacaaccaagctaatgaagaaggatcttgactagttacacaataaagttgatataagagttttgctccaaaataatag

SEQ ID NO: 203229 - DNA, 809 bp, Homo sapiens
cacgcggtgtttggttttctgtctttgtgataatttgctcagaatgatgatttccagcttcatccatgtccctacaaaggacatgaactcatccttctttatggttgcatagtattccatggtgtatatgtgccacattttcttaatccagtctatcattgatggacatttgggttggttccaagtctttgctattgtgaatagtgccgcaataaacatatgtgtgcatgtgtctttatagcagcatgatttataattctttgggtatatacccagtaatgggatggttgggtcaaatagtatttctagttctagatccttgagtaatcgccacactgtcttgcacaatggttaaactagtttacagtcccaccaacagtgtaaaagtgttcctatttttccacatcctctccagcacctgttgtttcctgactttttaatgatcaccattctaacttgtgttagatggtatctcactggatttagtatagtttcttcattcaacagatacttattcatcaccttccttctaccaggccacggagaaaaggcttgacctaagtaaacaagacatggttctgccctcatagagcttatattttattgaattataattgaaatactaaatgctaaaagggataagtagacattgctcaggaaatatagaagagcaggacctggacaagtgtggggcatgtgccagggaaagccttcttaaggaagtaacatttggtccaagctctgaaggaattgatcagaagaggtcttgaggagggaggcaaggaccagagagtggtgggaaaggccag

SEQ ID NO: 203230 - DNA, 288 bp, Homo sapiens
tttgtgcctccttttcctcctctgttcagatcacttccataatgatcttacaggtataatgtgaatatcaaataatagggcacttgtaaagtgctgagcccagtgcctggcaaatagtgaagcctcaattaagtggttaaaaagaaatttttagggccgggcccggtggctcactcctgtaatcccagcactttgggaggctagaggtaggaggatcgcttgacgcccagagagttccagtaccagctcttggccagacatagagagaggccccctacctcatacaaa

SEQ ID NO: 203231 - DNA, 395 bp, Homo sapiens
ctcccgtgtgtacaggccccaagttgccccatctcagttctgagctaattttgagggtgtcactgcagggggaaagaacactaaagtaggaatctggagacttgaactttagttcatgtgtgctgataattagttataggatcacgggcaaattcctttacctccataggcctcagttttctgatctgtatgcaaagaagcaggggaattaggtgatctctgaacttctatttaactgtacaagttttcattatatccacaatgtaacaaaatattgctcagatacaggtaaaaaaatttcccaagatcacaggtctggaaatggaggagtctcttctttcaggcattaacacaatgctcctttctttttcttaacactacaatactaacaaaat

SEQ ID NO: 203232 - DNA, 560 bp, Homo sapiens
cctttgtctattgtatctttcatattctgttcttgccttctgcactggctagggcctcctcttcaaaggtgaataggagcggtacttctaccttattcccagacaatgaaggaatattagaacattttaagtctatttacctgctccagacatatatgtcattgttgttgcacatttaattttacttatttttttttgagacagagtcctactctgttgcccaggttggagtacagtggcacaatcatggcttactgtagcctcatactcccaggctcaagcagccctccctcttagcttcctgagtagctgggactacaagcacatatcaccatgcccagctaggattttttggcattttttgtagagctgtggtttctccatgtcactctgaccggtctcaaactcctgggctcaagcgatctgcctgcctcagcctcccaaagtgctggattacaggcatgagccaccatgcctggccagttttgcagatattaaattagacatacaataaaaataagcagatacacaatacctacagaaacaatagacattacaaa

SEQ ID NO: 203233 - DNA, 273 bp, Homo sapiens
attcgaacaggaaagagaaagaagaaggcatggaagaggatggttactaaagtctgctttgttggagatggctttataagaaaaccacctaaatatgaaagactcatcaggccaatgggcttgcatttcaagaaagcccatgtaacacatcctgaactgaaagccaccttttgcttaccaatacttggtgtaaagaagaatccctcattcccactgtatacaactttgggtgttattaccaaaggtactgtcattgaggtaaatgtgagcaaa

SEQ ID NO: 203234 - DNA, 597 bp, Homo sapiens
ctctagaggatcttctgtatcccggggagaacatgcagagacagaccaataaaggcaaatgcaagaatacactagatacttaccacaagctatactataaacagtgcaactattctaatccaaaaggcatcctagttcttatgtgaaatgacctactgtggataaaccagaaagctagctatctgagtcaaagggaccacatagcactacagagtgtaaaaaggtgaaagcaggaaatgtatgccctttactgtgctgctgttgcagctgttgttgcatgctgttagttgctgccgtggctgctgtggtaagtgcgtgatgctgctgctgctactgttgctgcttcggtccacttgagaggaactagaacactggtaatatttaaatgcctccccgggatacagtgtatcccgggaagctgtcggggaggtcttaaggaataaaaaaaatcaagggctacttctcttgaggactgcgggtgctagtggcctgggaagcgctgcctggcaatggaagggccacggacgtgaatctgaagcccaattttcggtaggaccacaagcaacatattattacaatgaacccctatccgtagtt

SEQ ID NO: 203235 - DNA, 456 bp, Homo sapiens
agacaaatactacgtgttctcactcatatgtggaagctaagaaaaagtggatctcatgaaggtagagagtagattggtggttaccagaagccagcaagggtagcagaagtaggggattcaaagaagttgataaatcaatacaaatataaagttgagagaagaaataagctccagtgttcaacagatgagtagggtgactatagtttacaaaaacatactgtacatttcaaattagaagagaaaaattcaaacatttctaggataaagacaaatattaaggtgatggatatcccaagtacactgatgtgatgtatacaaattatatgaatgtattaagttatcatgtgtgccctgaaactatgtaacttattatccatcaattttttaaattgttgaaaaaatgattaaatgaataaataaaatattgggtcttggatgagccagaaaatttgggaa

SEQ ID NO: 203236 - DNA, 552 bp, Homo sapiens
ttgagagtggttcaaacgtggtgcaaggccagggaagggaatgaatctagctggagagatggaggggctaggcctgtgggctgaggactctgacagaagaaacacagatatcagacttcagattagggtgtcttcactcctggcctgtccaccagtcatgcaaaagtcgcttaggagaggggaggtaagggaaagcttcatgaaagagtgattcctggatcccttcagaactacaaagcagagtctctgagagtgaggcttgggaatctatcttttaaaaaatataagctacacccacaccccaacatttgaacacctacaagaagtcacataagggttacaagaggtgaatgtcatggttagacttgcatgcatttttatttcatctgagaatgtctttatttccctttcattcctcaagtataattttgcctattatagaatgtgtggttgagaattttctttcaactcttgaaaaatatgtgccacttccttttcttctccttctgtcgtcttctacccttctgtctctctccccttctgtcgtcttct

SEQ ID NO: 203237 - DNA, 531 bp, Homo sapiens
atcctttttttctatttctataactggatttttgttcttatgacacccctctctacattgactagttgtcactcttgggcttatacccttgccaggctgacctgtatgcataattataaatcataagtataattaattcagcacttttacttgaaggatgtttgtttgcaaacacattttattcatttacagtgattggaatagaagaaggccaagtgtgtgttttcaaacagtaattggcaactggaaaacatgtttgatcatagatttaaaaatcacttgtctataagtcttggcactacaatatgaaagcaattacatagtcataccataatagtttatgctgtaatttctttccaagaatagagacatatacagaattgtcacaaagacctctgataatcattctcctgtacgctttacgtagtagaatgcattaaatgtttgggctggttgaaatccatgattcctccccaacaaaaagtctctgacagataaatcatcaatagtttatgctgtgggtaccgagct

SEQ ID NO: 203238 - DNA, 338 bp, Homo sapiens
ttctaactacactgaacaagaaaaaaatagagagaagactcaaattagtaaaatcagagaggatattaccaccagctttacagaaataaaaagcactataagggaatactatgaacagctgtttgccaagaaattagataaactagatgaaatgggaaaattcctagagaaacacaaactctcagactgaaacttaggtcagaataaacctataacaagatattgaattagtaatcaaaaaacttcttgcccacaaagaaaagcccagggccaaagtcactggtgaattctgccaaacacttaaagaattaacaccaatcccttacaatgtccttcaa

SEQ ID NO: 203239 - DNA, 701 bp, Homo sapiens
gcagctcgcccaggcaggagctgctaaccagacgcgcattgtgaaggagaccgtggaaaatcaaaagtgggttcctgcaaaaatgtagcattggtttctgcagtccttgggcgaagtgcaaaggagaattcagtgacctcgtttttgagtttgtaatgagtcgttcattttggagataagacgggctgagttgtacagggtaattgctagaggatttgccaagtgcgtttgtcgactgctcctttctctgggaggggaaaaaaggcatgtgaaaaatgcgtggaccattaggaggcgtaatcattttgacactttaaaaaacggattttccatgtcggtgttttaaccaactgatcttgtttgtcaaactaagcacttgctgcgttttataaccaaataattcatttttaaaaatccgtaggtgggatcctaggaggcgcacttagtatagcctctggaagggtaattttttgttgttaggtgctctgaagcaggatctagtggccctttctgttgggatggctctctgcttcctgttgaaatgttaattccattgttggatgccacagctgtgagcattactcatgggatcaacattctattagcaagtctaatcttcgatctgagcctatagcactacctccacctttttgatatatatcatttagacttggcgggctgaaatgtccaaagtaagcctt

SEQ ID NO: 203240 - DNA, 881 bp, Homo sapiens
aagggggagctggctgtccctccacctcccatctgccattccgaggcatcatctaacgtccccggcgtcccctctcattctggtgtcccctgtgttctagaggaagcatggactgtgtctccaggatgggctgtgggagctgtggggctcccaggggggcaggagccctcaggggagaggggtggggcacgtgggtgcgcaggtaggccgtcctggagcagagcagtgtagggccaagccctgtgtcttctgctgcttctcactggctctggggcaggtggcttcctcacctgcacgatgggaatgaccctggagttctggggaacttggtgagatcaggaccttcccccagcagtgccccccaggtgcctgacgtactgttgtgctgttggtggtattattaccacctcgggccatgcgatgacccttttgcttatctgcaaaataaagcgggtttggcagcaagaaaatcaaagtgaaactggtgaagaaagggccggcctcacgagaccccggggactcagacccagtgagcgcacctcttgctgcctcctgcatccacaccgccaccccgcgggaaggcaggacgagctgcttgccaggtgacctcccgtgcctcagtttcccccatgaccacgaggcggtgagagctccgccgagctgccccagggataactgagctgggcttggtgcggctgcggccagtacgctggtcctgcccctcttgttggtcaaatctcaagcagacttgtcccaggaccctgggtcctgtgtgtggcagatggtcctccctgcctgccccggcccccgccttccccatgggcctacggccaggactggaggacttgccccagcctaggttggccctctggccaggggac

SEQ ID NO: 203241 - DNA, 574 bp, Homo sapiens
gaagatgctcacagccaacatcacatgcctatcagatattttatgtacatcatctcatcaactccaggaggcagagactaagagactagccccagtcacagagctagaaattggccaagacaaggttcaatctgaggactgtcaaatccagaactggaatttcttttttttttttttttttttgagatggagtctcgctctgtcacccaggctggagtgcagcggcatgatctcagctcactgcaacctccacctcttgggttcaagcgattctcttgggactacaggtgcacgccaccacgcctggctaattcttgtatttttagtagagacggggtttcaccatgttggccaggatagtctcaaactcctgacctcatgatctgcccgccttggcctcccaaagtgctgggattacaggcatgagccactgcacctggccttagaagcctcagttcctgatggcagttgggatctgcctttccttccctggactgcctacctcttgtcttttaggttacatatgagaaaacaaacctccaattcaccaaaactattgttatttggggagctg

SEQ ID NO: 203242 - DNA, 359 bp, Homo sapiens
taattgttcttaagagatatatgatttagtgtttagggttgaagtgtcatgatatctgcaagttacttcccaatggctcagcaaaaaaatctgtgtatgtatatatacatatatgtatatagtatttagaaaaagagataagccatatgtagccaaattgatgccctgatgaatctaaagtggtcccccctcatccacagtttcagttacccatgattaactgcagtctgaaaacagtaaatggaaaattccataaacgactcataagttttaaattgcacaccactgtgagtagtgtgatgaaatctcatgtttgctccagatgtgaatcatccctttgtccagcacatcaacgctgt

SEQ ID NO: 203243 - DNA, 561 bp, Homo sapiens
ctatagttaactgaattcaagctgcatcttaagaattatggtttcgtttttgttttagttttaaattacttttatttttgacatttacaagcacaaggaagacgctataatctctcttgagttgtcacccatctctaacagttttcaactcatggacaatcttttggcgtaactaggggagagttagagacttaaatcccacacatcatttctttccccagtgaataattcaatgtttattggatttctctgtcacctatacctagtttatgttcattttgcctgtgttattgtgaatgtctttttatagtatcctaaatagggctcatatattgcatttggttgatattccttaagctttattttgttgttgtgtttttgtttgtttgagacgtagtgttgcactccagcccaagcaacaagagcaaaactcctatttcaaaaaaaaaaggaaaaaaaaaggatggtaacttacaggtgggtccaaaggaattgcccgggattccggcgggggagaaccaaaaaccggggggggcacaggacttcaccatttttttactt

SEQ ID NO: 203244 - DNA, 607 bp, Homo sapiens
ctatagttaactgaattcaagctgcatcttaagaattatggtttcgtttttgttttagttttaaattacttttatttttgacatttacaagcacaaggaagacgctataatctctcttgagttgtcacccatctctaacagttttcaactcatggacaatcttttggcgtaactaggggagagttagagacttaaatcccacacatcatttctttccccagtgaataattcaatgtttattggatttctctgtcacctatacctagtttatgttcattttgcctgtgttattgtgaatgtctttttatagtatcctaaatagggctcatatattgcatttggttgatattccttaagctttattttgttgttgtgtttttgtttgtttgagacgtagtgttgctctgtcaccctggctggagtgcagtgagccgagatggtgccattgcactccagcccaagcaacaagagcaaaactcctatttcaaaaaaaaaaggaaaaaaaaaggatggtaacttacaggtgggtccaaaggaattgcccgggattccggcgggggagaaccaaaaaccggggggggcacaggacttcaccatttttttactt

SEQ ID NO: 203245 - DNA, 397 bp, Homo sapiens
ttggcatcggctcctagttctctaaacagaaggatgtcctgcctcaggccttcgtacatgctgttccttccatctgcacaccattcctgagccccacatgactccctctctcccattgtcctggtctctgttcaaatgtcacctaagggccaccgagctgcacaacctctggagtgccgtgcccatcacccttcaccccctgcctcagctggacccattcctcacaagccagaggaattttactctaatggtggaatttcaggccaagtagaaaatatattttgtgtgtatgaagaaaggggaaaaagaacccttctctgagacctcaagttattatttaattgattaatttttagtcattgattaaattattaaataacaaatgaaatcaattgta

SEQ ID NO: 203246 - DNA, 947 bp, Homo sapiens
gccaaggagaaggagcagagccccacggcagaaaaggatgaggacgaagagaacgatgcctctctggccaactcctccaccaccactttggaggacaaaggccctggccatgccacttttggccgcgaggccaccaaatttgaagaggaggagaaacctgacaaggcctgggaagccagacccccacgagagtccagcgatgttccccccacgaagagaaataactggatctttattgatgaggagcaagcctttggggtcagaggacaggcccggggccggggccgtggtttcagagagttcacttttcgtggtcggcctgctggcggaaatgggagcggcctctgtggtgggggggtcctgggggcccgcagcatctactgcagcagtcagcgcagcggccgtggccggggcctgcgagagtttgcgcggccagaggactgccccagagccaagccccgacggagagttgccagtgagacccatagcgagggctcagagtatgaagaacttcccaagcgccgccggcagaggggctccgagaacgggaatgaaggctcgctcctggagagggaggagagcaccttgaagaagggcgactgcagagattcttggcggtccaacaagggttgctctgaggaccacagcggtctagatgccaagagccgaggccctcgggcctttgggcgagccctccctccccggctgagcaattgcgggtatggacggagaaccttcgtctccaaagagtcaccccactggcagagcaaaagtccaggcagctcttggcaggaatatggcccttccgacacatgcggatcccggcgacctacagacagagactatgtcccagattcctacagacaccctgacgcatttggtggccggggctttgaggacagccgcgcggaggacaagagatccttcttccaagatgaacacgtggc

SEQ ID NO: 203247 - DNA, 113 bp, Homo sapiens
cagttgaagcatatgtcctgcgagcttaggggtgctacaagttgaccactgcagcagtaaagatgactctgaagaatggcatgggatggatcctttcgaatgcacttgagcag

SEQ ID NO: 203248 - DNA, 974 bp, Homo sapiens
aaacaaacaagcaaacaaaaacaaacaaacaaacaaactccaaatactttaaatgctattacagattataaaattacaacactgcagacttggcagaaggaaagatttagatttcagaaaacatacacaagtcatttggtagaaggcccagggatatgaacagatactacacgcatgagaaaatatcatgagtaaaacaagtacagaaaactgtacaaaacagtgccacttttggcatgttaacatttgatattctattttttttttttttttgagacagagtctcgctctgtcacccaggctggagtgcagtggcgtcatctcggctcgctgcaagctccacctcccgggttcacaccgttctcccgcttcagcctccccagtagctgggactacaggtgcccgccaacaagcctggctaattttttttgtattttagtagagacggggtttcactgtattagccaggatggtctcgatctcctgacctcgtgctcctcccgcctcagcctcctaaagtgctgggattataggcatgagccactgcgcccggcccaacatttgatattcttatttaaaaatggaaatgccaaatactgttacagatatgatgaaatagtacccctcatagtttgttgtagatattataaattggcactgttcttaagataattataagttaaaaaaagaaagttcatggcccacttacactctactgagaagtgaacaaaagaaacaatctcgagtatgaaaaagcttatgcataaaaacagctcaaaatattatttgtgataataaaaagttgaaaaaaaatccacaccatgaaatattaaatatcttttaaaacagtggccaggaagcctatgagccacctgggaaatgcttctgaaataattttaattagataaaaagctccaaaatagaacatgtgctgcgattaagtttatcttaaaaagacaaattcagaggtgaca

SEQ ID NO: 203249 - DNA, 384 bp, Homo sapiens
ggctcatttacgtggctggaaggttggtactggctgttggcatgaagctctagttcctgtccaaagggctgttttgagtatcctcacagcatagcagctggctttccccagagtgagcaatccaagaacatgacaagaagtgtaatacttttatgacctagcctcagaagtcacctcacatccacattctccctcaaattctttccaagttccaaggctgaatgcttacaaagtaaatatcacgtgtgctttactgaccattatatcccatccactggcagacaaatgggtaagcaaaatgtggcatacacctaccatggggtattattcagccttaaaagggaaggaaattctaacacatgctacaacatagatgaatctcga

SEQ ID NO: 203250 - DNA, 422 bp, Homo sapiens
tggtttgttttggtttgatttttgttttattttacaaaaaaaaaaaatttcctcaaaatcacaaagtagttggaattcccagtttgttgttcaggctacagtgtgtctgagtggggattcgcttctgagttctatgacaaatgtgaaaaaaaaaataataataaaaattgatttcattatttcttaatactattgagctcagtttgttgaaatatttataatatgagggttacagatcaatttgcacttttacctctcaccattcaactttgaatttgtgccatttaccccaaagaaggttcagtggaaatgcatgaagctatcttcttgaatcgaacacttcaactcaaggaataattcaaaacaatgctccactgatcaagaaaaatgtcactagttcctattttgattaaaaataagga

SEQ ID NO: 203251 - DNA, 496 bp, Homo sapiens
aaagaaaacggtttccagattgcacaggtagtgtttttgggtattgccaattccttctctgtagtatccagcctccaaattgtcccccaataatctctgcttctcaatactcatacctttgtgtagtcctctcacattgtagcaggcttcgtctctgtgactagcagaatgtggcaaaaatcatgttaagtcactgctgaagtttgggttacaaaagaccacacacatatggaatctcactggagtccacacagtgaaagcaatcttgaaaaagaagtttgttgggtagggcaaggtggctcaagcctgtaatcccagcactctgggaagctaaggcaggcagatcatttgacgtcagaagttcgagaccagcctggccaatatggtgaaaccctgtctctactaaaaacacaaaaattagccagtggtgagctgagatcatgctattgccctccagtctgggcaacagagcgagacttagtctcaaaaaaaaaaa

SEQ ID NO: 203252 - DNA, 353 bp, Homo sapiens
gggcccaggggaaggagaagatgggtgacctggagaaggaggggctgcgaggctgagaacacgttgccctcaggtggagggcacaggctgtcactctactccatggaccaggcatccaagccatcagtgaaaaacagtatgacaagagagccagtcccaggggacagaggccacatcccttgcccactgaggatgagtccaggcctcccatgtccatcccagaaaagccaccagaccactcgtctctcctgacccagttcaggagtaaagccacaaactctagctctctttttctcctgtcagctcagctctacaaaaatacatctagctttgttcacaaagggcaagaaaaa

SEQ ID NO: 203253 - DNA, 162 bp, Homo sapiens
cattgacagggcctgggtacccacttccctttagctgcacagaatgggcagaggcagccaggatcatccctaggtgcccttgagcctccattttacagtctctggtttgaaagccccagactacaactatagctggcccagaggaaaagcacctaacaaaca

SEQ ID NO: 203254 - DNA, 549 bp, Homo sapiens
gattatgattaggcaaccaaattagagattaaaaagaattgcatgaaaatgtcatctctagattaaaggattatatgtgcttgctgtttattatgttctttgtacttttctcgtttctttccaggttttctataatgagcagttataacttataattagagaaaacccattttggtttttttttagctagttgtatcgacgtctgtagcataaatccactttgaggtgttcactatgatcctttgaaatttttataataaaagtctatgctaaaagtttttattggccacttttttaatctttaaagattctattgactgctagttttcatctctcactgtaacctcatctcccacctacccgtatcagaatcactatcagagatccgtattaagcgtgtcaagctctgacaaaacattaacatcagctttatcactaaaacctctaagatacccgcactcacgtgcactcacacacactcctcaaagccagtgatctctaccctggaggaataatctcttgggcagtttggcatccacctaaaagtac

SEQ ID NO: 203255 - DNA, 146 bp, Homo sapiens
atgttctttctattttattcacatagcattaactaataatctttctattttattcatggtaccattgacatcatcaacactttattgagtgtaactggatttattataattaatcacaataaactgcacatgtttaaattatataa

SEQ ID NO: 203256 - DNA, 740 bp, Homo sapiens
cttacagaacaggcgaggcacagcccatgccactggtctgtgaaataagctgaaaaaccagctggtgccctcactaacatctaaagtgagctgtcatcacatcccatgctacattcctccctaacacactccctaggatccttccgggtcagctcccttgccaaattctagttaataactctgcttgcaccttgtacgggctcatgcaatggcttgaccctatctacccacttttattcacacacaccacactgtcacttctttacacacctgttcctcctagaccacgaagtcatctctaaaccttgtgggagaggtatacataaaataccagaactccttatggccaagcataatgtcttacttgcatcccagcacatgccattagccactgttccttcaactccaatttctcagtagctcaactttgatgaagggcagcggacacataggcagcacgtcaagacttcccttatccaactgttcaaaacagagaaaaatggttccaatagtaagaagtgtcctgtttcattcagaaacgtcatgtgggaccatctgcaacttgcttagttagcatttgcggcctcctgtaacaaggtgacaggagcacttcaggtcagcatctaaattgcttatttttttttaattttgaggccaggcatagtggctcacgcctgtaatcccaggagttcaagtttagcttgagcaacatagcaagaccttatctctaaaaaaaaaaa

SEQ ID NO: 203257 - DNA, 338 bp, Homo sapiens
gaaaagttgagggtaaattggataagacattctctaaagttccttccaatgcaaaatgctattcttccagatttgaggctccctaaagacaagaatcctattttatcattcctcattatgtgcctctcatggccctggctcatttctaggtccagagaacatgttcatgtcaagcttattaaatggatcaaagaagtcagtcttacaatttctatgattttgtttggagcccctttcctaaattttttttgttgttgttacaagcatatttaggctgatagtaatacttttttgttttttaagagacaaagtcttgctctgtcacccaggctggagtg

SEQ ID NO: 203258 - DNA, 540 bp, Homo sapiens
tgctcttgtttttccatttatgaatgcacagtggatctagtttcaagctagtttccctttaactgtttaattcccctattgacgttcatcaaaattgtttcaagtgttgtcccccaaaatttgcagagtactaacttccttttgtagtttaagtcctggttacaacaaccttgaagagtgacaggtctaccccttattaaatcatctgggccaggtgcagtgactcacacctataatcctagcattttgggaagccaagttgggaggttcacttgaggccaggagttccagaccagcctgggcaacatagtgagaccctgtctctacgacaacttttttaaaaacagctaggtgtggtggtgcgtgcctgtagtcccagcttctcaggaggctgaggtgaaaggatcacttgagcccaagagtttgaggctgcagtgagctatgattgtgccactgcacccattgtgacagtatgggtgacagagcgagaccctgtgtcaaacaacaacaacaacaacaacgaaaaaaaacccataagtg

SEQ ID NO: 203259 - DNA, 416 bp, Homo sapiens
cagcgggcaatagaaggaaaccttgaaaagaaaaaagaaaagaaaagaaaagaaaaaaagaaaagagaaaagaaaagaaaaagaaaaggaaaagaaaaatgtgaccatacatcatgctggtaaatgggatgttgagattacattttgatagaagaatgaaattatctaagaggacatgttagcaagataatatggtaagataaacattttatatgaaataaaaaaataataatttgattggtaaataaggcaaagaaagctaaaagattttttaaaaaacaagctgaaacaataccagcaaatgcatacatgaagaataaaaaataatttggctaaaagaaaatgttagaagaataaaaaggatcaaatatagtgatacacaaagtcaattaaatgtatacatttgacacattaaa

SEQ ID NO: 203260 - DNA, 627 bp, Homo sapiens
aaaatggaaagaagcaaacaaactagaagcttaaaagctaccacttaaaagtccacagctaggtggtccaggcatggctttccatagggtcaagaacccgagttcttctttctggctgtctggccggcttggctttcattccagcatgccatcacccacattggcatctcatcgacctcccaggcagcagaaagatggaaaagacaagtctttcctgtaaggacacccatcactttcacctgcatctcattgaccagactactgcctgtagcctcacagctccaagagggtctgggaaatgcagatttccttctgggaagccatgtgcccagctgataaccaagaagcacggtagaagacactagtggaaaatgctgaatctgtgcctcactacaccccttgagagccgccgtgagtggagtttgtgaacattcttagaggcaacaggatggaaatctcaagaggccttatcattggaagcatattgccatggtgttttgacattcctgaggacagaaggagagggcggtgaggaaaataagattgttagcctggttctaaaagtgtccactgtttgtggagtcccgtatgtcagagaagacatgaatggtgagaggagggagtggt

SEQ ID NO: 203261 - DNA, 456 bp, Homo sapiens
cctctgttattaacaggcatttgcaaaagcttggaaaaataacattttttaaaaattcatgaagaaataatatagttgtttatcattaagaggcaagaatatttggaagacagtagagtccagtataatgtgagcatggttttgaatctcacttgtgtcatttgttaattatatgagcatggacaagtgacaaacttctctgaaacacaattcagtaaaatgggattagtattacaagatgaaattcagctacttaggatctctgtctcaggtctgttcaggaggaaaagttgggattcgttatttcttatccaataacataagtatttttaaagaagaaatatatgcagggaatttcaaagaacaaatgccaagtgcttttcaatcctaagttaggaccgtactatatgtgtataaatatcttaaatatacattaaacgtttcccaaagtctaca

SEQ ID NO: 203262 - DNA, 236 bp, Homo sapiens
ttatttccacacagaaacacatttccttgtagccaagtcttctgtgtccctcagcagtattctgtcattttcttcatataaatttgacaaatctctagttttactcctaagaaccactgcattcaaatacctgcccatcacatattatgctttgagatacactagtttgatttgcaaattttacttttgggattcttgaatatttctggataatgctcctgttaacaactgcctga

SEQ ID NO: 203263 - DNA, 354 bp, Homo sapiens
cctttgtgtcatattccacagtatcggtcattaagatgtggggtgagacagccgagacaatggcattctcttgtaattagagcattttatttttctaagaactttatagtcttccctttagaagcaatactttaaaaaaatgcagtccaccatctgctatacacatagaaactgaagagatggtcagcggggacccagctgaaaaccttttatggctgaaagcccgtttatttcccagggaactggtatacaggttaatcaccacataatacatacatttgatttaattgtataagatatcaaactttaaaactacccacagaaatgcctaaatcctggagcaatagctgattg

SEQ ID NO: 203264 - DNA, 385 bp, Homo sapiens
acttggttgttttcagtaagtggcagggagtttaaaaagagaacggatagctacattccaaatcgcaaaaaatgtaaaaaatcatatgggcatgaataacattcagccacaaatatttatgaagcttctgctgtgtgccagacaaaatggctgggtattaggactatgacagtgaagataacacagcccttgctctcaaggatttacagttgatgagaaaggcagacaaatccaggaggcattataatccaccatgacagctgctgagctcttctgtgggaatttgcagcagtggcacccacatatgtgggcatttggagaaagtggggaaagcttccaggaggaaatgatgtcttaactgggacagaagcaagaagagtcagcc

SEQ ID NO: 203265 - DNA, 359 bp, Homo sapiens
ctctcagagatcccgcagttcatacagactcagctttagaatagtcactgtgaagtcatgtggggtttttgttgttgttgttgtttttaggccaaggaagctatccaagaattttgtgaatgaggctgagagttgaccttgccagaattcatggggaagatgtgtttcttgttttgtgtggtcaaagagagtttttcatccaaacattgccctcatttcttctcctttttctgctgagttttttttttcttttgattttttaagtgtctagagactttaacttctttaaatgttattttttggtagagttttattttcagtggtttatcttgggataagttgagtaagaggttcagatt

SEQ ID NO: 203266 - DNA, 449 bp, Homo sapiens
aaaagatgcctatacaactatctacagtacaagacagagagtgatcaagaggacagaagataacaaaagcacttaacatgctgcctggtacatagtaaatgcttcataaatgttggccactattatcaccattgtcattgatggagttcagaggagggagaaatgacggttacttgtctgtggggattagctgttttttagagcagctaaaatttaacatggcccttgaaagatggaaaagattagaacatgtagagttgagaaaaaggtggaccaagaaaatagcataagcaaagacataaaggagaaaaatacaaagaatagagtaccttaactgaactttgagatatatatggtggtattttaatgcttgcagatccttatgaggctcaaatgagatcgtaaatataaaaagactttgtgaactacataaaataatttgctgagat

SEQ ID NO: 203267 - DNA, 1128 bp, Homo sapiens
accgtacagtgtcatagaaacaggaaactcgagaagataaactgccaggctgtattttggagtcagtattttaacactgtcaccatctcaagcatgatctgtgggactcatcgctgtgctctttgacttgaacttctttaaggttagtgggaaaatgaagctttagagaagatgggactggcctaaggtcacactgcatgtcagaagtgtggtggagggtccaggtcttctgaccattcagtgcaagccaaattgtgctaatttccaatttttctccctttctcttggtgagctatttggtgctacttctactcctcatgaccaaagctggctttcatggtttactcatgtacttactgatgaaaccctgagacttggggccagtgactgttcagaggtccatgtgaagatgcgctgaatggtataaaggacagagcagtaaagagtgctggctgaatgcctgggctggcaatcaggcatgttggagtttgagtcccagtctgccactccagctctgtgaccaagaggaagtgaagtcatgtaccctttctaagtctctagcccctcttctgaaagacgaagatgccaccaccaaccatgttagtggttgtgaatgccaagaaagtccatgtgaagcacatagcatagtgtctgccatgcgttaagtgttccaaaaatggaagctatgactatttcacagagtacacttcccatcacttttcagttcattttggccttctccctcaaaagcactccagtgttctgatccagctgataaaacaccaaacattcacatagtgctttaaaagtgacccactgtttttacagactgcattacatatgaccctaacaaccactgcaatatagaaattcgcatctccattctccagatcaggataccgaagctcagaaaaattaaatgatttgcccaggatcacatagctagtaagcagcccagccagatcctgtgttaacttgttcatccgcttcctataagaaaacatccattcaaggcacatggggcaacaaagaaggacttagagctgtgtggcccctcgtcagggcagtaccagttgcacccatagtccggcctgaatactcagcttaggactattgtgtccaatgtcc

SEQ ID NO: 203268 - DNA, 472 bp, Homo sapiens
agtttatgtaagaagctatatttgctcattctgcttgccagcagaatgtcagagaattctttggcagctacatttcacaaatcccctaactcagtgactaagtgcagcccctggaagaatgcccctgaagatgataacatctcttgcatgaatcttttcttgcaaaagttccaggatcctaactcatgcctcttcctgtacataataagataatagctgataggattaatgattatgcctctacaatctataaccagatgtacccttgaaccccacccttgatgagattttgctctaatgtaactgctgagctcatttgatgtaactgctgagcacatctgatgccacttcccatcacatgccaccacctgtacctaagctttggagcagtctcacagaaagtctctgaaagactctccggattgcaatccttagtaagacatctgaataaaactaatattaattatttaaa

SEQ ID NO: 203269 - DNA, 266 bp, Homo sapiens
tcctatttcttccacttaacatgacatttctgaaattttatccatattgtagcatggattaatagttcattctttttattgctgaacagtattctattttgtgaatatactacaatttgtttatctatccaattgttgataaataatttattgttcacagtttggggctattacaaatacgactgtatgattattcttgtaaccatcttctagtggacacatatgatcatttatcttagactgatacagtagatatatgtagggca

SEQ ID NO: 203270 - DNA, 432 bp, Homo sapiens
ccagagggtggagccccccccagggaccccatccttcttcctgcacttcccggcccccctcctatttcactgtcactggcaaggagcgattccatttgcctggggaaaaggtgttacgtccttagtagcatggtatcagcatggttttgagaagataattcttacaggggtgcaggatggatctaagtgagaggacctgggaatgaggagactatacacaggctgtaggaaggcagccctccctgcctggccaggccaggtggaaagggaagcagcatctccctgcaagacatcaaccactttcctatcctctttcttcctaactgtggggtaatctttggcttctccgcagtgtttagataaggaagaaaacccagtcggcctccctcccccatcactctctaagatccaggtccagatacacaatggaag

SEQ ID NO: 203271 - DNA, 129 bp, Homo sapiens
ttgcctccacatatatattttagaatcagcttgttgatttcatagaaaagatcattgtgtattagtacgtggaaagccacggtattagttttttgtttgtttgtttgtttgtttagacaaagtctctct

SEQ ID NO: 203272 - DNA, 364 bp, Homo sapiens
cgtaagtccatcactcacctgtgtggagacagctccctcggggtgatttgttctccagcatcagagcaagtcaccactgacttgaggatttctgtgatgataggtggcagcacatgctcatcatagtcctctctgatactgatgaagatgtgaggaagctggctagagacaggctggaagaggatgtgcagttacactgacattctgtaaatttttgctaccagtgatgattggcatgttgtgtggtcaagagtgaaagtcaaagatcattggtttccgtacccaggggatgagaaagtgagtccctgtctctaccggtgttgtgtgctccatgggatcggtcaaagatgatagctctgtaccc

SEQ ID NO: 203273 - DNA, 350 bp, Homo sapiens
tcttagatcccccaagctctatcatctccccaatcaacctttgttataaaagcaccagctgttcctatcttctgtagtatgtagttaatggttatcaggaaatgacaaggataacatctcctgccaaattaagtgctaccttctagtaaaaagctcacataaatattattatacagctatggaaatgttcatttaaaaatgtctgccacatagtatatccatttattgactcacttgctatcttttttatagaaatgtttctttaagaaattgatattttaaacattgtgctatgcactcagataagaaaaaaaatcacaaaattaataacatcacctcaacttgccatt

SEQ ID NO: 203274 - DNA, 327 bp, Homo sapiens
aggagacttaaaaaatacagatgtctagtttctactaaataaaaaactctgttaaaagtctggttttgttttgtgtttaagtttcatgggtgctataccatccaagaaccatttatttttatcttcagctttcattgagagttgataggagaagaaatagccatattaatatttttgtatattttataccatttgataactcttactaggaattagtagaagaaaataacatctctctctctcaatagttaatacgcaactcttcattttcccttttgctttggttaccagagagctcagagtaaaattttgcactcagttttgaaa

SEQ ID NO: 203275 - DNA, 456 bp, Homo sapiens
gacttcagcgatatcataggatctctgttttgatctgtaaaataggaataattatgtcttcctcacctaactaatatagtagtaaagattaaatgggctaatgtgaaagtacattgtaaattataactaattggaatataaaaatataaggaatgaaggtaatgcaatatctaatacctttttctgctttgggaatttgttactatatgaacatacaatatggacataaaatataatttcatcttttatgaaaccgtagtttatcaaagcatgaactactgtgcagttttcgttatttaacaattatgacattatgggacctggtagaaaagtccagatatgaggaactgtgatcttcagggaacaggaggaacttctgcataagaccaacaaaatcagtacagctactacctacaccaaaaggaggttggtcttctgcgtaagaccaacaagatc

SEQ ID NO: 203276 - DNA, 500 bp, Homo sapiens
ttcttaaatgtggataaattagtaactatctcataggattaatagacttaaaggagcttgtatttgtaaagtccttagagcctggcacaaagaagtgctgtatgagtgtgcagtaataaaataaatacataagcctaaagacaaaactcttcctcatttcaagaaataatttctccagaacaaagcaatagaaagtgagttaagcacctaatttttgtttacctcccacattgcacctgttcttgcataacaaacacattctatttcaagaagttgaaatcccttcctttttgtccatctaagttgtctattatttctgtgccacgggtcattaatgaaaggcaggattctctctgaaattaaacagtggggaagtcaactggaaagagagaaaagtgcagcagaagtgactaaaagtgaaataaaagaagcagaagaaaacattaaaaaaccccgtaattaaaagcatgcacagagtcctgttaacctcggctgactcc

SEQ ID NO: 203277 - DNA, 460 bp, Homo sapiens
agagtacatgaagaaagtcaacaacaaggtggcaaaaactgtacctcagattttgtgtggattaaaaaagctaatgtcctaggtactttcagatgctggatgaagaacattattataaccaggaagcctacaattaattcttcctttaacaacaacattgactactttgaaggtcagactgcattttaaaatcacagggctctaagtttctacaggacagaaaactataatttcaacagcccaaaacttgaagaaagggagacacaggaaaaaaaggtagagcctgccagttccttagggagagactcagagagaaaggaaacatgtccctagccataaaacatacttctctgtcatctagatagacctctgacacctgaaactagtagagcctttttggagggcactttgacattacctctttagatacactcttaagttgtctgagtttacttacaaa

SEQ ID NO: 203278 - DNA, 618 bp, Homo sapiens
catggaatgtgtttccatttgtttgtgtactctcttatttccttgagcagtggtttgtagttctccttgaagaggtacttcatgatttatgagagtttttaaaaagtttttgtctgctaagtccaacgtctgggcttcctaagggctgatttccatcaatttattttgttattttggatacgttcctttgtcttggcatgatttgtgactgtcattgaaacatggacatttgaatattgcaaggtagtaactctggcatttagatgatacttctcattgtttgctatgtgtctgtgagtgagtgtgtttttaatcattgaaggctgtagtagtacatacatttagtgacttccaaactatttttgcaaagatttatcattttcatgtgtggtcactgaagtctctgattcttttagcttgtgttcagctcacattttgatagagatttccttgaatactaggagctaaaaatggaagaaaacacctctcccagtctttgaagtttgcctttgcaccacagcttttcttcagcacttagctgggcctgcactgaccctcgtaatcaggccaaggtgaaagcttaggtctttctgagcgagcatcctgccctggacaaag

SEQ ID NO: 203279 - DNA, 507 bp, Homo sapiens
ccatacaattaaaagcaaaaatttatatgattaacacaatagatgcagaaaaagcattcaagaaaatccagtattcatttatgaaaatattctctaagcaatgatgaaacatacctcacaataataagagccatctatgacaaatcctcagctaacatactgaacagacaaaaggggcatgcatttctcattagaaaaaaaataagactatctaaacaattctatttaacatagttctggaagtgctggataaatctaacaaaatgaaaaaataaatggcatccaaataggaaaagaagaagtgaaattaccttcactcatgatataattctctacctagaaaactttaaggattttaccaaaagactcctaaggttaaaaatgacttcagcaaagtctcaggatacaaaattgatatacaaaaatgaatagcattgccttacaccaataacattcaagctgagaacaaaatcaagaacagttttctttacaatagccataaacaaa

SEQ ID NO: 203280 - DNA, 390 bp, Homo sapiens
acccccgagtgtgctgcatagttactagactgatttctaaaacctatcatttacaaaaggaatatagaaaaatctttctgctaaaaacttgtgggggaggtgttcacctttgctaggtattattttatatcataattattaattattcaaagattcatattactatgtattaatttgtgtcaatcagtttgttcacattcacaatactgtatacgtaatacagtttccaatttctccaagtagattttgaaattttgttagtaacataatcaagaacctatataacaatgttttagcattcttcgtgaatcaaatcagaaaaaaaaggtagtttttttcaccatcagcaacctgcttgcatttgttaatccggaaatttctaaagtttga

SEQ ID NO: 203281 - DNA, 634 bp, Homo sapiens
ccgctggcgaatatgtgtgtaactctgaaagaattaatgataatggagaaggagccatggtgtgggtgatccaggagagtgggcaatcccatacgttaaatgaaagtcttcacatataatttaataactgagagttacagaagtacgttagacatgatctcatgcaaagtcttcatttaagggagaaagaaatcagctcttagaaaaagtaaacgtgtcattggtgattgcagcagttaagagagtgggccccgggtatcctgattccggcacttgcctgctagtcacctgtgtccccgatacccaacaagccccctgcggtctggcttaagttgaaactcatgctatggacagttgagagttgtggataccagaggcttacccagggagtaagcatatacaggccttaccttaatcttttgaggctctttcctaactcacctttgtcattatttgtttttagtcacttggctgtagttacatttcttcccttctgcttctgtttgacggtcacttttctaactttgaaggccttatgtaaatacggtgttttttcctgggaggtgaaggttgcagtgagctgagatcgcgccactgcactccagcctggtcgacagagcgagactctgtttca

SEQ ID NO: 203282 - DNA, 403 bp, Homo sapiens
taaatatttgttgaacctatgaatggacattgtaatttgacagatattaatatccctatgttaggagatgaacagattgaagttcggataaggtaaagtcaatttccttaggtcagacagctaataagtgtggcaaactcatcatttgaataaagattagcctaattcaaaatactatgttcttttttttaagtcaatactgtctgcccgtcatattgccctaaccttggtgaagacacttgtcaaaatgaacagcgacacatgcttctgactcttaaagaactaacagcggatcctggagatggaagctgggtagtaatggaagctactctcctatacaactgagaattctgatgcgagacgcccaaatataggaatacatgagctactgaaccacaaaacc

SEQ ID NO: 203283 - DNA, 597 bp, Homo sapiens
ttgcaatagtgagtgaattttcatgagatctggtcatttaaaagtgtatgtcacctctgcccacactctctttcttgctcctggtctcaccatgtgatgtgcctgttcccccttcaccttccaccaagcttcctaaggccgacccagaaggcaagcagatgctggtgtcatgcttcctgtgcagcctgcagaaccatgagccaattaaacctcttttccttagaaattacccagatgcagatttttttttatagaaatgcaagaattgcttaatgcagaaaattggtaaaaaaaagagtggggcatttgctgtaaaaatatctgaaaatgtggaaggaactttggtactgggtgatgggcagaggttggaagaatttggagagctcagaagaatatgggaaataagggaaagtttgaaacttccttgcgactcattaaatgattgtgaccaaaatgctgatagtaatatggacagtgaaatccatgctgaagaggtctcagatgcaaatgaggaacttattgggaaccagagcaaaggtcatgcatggtatgccttagcaaagaatttggctgcattttgcttctgcccttgggatt

SEQ ID NO: 203284 - DNA, 625 bp, Homo sapiens
ccacctgggctcctgcaaacaccagacgtgtaattagaggctcctgggctgggatgatgtggtgtgcagacaagtcttatcacgcgtctgagccgctgtgggtgcctggagttgcctctgcagcccggagcggatgagcggaggctcccgtgactcacccaactgcaggaactgtcaactggcttctgcccagccaagaacttttatcaatcactaagtagagacactgtgtacaaggacaccggttcatccaagaacatcaggacagccaggaattcaaaacacaaaacacagcttcctgcatgttgcaccccaggcggctctgaggctcagcccaaggaaggtttggggctcgggccagaaagacacgattcactctgacttacacaagaggggagtgtacaaaagtcatgcagtctcaggggaaggcactgggctaaaccctcatgactgtaaaatgaagaaataggcatgaagcatgactagggtgtttatttgacgaggacccagagttatgtccaaggaatgaaggcgttgcctttctacaacagagcaaaatgtcaagttaactgataacatgtacattcctcaggactggtccctcagtgagacagcgtttttagcg

SEQ ID NO: 203285 - DNA, 402 bp, Homo sapiens
gcagccttgaactcctgggctcaagtgatcctcccacctcagtctattttgagaattgtaaataattacagtttttgctttatgcagcattatgcctcagcctcccaagtgggaatgattttctgcttttagaaaataatgcagaggccagtatctaataaatgttatagtgacttgatataaaacttacataggacttgtcaaaatgtcctcaacttaaaatacttacccacagtatgatgcagtagtaaaagtgctgtatctagagtcacagctctggggctcgaggtatcactgctctagagtgtgaatgtagtcatatttcttactttctctaaacctcagatttttcaaatgtaaaaaggtgatgatattttactaggtaattgtagaacctagatg

SEQ ID NO: 203286 - DNA, 368 bp, Homo sapiens
caggttgacctacccaggcactacgtaccatgatttcatagtgctctgcagccagcaggctcactaaacgctcatcacggaacataccacaaatggtgctgatcaatgacacacgggttttcatgcttgtgacacagacagacagcaaaacaccacggcttattatcttcccattgtgtacaccactcacaggacggtgacagtccaggtattgcactggacctcggctttgcttaacagaaaacaaccctgctacggttggaaagagttgttaggtctacctggccaggtagacctaacttagtaatcgatttggaatcacatcacaggattgatctcaccttcttagagtaacctgtaagtaaagt

SEQ ID NO: 203287 - DNA, 447 bp, Homo sapiens
tctttctgccagtccctagaaaagtcagtcttctctcctgtgttgttagtcatgattagtcacttctaattctgttattgaatacaagagtaggatcttgaaagtaaaatagggaggagtagaagctcccaggatggcattatcttgaagtagagaatctgaaaaaccagtgttcttttattattgcaaaagatgatttttattaatttttaaatttattctagaatatttataaattcactatgttgatcaataaaagagctggtaatacagcatttataaatttatgttcccctaagaagttattctcttgtgtcctcttatgttaaaagaatgactcctagtccatcctgggctacattacaaaagaccctcttcataatcttggtctctgtattgtaggttttcctttattaatctagccattgtaggtgccatgatatgtat

SEQ ID NO: 203288 - DNA, 359 bp, Homo sapiens
agatggaaccttctaactgtgttctcacattgtagaagggatgaacaagatctctcaggcctcttttataaggacactaatcccattcatgagggcagagcccccccagaagttccaccatccaacaccactgcactggggattaagttttaacacatgaattttgcggggacacaaacattcagaccatggcaagtcccttccttatcactatattgtaaacataagaaaaaaagtcaagatattttaagcacaatttttttcgggtctttatgtcagtggttagagtcagattgcccaagtcttcactattcctatcaatcacatggtttcatagcctcttttccttccctcctcct

SEQ ID NO: 203289 - DNA, 235 bp, Homo sapiens
tggtgttgcttggcattatgattttatatagtcttgtgttttaaaagtacagtcactcacatgaaagaaaaatattgaagagcaacagtgctttgcaaataagcaaaactattacacttaaaagtaatagaaaaatttgctcaaggtaatgttctcttataattctgtctttttaaaacttggatatagctttattctactgagatttttctgaatgataaatattttttaaatt

SEQ ID NO: 203290 - DNA, 448 bp, Homo sapiens
aattatgtctagtactggcccaagcatgctgtcgggattttttgatgatgatgtagtgattaagagtggcaatgatgggtctagatcatgcaggcgcagctctgctaaccacaaatatttcttttgataggtagggtacagagtaactcttgtctttaaaaatctctaatgaaatccttaaaaccatggaatataattaaattcggagtttttcaggtgatggaggttgtctgtgtgaataaacatgtggttcaattggaccaacttaaaaattccttggttggcttgtctgtgtttgctcttggctgctttagtgctttaaaatggtccagttaaatcagactgtcaaaatggtgaggttcctgtttgatttactcatgccacacaaacccacacagagtgttatgaatgccacatttgagaaaatctcccatttgtgaaaacatat

SEQ ID NO: 203291 - DNA, 259 bp, Homo sapiens
aaacacaggggaaacataggggtgttcagaaatagttcccaggttactgcctgtttcaatatgtacagtcctcggccccacccacaagattctgacttggcaggtgagagttggagatgggggagctacctggttacgagggatcccagttcattttgaggcagctggttgttagactgcattgtaaaaattaccccccaaagattggaaaggataatttatgtatttttaatagagatagggtttcaccatgttggcc

SEQ ID NO: 203292 - DNA, 2650 bp, Homo sapiens
agatcgcaccattgcactgcagcctgggcaacaagagcgaaactccttcgccaaaaaaaaagaaaaaaaataaaagctaattacaaatacaggaaaatggataggccatgtgtttataagtttgagctcttgagccagtgacttccctgcacgttcagctttctcctttgtgaaatggtaatagaagcacgctgcacttgggattcttgtggattacatgtgagggtcttagaaacacttgatgtgtaagccaactattatgtattactgtatatggaacacaagggatgtagccaaaactaaatgcaagtttgtgcctcagatgtcttcctatcagaacagagtcaaatccagattttgatgcttaaatgtgacagcttattcagatttagaaaaacttttggtatgggccaaagaaaacatatccttaaggggatatggcccctaggccctcattttccttttctgtctgagcaattaaaaaaagcattaagtaaattccacaaattctttggaatacctagagataaaccagatatcatgttaactgtatgataataagttagaatacttgcaacaaaatgcagagttttctaggaaaacaagtaatcattcagaaataagaatatgaatagttcctcagttctccccctttgtggaatttgtgcagtaaatgctgctccaaagctctgtggaaaacagaagcttcccatgaaaaatctgacaagggtatctctcagaaagagagctgtaatcccagcactgtgggaggctgaggtgggagtattgcttgaggccaggagttcaagaccagcctgggcaacgtggtaagacccccatctgtaaaaaaaataataattagccacgcgtggtggtgcacacctgtggtcccaattactggggagactgaggcggaagaatcgcttgagcccaggagatggaggttgtcgtgagctaggatctgccactgcactctagcctgggtgacagtaagacccttgtctcaaaaaaaaaaaaaaagaaaaactgcagattggtgactcttacgaagatagatggaaatgttctaaataaaacacacttaggatctggcaatatatatatttaatgtactattctgaccaaatggagcttaatcagatagcttgagaatgatttaatgttacgaaatctgttaattgcattatctcaataatagatcggtgaataactttattattctctcaacaaatcctgtatttgatttacaaaatggatgggaggtttcagggagagcagttggaagcctgtgtgctcacctgttaggaacgagagtggcaacagcagtggggaggagtgctcggctcctgcacctgtctcgatggcagagcccacaggcttggctgacagacgtgggatgaaggaaagagaagcctctcactcttcccacagcattgtagtgcgatttcatgcagaagtccaagcaggttccaggacaattgtgtaagaagctatggacaagaacgtctaagaaaacggaaaatgacatagaggatttgcactgtagctaagacttcacgcaaggctgtggcagctgaaagcatgttctggtgctggggctgcgtggcagagccaggagcccaggatccagcgcactgggcaccgacctgggacctggtcatctttgcgtgtggaaaagatggcatttccagttattgacaggtgaatgctggccttttagggaaaaaaaaatattagaattccatacagaataaagaatgaagatgagaggttaaaggtttttctaaggcatgaagagctgtgggggcagcctgcccttgttctttttgtcgtgtgtccttcacatgcagtaactctgttcacgcctcacaaaaaccctatgaggtggagacctgccatcaacccttcctgcacgggtgccactgaggccccaaggttaaatcatttcccagagtgtatcagcagaggcacagccacagagacacgtccgcacagagagctttccagatcaccagtaacagcgtgagatcatggtgcagaaggtcatgaggaggatggcaacgagcgagacacagccggttggtgctcacaaggacattggtagatctgactgagggccaggtcggctaggccttcccaggtgacaggagcccagtgccggccttggtgcacacagcgcgtccttgtgctttctcaggagagcttcactggggacactctgtgatgtttttggagggtcatttggtaatgtgttcaggagccaaaaaatatgcataatattcagtcttacaattacattttttgaatttatctcaaggaaatcccagggatctgtgtgaagctgcacatgctgctgctgctcagtgcgggactgtttataatatttgtaactcaaatgtccagaagaactgtacactctgtgcatgttttcagtaagttcatatttgtaagaaaaagtgggtgtgttgagagacaaatttttgtgtacatttacctggaaacaagcagtagtacacatatgcatgcatgaagtggtgttttcctgagtgttaagattgtgaatgttttattatgatcatttctactttttctattggaaaatactttgtgtaattaaaacatgaagatggagctaccatcaaaatggtga

SEQ ID NO: 203293 - DNA, 397 bp, Homo sapiens
agatcgcaccattgcactgcagcctgggcaacaagagcgaaactccttcgccaaaaaaaaagaaaaaaaataaaagctaattacaaatacaggaaaatggataggccatgtgtttataagtttgagctcttgagccagtgacttccctgcacgttcagctttctcctttgtgaaatggtaatagaagcacgctgcacttgggattcttgtggattacatgtgagggtcttagaaacacttgatgtgtaagccaactattatgtattactgtatatggaacacaagggatgtagccaaaactaaatgcaagtttgtgcctcagatgtcctttgaatatttatagaaattaaatggaacaaattagggcatcaggaaaactatacaaaagtctttacca

SEQ ID NO: 203294 - DNA, 521 bp, Homo sapiens
agatcgcaccattgcactgcagcctgggcaacaagagcgaaactccttcgccaaaaaaaaagaaaaaaaataaaagctaattacaaatacaggaaaatggataggccatgtgtttataagtttgagctcttgagccagtgacttccctgcacgttcagctttctcctttgtgaaatggtaatagaagcacgctgcacttgggattcttgtggattacatgtgagggtcttagaaacacttgatgtgtaagccaactattatgtattactgtatatggaacacaagggatgtagccaaaactaaatgcaagtttgtgcctcagatgtcttcctatcagaacagagtcaaatccagattttgatgcttaaatgtgacagcttattcagatttagaaaaacttttggtatgggccaaagaaaacatatccttaaggggatatggcccctaggccctcattttccttttctgtctgagcaattaaaaaaaggaaaatgaggcctaggggccatatccccgtcgta

SEQ ID NO: 203295 - DNA, 2364 bp, Homo sapiens
caaacagaggtttccactcttgaacaagatcatccaggttcttaaagtcctccccacttccaccgcttgctgcgagaaaggccgcaatgccctccagcgagttcgcaaaaaccaccgctcccgcctgaccctggagcagcttagcgacctgttgacaatcgctgtaaacggaccgccaatcaccaactttgatgccaagcgagccctggacagctggtttgaggagaagtctgggaacagttacgcgctgtctgcagaagtcctcagtaggatgtctgcgctggagcagaagccagcactacagaccatggaccacgggacggagttttaccccgacatttagggagctggcgctgcagagttcactaagctgttgaatatttttttaatctatactcataagctttgatatattatataaatatatattatattatattatattatattatatatatatatatatataaactcacactgaaaatttttaaaaaccaaggtgacgcgtccaccagaagccactgggagatttcagaaaggaaaaatgttggaaactgactcttgtctacaaaatttggcagctgcaacatacatggcaactcattttcactcacagaagcacgtgctggggcctcctgtgttcccaccttactgtccaccaacagcataagctaaaatgacaggtctctgtcatcacctttaggtagctcattttgtttatgttttcatttgcgggtggcggggctctgggtttgggtttatgttcttgccttttcttttttcatttggttttatgatgggagggagctcctcagcctcctcattgacattctggtccggctgaatcagatctctgacttaagtcagggtgggttgtctgtctgcatttgggaggcaggggggttgacctttctccctccccacctgacttcagcttgagatctttttttattcatttcctgatgagggttccttcactgtcctacaaacaaaagtgtcggtcaaactgtgacactgccacacctcacctctgttgcctcgtccatccctgggttgtggatcccttccttccagccccccctggaaactcacaatattacccattatactgaaggcaacattgcctcaccgctgagcttgaaatcctggggaagggagaaggggtaagcttttagcattcctgtttttacgaggtggaggataaaacaatataattccattccaatccagggcttttggggagatgaagagccaagaagtccagaccccaacaggggagtgatttttggctaaaaaacaaggaaaatgaaaagtacatattcgagttacatggattatttatactttttctttataatcatatcatgtgttgagggtattttttttcctttaataatcaagaaatgcctgctatagttcagtggcaggtagtgtcaatgcaaattgtgccctaagttatgcataactcaaatgagagtctgtagagatgtggtcctccttttgcaacaaggctgataacatgctacatggtcataggaaactggggaatgtgtctctgcctgtaaactcttccttttttgaacagggtagagatgtcctaaagaaatggagaaaagaagagaggactctcaaggcatcagcctacacagacacacacacacacacagacacacacacacacacaatcacaatatacaatataagctttagaaatagccacttgcctattccctggggcaagtagtggtttaaactagaggagtctgatcaatgctctttcattcatttaactaccggtatacctcgcaagggagttttaaaaaatgtgcgtgagctgttaaaaacttctgttcatgttcctacatctgatttatgcatattttatatgcagagatcctatcacgtggatgcaggtcattttgggggagggaggaagatctgaattatatacatgtggtcagttctgctgagagcttcatctcttggttggcagagggtggtgttatctggccacaggcaaggccccaatgtcttcagcctgcttggttcagacattataaaactgtggtggcttccttccttcttggtttatgttgtctctgaggcctcatgccaccgttgagaaccatagtggaaatgtcatcaacactgaacatgttatagccctttcttggttccaccagtcccttcatcccctaccaatcccttccccttcacctccatggtcttggtgctaagataactttagaatcattgctgctagtcaatagcttttcattatataaatatattatatatattatatattatttttgaaatatttttgtttgttttcaacagtgatgtagcatgttaaaaaacaaa

SEQ ID NO: 203296 - DNA, 450 bp, Homo sapiens
ctgagtggatggtgctgtgatatttttaaggagcctttcaggcaatgtttgcatgttagccagagggagaaaaagtgcccttttgggaggaaaatggtacgcccctccacttccatctggcactcccttcccccccaccacgctgctgaaccattttcatgtcaatcacaaaggaaaaataagtggggatggggggaaatacctaggagtctattatcacatacatattaatatgttaatactttctttaaaaaaaacctcttgatgttattattttgcagactacgctttatagtacctgtgtgacgggacctagaacactggatacaaatagagctatgttggtttatcataatatgtacgcagaaactttctttttgtcatattatccttgtaatgtaagaagattgttaataaaagcatttaaatttactcaccactgttgaattg

SEQ ID NO: 203297 - DNA, 2344 bp, Homo sapiens
ctgagtggatggtgctgtgatatttttaaggagcctttcaggcaatgtttgcatgttagccagagggagaaaaagtgcccttttgggaggaaaatggtacgcccctccacttccatctggcactcccttcccccccaccccctcaagtggtatcaccctggaaatacctatgcaatccagtctccctaggagagagtgcatggaagcaggggtatgtgcagtgtagaatacagatgctacagcatatatgttgtatatatggacatatacagtacgtatacacacagagtaagagagtaaatcacgtctatatatctataaataatatcctatatatttatacatttctatgttttaaatagatataaaaatagagtctatagagctgggagagcagtgggaagcctggcgctgtgctgtgcaaaggggaagggagcacggccttcggagagggagccggggaaggccagcaggcagggttggctggcaagggggcctcctacccggagtgttggagaggagagtggctgggtcccggctcgctccatgcactttctctccttttccacaggcttggtctgaggttggaaggagataccccctgagctccagctgaggtgccccctacctctccccacccccacagcccacgcttaggcggtcactgctgcttggcagtaggacgtggtctctgactcctggtggagggaccactgcacaaactccttcaaaaccctcccccaccaggactgagcagcgtcagtggcaataggaaaggtccaaactggatcaagagctggtccaggaaagataccgcccctgccctgttagatgcttctgctgcccctagaggccaagcccctgaagtgcagccgtcctggcctccctcacttgctcaaccactgtcaggaggagaggatgtgggcagcatgagcatcgccaggcagcgctgcccaccatccacaggctttctggccagggcagggggcatcagctagcaggaaacggtgggagagacatatctgcacactcataaattcaatggctactccagtccagaagcagggctttggcccagcccgctccgcgcagcagctgctgctggctgtactcaggacaacgctgttccccctccctcacagaggccccgtggcccctaccccactcccgccgtaacaggcaggtttagttcacatacactgttcgcattctgtgacttgaggcagaggctgagctgggataccccaagctcatccactttcgttggggagggcccctccctgggtttatcaccagctcctagcccgggccgggcggggatgtctgggggccacgcgggggcactggtgcaagctggcagcatgacagagggcttgtgcagccctgacgggacccagaagcccatttgctcgcagtttcctctctctgtttttttcctcctggaggtaggagagagggcctgaccaggcaccagatgatggagcaagggcagctgcatgctccctctctccagaccagccttctgcttttggggtccgaaggggcatttgctcccatcctgagcctcctctgcccctgtcttgctcttccccaccatcctacaagtacctcagtctccagcaggcccacccctccacctgcagcccagggcgggtctgttctgccaatgcccacctccttgagccacagttagctgccaactgggtcttgggacaccctccagtacctggctcaagagagaccaggccgggccgagccttcttcccactgcagtggactagacccacggccaggggatgggcatccccaggtagcaatcccacaatgcactgtacctcagagagagagcacgccaggggcaccaagggaccgagccctctgtccagagggggacagcggtcacaatactgctcaccaaaagacaaaggccaggctgccctcgggcacctctcagtcttcacttttgtctctccggaagaaccagcagtctgattccgtctatttcagcccccgtctctctcttctccacccccacgctgctgaaccattttcatgtcaatcacaaaggaaaaataagtggggatggggggaaatacctaggagtctattatcacatacatattaatatgttaatactttctttaaaaaaaacctcttgatgttattattttgcagactacgctttatagtacctgtgtgacgggacctagaacactggatacaaatagagctatgttggtttatcataatatgtacgcagaaactttctttttgtcatattatccttgtaatgtaagaagattgttaataaaagcatttaaatttactcaccactgttgaattg

SEQ ID NO: 203298 - DNA, 1460 bp, Homo sapiens
accaggcatagtcgaattgtgctaatgaacacagtgactgatcatattaagccaatatgtagattccttaaatcttaacataatgtgctgggctttactgaactgtgggtgatgtgactggtcattcaaaaagctgagtcttgctgcacacattttcacacacacacacacacaatcacaatatacaatataagctttagaaatagccacttgcctattccctggggcaagtagtggtttaaactagaggagtctgatcaatgctctttcattcatttaactaccggtatacctcgcaagggagttttaaaaaatgtgcgtgagctgttaaaaacttctgttcatgttcctacatctgatttatgcatattttatatgcagagatcctatcacgtggatgcaggtcattttgggggagggaggaagatctgaattatatacatgtggtcagttctgctgagagcttcatctcttggttggcagaggggcttgtgcagccctgacgggacccagaagcccatttgctcgcagtttcctctctctgtttttttcctcctggaggtaggagagagggcctgaccaggcaccagatgatggagcaagggcagctgcatgctccctctctccagaccagccttctgcttttggggtccgaaggggcatttgctcccatcctgagcctcctctgcccctgtcttgctcttccccaccatcctacaagtacctcagtctccagcaggcccacccctccacctgcagcccagggcgggtctgttctgccaatgcccacctccttgagccacagttagctgccaactgggtcttgggacaccctccagtacctggctcaagagagaccaggccgggccgagccttcttcccactgcagtggactagacccacggccaggggatgggcatccccaggtagcaatcccacaatgcactgtacctcagagagagagcacgccaggggcaccaagggaccgagccctctgtccagagggggacagcggtcacaatactgctcaccaaaagacaaaggccaggctgccctcgggcacctctcagtcttcacttttgtctctccggaagaaccagcagtctgattccgtctatttcagcccccgtctctctcttctccacccccacgctgctgaaccattttcatgtcaatcacaaaggaaaaataagtggggatggggggaaatacctaggagtctattatcacatacatattaatatgttaatactttctttaaaaaaaacctcttgatgttattattttgcagactacgctttatagtacctgtgtgacgggacctagaacactggatacaaatagagctatgttggtttatcataatatgtacgcagaaactttctttttgtcatattatccttgtaatgtaagaagattgttaataaaagcatttaaatttactcaccactgttgaattg

SEQ ID NO: 203299 - DNA, 3261 bp, Homo sapiens
caaacagaggtttccactcttgaacaagatcatccaggttcttaaagtcctccccacttccaccgcttgctgcgagaaaggccgcaatgccctccagcgagttcgcaaaaaccaccgctcccgcctgaccctggagcagcttagcgacctgttgacaatcgctgtaaacggaccgccaatcaccaactttgatgccaagcgagccctggacagctggtttgaggagaagtctgggaacagttacgcgctgtctgcagaagtcctcagtaggatgtctgcgctggagcagaagccagcactacagaccatggaccacgggacggagttttaccccgacatttagggagctggcgctgcagagttcactaagctgttgaatatttttttaatctatactcataagctttgatatattatataaatatatattatattatattatattatattatatatatatatatatataaactcacactgaaaatttttaaaaaccaaggtgacgcgtccaccagaagccactgggagatttcagaaaggaaaaatgttggaaactgactcttgtctacaaaatttggcagctgcaacatacatggcaactcattttcactcacagaagcacgtgctggggcctcctgtgttcccaccttactgtccaccaacagcataagctaaaatgacaggtctctgtcatcacctttaggtagctcattttgtttatgttttcatttgcgggtggcggggctctgggtttgggtttatgttcttgccttttcttttttcatttggttttatgatgggagggagctcctcagcctcctcattgacattctggtccggctgaatcagatctctgacttaagtcagggtgggttgtctgtctgcatttgggaggcaggggggttgacctttctccctccccacctgacttcagcttgagatctttttttattcatttcctgatgagggttccttcactgtcctacaaacaaaagtgtcggtcaaactgtgacactgccacacctcacctctgttgcctcgtccatccctgggttgtggatcccttccttccagccccccctggaaactcacaatattacccattatactgaaggcaacattgcctcaccgctgagcttgaaatcctggggaagggagaaggggtaagcttttagcattcctgtttttacgaggtggaggataaaacaatataattccattccaatccagggcttttggggagatgaagagccaagaagtccagaccccaacaggggagtgatttttggctaaaaaacaaggaaaatgaaaagtacatattcgagttacatggattatttatactttttctttataatcatatcatgtgttgagggtattttttttcctttaataatcaagaaatgcctgctatagttcagtggcaggtagtgtcaatgcaaattgtgccctaagttatgcataactcaaatgagagtctgtagagatgtggtcctccttttgcaacaaggctgataacatgctacatggtcataggaaactggggaatgtgtctctgcctgtaaactcttccttttttgaacagggtagagatgtcctaaagaaatggagaaaagaagagaggactctcaaggcatcagcctacacagacacacacacacacacagacacacacacacacacacagacacacacacacacacacaatcacaatatacaatataagctttagaaatagccacttgcctattccctggggcaagtagtggtttaaactagaggagtctgatcaatgctctttcattcatttaactaccggtatacctcgcaagggagttttaaaaaatgtgcgtgagctgttaaaaacttctgttcatgttcctacatctgatttatgcatattttatatgcagagatcctatcacgtggatgcaggtcattttgggggagggaggaagatctgaattatatacatgtggtcagttctgctgagagcttcatctcttggttggcagaggggcttgtgcagccctgacgggacccagaagcccatttgctcgcagtttcctctctctgtttttttcctcctggaggtaggagagagggcctgaccaggcaccagatgatggagcaagggcagctgcatgctccctctctccagaccagccttctgcttttggggtccgaaggggcatttgctcccatcctgagcctcctctgcccctgtcttgctcttccccaccatcctacaagtacctcagtctccagcaggcccacccctccacctgcagcccagggcgggtctgttctgccaatgcccacctccttgagccacagttagctgccaactgggtcttgggacaccctccagtacctggctcaagagagaccaggccgggccgagccttcttcccactgcagtggactagacccacggccaggggatgggcatccccaggtagcaatcccacaacgctgttccccctccctcacagaggccccgtggcccctaccccactcccgccgtaacaggcaggtttagttcacaaactccttcaaaaccctcccgcaccaggactgagcagcgtcagtggcaataggaaaggtccaaactggatcaagagctggtccaggaaagataccgcccctgccctgttagatgcttctgctgcccctagaggccaagcccctgaagtgcagccgtcctggcctccctcacttgctcaaccactgtcaggaggagaggatgtgggcagcatgagcatcgccaggcagcgctgcccaccatccacaggctttctggccagggcagggggcatcagctagcaggaaacggtgggagagacatatctgcacactcataaattcaatggctactccagtccagaagcagggctttggcccagcccgctccgcgcagcagctgctgctggctgtactcaggacaaccacgctgctgaaccattttcatgtcaatcacaaaggaaaaataagtggggatggggggaaatacctaggagtctattatcacatacatattaatatgttaatactttctttaaaaaaaacctcttgatgttattattttgcagactacgctttatagtacctgtgtgacgggacctagaacactggatacaaatagagctatgttggtttatcataatatgtacgcagaaactttctttttgtcatattatccttgtaatgtaagaagattgttaataaaagcatttaaatttactcaccactgttgaattg

SEQ ID NO: 203300 - DNA, 2992 bp, Homo sapiens
caaacagaggtttccactcttgaacaagatcatccaggttcttaaagtcctccccacttccaccgcttgctgcgagaaaggccgcaatgccctccagcgagttcgcaaaaaccaccgctcccgcctgaccctggagcagcttagcgacctgttgacaatcgctgtaaacggaccgccaatcaccaactttgatgccaagcgagccctggacagctggtttgaggagaagtctgggaacagttacgcgctgtctgcagaagtcctcagtaggatgtctgcgctggagcagaagccagcactacagaccatggaccacgggacggagttttaccccgacatttagggagctggcgctgcagagttcactaagctgttgaatatttttttaatctatactcataagctttgatatattatataaatatatattatattatattatattatattatatatatatatatatataaactcacactgaaaatttttaaaaaccaaggtgacgcgtccaccagaagccactgggagatttcagaaaggaaaaatgttggaaactgactcttgtctacaaaatttggcagctgcaacatacatggcaactcattttcactcacagaagcacgtgctggggcctcctgtgttcccaccttactgtccaccaacagcataagctaaaatgacaggtctctgtcatcacctttaggtagctcattttgtttatgttttcatttgcgggtggcggggctctgggtttgggtttatgttcttgccttttcttttttcatttggttttatgatgggagggagctcctcagcctcctcattgacattctggtccggctgaatcagatctctgacttaagtcagggtgggttgtctgtctgcatttgggaggcaggggggttgacctttctccctccccacctgacttcagcttgagatctttttttattcatttcctgatgagggttccttcactgtcctacaaacaaaagtgtcggtcaaactgtgacactgccacacctcacctctgttgcctcgtccatccctgggttgtggatcccttccttccagccccccctggaaactcacaatattacccattatactgaaggcaacattgcctcaccgctgagcttgaaatcctggggaagggagaaggggtaagcttttagcattcctgtttttacgaggtggaggataaaacaatataattccattccaatccagggcttttggggagatgaagagccaagaagtccagaccccaacaggggagtgatttttggctaaaaaacaaggaaaatgaaaagtacatattcgagttacatggattatttatactttttctttataatcatatcatgtgttgagggtattttttttcctttaataatcaagaaatgcctgctatagttcagtggcaggtagtgtcaatgcaaattgtgccctaagttatgcataactcaaatgagagtctgtagagatgtggtcctccttttgcaacaaggctgataacatgctacatggtcataggaaactggggaatgtgtctctgcctgtaaactcttccttttttgaacagggtagagatgtcctaaagaaatggagaaaagaagagaggactctcaaggcatcagcctacacagacacacacacacacacagacacacacacacacacacagacacacacacacacacacaatcacaatatacaatataagctttagaaatagccacttgcctattccctggggcaagtagtggtttaaactagaggagtctgatcaatgctctttcattcatttaactaccggtatacctcgcaagggagttttaaaaaatgtgcgtgagctgttaaaaacttctgttcatgttcctacatctgatttatgcatattttatatgcagagatcctatcacgtggatgcaggtcattttgggggagggaggaagatctgaattatatacatgtggtcagttctgctgagagcttcatctcttggttggcagaggggcttgtgcagccctgacgggacccagaagcccatttgctcgcagtttcctctctctgtttttttcctcctggaggtaggagagagggcctgaccaggcaccagatgatggagcaagggcagctgcatgctccctctctccagaccagccttctgcttttggggtccgaaggggcatttgctcccatcctgagcctcctctgcccctgtcttgctcttccccaccatcctacaagtacctcagtctccagcaggcccacccctccacctgcagcccagggcgggtctgttctgccaatgcccacctccttgagccacagttagctgccaactgggtcttgggacaccctccagtacctggctcaagagagaccaggccgggccgagccttcttcccactgcagtggactagacccacggccaggggatgggcatccccaggtagcaatcccacaatgcactgtacctcagagagagagcacgccaggggcaccaagggaccgagccctctgtccagagggggacagcggtcacaatactgctcaccaaaagacaaaggccaggctgccctcgggcacctctcagtcttcacttttgtctctccggaagaaccagcagtctgattccgtctatttcagcccccgtctctctcttctccacccccacgctgctgaaccattttcatgtcaatcacaaaggaaaaataagtggggatggggggaaatacctaggagtctattatcacatacatattaatatgttaatactttctttaaaaaaaacctcttgatgttattattttgcagactacgctttatagtacctgtgtgacgggacctagaacactggatacaaatagagctatgttggtttatcataatatgtacgcagaaactttctttttgtcatattatccttgtaatgtaagaagattgttaataaaagcatttaaatttactcaccactgttgaattg

SEQ ID NO: 203301 - DNA, 386 bp, Homo sapiens
ctcgggttgctccgcctgcattctgcccctgtggaggagacctctggttctgcaactgcctgggagagtctaagtcggtgatggagagttaactggcctggtggacacatacctaccatgtcctgcaatccagcttaaagcttacactttaagaaacagaataacaagaatagattctagagctgagtttaaaccctggctccaccactgataagctgtgtgaccttgggcaagttgttagctggcacccagacacattgagaagatggtcatctgaaagccaggaaaagagactgctccagaacctgaccatgctggcaccctaatctcagatttccaccctccagaactgtgagaaaatacatttctgatttttaagcccccaa

SEQ ID NO: 203302 - DNA, 758 bp, Homo sapiens
ctcgggttgctccgcctgcattctgcccctgtggaggagacctctggttctgcaactgcctgggagagtctaagtcggtgatggagagttaactggcctggtggacacatacctaccatgtcctgcaatccagcttaaagcttacactttaagaaacagaataacaagaatagattctagagctgagtttaaaccctggctccaccactgataagctgtgtgaccttgggcaagttgttagctggcacccagtaagtgccacataagcatctgttaaaatctccatctgtctacattctttatctattcctcagttagttcagaacctaaatgggaaagaaaggtgttatatattgcccctatgaaagcccaacacaaaataatttacaccttatatttttttaattctaaagcatggggtatgcaatggattgaatgcttgtgtccccttaaaattcatgggttgaaattcttactctcgatgtgatgctatttggaaatggttttgtgggaggtaattagggttaaatgaggtcatgaggatggggcccttatgatgggattagtgccctttgaaggaagacaccaaagcgaactctctctctttctctctgccctatgaggacacattgagaagatggtcatctgaaagccaggaaaagagactgctccagaacctgaccatgctggcaccctaatctcagatttccaccctccagaactgtgagaaaatacatttctgatttttaagcccccaa

SEQ ID NO: 203303 - DNA, 590 bp, Homo sapiens
tggaaatagtaccactctctttatctcaatgggccttttcattgtaattattagaacaaatttttaatggctctggggtttgtgtaattagctttggttaccagaaaatagagaaataagtgacaatgaaagctcaggaatggtggcagacataaaaaaatgcttgtgctgcaaaacagccagaggacctggtcaatggaggggttgtgaaaggggatttcagcagtcatttgggtctccaggtgttcagttctctgaacagggtcagcatgttctgcttcatatcatgtttaaggttagtgatctataggaagaagctatgtgtgggttacctggatcgtaacatgctcagagttcctttcctgtggcaatattcctagattggaattcactgtatgtgtagcagtatgtatgtatgttctaatcaattgtcagagtgcaatacttttagtgttgtttacagctaggcagacattctcatttttaaactgcagtggtatgtgtgtttttaaaaaataaaaatgaaactgtttcctttgggtatcagaacaacaaattatgaacaataaatgaataactatttccttgag

SEQ ID NO: 203304 - DNA, 858 bp, Homo sapiens
gagtactccatgaccagtttcagagtatagatgatgtggggcatgagttgctttagcctttctgtttcatcttgggctaagctatccccaggaacagagcaatgagaagttcagggtgcctcttaaatgtgtctggtgtcaggattttatagcagcttttcatggttcagcctttttggccagtgcatgagtaggacatttttaagccctgtgctgctgactatttgttgataccatacaggtgctacattatctcctttcaggattttcatatctgcagattgatttttgttgtcttgtccagggcatcatatttttggattgaatgttttctgtttgtaaaatggttggtgtggacagacgataagctccaccattacccctgaagcttgtggactggggccatttgggtgaggggcttgttacacaccgactcattgtctgatctttcacaataaatagcagacaggtgaagagctttttagagaagtggaacgttggtacccttggatttgcctggtttctgattttcttttgttgtctttaagtggaggttcattaagttcaacaaatagagcatctggtgtgtgccaggaacacagttgacaagattaacaaattagtttggtttgttgcttaaaaactattttgttttaaaattgtttttaatagaaattttaaaattttttaattcaaattttagtttttaaaaataggcaatacattcacatgatgaaagaaaattttttaaaggcacaaaggttaactagtaaatacatctgtgtgtacccctgacccctgatcctcagagcaaccagtattagcgatttcttcatcctccagatattcaggtccctg

SEQ ID NO: 203305 - DNA, 652 bp, Homo sapiens
  misc_feature (52)..(52): n is a, c, g, or t
  misc_feature (76)..(76): n is a, c, g, or t
  misc_feature (293)..(293): n is a, c, g, or t
actctagagatcccccctgaaatttctgggaccactgctacagccttcattnacacagtgctgtgtggtatcattngacttcacatgatgctctcatatcttttctgcgcgaagttcatctctgtatttttctctatagtggggtttacctggcttcaattcatcagaaattcacatacaaacgggggaggcactgagacgacgtgggtgcaccttgatattataattaggtatcccaacattccaggacaggcttgtaaaacattttcaattatcattaacacgaaaccaanacgtctgagtttgtatgtgaatttctgattttcttttgttgtctttaagtggaggttcattaagttcaacaaatagagcatctggtgtgtgccaggaacacagttgacaagattaacaaattagtttggtttgttgcttaaaaactattttgttttaaaattgtttttaatagaaattttaaaattttttaattcaaattttagtttttaaaaataggcaatacattcacatgatgaaagaaaattttttaaaggcacaaaggttaactagtaaatacatctgtgtgtacccctgacccctgatcctcagagcaaccagtattagcgatttcttcatcctccagatattcaggtccctg

SEQ ID NO: 203306 - DNA, 387 bp, Homo sapiens
cttacttgggagagccacctgaccccaatttttagtgtatgtacatcaacttaatgtgggaggagtgcaagggtgtcactcaacccaagcctggccagtcagaggattccatcaccctggccataaagtttggttcaggaggggaatataacttcagatcagtgagatgccatccagactgtctcctggaacaattggggaaagataacctttttcctttgggcatgtgactattaagatgtaagttcagagactctgctagccatcttgctgctaagaagggaaagcctaggtaaaaaagaagccaacagagagggaaagatagctcataattggagagagaaatattcctgatggcatctctggtgtgcttggattgagccatac

SEQ ID NO: 203307 - DNA, 250 bp, Homo sapiens
atttatttgctgctcttctttttctaggatggagcctgctagaatatacaaccaaaataccacaaatttaaagataaaaataattgaaataatacaaattttccttcaaaaaaaaaaaaaattatcaaaaaaaagaaaaaaggccagacatggtgttacacacctgtagtccagctactcaggaagctggggcaagaagaccactttagcccaagagtttgagcccagcctaagcaacacagcaagatcc

SEQ ID NO: 203308 - DNA, 1411 bp, Homo sapiens
gaaaaagagaaattgaaaggttgtttgaaaaataggcttaagagagttactgcttttggatgagaagatttcagtggttgatttgaccataaccatcttggtagtatgagctcaggaatgcgttacttattagtgatgtgggaattacatggatttgtccccaaagcacaagcttttagtgggctgcttctatactggatgtgctaccttttggtgtcattaatcctttctccaccacaggcttactcattttttaacagggaatatttttcactgggaattggagtctctcggctccatgtaagaaatcaagttggtaaaggctcttgtccctaagagaggtataatacatacattttgttgtcaggatgattttgctaagttttggaagagtaggttggttccactaacctgcatttaagaaatgattgattaggctgggtgctgtggctcacacctgtatttccaacactttgggaggctgaggcaggaggatagcttgagctcaggagttcgagaccagcctgggcaacttagcgagaccccatctctacaaaaaaaagcttttaaataaaaaattagctgggtgcggtggtgtacacctgtagtcccagctactcaggaggctgagatgggaggatcacttgagcccaggagtttgaagctgcagtgagctatgattgtaccatctcactccagcctggatgacagagtgagattctgtcttaaacaaaaaaccccaaaagaccatccagagtgcttgtctcggtagcatatatactaaaattggaaggatatggagaagattagtatggtccctgcgcaaggatgacacgcaaatttgtgaattgtttcataattactatttaaaaaaaaaaaacctctgtaggtatttctccaaagaagctaagcagatgcccaataaacatatggaaagatgttcagcatcactaataattagggaaatgcaaatcaaaaccacagtgagatgttattttgcgaccatttaggatagttataacaacaacaacaaacgacaaaagcaagtgatgaggttgtagagaaattggaaccttggtgcattgctggtgggaatgtgaaatggtgcagccacagtgagaaacaatagggtggtttctcaaaaaattaaaaatgaaattaccatatgatctagtgatctcacttcgagttatatccaggataatttaaatcaaagattcaaacagggccaggcaaggtggcttatgcccgtaaatcccagcactttaggaggccagattacttgggctcaggagttcaagaccagcctgggcaacatggtgagatcctgtctctaccaagaaaccccccaaaattagctgtacatgttggcgcatgcctgtagtaccagctgcttgggaggctgaggtga

SEQ ID NO: 203309 - DNA, 616 bp, Homo sapiens
gggtgctggggtcccagttgggtccattcactcatgccacagctatttactgaatgcccactctgtgcacaggatcctccagttggtgagaatgggctgactgggctcgcagagggcggatcagttttctcgtgccaggaagtcgtggaatcgggaggtcatctggctcgtcctgcgctgagcatttgaacacagggctgtcaagggagaggtgagagcattctagggtgaggcagcagcaggcctgcacccagagccctggtggcctgacttgtcctttcctcccctctacacccacacagccactttctgactctcctgctctgaaatgtttattcctgtcagtaagagaggcaagaaaaacagccttccttttgttttgttttgtttttttttttccttagtttgaaaaaaagaatcagcgaatcctgtggcctttctgtttcttccactgaaaaggctggcagatgctctgtggctagttgagcacctgccgtaagccgggactttgagctgctcagagttgcatggagaagtcagacacataagcagatcattacagttctgagtggtagctgcttaatagagctccttaatggagtaactaatactgcgt

SEQ ID NO: 203310 - DNA, 415 bp, Homo sapiens
ttaacttctacgctgatgtgggacatgaaatgggggtctcgctatgttgcccatgttagtctggaactctacccttcagcgctcctcctgccttagcctctcaaagtgttgggatcacaggcattagccactgtacctggcctaattggcatcatggactcaaagactcccgatcaggctggctggaactttgttagcgccgtgctttgatctgggatgcctgctccctggccctcactccgtcctctcccagatgtcatcacagtgggaggctgtccttgtctactccagcttcctctcctttgtccatcacagacgatttccccaagaaagagatctcttcatgtctaattttatcttggtttggaggactcaaaccaacacaaagaataaatttcaatcttaaagatattat

SEQ ID NO: 203311 - DNA, 857 bp, Homo sapiens
gtgtatgttttagaagcaaaccatggcagaaatgtgtatggaattggaggggaagaaaattgaaagcagagaagccagtcagaatgtcattaccatgcccaaagcttgcagtctgctgaggggaacatccaaaactatctgaagccccgggctgaaccaggctctgcagacattggtggtgtcctagaaggctcttgctgaggtcttatgtctgaaaagaaaccctcggaaacccacttgagtctgtcttgcatttcacatgaaacaaggcttcattctgcaaaaatatctgggaccttcaaattcacaagtggattttctgctcaggggagagctaccaatcggttgaaaggtatgttacagctctaagaagctgcatccatttcctgtaggatccatagtttctggttctggttccagggaactccttcaaatgaactggtcgccatatgaattgatgctacactttgagcgttgccgcagtcaggtgaattcaagctacagagaagaggcgattcacattttttccttctgtcttgtattattcctccggctcaagaacctgccagagatggaatctccctatgttccccaggctgatcttgaatttctgagctcaagcgatcctcctgccttggcctcccaaagtgccaggattataggcgtgagccaccatgcctggcagagagcattttagtaaggataaaaagttttattggcctcaggctgaagtttgcaattatattccaaatacccaaagtgggtatatattgacgttgtcctgagagagggacagaaaggttgactgtgttggttctttggagtcagttttggggctgttaaggattacctggaaa

SEQ ID NO: 203312 - DNA, 549 bp, Homo sapiens
taaaccctaatgcctagcatgtatttagcaggactcaataaaatatttctgagtaaaacaaagactgtttttacaaagatgatgtgcaagactctcccctgcagtcttggagcagaggggacagacgtggaggaataatgtacagtttaggtggtcaagatgcagtagaaaaatcagtaaagtactaaggcagcctcaaggaaggaggtacctgtttatttggggaaagacatgcagaatcaaggaagacttcatatagcattgtttcaaaagatgaaaataaggccaggtgtggtggctcacacctgtaatcccagcactttcagagggaatcacgaggtcaggagatcgagaccatcctgtccaatggtgaaaccccatctctactaaaaatacaaaaatcagctgggtgtggtggtgcttgcctgtaatcacagttactcaggagactgaagcaggagaatcacttgaaccagggtcgcggaggttgcagtgagctgatcacaccactgcattccagcctggtgacagaggaagactctagctcat

SEQ ID NO: 203313 - DNA, 429 bp, Homo sapiens
ggatattcaaatgctaggaaagattattgtttttctaaatcatttgaaacatggaaggggattcaaacatataaatagtaatttgtaaaaccaagtttgaaaataataatttttctagatgcaagatcaaagataaatataaccagatgtagaaaaccagtaagtatctgaggctaatagaattttctgaggggaaaaattgttttctcgggaagtaaacattatttcaggtattttttcccagaactttaagaagtttatagtaatgtgtttcattcccagaaattaatgaaactaaattatacaattcccagaaaatatggtttaaaagttgcctttatagaaataaaatactctattagcaactattaccaagagaattcattgccttgagtgaagaagaaaactgaagttcacaaactttggaat

SEQ ID NO: 203314 - DNA, 589 bp, Homo sapiens
ttatcttccctagccccttaaagcattacataagactcgtatgtctagttgcttatttgtggtgctcaaaacagaactcttgtcctctacactccctggcccacatccacctgaatgctccctcagtgaatagtgttgccagtctatctgtctattcaaactaaaaacctaaaaatatgacttgaattcctctctctctccttgtcctctggtcaacatggtgaaaccctgtctgtactaaaaacacaaaaaattagccgggtgtggtgatgggcgcctgtagtcccagctactcaggaggctgaggcagaagaatcgcttgaacccgggaggcagaggtttcagtgagccaagcttgagccactgcactccaacctgggcaatagaactagacttcgtctcaaaaaaaaaaagaaagaattaaagcagagtgatgtgatagagtaatgagaatagagtggtgcttctatagatggcctgctcaaggaaatttctgaggaggtgatgttggagctgacacctgagtggagagatctcagcaagaagaagcctgaagcttgaaggctgaaaaaagacaaggggaaccacg

SEQ ID NO: 203315 - DNA, 237 bp, Homo sapiens
ttcttagggttaccactattctgacttctaacagcataaattagtttgacttgtgttctactttatataagtggaattatgcggtatatactctgtgtctggctttttattaaatgatgtttgtgtgatttattcatactgttgtgtgtaattgagatcattgctgtatagtattccattgtatgtgcaaatataacactgttttctactattgatggacatttttgtacttttcag

SEQ ID NO: 203316 - DNA, 512 bp, Homo sapiens
agcatgtaaaaatttagaaatgttaaaatggtcaagtgtttaatggaaaaatctttttgaatcatgaggacttttactttaccctcagagaagctttgaaataaaattttctgagaaggtgctttaaattttaggggctgcaattatccaccgttaataaaagtcactgttaagctaacagtccaacaagtgagggtgagcctgatggattatatatcatatggtagaatactttactgccattaaaaaggtagagtaagaggataagcaaaaggtagttcttatgtaagagtaataggttagaaaaagtaacattgtaaatctcattaaaaatgtattttttatgcattgcaaaaagattaatcatatttaccaagatgttgactgaggttattatgaagtggtgggttttataggtgtttttaattattttcccatggttctgtcatatttttttaattttctatattgaatgtgtatttctttggtaataaaacaaaattttaaataac

SEQ ID NO: 203317 - DNA, 395 bp, Homo sapiens
gcaaaatcaaggtgcaggcgcgtccccgggccagggctgcctcccgggtagagccgccaccttggggtctctgggctctcagtgtcctgggcttcgtcctcaaagtaagatcttcagagtaagaggacggagcccaagatggtgtgaagaccaccattcttgtcacacctttggggacctgtaggagccctcttgtccacacggctggcccagatgctcctcagggaaacctcctggccggcgagggtgcggcctgcgtgggctcattgggcccagcccactggcccagccttctctttctggattcttggcactgttggtgtctgcggctgccaccctggtgtgcccagggcagccacgcacctcagtcccgggcagggtgagggttggggagc

SEQ ID NO: 203318 - DNA, 531 bp, Homo sapiens
gcagagggaggggacagagagggtgatgggattttgcatcttgggcttctgagactttaatgattcttttaaattaaggaactggaaaacactcagcatggtcctggaagtgtgggaagttcagtaaatgttagttctctccccagtgccagaaatcaggaactcaggcagagaagcagatgggaggggagggggaaggtggaggtgctggcactgtattcaggtgatgagacccagcagctggctggaaagagcaggagcagagttggcaagggacagtggcgagtgccaccttcacagagtcattgttgaaaacaagggagagagaagaggcttgggtagaaccagggaaccattcccctttcagggtaagaggaggaaaagtgagaggcaagtgcagaacagtcagagataaaggggaaaggcactgagaggatggtgccttgcagtcctgggttcataagacaggtcttcctgctgtagaggtgaaggataagagggctgttggtggcctgtgggtgggattgggtc

SEQ ID NO: 203319 - DNA, 479 bp, Homo sapiens
ttcatatgaaaccagaaaaagaacctgaatagccaaagcaatcctatgcaaaaaaacaaacaaacaagaaaacagacgtagaggcatcacattatcagatgtttgccacaaggctgtagttacaaaaatagtgctggtataaaagtaggcacatagagcagtggaacagaatagagaacccagaaataaagccaaatacttacaaccaactgatcttcaacaaagcatagagaaacacaggctgaggaaaggacaccttatttaataaataatgctgggaaaactggataaccacatgtagaagaatgaaactggatgcttatcccttaccttatacaaaaatcatctcaagatggttcaaagatgtaaatctaagacatgaaactataaaaattatagaagataacctaggaaaaactattctggacattggcttaggcaaataattcgtgagtaggaccccaaaagcaaatgcaact

SEQ ID NO: 203320 - DNA, 393 bp, Homo sapiens
tacgtgtgccaggctggtctcaaactcctgagctcaggtgaaaccccatctctattaaaatacaaaaaattagctgggcgtggcagcgtgtgcctgtaatcccagctattcaggaggctgagacaggagaattgctagaacccaggaggcggaggttgcttgtgagccgagatcgtgccactgcactccagcctgggtgacagagcgagactccatctctaaaagaaaaaaagaaaatgaaaagaacaataaaatcactcaggagaaaaagaaggcacggcataggaatggaaggaggacaacctgtaggtcctacagatgcgaaaaggagaagagaatacgataaacaacgtgccacacagaaattcactcatttgaaatggaaaaaattat

SEQ ID NO: 203321 - DNA, 121 bp, Homo sapiens
accatactcacttttctgtggcttacggggagatcaaagtgtggcagagcaccttggtcaggcagacgtgtggatattctcctcttcctcttcacgcaaggatcatagaactttttttttt

SEQ ID NO: 203322 - DNA, 486 bp, Homo sapiens
gcccaggatggtcttggactactgccttcaggagatcctcctgcctcagcctcccaaagtgctgggattacagacacaagccaccatgcccggcctcttttttgttgttgttcaatagtagctgttctggtgtttgtcagatgatatttcatcagggttctgatactgcgttttcctaatgattggagatgtcaagtatcttttcatgtgcttattggccatttgtatgtctttggagaaatgtttgttcaagtcctttgcccatttttgaatcaggttatttgtgttttattgttgttgagttgtttaaagacttgttagtgggtgttttcaagcatacacaaaaagtagagccctcagtatccatcactgtgtcactagttatcaacactttgccaatcttcttccctgccctgcccacacctctaagtttttgtcctgcactattttaaagtaaatcccagacatcagatcttttatccgtaa

SEQ ID NO: 203323 - DNA, 247 bp, Homo sapiens
gtagtttaccctaggttatgtgggtaatagcacagctgtgattcaagtacaggcagtttgactatatagtctactgtaatgtcatttaaagaaaacagttatgtaattatttaaattttgattttagtcattgtaaatgtggcattcttcagttggttaggaatttgatctctgttattccttagatcttcaccaaagtgatgaaatgtgtgtgctcatttctcatccttctctccttccactctct

SEQ ID NO: 203324 - DNA, 691 bp, Homo sapiens
tgaccatggactttatttctggttaatgaaaatgtttgtcctgggcacacatgaagttttgcatgtgggttgccaaagtaataaccccaaggggcacccctcgcatgtatgatctgaatggcacccgtgggggtcatgccatgcatggccctgtgaagctggaggtaagtattatctctttggaagttggcatcaaaactgtgagcttcaaccaattctctgtaatcaaccaaagagaaaaatcagaaaaaagtgagagctctaattctccataacctataattaggttgtcatccttcaaatttggaagttaattctatagtgagcaggaaaaagtagtagagttgtaattctgtcaccaacacctatcccccaggaacacagggagaaacatgtaacaatctcatttatgccgtctttctactcatattttacatggaccaacaaatatagcttgctttactagcatatggctactgaatcattggcagtaatattctaggagtattctatagaagagagcctaacctaggattttttttaaatcctagtagttgctacagatgcaactactagattttaataattttctggactgctgaaaacatatttttctgatgatttatttttttcaacttgcctgaaagatgatttgctatgatttgtagaaacaactgaatcatgatctctc

SEQ ID NO: 203325 - DNA, 252 bp, Homo sapiens
taaaagtgcactcttctatatctacgaccatttgtctcaaagcaaaaatcttagagtcaatcctacttattttctttgtcaagaattgcacatcccacctttcagtgagtcttgctgcttgctctacattcagaatctatccaaagttagtcactctcttagtctctcccagaaacagatcccagtaaaaacattcaatcagaagtaatttgggatgtagagaaaaactatattctttttcttccctcagcc

SEQ ID NO: 203326 - DNA, 593 bp, Homo sapiens
tgacccgaggagtggtattggaagtttgagaccgtacatcccttgctaggtgagaagggggtcagagaggtcaggcacagacagagaagggaacgcaggctcctggccactagcctctctcaagacaggtgaactttgtgttaagcgaactcatttaatattttgggcctaatagaagttatttgtattttctctcctctcttttcctccccgggatactgtatcccggggagttggggagctaggcaggtgcagtggctcatgtctgtaatcccaatactctgggaggccaagatgggaggatcacttgagcccaggagtttgagaccagcctgggtaacacagggagaccccgtctcaaatatttaaaaaattagtcatgcgtagtggtgcatgcctgtggtcccagctacttgggaggctgaggtgcaaggatagcttgagcctgggaggacaaggctgcagtgagctgtgattgcaccactgcactccagcctgggcgatagaatgagaccctgtcttaaaaaaacaaggcagagggacacaccagtgtagtaatgacgcagaagcacacaaattttttcacaaatttt

SEQ ID NO: 203327 - DNA, 381 bp, Homo sapiens
tattttctcattcattctgaactcccccagtgatgttaagcagtactcagcatgacacttgatactacacagcagtgtggttaagagcaggggagcctcaagggcaccaacatgcatctgctagccaaccttggtgctggagctgggtccttgatgcccctgctgggctggatattaaccctttagttgctggctcatgagcaggtccttgggttcctggggaaggggcaagggaggcctggccggtggtggtggacacataggaggcttcaagcagcagctctccactaagaggcacagagggacttccacattttaacaactagtttggctgtatgtgtacaattagccctggtgaaaagtgcaagctttggaattaag

SEQ ID NO: 203328 - DNA, 130 bp, Homo sapiens
tttgccttgtacaatacagtgtccaccaattggagattaagcttaatatttttctgtacttcctatcaccatcaaagcagatgctgatgatctccagaactcaaaggaaatcccccaaatgaaagtgtaa

SEQ ID NO: 203329 - DNA, 407 bp, Homo sapiens
caaaagcgcatactagaagaatatcaagtatacttatattccagggctgaaccatcaaatatgttagccactaactacatgtggctatatagattaatattttaataaaattaaaaataaacattctgttacttaattgtactacccacatttaagtgctcaatagtcatatgtggctaatggctactgcattggatagcacagatatttgacattttcatcatcacagaaagttctattagacagtgatattccagaattatgttcttacaattgtaaaacttacagtttattgtaatgcaaagccatttacattagtgaatactcaatatttacttatcatatgtaaataaaatcagtgtaaatatttgtttaaaatacaataaatcaatttatcagaacattca

SEQ ID NO: 203330 - DNA, 172 bp, Homo sapiens
caattgttgccattgaaaaccctgctgatgtcagtgttatatcctccaggaatactggccagagggctgtcctgtatttaggggcagccactgcaaagttattgatgaacatgatctttagctgtatcatggcactgggtggagagcaggtttgaaaagggtgagactggaa

SEQ ID NO: 203331 - DNA, 301 bp, Homo sapiens
gctcaagacattgttctgccttgatttcatcatacagcagggtgaaactcataaagcctgcaggaaagctccttatagtacatggagggggaagatagattttaagaactatattctgagacacataatttttaaaaacatgtatggattcaaaaccattcaaaaccaattgactgtgacatgtaagaaacagaacaactttgccatgagttttaaacttgtaaatggtgtgaaaaattctgagccactctgttttgctgttgtgagcagttaaagagaataaatgagaaaacacttcaaa

SEQ ID NO: 203332 - DNA, 193 bp, Homo sapiens
cataaaatgaaataaaatacatctgagaagaaaaatgaaaacaataactgtgcgctgctgtggaggccctccaggagactgtaaatgccaaaagtaaggtacttcagtgtacctggtaggctatttttcatttaagaaagaggaaaaaaatattgaattgcatttgtttatatttgtataaagaaattacaga

SEQ ID NO: 203333 - DNA, 457 bp, Homo sapiens
  misc_feature (22)..(22): n is a, c, g, or t
gaaaagtacaaaaattagccangagcagtggcatgtgcctgtagtcccagctactcgggaggctgagggaggagaatcacttgaactcaggatttcaaggctgcagtgagctatgattgcactactgcactgcagcctgggcagcagagagagactatctctgaaaaaaataagatgctgggattacaggcgtgagccaccacatgcagacttagtccatcttttaatcatctctgcagtgtagtgatttttcttcctttgtacttctttggtgtgctgggtaccagtctttgctgtctctttaacatggagggtgttaattctataatagtcgattaatatataccaggatgcagtttattttcatgtttttaaatcttattttcatgtttaaaatctttaaattttaaagctgctaaaaattgcagcttttaaagttgtcttaaaacatagtctt

SEQ ID NO: 203334 - DNA, 301 bp, Homo sapiens
tctggtgggtggtggctgtggggctgcagttagtgcgtccaggccctgtggcttgttgggcatgaggcagcattcgtacaccttccagggtggcttttcttgctcagtttctggaaaggaggaggaaatgctgcagcttccacagtacttttgcttaagacaaagccagggatctggaatttcaaaagagctggggatagaaggtttgagctggccccacccagccctccatttgacctccaaagcaggctgtttcctgctgctggctgagtagaggcggccttcctggagggaagggaga

SEQ ID NO: 203335 - DNA, 266 bp, Homo sapiens
ctggtggctgctggctctccttacattttaatgtagaggattagcctgctgaatcagagaggatgctccagtctctagataccatgtttctgtctttgaagataagacaataggagttgatgtcagtagcctctgaggttgacttatattggtccctcctgtccttattgaacagccctgggattgtccgtttttatgttgcaccagtgtcaacttgggggtctatctgtgccaaagtaaaatctcagcattgggaccgtggctgg

SEQ ID NO: 203336 - DNA, 498 bp, Homo sapiens
tttgacatccaggagtttccatttatcctctgaaatctaggtggaggttcccaaaactcaattcttgacttctatgcactcaaggcccaacaccatgtgtaagctgccaaggcttgaaccctctgaagcaatagcctgagccgtaccttgaccctttttagccatggttgggatgcaggacaacaatctctagactgcacacagcaggggtgccctggacccagccaaggaaatcattttttcctcctaggcttccaggtttgtgatgagaggggctgctgtgaaggtctctgatatgccctggagacatttttctcattgtcttggtgattatcattttgctcctcattacttatgcaaatttctgcagcctgcttgaatttcttcccagaaaatgagtttttattttctactgcatcatcaggctgcacattcttcaaacttttatgctctgcttcctcatgaacacttcgcctcttagaaatttcttcctccaga

SEQ ID NO: 203337 - DNA, 222 bp, Homo sapiens
aatgtgagttatcgatcacccctggaaaggattaggatatgccactccaaaatatgccacgtttattttgcactgaaggcaattgagaaacagtagacacaggaagagctctctgcttttcccctttttacctaaaagcagagaataaatttccttttggaaagatgacatacattttcctttataaaggtgttcccttctcctctaccaggaagatctgag

SEQ ID NO: 203338 - DNA, 542 bp, Homo sapiens
atatctatatatatcctgaccccgggttggctgtgtgttaaaaaatcaaactgaaatcgcctccaaaaggaaggcagcactgaatgacagtaaagtaagggctgggcctggggtcagcagcctggcgtccagccctgccagccactagctgtttgaccttggctgagtcatttcctctccctcatctcatttgccttgtttataaaatggtatccagccaggcacggtagctcacttctataatctcagaaggcgggaggatcagttgagctcaggagttcaagaccagcctgggcaacctagtgagacctcatctctatgaaaaaaaaaaaaaaagaagaaacaaaaaagaagatgtagactgtgtgatctctgaaatttctccatgttcaaaagtctaaccttcgaagacttctaagagttttagaagaaaagtttgagctgctagaggagaaagaggaaacagtttaaaaattaagttagagagttcttgcaaaggagatgtttttgttagagacactgaaaattcttctcttaaaacc

SEQ ID NO: 203339 - DNA, 670 bp, Homo sapiens
gaaaaaaaaattatgaaagcaagtagctgtgccccgcctgccgcacctcctacccatgcctgagcgcactttaccaccaccttttaaagtccagacgtctgcgccattaacttcggagtggtgttcgcaggagcatttgtcgcagtggtctttaattgctttaagtcgctgtccattttgagaatctgataactggacgatctcccagggaaaaagaaaagggggggggcagatttgcatacaatgcggggagaggttttctgaagcccatttccaactttcccgtaaagaacccctggctttgaagagccaagtctttcgagatttaactccaccaacatttagagttcagatgtttttgtaaaatcgcttttttctaagtttgagtggggatttgctttctggaattgactgtctcctgtcttcagatgactgccccgtgtcagcccggcggcaatcgttagtctccgggccaacccaggacgatgctttttggcgttttcaggcaccagcgctgccacctgctggcaaaaactttctctttcggttgtgagggggaaaagcaaaaagcatcaagaacgtaagttgccctgagctaagatcgaaccactgcactccagcctgggccacaaagtgagaccctgtctcttatttaaaataaaacaaaaca

SEQ ID NO: 203340 - DNA, 510 bp, Homo sapiens
cagggtgttcaggaactatgcattaaaaacttagtgaatatagcaatgtctccgggcataaaattaatatatgaaaaccactgtgtttctatatactcgttttttaatagaaatggatgaggcaatttttaaaatttatgtggaaatgccaggacttagccaaaagaatcttgaaatgaaacaaagctgcactacttaacactagctgacttccagactcagcacgaaactactgtaatcaagactgtgcaggattaggataaagacaagtagatcaaaggaagagaacagagttcagaaataggccccacacttggacaaatggctttcaacaaaggtaccaaaacaattaaagagcaaaaggaaaaaatagtcttttcaataaatggtggcagaacaactgaatatccatagggaaaaaagtgaatcctgaccccaactttgcacataaaaatgaatttgagatgcaccacagacctaaatataaaagcaaactgtataacactttca

SEQ ID NO: 203341 - DNA, 438 bp, Homo sapiens
gtagtctgaggttacctagacagtggttcttccagccactgtaggttagagggatccgagttcaggagggcattgtagagcttgggcaggtcacttaaccactttggacttagcatttcccatgtgcaagaagaggcagcttgcattatcttcagggttgcaccaaggaaacgcttcagcatgacttttttgagtgacgccgagtgagaatgcaatttgtcatttcttgtgggagtgactaagccgttgtctgtgtgttataacagtgaattaaaattctaaccctgtttctttggttctttgaatgtatatcaggttcaaagcccatagacttcacaggtgagccactgtgctaatggaaaaaggctactcatctggtagattcttcatataaaaatccatgaagaccctggtagagaaacagtagtacatctgatt

SEQ ID NO: 203342 - DNA, 847 bp, Homo sapiens
agaagctttcagtaaaactaaagggaccttttctgatcaaaccctgtgtatggctgatatatgttctgccaatccagccttgtttgagtttaagggtgccttctggcctggggtcaatttctctgtgattggtttaatgtcatttgcccataagcatacattgcagggtgctgcccaagggcaagtgcacagcttaggtacatcatctcatttacaaatcaccatccggccatgtctatgagcactgagatatgaatcatcattatttatacactttagtcatatttgaagttcttcttactaaccctataaaactctcaaatgaattagaatcctcaaattcacataactatcctatccatttcctgtaggcagagccatatgcaaaactaacccattattgagaggtgcttggtaaacataggcacagaacagactctaatcacgtcttgtaaatctggggtccattataaataataaataaagttttattgaaacaccattatgcatattcattcatttactgtctgtgactattcttacattacaacaatagagttgagtggtaacaacagtgatctacagctgaaaaagctgaaaatgtttactatctggcctaggccagaaaactatactttctatcatgtgtccttgccgtgtaggcaggtgacttatggagaaatgggatgaaaaaaatggacatggtgagtcaatcatcagtagagttgaattgaaagaatgccattagttggagtcagagtcatggcaagagagagagagtgtaaggtaaagttgtgaggaagaagaaaccatgcattaagaagagaaacctggtcaggagacagaa

SEQ ID NO: 203343 - DNA, 296 bp, Homo sapiens
atccatgggaaatcctgctggctctaccttgtaaacaaatctactggttattcattactaagaggaaaaggaaaggttcttgacatggttacaccttaaccaagcgatccaaatcaccatcacaaatgacagaacaaatagacctcaggagtcccctgaagggatgtccttaggaggcacctcgagtctgtggtgttcccgccaaacatgttcaacatgaatccaatcggggaagcaatcaggagactccagacatcgggacacactatcaatcagaggactggctccaatgtcaa

SEQ ID NO: 203344 - DNA, 391 bp, Homo sapiens
gaactcctggctacagtaggaccaagtaaagtcattaatgggaagatcggaatactagagccataagagacattaatgatcatctagttcaacccctcatcttccagaggacaaaaactgaattctgtttccccatcaatcccctatctttctacctcttttgattcatccttcatacagatgcccagcaatgtttctaagaacagttgtgatcattttactcttaagattaaagctctccatcacagccttcaggatctagttcaaattccttaatataacccagaaggcttttgatgatctgacctctgcctttctttaagctgtgcatatttccatgcccctgtaacacacgcatgcacacatgtacacaaacactcccccccacaca

SEQ ID NO: 203345 - DNA, 358 bp, Homo sapiens
taacaaaggcagaaaatcctaaagaattgtaacaattcaatgttcccaaaagacaccatggaccacactccattttatatgacacttatatgacattccatacatgtgtctaacatgaagattgagcagataaaaagtatcactttagtaatcatcctcaatcaacaccagataacaaatgaggggcttttgcttatggaaattctcacatattgagctgaacacttttaccttaattaattaatttatttatttatttattttttgagacagagtttcgctcctgttgcccaggctggagtacaatggcccgatctcggctcaccacaacctccatctcccaggttcaagtgattct

SEQ ID NO: 203346 - DNA, 197 bp, Homo sapiens
caggaggaagaaataaaattttttaaaagcccaagatttaatgaaaatgggaacaaatcatagtggaatgcagtttcaggtatgagctacaagcacattaaggaacattgaagttgagtgtgctttatattcctaatgtcttgagcacactgtgatttaaaatagctattaaagattatgcaaaatgtgcaaaatta

SEQ ID NO: 203347 - DNA, 553 bp, Homo sapiens
atatatgtgtatgtatatttatgcttatgtatgcatttagaaatctgtatcccaaatgttaccagttgatctctggtgaggaggcctcccagaggcctttggtttctgttgcttatacttctgggtgttagagcattggcaaagagcacgtaatacccataataaattccaggaatgaaagaggtacatttgaacaaagggcagcctgtcgtctaaataaagcgcttcacaacgatgctactttggcattcaagtttgagcaattgtgatgcagaagcaatgttcgtgtagagattttgaatctaagaggttctgttggctgaaggttccccaagtgggggcgtggcagagacaggaggggaacattactgcagtagaactcatacaagagaattcagttttctgctgctggtgggtgaaatgatgagatctgtgactgctgtttctgtagtactctgcaaagaaagtcccaaggaatgcttgtcaattaactgagagcaagtcagttactccagattatcaactcagcaatttctgatttgtactttctttt

SEQ ID NO: 203348 - DNA, 512 bp, Homo sapiens
atgggtttgcacttgagaatagactgtttccatgtgcccaccttcacctctcatccaccgtacttcatctttttccccaaacctattgcctgtccctgaaatggacttgctttcagacatttcagaggaagacccctttggggaggctgaccagatcacactagacagcttagagcacctttccacaggtgaaatatcggagcagggggattctgaagttgctatgcctgatttggtcttggattctgccatagccccttctcagcctgactgtccttctcccatccatgggaagactcttaaagcagctgacgacagtgattctgagtttggttacttctccttcagtttctccaaatgttttccctccggcttcccctcccttcttgatgaagatggatatcttgctttccccagcctccccaaggtctgggtctccttcctccccgctggtgtgcagcactatgtcccaatcacctccccttcattcattccttcccttatcctcatct

SEQ ID NO: 203349 - DNA, 375 bp, Homo sapiens
ggagcagagggagtggggcgagagatggagaggaggggccggggcaaggaaggatccctaggtctgccttcctgtccacagcactgcccgccagccacagctcctgagtcaaaggctctgaagcaaagttgtatgatgaaccttggatttcctgtacaatttggctaactctagggtgatctctaataaagacaaaggccaggggacagaaatatctttcttttgctcctggcaaatcccattttgattctatctcaatctaactgtccagaaaattggattgaaagcaggacaccgccgggaggtaaatcagattagggcttcctctaccacagcctccagcagacatttcattttgcagtgtgcgtccctcat

SEQ ID NO: 203350 - DNA, 526 bp, Homo sapiens
ttgaactagggccaagataaaagttcgtcaagtgagaagggctctcctaaattctgtgccaaaatttatagtaaaattctgctacagaagctgaaagatactgaactcatttaattgttttttaactcagcaaaactaaatagattcttgggtaccaattctgtgtatagctgactactgagtaagaaacgccagcaagctggtctttttaaaagcaatgaaatcaaccttttaactttgatgaagtgcagtgagtttttttgtttgtttgtttgtttgttttctttaaagacaggatcttggtctgtcatccaggctggagtgcaatctcactgcagccttgacctcctaggctcaagcagtcctcccaactccagccgagtagctggatatacaggaatgcaccaccacacctgcctactttaaattttcttgtagagatgaggtgtcgctatgttgcccaggctggtctcaaactcttgagctcaagcgatcctcctgccttggcctgccaaagtgctaagat

SEQ ID NO: 203351 - DNA, 519 bp, Homo sapiens
ccaggaggcggaagttgcagtactgtactccagcctgggtgacagagcaagactctgtctcaaaacaaaaacaaaacaaacaaacaacaacaacaacaaaaacccatgcgtaaatgtttatagtagccttatgtatcagagagaaaaacaggcaacagccagctgtccttctgtggggtaacggttacacaaatggtggtgcatccataccatggaatatgactcagcaataaaaagaagtacttgcaaaaacttggtgattctcgagagtgatgctgagtggaaaaaaagccaatcccaaaaggttgtatattgtacgattccatttatatgatattcttgaaatgataagattatagaaatgaagactatattagtaagtggtttccaaggttaaggaagggctagaagtagaaagaaggggatgtggttataaaagggcaaccagggggatccttatgatgcatcttgattataccactgtaagtatcctggttgtgattctgtactatagctctg

SEQ ID NO: 203352 - DNA, 398 bp, Homo sapiens
agaagaaggtaaaagagcttctacttggtatctgagtagcaggaaagtaaaagagaaacgaaaaagctttcagtgcctcaagagcagttaacaaaccctgaaagggaaagagaagtgggcaaaactgcactgcctgaaagttttattgagagaaaagagaaagagctttatacacagggtgaagaaatggcactcttggtggttagaaaagatgataatgtcagttataggtaagagctggtggaaatagtactactcacaagtttttatagaaatctgcatgtagcattcaacacgtaatgaattacaatggatttttaaaagagatcgtagttttaaaatgtagctttggggttggggagatactgttcaaaggatacaaaacctcagataggagg

SEQ ID NO: 203353 - DNA, 488 bp, Homo sapiens
gcatgtttgtttgtgtgtgtgtgttccattttattttaaaaattttttaaatttttaatttttgtgggtatgtagttagtgtatatatttatgggttatgtcagatattttgatacaggcatgcaatgtgtaataatcacatcagggtaaatgggatgtccatcacctcaagcatttatcctttgtgtttcgaacaatccagttatactcttagttattttaacatatgcaattaaaatttttttttactataattatgctactgtgctagcaaatactaggtctttttcattctttcatcctgaatctttgtgctatgatgccggttgagtcagtacatggagatgctggagaactcctggaagccattcctacagtggaatgactagcgaagatgaactataatggaaattgagtgcaaaacacatacatatatcccattaattacaaaccaaatgcattgccaacaacctccctcttagctggag

SEQ ID NO: 203354 - DNA, 750 bp, Homo sapiens
gggcagaagacattcctgtgtcctactagatggagctctgagctagccttgtaggtggggaagatccagattcctgagggactcatgatctggcgctgtcttcactgcatacctgaattccaggttctggagtgggcaggggttgctgagaaccctcgccctttggcctctcccggggaagtgctgctgtgtggtgcgctcactgtcagcagggctgtctgggcagaacaggccctaattcctgctggggagtgggaggggaccctggtgggggcataaatacatctgcattaagctgttcttgcactgctataaaggaatatcagagactgggttatttataaagaaaagaggtttaattggctcacagttctacaggctgtaccaacaggcaccagcatctgcttggcttctgggaagggctcagggagcttttactcatagcagaaggcaaaacatgaacatacatgtcacatggcaagagcaggagcaagggggtggggggaaggtgccacacactttaaaacaactggatcttgcgagaactctgactatcgcgagaaaggatagcaccaagccatgaggtatccacctgcttgacccacacaccttccaccagaccccatctccaacactaggattacatttcagcatgagatttggcagggacagatacccaaaccatatcaacatctgagtctgacttatcaccagaggaatgcaggctgtggcaggaagtgagtcctcacg

SEQ ID NO: 203355 - DNA, 327 bp, Homo sapiens
ccatattggggccatcatttcaatcaggaattaccagctctgtatattccaaaggttatgagggggcctgtaacatggcacattttcattttttcttctgattcttattctttcagaagtagctaccttttgaccattatcaatttttaaaaattgtactttgcacgtttaatccatttttaaccatacaataattacactcgtgtggtggtaaaattatgtgtcgttggggaatgcatataaaaacttgatgttaaacataccatagattcactcaattttttgatgggaaattttctgagcaaaagctgtctaaaaatggttctg

SEQ ID NO: 203356 - DNA, 366 bp, Homo sapiens
cggacgctgggcggcggggcgtggggggcgtacctgggggtcaagctggcttcaacaaaaatgtttaccacttatcgggggcataacttttttgaggtaaagatacatttcatcaaatctaagactccatcgactgagacacaccactgtttatccacaggtgacatcactgcctgttgagagactgcgtggtgcacaaggcagtcacaccggcctcatagacgtctcctctattccaaggagtctggctctctcctgacttcagttgcacggctttgcttccaacaggtaatccccttgcttgtggctcagtaataaagcaaagcaggactcacgacaccgcttcaggggccgcccttgctcaga

SEQ ID NO: 203357 - DNA, 931 bp, Homo sapiens
ttcagtgcagctgaaacaaaagtacaaggggagctggtgagaggagaggtgggtgcagggagggagtagctgcccccagtgtcaggctaaggagttcggcttttaaaattagtccaatgtctagcatacagcaggtgctcaggaaagctggagacagagagtcatcagttagtttggggacatggaagtgggtaggcggtcccttggctgcaaagctcccgggtagacagtcccttggctgcagagcttggagctgctagtgacccaggagactacgtctgatgtgaaatgaaattgaaagtcgagcagagagtctggctaagaccttctaagaggcggaaaatgatgtggaggcagggagagggaaccaggcccccagagtcagaataggcagcaggaaggacataaggcctgctgcttacggatctctcatctctgtccacagtcacatttggcaaaggctgcatttctgctctgacgtgtggggctctctccagcaaaatgatgttatcgcttttcctcccagcatggtgacggccctggtgatgctgtgatcagtgtgtaattaaaggcagccgtgcatggctgctctcagactgttgctgagggcttctgatcattgggaaatctcagtggtgtaggttttagtggaaactgtatccagccaggccattcatagcttctacaccatagagggaatgttggtcattatcagagggcatgggtttcacttttttatgtctgcagcctgagtcgggtgaacctttctcttaccctagggaagcactagaataatgcctgcctgcctacctgactgccgtcctgccatccccgtctgtccatccgtccatccatttatccatctaaggtgacagcaaagatttactgtagaaaatctctttcccacagtaaaaacctcttttctacagta

SEQ ID NO: 203358 - DNA, 504 bp, Homo sapiens
tagcaaagaaaatctataattacctggaaaggctgttaaagatattccttctttttgtaactacatgtctgtgtgaggcagaattttcttcatatacttcaaccaaaacaacatgtcacaacagattgaatgcagggatagacaggagaatccagctgccttctattaggccagatgttaaagagatttgcaaaaaatgtaaaatgatgccactctttttgctaacttttttttagaaaattatttataaaagtgttgtttatattaacgtaatgggcttattgttttaagctagtaagtatcttaaacatttctcagttttaacatctgatatgatacatattaatagctgtcaccccctaaaacaaaactcttttgggatcttcaccaattttgagagtgtaaaggggtctgggagctttcaagttgctgaacacatggaggttcctggaggatggtgtgcccagggagggcgtggaagctcctcgcccctttcctcatcaa

SEQ ID NO: 203359 - DNA, 346 bp, Homo sapiens
taacaaaactataaaatatactccaactatatattttattgtaagaagctgagtttatattaccaaagatactatattattaggaaagctaactttaaatatgactattaattccatgtacatgagggacctagagtagatgaattcagagagacagaaagtagagtggtggttgccagaggctggaagagtggggatgaggagctgttgtttagtgggtttagtttcagttttgcaagattaagagttctttacaacaatgtcaagtacttaacaatactgaactatacacttaaaaatggttaacatgggccgggcacagtggctcatgcctgtaatcccagca

SEQ ID NO: 203360 - DNA, 621 bp, Homo sapiens
tctctaaaatgtgaaagataaaagcataaaaatttttataaacatctgctaacataccacatagaaaaatacaattagcaacatcaccaacaaaattgagaacaaatgtaatgagaaagaattgttgaatgcaactgaagtttattttttaccaggttaaaatatattgttgtatcttttagaagttttatgtaatctccaaggtacaagaagaaaaatacctgtatagatacacaaaagaaaataagacagaaatgaaagcatatcggtaaaaaaaataaaaaagacacaaaggaagacagaaaaaagaaaatgagaaagatgtaataaacaatgaaataacattagtaagtctttctcagaaaattacttaaatatatataaaattaacttttggatcaacagatatgcttttttttttttttttggaaagggggtttaaccttaggtcacccaggctaaagtgcaagtggcacgaattcaacccatgtgtaacctaaacctccgtggttcaagcaatcctctggtttaagcctcccgagtagctgggattccgggtccccaccattatgcccagctactttgggtttttaaagtaaagatgggtttccactttggggg

SEQ ID NO: 203361 - DNA, 731 bp, Homo sapiens
catctcctactgaaccaatataatagcctcctaattaatctccctaaatctattcttgccctctccctgaccctttctctacattgcaaccactgacattggtccaaacgcattactactctgctgaacttctgccttcccaatggcttcaggataatgccctatttgatctgacctgtctaccttgtcaagaattttaactctctccttcacttatgtttcttcagttacaatggcttttttggtgttttgtttagttggttggcttagctggttggcaggtttctcaaacatgtcaaattctttccaaccttaagagtttctgcatgtgctaatcactctgcatctttgcctggttacctcctagtcaccctttaggtctcaacttcaaagcctctctcaggaaagtgttctctaatgtttctatctactactgaagtctagattagctcactctatcatatactgttactgcagcctatgtttacctttgtagccctttgtgtaactgtaattaacattactagtatttgtttaatgtctgacttttccaccagaccagaagctccatgacagagggaccatacctgttttatccattactgtaagccagagcgccctacatggtatctgaacatggttaaatgcttagtattattttctcattcctaccttaggactttgcattgcctgttccctatacctagggccccagacctggtccccagaac

SEQ ID NO: 203362 - DNA, 632 bp, Homo sapiens
cctgcggccactgttcctgaagtggcctctttctgccttcccaatggcttcaggataatgccctatttgatctgacctgtctaccttgtcaagaattttaactctctccttcacttatgtttcttcagttacaatggcttttttggtgttttgtttagttggttggcttagctggttggcaggtttctcaaacatgtcaaattctttccaaccttaagagtttctgcatgtgctaatcactctgcatctttgcctggttacctcctagtcaccctttaggtctcaacttcaaagcctctctcaggaaagtgttctctaatgtttctatctactactgaagtctagattagctcactctatcatatactgttactgcagcctatgtttacctttgtagccctttgtgtaactgtaattaacattactagtatttgtttaatgtctgacttttccaccagaccagaagctccatgacagagggaccatacctgttttatccattactgtaagccagagcgccctacatggtatctgaacatggttaaatgcttagtattattttctcattcctaccttaggactttgcattgcctgttccctatacctagggccccagacctggtccccagaac

SEQ ID NO: 203363 - DNA, 426 bp, Homo sapiens
tatttaataaatatttaatggccatattcccaattcagcacctttggtcccattatcttttgtcctttcctcttatgctgtttaactatttaaatcttttccacccctcaagactgagctcagttctccctctttgaagtctatcatggttttgcaacagttaatctttcttctctaaaattttatagcatttattgccagtaccaccttgtgttcatggaaaatcacactatcacatatcttattttacctagttgtatcaaaagcttcttattttctcagaaatcttgtagcttgttatgccagtacccctcatatttttggttaacttgaccagcttctattaatatcttaattagctaatttgactggaagcttctcgatcagaagctgttttagctaatgccctcctcagttattttcact

SEQ ID NO: 203364 - DNA, 833 bp, Homo sapiens
tcttctctcgccttctctcctccctcctctccagcatcctggggtccgttggtccagatgaaggtacttgccaaggagggagcccacaggtcgatggtcgcgggatggggtcagtggggtcattgtctctcttggctgggaccttaccagtcatgtcagcttgagccacctgtcacttcgtggtggtgctgggcccagaaagcagggcagacctccagcctattaggtcatttctgatttgggattcgtcctactatatgtggctgaccttacaccccagctgtgtcatcctgcttgtcccaaggcctggggtgccatccatctctctgaaaccccatcagcccagatcccgagggctgagatggtacctctgtaggatagcagagtccctacaatcttactctcagtcccagcagcagggacatctttgcctagcctgggtgggggatggaactggagaaaggttttgattggctttgggcctgcagacggcactcacagggaaggggcagagctagcctaggaagaactctgctcccagctgggggcggtggctcacgcctgtaatcccagcactttgggaggccaaggtgggtggatcacctgaggtcaggagttcaagaccagcctgaccaacatggcgaaaccctgtctctactaaaaatacaaaaagtagccgggcgtggtggcagacacctgtaatcccaactactcgggaggctgaggcaggagaatctcttgaacctgggaggtggaggctgcagtgagccgagatcacgccattgcactccagcctgggggacagagtgagactctgtctcaaaaaaaaaaaa

SEQ ID NO: 203365 - DNA, 837 bp, Homo sapiens
cagagatccccccgaatatggggaagatctgagcaggactggagcctagagaataaaccagatgaaggtacttgccaaggagggagcccacaggtcgatggtcgcgggatggggtcagtggggtcattgtctctcttggctgggaccttaccagtcatgtcagcttgagccacctgtcacttcgtggtggtgctgggcccagaaagcagggcagacctccagcctattaggtcatttctgatttgggattcgtcctactatatgtggctgaccttacaccccagctgtgtcatcctgcttgtcccaaggcctggggtgccatccatctctctgaaaccccatcagcccagatcccgagggctgagatggtacctctgtaggatagcagagtccctacaatcttactctcagtcccagcagcagggacatctttgcctagcctgggtgggggatggaactggagaaaggttttgattggctttgggcctgcagacggcactcacagggaaggggcagagctagcctaggaagaactctgctcccagctgggggcggtggctcacgcctgtaatcccagcactttgggaggccaaggtgggtggatcacctgaggtcaggagttcaagaccagcctgaccaacatggcgaaaccctgtctctactaaaaatacaaaaagtagccgggcgtggtggcagacacctgtaatcccaactactcgggaggctgaggcaggagaatctcttgaacctgggaggtggaggctgcagtgagccgagatcacgccattgcactccagcctgggggacagagtgagactctgtctcaaaaaaaaaaaa

SEQ ID NO: 203366 - DNA, 452 bp, Homo sapiens
cagacaaatacatattattttcaagtgtccagggatcatataccaagacagacgatgccctgaccataaaacaaaacttaactcattttaaagaattgaaataatacactgtatgttctctaagcccaaaggcctcaaactagaaatcaataactgaaaaaaaacaggcaagtatccaaacaattgcaattgaaagtaacacacttctaaatcattcatgtgtcaaagagaaaatctcaagaaaaattttaaaaatcaaattgatcaagattgaaaatgtacaaatcaaaacatatgagactcagctaaagcagagagggaaatttatgacattaattgtttacattagaagagaaaaagttccatatcaataatataagcagatcaagagcctaggaaaaggagaggaaaataagcctaaagcaagcagaaagaaggaaataatcagagca

SEQ ID NO: 203367 - DNA, 389 bp, Homo sapiens
tgtgaagagatcacatggctaaagaggaagcaaggaggggaggaggtgccaggccgttttaaacaaccgtgttcctgtgcccagtttcaaaatagccttcagccaagctattgaagcagcctttgtgaaactggacacaccagctacttcagatcccttctgtggtaagggcagaggctggagtgcccagggttgtcaaacacacatgtactgccattcccactgggatccagtggcagacatcactcatcagctctttcaggaatgaatgcgagaataggtctcccatcccccagggagggcattaatctgttcatgaggggtccacccccatgacccatacatctcccattaggtccccacttccagcattggggatcagattttaa

SEQ ID NO: 203368 - DNA, 895 bp, Homo sapiens
tagtttcactttgagaacccgtcagacaggttcaacagcaccaggtctattatgacagccagcaacgggcctggccagccactgctgcatcagagctgcacagaaaacctgccagcttggtgttggtgttggtggagatgaagttcctcaaggccgtggatgaaacacgcccagtgccaccggctggcagaggggcccaggacaacctagacgtgccatcttacctgctttgctgagccctgggccttctgccttcactttgctggcatcgtgggaagggtcaactttgactctgaaagggctggcggggatttcctgtagcagagacacagtcttagtaggaaagcccctgaagcaacagccagagctcagggagccttcaacaaagggtgaaccttagcatcactctgacttagcgagtggtgagcagacttctattaccacaggtaaacagaagggtaagataagccaaaagggcccagcattgggaaagggccttctataacaggtcactctctaatgcctggatccctgatgtcacaaacaaacccgaggactttgagcctttaatactgaatgttgagtactcaggatgaaaaatgccaacaagaataaaaccaaaaacgacaataatacatggggctgggggaaggaaatgtcctccagggacagctgagagctaaggtctggggaaatgcaagaagtgatcagagacagaatgattataattcttcaaaaagaatgttgcagactattggaataaaggcagaagaggttaaatggatgtcaagaccactacctttaggcacagaacattctactaagatttccatttttatgtaaggttaattttaatccctaggatttcaaaattctctctttcaggatcctgctc

SEQ ID NO: 203369 - DNA, 607 bp, Homo sapiens
gcacatcatacccagccaacccattgtggacatggaatgtaagaaatcaaccttggttgctaagctgctgagactctggcgttaatttgttaccgcagcataacctagtccatcctgatgcatgcagcatgcaaaccacttatgttgacccttagccatggtaagtgctccacagatgttggttacttttggtaggaagatagattgcctctgaaagttttgttagctgatctcatgatgccaatgttgctattttgtaattggataaattggacttggctctccttccggcatgtgggagagaaagatgactgagagacaataaggcactattatcttcagtttgtgtccttggatacccttggtggcaatgaacaatgcatgcccctctgagaaaactggacctaaaggagaatgggagatgataccagaattgggaaagtccaaggccccaggcattccctggtctggagacaactttgagtccttggtgggaagattctccaagggaacataaatgcttctactatctagtttgtctctttgagaattaaaactttttttttcattccagtagcttttggggtacagttcggctctttgagaa

SEQ ID NO: 203370 - DNA, 131 bp, Homo sapiens
tacaacatagactatacttcttgagcaaattagccaaacattcagtttagctaagtttctcttagaaatgttgcaccaccatataaaaatcctgatataaccccagtccaagcaatctgttctataaatta

SEQ ID NO: 203371 - DNA, 450 bp, Homo sapiens
tcagaattacaaggctagtaactaagcagttgtggttttgcagtagaaactggatttgaaaccagaactttgtgacctcaaaacttctccttaccacgtgtatacaatgccatcttataggttatacagtgccctaggaatttttttttacacagaaaagaattatatccctactctcagatacacactagatataaattcctgtaattagtgatagcttctttattttttaaacattcttttgctaaaaaggaataatagcaagaaaagtaataactagttttgctgaacaagaatagtaactgatctgaaagtaaagaagagagaatatgggccgggcgcagtggtttacgcctgtaatcccagcactttgggaggccaaggtgggcggatcacgaggtcaggagatcgagaccatcctggctaacatggtgaaacactgtttctact

SEQ ID NO: 203372 - DNA, 681 bp, Homo sapiens
  misc_feature (306)..(306): n is a, c, g, or t
agagacccaaattgaaattagaagccaagaactttaaaagaactattataagaatatataggaaaagaggctgggcatggtggctcacgcctataatcctagcactttgggaggcagaggtgggcagatcacctgaggtcaggaggtccagactagcctggacaacatggtgaaaccctgcctctactaaaaatacaaaaattagctgggtgtggtggctcatgcctgtagtctcagctacttgggaggctgaagcatgagaattgcttgaacccagaaggtggaagttgcagtgagccaaaatcngcgccactgcactacagcctgcgcgacagagtgagactctgctcccaaccgccaaaagaatatataggaaaagatggtttggctgagtaaatatgttggggaattttagaagagaaagtgaaacgcctgaaaaagaaccaaatggaaattatagaacttaaaaataaaatatgtgaaattaaaagttcatggttgtttcttagctgttaatgaataatgctgcattgaacatgagaatgctaatatttctttgagaatcctgttttcaattattttggataaatacccagaagtaggattgctggatcatatagtggttctattttttattttttgatgaacctcattgctgttttccatctcagctgtaccatt

SEQ ID NO: 203373 - DNA, 331 bp, Homo sapiens
tgctttttgacttaaagtttatttgtgtgacttaaagtcacttaagtctgttattagtgtaactacccgagctttcttttagtactatttgcatggaatatctttttgcatacttgcattttcaacctatttgtgtcttccacatatcataatgtagttgaatcatgttttttaaatgtatattgccaatctctgtcttttgattggagaatttaatccgtttatatttgaactaattactgataaggaatgacttctgccattttgctatttggtttccaaaaaatttttcttttcctccaataaagccctttgtgtttattttcttgta

SEQ ID NO: 203374 - DNA, 916 bp, Homo sapiens
tagctaattcctgttcatcccttgcatctaagcttaggtcttatttccactggcctgtaagcctctcaaataaaaatatttaaaactcctaaatggaaagaagattaaaaataatggaaatggccaatgatgtaccaggagcaagaatataatattgatactaaataaaataaaacatacttcaaacctcaaggcattaaagggacaaagaggaatattatataatgataaataatcaaaacaacagtccaattttcaaaaaatggacaaaacttatgaaaagaaagttcacagaaatggaaatattaacagttcttacacatatgtaacggtactcaacctcattcataaggcatatgtactttaaaattacactgagggctgggcatagtggctcatgcctgtagtcccagcacttaatgaagccaaggctggagaactgtttgagcccaaagttcaagaccagcttgggcagcacagggaggcattgcctctacaaaagataaaaataaaattagccaggcttggtggcatgcatctgtagtcccagctgtttgggaggctgaggcaggaggattgcttgagcccaggggtttaggctgcagtgagccagctgtgttcgtgccattgtacttgtactccagcctgggtgaccctgtctcaaaaaaataaaaattaaaccctggttgtttcggttttccctctaatagatgcggcccttacacaaattgcgcgcgttcgaaacaaaacttcggggcggcgcggggggtcaccctataacccaacttggggggcgaaaggcaaaattgggccagggttgacaacccggcccagggaacccgtctctcaaaacaaaatcgggggggggcgcctccccccacacggggggaaaaatagagacgggccacaccacccg

SEQ ID NO: 203375 - DNA, 715 bp, Homo sapiens
tagctaattcctgttcatcccttgcatctaagcttaggtcttatttccactggcctgtaagcctctcaaataaaaatatttaaaactcctaaatggaaagaagattaaaaataatggaaatggccaatgatgtaccaggagcaagaatataatattgatactaaataaaataaaacatacttcaaacctcaaggcattaaagggacaaagaggaatattatataatgataaataatcaaaacaacagtccaattttcaaaaaatggacaaaacttatgaaaagaaagttcacagaaatggaaatattaacagttcttacacatatgtaacggtactcaacctcattcataaggcatatgtactttaaaattacactgagggctgggcatagtggctcatgcctgtagtcccagcacttaatgaagccaaggctggagaactgtttgagcccaaagttcaagaccagcttgggcagcacagggaggcattgcctctacaaaagataaaaataaaattagccaggcttggtggcatgcatctgtagtcccgagtagctaggactacaggcacttgccactacaccccactaatttttgtatttttagtagagacggggtttcaccatgttgaccaggctggttttcaactcctgacctcgtgatccacccgacttgacctccgaaagtgctgacagcagatcgacctgagtcaggag

SEQ ID NO: 203376 - DNA, 541 bp, Homo sapiens
ccggtttattcctcaaaagacaacagagttgaactcattttatgagcttgaaacattagcacaactggtctgtgtgttcatctgcatgctggttgtcaagaaatctcaaaagaaaagaattggttgggcgattttaatcttatttattcctcccccaccactcttgctatagtaggacatgagtaataaattatctaaaaagaactcaagatacagaatctagccaggctctaatgaagattttctataaatctcagctaatgcatttctccttcagacctgacacatatccattctggaattccactgctcctgggcgacagctataactaatagctctggaaagttcaatgaactttccaggaaagatggagggtggggacggggacagatttgttctcatgtctggaatccctagggagaaaataaagatctatccaaaacccagattttctcctaccatgtttctaccaccatcataatgtggatggggaggtagtctctttactttatacaatagttgtagaatgtaatgattaaa

SEQ ID NO: 203377 - DNA, 192 bp, Homo sapiens
gggaccaggaagggcagtgtggaggcgttctgtgtcctgagtcagtgccaatgtcctggtggggaggctgcactacaggattttccaagatgtcgtcacaggagagaactgtgtaaaaggcacaaggaacctctctgcattacttcccacaactgtatgtgagtctaccataactaaatgactaataataaa

SEQ ID NO: 203378 - DNA, 220 bp, Homo sapiens
taattgaattcaggtcctctgttctgctgtcagaaggcattctttacaaaagcccacctctgagccatccttaaggacacagggagaactccatggctggggcacctgcacggcgcctcttcacactccctctccctgcccaaagccttgggccactcctcacttggcatttcttccagagcactcacaactctggcacttccctggacagtatctaaca

SEQ ID NO: 203379 - DNA, 418 bp, Homo sapiens
ttgatcggcagagataggtatccaggtagaggatcaaagactaggatgagaaaagaataaggccagttctgtgaatacccagtgactaacacaaggctaggagaaaaggagtattgattgctattataaagcattaccattaatatgtaatttcagctagctatgaactcaaatacgtttatgaagtaatgagatattttagcatttttttctcatgtgctactcctaaaagttactcttaaaacaacagggttgacaaatatgtttaatatatggcaaaatagacatagatttaaaaatgcactttagtatcttgctatttgattgtgtggtcctcagatgagcagcattggcatcacctgtaacttgttagaaatgaagctaatgcaggatgttggcccccaccccaaacctaaca

SEQ ID NO: 203380 - DNA, 498 bp, Homo sapiens
ttgctttgctttgtgtgtatttgtttgtttcattttgccaggggcatttggtgctcagcccttaccccctatgttttgtgaagcatatcttattctccaggcatgtcttattctccctcccttttatcttgtcctgaacacaggctagggggatgacatggtttccttttaggttttagaagaaacaggagtcttatttgattcctcctttgaaagaactgctgccatgggtgatttcctcattgatgcaaagaaactatgctttgccctacctttgagagcatttacaatagaaagtctacttactcttccagtgaactgatatatacttagtctctgccctgtgtctgggacgctgtgagatgctggtgaatttgctagctggcgtgatggattgtccccttacttctctgctttcactccccaacagatgattattgttctcctgtgcaaaggactgtgaggacactttgaaataaaaaggtagtttctgccctc

SEQ ID NO: 203381 - DNA, 298 bp, Homo sapiens
tatgcatgcacataaagatttcacctggggtttcttttctttaatagaacatttgtgcattttaatggaccagtcatgaactttgcttaatcaccctttgtggaccttaatattggataagtattcaaagcacatttctcttgggtgatatagactggagaagttcaggaatgtttcccatccatcaagaaaacagaggatagaacacattcagttgccatatagggaacaactggccccattctccctgcctttgactgccctttctgatggtgagagtgaatgctttgagtgttcc

SEQ ID NO: 203382 - DNA, 376 bp, Homo sapiens
tccgggcggattttaaagattcccgtgactctcgccgattaagtgtatgcttacagatagcattttaaaattaatagaaaacaggatgttaattatctgaaagttcatgttttctttcatcagatactccgacttcgttgttcatgaaataggaaaagatggacggatcagccatttgaatgacttgtccattccagtggatgaggaggtagaagtagctctttagcaaatgtcaccttctgtataaaaaatagcatttcctagagatttagaaatatagagctttattaaacttgaattctatgtatgattcattgtgagttctcatggttattttaaaggacccttcagaagacatatttacagttttgacagc

SEQ ID NO: 203383 - DNA, 428 bp, Homo sapiens
tccatctcaaaaaaaaaaaagaaaaaaaaaattaactccatgtgattttgcactgaagattttttaaaattccttgttttgcataatagtaaggcttgctgttgatcaactttatcttaaaattaatagaaaacaggatgttaattatctgaaagttcatgttttctttcatcagatactccgacttcgttgttcatgaaataggaaaagatggacggatcagccatttgaatgacttgtccattccagtggatgaggaggtagaagtagctctttagcaaatgtcaccttctgtataaaaaatagcatttcctagagatttagaaatatagagctttattaaacttgaattctatgtatgattcattgtgagttctcatggttattttaaaggacccttcagaagacatatttacagttttgacagc

SEQ ID NO: 203384 - DNA, 366 bp, Homo sapiens
gccagacacaaaagatggcatatgttcactaactcagcagctctctaaacccctttgtttagaagattttatagaggttttattacataggcatgattgattaaatcattggctgttggttattggcccaatctccagcccctctgccctccccagaggtgggaggaggggtggggctgaaagttctgaacctagttgcatggttggttctgtaacgagactaaaaagagattccatgaattgtgtataatagtgcggtgactggtacagagtaaatactcagttacatgttagctgccattactgttactgttactggtttttgaagatcttgttatgttacagtaatttatagagaaagtggct

SEQ ID NO: 203385 - DNA, 255 bp, Homo sapiens
gttactctagccaggagcacaggcatgcttgtagttgcttggctagactaaggcatgtctgctggggatggctcatagggctgtttctcagccatgtatttaggctcatggctgcttcaacagtctgcaatgtttccaccaggggtggcctacagcattgtttctcagacccttgttgaggatgtgagggggttgggcaggacatgtcttgggagggaagagggcactgtgtttctgaatccctgagtgtgggca

SEQ ID NO: 203386 - DNA, 486 bp, Homo sapiens
tctcagggtattcttacctaagtgattgaaggaccacacttagactgcatactctatatctaactcagtactcatggcttcagctgccatctatgtatattgatgacttccaaacccttatctttgtttttattattattattattatctactgactgagctagctggggccaaatccttatctttaaacaattcttgaatgtcaaactcatctataaaattggcatgtctctattaaagacagaatacactccgaactaggatacctgggttcaaatcccagctcagccccttaatagctgcatgaccctgggcaagttacttaacttctcagatgccttatgtaaaaagaagttaatacctcatagtgttgccttcatgattcagtggctcaatcaatgcatgtaaacttctttgaccagtgcctcacatgtagcaagctcaatataaatgttagctgttttttaaaaaatgttatttcacaag

SEQ ID NO: 203387 - DNA, 659 bp, Homo sapiens
tccatgtctgttgttcccctctttgtgtccatgtgttctcatcatttagctcccacttataagtgagaacaggtggtatttggttttctgttcctgctttagtttgctaaggataactttccttgattctctgcagccaactgctgatgatgcatttacttcaactcccaagttcagcagtaaaattaaaacaacaataaatttgtgcttaaagaaaaagagcaaagaaatcaattgcccaagtcagcaatagcttttcttcaattaaaaaaaaaaaaaagtctggcagatttcagtccccaattcctaaaactccaagcgaggttttgttcagccttttagacattggttaagtggaaaaaacagtaccaaccccaaaatactgaatatattgctaaacaagtttagagtttggatagctacctttagggatgaaggtatgaacatagtaataagaactactattcatttaacacttactgtatatcaagaactttgctacatattttgcatttgatctcttgacaacccattggggtagttaatattctcctcatgttacagatgaggaaaaatgaactcagaaattctgtgtttgtttacagggctgtcaaaccgaggtctgacacctatgctgaatctgttctaggaactcagtt

SEQ ID NO: 203388 - DNA, 437 bp, Homo sapiens
aactgaaatttaaaaaaggaacatttactagtagaactaagagaaaccaaggaagattgtactaaaaacctttggtactcttctgttatactaggttttagctatgttcaaatgactcagaggcccatggatttgtggagcataaaatagaatcttgcatgagttggacaggttttctgaaataagtctcatagccaatgagcatcccagtggatcaccccacactgtatctgaaactagctttggttttctgctgaattctcatgaagttatttaaaaagtatttttttgtgtgtgaaaatttgctatcaaatgagagataaaaatattagtaaagccaatgtcatgctcaactagaggtgtgatgataaacataagacacgactcttgagagaacagtgatttggtggaaaagtgatttacaacaaagccagaag

SEQ ID NO: 203389 - DNA, 556 bp, Homo sapiens
  misc_feature (80)..(80): n is a, c, g, or t
ttttgggatttttaatctttaattttcaagatggttaaaatattgaaatgtttaagtggataactatattattcataaantgactgagtgaaaactaatatactatgagatgaaaagtacttgtcagggattttcaagcttttgctcaagtaattaccatgaagtaacaatttctagaaatgaagaacaatctgtgaagataaattaccattggtgtggggaaaaaaagccaaacagaagtagaaaaaggtgtagctggcatacaaatgttatctacagtgtatttattttttttttaaacttttaattaaaaagtaaactttaatgtcgaaaatgcaaacttggggaagacagaaaagatcacacacaaggctgtcacttaacacttggaaggttgcacagtggctgggcagaggtgctcctcacttcccagatggggcagcgaccaggcagagacacttctcacttcccagacggtggggcggccgggcagaggcactcctcccttctcagacagttggtggccgggcagagggcattcctcacatcccagatg

SEQ ID NO: 203390 - DNA, 687 bp, Homo sapiens
cacgagtgagaacacaagcacactccaggctctcacccctcttgtgccctgcccagaggagccatcatacatggcagtgtggctatggggtgagatctgaaaatagttctagcggccctggagttgtatacaactgtactaccagggctgggttattctgcctgcccctgcttcagcatgagcctctaggcaagagagtcctgttaacttctgctctttcttctctttcctctgctttaaaaatggaagaagagccaggtataagcagaacaccctggcagaactttttacatttggttactgcttgggctacttgctactctgagtagaacgccttcaggggttggcaaactataactggtgggttaaaccctgcccgccacttgcttttataaggttttactggaacatagccacactcgctcatttacatgttgtccatggtctctggaggcttctgtgttccaacagtggcgctcaagagttgtgacagggccataggaatcacaaggcctaaaatatgtattatctggctctttatggaaaaagttttccatgcctgttctaggacgttccaggaacttggagggtgaaaaactgttgtaaagatcaagaagcttgtaatttctcagaaagcaatcaaacacacgacagagaaaaaaagttatttcatatcctatgtttaaa

SEQ ID NO: 203391 - DNA, 287 bp, Homo sapiens
ttatcgttggtttgctgtgtcccaggtacgtcctaaatgctcttatgatcattttcttgtttaatgatcactccagtcacataaagaatacatgattattatcctcattttataaataaggaaacttaaagatgttaagtgacttggtcatgattgaggcacatccaggatcaactgcttattcattcactcattcatttcttcattcatttagcaggcacctaccccacctagatagatacgccaatctaccataaataaatttaacattacaacacaataacctc

SEQ ID NO: 203392 - DNA, 246 bp, Homo sapiens
atttttaaaattttttgtagaaacggggtgtctcactatgtggctcaggctggtctcaaactcccagcctcaagtgattcttccctcttggcctcccaaagtgctgggattataggcttgagccacaatgcctggccttgagtacagaatttctttatggggtgatgaaaatgttctaaaattggttttggtgatggttgtacgctacaatgtgaacttaaaatgggtaaattatttgtgaatgag

SEQ ID NO: 203393 - DNA, 901 bp, Homo sapiens
aggatatgggttggactttgggatgaagaggaaaggggaggaagaatgggagtagcctagggagagacagagaagcagaaatagagacagtgagatgagttagggggcgttgtagtaacccaagcaggaaatgaaggcttttaccaaagtgcaggtggtgcacacagaggaggcatgggtttaagagacacaccgggcagcactggcaggatggaagatgaaggcacagtgcagatgaccagggttcccagcaggagagactgagtggagggagggtgggacctgttctggaaaagcagggagagaggattagttcagctggagtctcctgagggtgagacgctggcgggtgcccaggtgggaagacaggtgggcagacagtcggaaacttgggtctggcacttagaagaggagatgaagctggcaggggttctcagtgttgactgcacatcagatgtctggtttttaaaaatcagatgcccaggccccaccccaagagattttgattctgtgagaaagaaaggagagaagaaagacagagagagaggaaggaagggaaagaaagaggaaagaaagaaaagaaaagaaagaagacacctctatcaaagattctggggcccagctaggaattataaagtcaggtacagatttgaatcccaattccaacctatactaactgtgacttcacggggttactgatgcttagcttcaagttccttacctgtagaataaggccagccatgccaccgaggtatttccagagggattgatgctgcctccaaagaattgctttgaaggtcaactgcatttccagcaccaaactaggtgccatttaaaaaactccaagattgggtagatatgctttatataaccatttcagaaaggcaatttagtgtggtta

SEQ ID NO: 203394 - DNA, 1344 bp, Homo sapiens
gtggtgagtgggagctggcgctccaagggtggtcccggcatccttccctgtggcaaactaaccctaaccctttggctactgcagcgctagtcttgcagtggcagaattggaacactgggagatgcaaatgaagctgcttcctctctggccctggtgcttcgtatgtttctttttccctgccttcattttttctggcttttagagccgatggagcagcacatctgtggacaaccttgtccccagtgaccactttccccctgtgccttattaggaaaggcctcatcaccccagaggagcttatgcaatgactcagagccaattcctgtaagaaacactgtggacagagctggggcttgaggacttcattcctggtgatgggtgtccctgtgagctgagctctgcagagaatcatgcagcttccctaaccatcggcccagcagcttcccagacagaggagacttctgctgttgctctaaacagacctagtcatcagtgagaacagcacagaatcctccaggatcactgtactgcagcctccctggaggctcacctcctgccagcacagtacttacagaaaccctagggggcagagggtggcatggtgctgtcaatcagagaaacagcccctgtgtggtgggctgaaaacacagggcctggctgcctggggcccacttggtatggctgcacctttgtctcctgctgcaagtcctctctgagtgtttagccagtgctaagacaattcagggaaggggatgtgttcagggagggacagggccttgctgaggctggcaggcagaaatctgctgctggggtttgcctgttaaggaatgtgaacaaagctgtctggcggcagcgccctcctggcctgcatctctggtggcctccctgctgatgtaggaaaccagacggtaaaagggacccagatctcagcctgctgaccccagcatccttttcttacaagtctgtgctagaaatgaccatggtagcttttgtaaaattgttgcctgtatttacttcagacaggatgtagagagtgagctagtttagttattcagctagatgattataaagtagtaatcaaaatagggccttagaagttatttttaaaacatttctaagagtttgcttagggatcatattgatggacagtatagcatgacttttgaaatctaccagccctaagtggtttccagctagaccacttattagcttgatggaacctggagaattgtttgacttctgagcctcagtgtcccccccttgaaataggaatgatacctggctttgctggtggttacacggtatccatgaggcattgatgggctagcataggtcaagtgctta

SEQ ID NO: 203395 - DNA, 375 bp, Homo sapiens
ataggatctccagattcgaggagactctctacatcctgtatttacttcagacaggatgtagagagtgagctagtttagttattcagctagatgattataaagtagtaatcaaaatagggccttagaagttatttttaaaacatttctaagagtttgcttagggatcatattgatggacagtatagcatgacttttgaaatctaccagccctaagtggtttccagctagaccacttattagcttgatggaacctggagaattgtttgacttctgagcctcagtgtcccccccttgaaataggaatgatacctggctttgctggtggttacacggtatccatgaggcattgatgggctagcataggtcaagtgctta

SEQ ID NO: 203396 - DNA, 199 bp, Homo sapiens
ctcattcccacccctatccccagtaatctattttctgtttgtagatttgccttttctatttaatataaatagaatcataagatatgtgactggattcttttgcattgagattcttttagttagcatgttttagaggttcatacatgtcgtagcgtgtatcagtactttcttcctttttattgccaagtaatactccatt

SEQ ID NO: 203397 - DNA, 518 bp, Homo sapiens
catttagcattaggtatatctcctaatgctatccctcccccctccccccaccccacaacagttcccagagtgtgatgttccccttcctgtgtccatgtgttctcattgttcaattcccatctatgagtgagaacatgcggtgtttggttttttgtccttgtgatagtttactgagaatgttgatttccaatttcatccatgtccctacaaaggacatgaactcatcatttttttatggctgcatagtattctttatgagaatacgcagtttcaattttatgtggatttgtggggttctttgccatgtatatctcataaatctgagttaagtaacattgatcccattttacagatgagaaaactggggcagttgatttgcttgagattatttagccagaaagtgactgagctatgagttgaacctaaatctgtgtgactatattactgttaggctcagctgtgaggaacaataaaaccttaaaataacataagcttacacaagatagaagtttctcttt

SEQ ID NO: 203398 - DNA, 536 bp, Homo sapiens
ccattttcagtattcttgcctaggttatttcacatactcagaaagtcaaatttgagattgtttttaatttgaagattttattctataaataattgctgaggttgtaaaaccagttctttggctatgtaatataaaaattcctctctgttgaaaccatgaagcaagattctattatattgttttaagaatagttcgtatgaaggatgaagccctctccttttgggagtgattagttgtttgagaatttgcacagctgccacattaagctttgttctggttattccctgtcacacacttacgtcttcctgtgtagattttactattctcagttgcctttagccatacttacacataatatggaatttatggggatttttttttctgtctcctttgctcaggatgcaaagatttttttctattcatgttactaggtatggtttccagaagaaatcagaaaattcactgttaagtgtcaccaagtttttatcaaaacctgtttaattttcaggaaaaaaaaatcaatgaatgctgttttt

SEQ ID NO: 203399 - DNA, 146 bp, Homo sapiens
gagagtttgtccattgagcatcccccaaacacctgtcctctaaagagaggtttttagaaaagctctgcctgagaagacagttagggtgttaacctcagaaggagagaaccatggcagagactgagggaaacccagactttcgtgaa

SEQ ID NO: 203400 - DNA, 382 bp, Homo sapiens
gccaacacagtgaaaccccgtctctactaataacacaaaaattagctggctgtggtggcgcacacctgtaatctctgctagccaggaggctgaagcaggagaattgtttgaacctgggaggcagaggttgcagtgagcccaaatcgtgccactgcactccagcctgggtgacagagaaaaaaaaaaaaaagaattgaaatcatatcaactatcatttctgaccataattaaacaaaactagaaatcagtaacaacaatttgtgaaattgtacaaatacatagaaattaaataacatgatcctgaacaatcaatgggtcaatacagaaattaagaagaaaatttaaaaatgtcttgaaacatataaaaatagaaacacaacaa

SEQ ID NO: 203401 - DNA, 615 bp, Homo sapiens
aaaggaacagtcgaattgattcagcatcagctaagcatggaagaaaaaaaaatatgtaactgtgaaaacaaaaacaaaacagatttctggctgctgtcctcagaagcctcccgcacagacgatgttcctgacaggatcaacaaacgtcgcatttcactgtcccacagtgcagcttcgtccatcagccactgactggcatgggccaggagcagtgttggtctcggtgacagtgacttccttgccctgctctgaatgagtgtcctttctgtgaaagtaggtctcatggttctagggctgatcccagcgccatcccacaacatttcagtgtgcccgacagcgtgcctggcaagcagcgagctcctgacaattggaagctgctaatgctgttacagacatctgcaagcaagtcagatcagccagcttccatcacgtgagacaccttggaggacaaagccacattgtgtggaggaaaacacaccaccattcaggcccatcgtcatcctgctttctcctatactcagtctcccacagtgccaggtagttttctgcctgtactaagaagggtgaatggaaaggtgagatgtaaaaacaaacaaacaaacaagggctcgaaat

SEQ ID NO: 203402 - DNA, 505 bp, Homo sapiens
tgctttgtctagtagatagtgaaaatataaatatgaaaaagtttcaccagtttccatactgggtatgataattaaaatatgtaaccctagcccccaacgaaaacacaatatttgatagaaacagcctgataaagctctctgaacaaacaaaatagtgtgagggctacatacaaactgtatggttatataggctcctataattaagcacttttcattttctctagcttgtaataagaaagtaggtatgcatgaggaatttattttaaaatgccatatacataaatcaactacagcatagctgaggagtaaaaatgttctaacaaaaacaaaaacttttattgtaagatccctagtacatggagtggttccgacttcacagtaccccaacaaagactaaggaaaatctcttgttaaaagctctaaggagctggagacactctcttcaaagatgccaggcccagatcactgttgagacaaaggagacacgggatcctctagagcagtg

SEQ ID NO: 203403 - DNA, 484 bp, Homo sapiens
ggcgggagcttggtggagcaggagcggctgggcatcctcctgagactccggggtcagacgcccactccagcgctttctgcgcagcacaggcaccctcgcctgtcacgcctccctctcctcttcccgtctcccagcgtggatgagggcgcctgcagatcccggctagggcacggaccgcctaggccgagaacacaaagagggccgggcgcagtggctcacacctgtaatcccggcactttgggaggcccaggcgggtggatcacgaggtcaggagttcaagaccagcctggccaagatggtgtctctactaaaaattcaaaaattagctgggcgtggtggctaggcgcctgtaatcccagctactcgggaggctgagacggagaattgcttgaacccgggaggcggaggttgcagtgagccgagattgcaccactgcactccagcctgggtgacagagcgagagtctgtctcaaaaaaaaaaaca

SEQ ID NO: 203404 - DNA, 136 bp, Homo sapiens
ttactatttggtgatcagggtcttggagactagtaacaaaggccagaggacttataagaagtgttagctctcagatttcacctatttttttaaattttttaaaattttgaaataacttgaggtttacagaaaggtt

SEQ ID NO: 203405 - DNA, 391 bp, Homo sapiens
gatatcgtctgtcctccatgaattggggctatttgggttgatggttagttatatgatgggttgttatatattgagtatgtttgaaagtagagaataacaatcataaccatttcactgaataactattatgacccaggcactaagtgatttgtaatactatctaatgtacactaaaacattattcccaatgcttactactacaaagtatataatgactgccattttaaagatgagtaaactaaggctcatagtattaggttaaatgctaaagtcaagtttgaactctgatatggttttctgagacagagtttcactcttgttgcccaggctggagtgcaatggcgcaatcttagctcactgcaacctccgcctcccaagttcaagtgattct

SEQ ID NO: 203406 - DNA, 358 bp, Homo sapiens
atatacaaccacgcaccattagtcaatgataggcgaatgccatttccacctaaagaataagcaagttggaaaagaaaatataacagtttgctaggaagaatgaaaacatcatcatgtacaatgctggtgggagtgcagactgatacaagttttggggaggcaatttggcaactgccttaaaattttgagcagtctttgatgtatcacctgtacttctgagaagcattctgaagacacaatggatgtgtcgtttattatgacagtgaagaactggaaaaaatctaaatgctcaacacaggactggttaaggtcatctgatccaatagattgcaagcattaaaaagtatactagagaacg

SEQ ID NO: 203407 - DNA, 491 bp, Homo sapiens
agcttagtttcatgttaacttgtatgtccatattattttatttttaagggtgagatcaaagaaattaagagtccaaacaattattttaacataatagtacaggaaatgtgaccaaagaatgcactcatcagttacacatgtgaaatatctcaacttcaaaagcagaaaaagtccattccctgccctcccctcatcttcccccaccacctgccaccataagaattctatagattactgtaacctgtgtatcactgcattcaatttatgtaatcagtgagaagaaacagtgataagatcagtttaaaaatttacacatttatcatgtgcattaatgttttaaactcaactgaacctttttgttctctttccctcaacaaatccctgtgtttaataggggacattcagagtgaattttaaacttcctgtcttcccagtctcaaaagcctaatctcagctaccattacttctaatttgctttcttcagagagaaa

SEQ ID NO: 203408 - DNA, 410 bp, Homo sapiens
cccggaagtgggattgctggatcgatcatatggtaattctagctttaattttttgaggaactgtgatatcatttcctaggacaaactttaatttctctgtgcctcaccttccttatttgtgaaacaggaataatcatccttaactggaagagggctatcagggttagagataatgtagttaaagtgccagcatttcttgcctctagagccagtagcaacaaaacgtgtagtttctgcctaaatcttgctatttctcactgcctctgctcttgctgtctctctgtttgtaatggcctttcttacctgactccctcctatgcatcctgtaagacttgttcaagggctgccttctctaggaagttgtccctgtttctacccaagctatattgccccattttatgcttttatgg

SEQ ID NO: 203409 - DNA, 218 bp, Homo sapiens
aggcatatcatgatgcgaacttagtgcggacaccgatcggcatagcgcactacagcccagaactcctggactccagtgatccacctgccttggtctcccaaagtgctcggattacagacatgagccaccatgccaggccacaagtgtaattttgttacacagatacattgtgtagtggtgaagtcaggcattttactgtatccatcatctgaataatg

SEQ ID NO: 203410 - DNA, 451 bp, Homo sapiens
caaataggaaaacataattataacagagattacaaaagaggccagtaagtatgtatatattgctggttaagagcactgacctggagccagccaccattggctttaccatgtactagctgtgagaccttgggcaagttacttaacctctctgtgcccaagtctccccacttgccacatggtgataataatagtatcttctttggaaaccagtatcgtagttcctcataaagttacacatcaaattaccatatgatctagcaattccacttctgagtaaataactaaaagtattgtaagtgggaactcgaacagatacttacacaccagtgttcacagtagcattattcacaatagacagaaggtggaaacagcccaaatgtccatcaacagatggataaacaaaatgcggcatacacatacaatggtatattacttagccttgaaaaggaag

SEQ ID NO: 203411 - DNA, 539 bp, Homo sapiens
gtaaccattacctccatgatgttctgaaatgaagccccttcctgtaaagctgtgcttttttctcttgtagctagaggttggcccattgtactattggaatggatgtcagagtgtggataattctgggcttgtgatttttttctttctcctattttatctgcctctttttgtgtctttgtgagcaagtctgtgattactattgagtttttttccctaaatgccagcaattatctcacaggtggagggattaggaaagagctgagagaaatgcactgggtttagaataaaggctccccacccccactttaaatatggtgacaggagggagtgtagagttgggggcgggggtggcagacagctgtgggggtagggtggacaatttgcttctgatatttaaatccctagaaggagtaaaggaagaaattcctaaggaaagaaagaggaattaaagacctatataataagatattttggggttattgtttcagggagctggagatgcaggaagggaggggcagccacttttcttaacttgcttt

SEQ ID NO: 203412 - DNA, 484 bp, Homo sapiens
gtctacagtggtgtataggaatgttctgggccttcatattcactcaccactcatccagtgacacccagagcaacttccagtcctgcaagctccattcatagtaagtgccttgtatgggtgtatcatttttttttaaatcttttataccgtatttttactgtaacttttctgtgtttagatatgcaaatacttattgtgttataattgcctatagtattcagtacagtaacatgctgtacaggtatgtaacctagcagcaatatgttatattgtctaggtatgtagcagactacaacatctagtttggtgtagactctttgttcacagggtgacaaaattgtctaacaatgcatttctcagaacatatccttgtcattaggcagtgtgtgactgtacttgggagttcactgtgttatctgctccactttggtatgtggttgacattttaaataatattaataaaaaatgtaaacatttaaattga

SEQ ID NO: 203413 - DNA, 345 bp, Homo sapiens
acaactaaaatacaggtgaaaagacaaggcactcaaaataatctgtagataatttaggaagaatgcaggtgttcattctgtggcacagacaccactgttgcaacactgtggaagatcaggcaaaaaggagattaaacacagtaattatccaacagccagcacagccctaggagaatgcaggacatacagtaaatactctataatacatctactaactagctggtggttactagtttaacagccctataaaacaggtagccaaaaactgaatgtggaaaggcaacctcaaacttctgttccatttggactaaaaaatataaagaggaataagagccactaaaccat

SEQ ID NO: 203414 - DNA, 324 bp, Homo sapiens
tttctgaaatatccaggtgtctctcaaggctgcctccatgggctcccccactggctccttttcctccatcctttgaaccttgctgctaatccttaaactcgtttccttggagaatgcatccactcacagttttaacaagtatctccatacagatgattgctcaattctacctctggctccgacttctccttctcttttgagaaaaacctagctgagtttaacattcagtcatcatcgaaacttgactttgaaaattctaacagtattgtctgtcccactcatccatgatgctaattttataaatggcactagtattatctcagt

SEQ ID NO: 203415 - DNA, 554 bp, Homo sapiens
ttgaatccacggatacagaacccacaaatacagagggcgactgtgtactcctttaatcctcatgatatctcaatgaagtaggtactaggttaagcatcccaaatctgaacatttgaaatctgaaatgctttaaaatctgaacatttttgagcactgacatgacactcaaaggtaatgatcattacagcattttggatttcagattttcagatttgggatgctccaatggtaagtataatgcaaacattccaaagtctgaaaatatccgaaatctgaaacacttctggttccaagcattttggataagggattctcaacctagattattatgaccattttgctgataagaaaactgagacccagaagtgaactaactttttcagactctcataacccaaaagataaaacaataaacaagaaagaaatagtcccattttcaaggagttcatagattagtgggacagactattaaatctatgtttttaggaaaagaataataatacataatacactaactaaaatgatataccaaaaatgaaatataaatgagcaat

SEQ ID NO: 203416 - DNA, 300 bp, Homo sapiens
gaatccacaagccttgctgtgggggtgagggagatacaaagaggaaagggcaaggattatccaggcatttggcctgaataactgggtgatggagaggccattacgaggacaaggaggaatgtagtgggaatagaggggatccaagttctgtttaaggcacagtaagtatactattttataaaacaagaaagccatggatatgagagtctggagctcagtggagagggccagctagagataaaatggagaaatcatcagcatagtgaaagcatttaaatccctgggcagggactgtaacag

SEQ ID NO: 203417 - DNA, 243 bp, Homo sapiens
taggacaacagacacatgctaccacacgcagctaatttttttttttaattgtttgtggagagagggtctcactataattgcttaggctggtcttgaactcctgggctcaaatgatcatcctgcgttgtcctcccaaagtgctgggattataggcataagccaccacacctggccacatattagtttttttagttactttgtatcctgataatacttttgtgatttagaagcaggcaaaataag

SEQ ID NO: 203418 - DNA, 479 bp, Homo sapiens
ggtctggacctgggttgttttctcaagcccttaacacctgaagaaacatattctaaacaacaggcatagatttatcaggaagtgaatgaatttaagcttcagagcattcacttacagctgtttcttccagtgccctgggataggacctaacaattttctatgtgtaattttgtattaatttccttgagagggccctcataagaccccgtaagctgaagactccataaaccctgggtccatgtgccgctgataaattatagggaacaaggagtctaaggattctccttcgggcctgcagagcatctagtatgatgtttgctaatagaggtgttaaataagtacttaaattagattgctggattcctgagggtttctcttaaaaaatatttcagatctaaagattttgttaattaatacttaaaagtagaattattggttgtgaacaatcatttataaattgtcacagtgtataattttta

SEQ ID NO: 203419 - DNA, 145 bp, Homo sapiens
ctgccctcacttaggatgccagtcatgagtctcaggaggtcccaaggccactcacacttctgcccaactggcttcaaatttaatgactcctatgaccctctcaggttcagtcactcactagaacaactcacagaactcaagaaag

SEQ ID NO: 203420 - DNA, 464 bp, Homo sapiens
gaccctgagtcaggtccactgagtcaagctgctttggaattcctgacctacagaaaccgaataccaggatagagagaaagagaagccacaatgataccacagaaagaaagctagacatcttcattcagggaaactgcaggacagagaaggtcaatgctgtccctaaggccgcactgctaagggtgagaagaaatattcgaagcagttcagggaccaggaagtgggtcctctaggggcattctgctgaacggttttttaaagatgtttcctccaagattatctgcctcatttacaatggtttttgtcttagaagtctctttgattttataaactgaccatgccttattctgttacgaatgcatgatactgtactttagtccttcaataagcctattacacattttcactatgttgtcttcaggcacttttctgcagtattaacaatgtcatctttatcattacta

SEQ ID NO: 203421 - DNA, 461 bp, Homo sapiens
gccagatgctagggaggtcaggaaatggagtttgtagctgggagggtaagtactgggagaaagaatggattatggtagaccattagctgtttctctcacacaaaaatttctctctgctctgcataggatctttctatctggagacctgacttattaaatgttaaagaaaattttatctaatgcctaaagctggtaattcctcatcattatttggctgaatttggtaacttgccattcttctaccataggaaagactgatattaatagtaaagcaatattacttttttgtaatagacattacaaaaaaaagttccaaaatgctttttataaaatatatgaacttggccttctaaaacaacttgtatagttgtatcatgtgtttatgtacatacatatgtatgtatgtatgtatgtatgtatgtgtagttttaaacctttatgactgtcttagtctgtttagt

SEQ ID NO: 203422 - DNA, 338 bp, Homo sapiens
ttgtagtagagacagggtttcgccatgttggccaggctggtcttgaactcctgccctcaagtgatccaccctcctcagccccccaaagtgttaggattataggcgtgagccactgtgcccagccaattataccagtttcttaaacaaatgtattgattacttaccatggaccacactaagaacatatattgagaggctgggcacagtggctcacgcctatcaccctcccaaagtgctgggattacaggcgacaatcagacctatgtgacagatgagattgaaggcaaggttggtcaacatgagatatttattagataatacttatgtctccaaataac

SEQ ID NO: 203423 - DNA, 232 bp, Homo sapiens
tggctaacccagccttctgtgactgactgctctgcctgtacattctaggacctagagtctcatacctgttctgtagagatacatatgtgctaatcttactaccccaggttggttgcaaattgatcacgagcaagatctgtgtctcatacttcttgatcttgctcccagggtgctaatatgagcccagaacacactaggccctaaataatgaatgccagagggtctgattgaa

SEQ ID NO: 203424 - DNA, 244 bp, Homo sapiens
gtattggatcctaaagcaacaccgcaaaggtcattagtggaaaaataggtgaaattttaacaagacctggggtctcgctaatattgtggtaacaattactgcttagttctggcaaatgtaccatggttacgtaaggtgttcacattagaagaacctggtgaaggaaatatggaaattctctgtgctatcccttgtaatttttctccaaatctaaaattactgcaaaataaagagttaaaaaaaa

SEQ ID NO: 203425 - DNA, 263 bp, Homo sapiens
ccacactcacattgctatttccagtaaattacatcgcttacagacactagagccatacagcagcgggaccccatccttccagagttattaatgttctaggacaaatctagtatcccaaggagattttctttcagctaaagcagaagcctgaattcacttgagttcgggcagaatagataattcatccagattacttgaggccccaaatggatctgacagtctaaaagttagattgtaaaaggccgtattgatcctaatatctt

SEQ ID NO: 203426 - DNA, 584 bp, Homo sapiens
gggaagaatatattcaggttgagagagaaaatagctttcccaagagtgaggaccaaagtagtttccaaactctctataaattaataataagatagaactataacatcagtttatataagataaattggtatacgacaaactgcttatctacaaagagctgtgattattcactaaaaagaagtggcttgtcttggttgggaaaatcccccagttgggagtttcacagacctgagattgttttcatttcctggtttcctggtcttgggctgattatttagcttttcttaacctcagtttctttatttgccacgttgcaataatgacacctagattttcgggttgtggtaagcattaagtgagggaatgggtgtgcagctctcaccatagtgcttaaaacaaaatgaaagtagccagcattattgttagaataagtatggaaaaaagactttcagacttagaagtcataaaaccacttttctctaaatgtacattttggctcagatgatttccttgttctctctctctctctctctgtctctctctcatttcaatatattccctatcttcctaggtaagaacaatgc

SEQ ID NO: 203427 - DNA, 358 bp, Homo sapiens
tattccacttcctgcagcaaaacaccatcaatggtcttcactggagtcgggtgaggaggagacttgggagagctgaccagcactcattctgaaattgatttcacatgaaaaccgcatttcgggggctttgcctgctgcagctctctctttctctataaacgcttccccatgctgggaggatcaggtgctggatccgtttcctattccagctgtaaacaattaccacaagctcagtggctttagaaaatagatactcttctgaagattctcccttccagcgctggaggtcagacacttgatcatggcgcgagtagggctaagttccgtctggaggctctaagggagcgtctgtttcctg

SEQ ID NO: 203428 - DNA, 411 bp, Homo sapiens
ccgtatctctaacattaggtacaatgtacactcctcctttgacaggcgcactaaaatctcagaattcatcgctacataattcatccacataacaaaaagccacctgtacccctaaagctattgaaaaaaaatttttcttaaagacataccagataaaggttaagaagaagaaagctgggcagggcgtggtggctcacgcctgtaatcccagcaccatgttggccaggttggtctcgatctcctgacctcgtgatccacccagctcggcctcccgaagtgctgggattacaggcgtgaggcaccttgctgggccctttctccatttattaatgggacttctataacctagaactgtcccttgttaattatgtaattcccctgaaatgttataatgtaagaaactgaggctcc

SEQ ID NO: 203429 - DNA, 562 bp, Homo sapiens
tggccaattactccatctgtttgaaaccagagaggctggatgcctgaggcctatcaccctgtgctgaatgccaggtaattgtagccaaactcaggttcaactgctcactacttgatggaaagaaagcaggtttatttatgtgctagcaactttggagatggccagactgaaatctcaaaaagccatctcagagtctcaggctggctaaagggattttaaggggaaatgtggcatggaaactatgtgcagaagtggtgtggattgcaggtcggcttgttgttttccgttgactaccctgagtaatggaccatttgctgacctagttggcagcatctcagtgggggtctggttatgaattaactgttcaccagtttcttctcagaagggagaaaattgcaactgtgatcttcacttaatgcttggactgtttcgagatcagtctttggaactctcaagcaaacaggtagtaaatacacgttgtagcaagaaacaaagtgagggaggggttacttttagactaagcaagcaaattggctataccctttataacttaatctagaaa

SEQ ID NO: 203430 - DNA, 537 bp, Homo sapiens
catgtctaaggatggctgtgggttacaattctaaaggtctttttatttgcttattcaaatataatgacatttaaaaattcctggcaaattagaagtattaagttactaacttaacattttcatatagacctttgtattattttatgtaccagaatcctcaaaagcactctggagttattggcctttttttataaaaatagtgaagcagagagattaaaggagttaactgtaagaaatacaataaacattcatagcctagatttcaaattcactccttatcatactgctgctacaaactcaagataattattaaaatccaaaatagaaatgaagccctgactgaactaaatccttagcaaagataaatgaacttgcttggttttgaagagtagtgtaaagaaactggtttggaggggtctggaaggcaggtcatctgattatgattcctaactgccatgagacaatgcatgagggtgtgtgtgtgtgtgtgtgtgtgtgtgtgtgtgtgtgtgtgtgtgtgtgtgtgtgtggtgtcaa

SEQ ID NO: 203431 - DNA, 401 bp, Homo sapiens
cctcagcaaatcccatctattttccaagccccatctgaaagcgtgcctcttctctgatgaccatccttgttggagctgactttgccgtccctcctgtggacatccatgccagttgtctgtgtcatctgtttagcagtcatctggtcctaacttttagcttatcttttattatatctaagtgtgatctaacttttcacctttatcttgtctccctgtcacctcgaaagaggacacgacagtgctgttaatttttctatctcccatgggacttaatcggtgtcctccacgtagtatgctttaataatggtttattgctgtgatactgcttcacaaatgccagcagatgccatgctgtatcatcagagatgagattattttatttatttatttttaattttttt

SEQ ID NO: 203432 - DNA, 706 bp, Homo sapiens
gacttcaaagcctatgcacttaacctcaacactgtagattacaagatggtttgggggtggtcttatctaataatatgcaggtagccttattcatttggatccattctcaagagaaagctaaaagaatgcaagtctgaaggattcaccttgaaacatgacagcagaagaaatttagaaataaaagacaaatttaagtacttagaacagtactcataccagtacagggggaaatcatttgtactatgttcattacaatgacttataacagttaaaaaataaaatgaaataatagtccatcaccaaaggattggctaattaactaaattttgttatttaaaccacattgattggcatggtagctcatacttgtaatcctagaactttgagaggccaaggcaggaggatcacttgaactcaggagtttgaaactggccttggcaacatagcgagatcctgtctctacaaaaaaatttttaaaaaatattagccgagcatggtggtgcacacctatagtcctagccacttgaaaggcctaggctggagaatcacttgagcccaggaggtcgaggctacagtgagccgtgattgcgccactgcactccagcctgggcaacagagagagactctgtctcaaaaataaataaataaattaccacgtaatactttgcagctatcacaaattgtatctatatttaataacatcagt

SEQ ID NO: 203433 - DNA, 546 bp, Homo sapiens
gacttcaaagcctatgcacttaacctcaacactgtagattacaagatggtttgggggtggtcttatctaataatatgcaggtagccttattcatttggatccattctcaagagaaagctaaaagaatgcaagtctgaaggattcaccttgaaacatgacagcagaagaaatttagaaataaaagacaaatttaagtacttagaacagtactcataccagtacagggggaaatcatttgtactatgttcattacaatgacttataacagttaaaaaataaaatgaaataatagtccatcaccaaaggattggctaattaactaaattttgttatttaaaccacattgattggcatggtagctcatacttgtaatcctagaactttgagaggccaaggcaggaggtcgaggctacagtgagccgtgattgcgccactgcactccagcctgggcaacagagagagactctgtctcaaaaataaataaataaattaccacgtaatactttgcagctatcacaaattgtatctatatttaataacatcagt

SEQ ID NO: 203434 - DNA, 263 bp, Homo sapiens
ccgctttgtggtctggactgtctcctgtcaccggctccccagccacggttacttttgtagcaccccaaacctgtatcttgactgggggcaggcctaagcagccccacaaaatagtgcctgctccccgctccaacccctaatatcctgttgtagtccagatctctaagttaattactataccaggcacttcacggcagagaaaaacatcacagatgccttgtgtgcttgccatgatctggtctaggccaggaccacaaatggct

SEQ ID NO: 203435 - DNA, 243 bp, Homo sapiens
tctctttaatattttttacttccttaaagcctagtaaatagaaaaaaaattctgaagctcagaacaaatggaaatatagcccatttcatttatgtatgcatgcattaattcattcgacaaatgtttgttacatggctcagacatggcagaatctatggaatactctggggcagagaacaatgaggcagagagatatgttgtaattattaaagattaaacatgttgaaagtattttaattttaa

SEQ ID NO: 203436 - DNA, 716 bp, Homo sapiens
gcacacagcaggggtttggaccacaaaacatttttccctctaagcctcctggctgtgatgggagggtctgctgtgagggtctctaacatgccctggagacatttgccccattgtcttggtgattaacatttggctcctcattacttatgcaaatttctacaacccagtctcctgagaaaatagatttttcttttctgttgcatcatcaggctacaaattttctgaacttttatgctctgcttcttctcgaatgctttgctgcttagaaatttcttgtgtcagataccttaaatcatctctctcaagttcaaagttccacagatctgtagggaactctagaaaaaaattcttattttccctctttcccgcctatcttatgcccgtttctaatacaggtgcacaatgcctgcagtgtctttgcatagtaagagtgactttactccatttcccaacaaattcctcatctgcctctgagaccacctccgcctggaccttgttgtccatatcactattaacatttgggtcaaagccattcaacaagtctcgaggaagttccaaactttcccacattttcctatcctcttctgagccttccaaactgttccagcctctccctgttacccattttcaaagttgcttccacattttcgggtatctttacagcagcaccccactctactggtatcaacttattgtattagtctgttctcacactg

SEQ ID NO: 203437 - DNA, 531 bp, Homo sapiens
cttctacccgagggtgtaggattcagacagatgtaagcatggtaccattgtgagttaagatggatgctgccacagtaggctgctgtgaagaatgcagactggagaatgaaagtctaataggttggtttggggtcgggtgcagtggcttatgcctgtaatcctagtactttgggaggcagaggctgatggattgtttgagcataggagtttaagaccagcctggacaacgtggtgaagcgttgtctctacaaaaatacaaagctactcaggtggctgaggtgggaggactgatagagcctgggatgttgaggctgcagtgagctgtgcctgaattattccactgcacaccagcctaggcaacagagactgtctcaaaaaaaaattaaaattaaaaaataaaataaaagctcgttttgggactaaaattttagattcatttcggtagcaggtaaactgttaccacagaatttaaatacacagtaactatctgataaatattatatatatataatttatatatgcattaaatat

SEQ ID NO: 203438 - DNA, 564 bp, Homo sapiens
atatattagggtggtgcaaaagtaattctggtttctgcaattacttttaatggcagaaaccacaattacttttgcaccagcctaatagcacctcttaaacctgctaagctgctcctttgttaactattttcctctgaaaaaaaacacaccttatttaatttgaccctggctaaaagtattctaggaggagatagccttttaatgatttgtcttgagtgtatatactatgtatatactagtatatacacatatgctacatatgtgtacctcagtcctgtagaatttctggttcactgcatactttcaataaacacaatgttggccaggcacagtggcttacatctgtaatcccagcactttgggaggccgaagtgggcagatcacctgaggtcaggagtttttgagatcagcctggccaacttggtgaaaccccgcctctattaaaaatacaaaaattagctgggcttggtgtcaggcactgtagtcccagccacttgggaggctgaggcaggagaatcgcttgaacacaggagaaagaggttgcggtgagccgagatcatgtca

SEQ ID NO: 203439 - DNA, 412 bp, Homo sapiens
cggccacttcccattctcttaatttcccccagacttccattatctggaatatattttatttcattgtttctaaagaagaaaagcttttaaatacagtgctgagtatcatcatttagacctttggttaagttaatgtttgtattctctaatgattgaggtctgaattttagcagaggttcttgaactgttcagggaaatatataccactagttatatgagtaaatactttattaaccattcatgatgttaaatagactgtgactaataaagaatttaaaacagaacaaaagaatttaggattaataaattctgctttatacgcataccattcatttctaaggaattcctttattcatctacaattaggatgagtaggaattttttaatgcttttaaatgatcaacattattta

SEQ ID NO: 203440 - DNA, 298 bp, Homo sapiens
ccgccaccacacccggctaatttttgtatttttagtagaggtggggtttcaccatgttggtcaggctggttttgaactcctgacctcatgatctgcccgcttcggcctcccaaagtgctgggattacaggcatgagccaccgccggctatccttcatttttataagctccatgaggtcaggaacctcattcatcagtgtagttccaggctacatgtttagaaaataaaaaacacaggccatctagttctgtgtgaatttcagataaagaacaaataattttttagcataagtgtgtcc

SEQ ID NO: 203441 - DNA, 464 bp, Homo sapiens
tagaaataggaatgatttgtaaaatccacagctatatcctgatgctggatggtattaatcttgtgtagtcctaaactggttagtgtgaagtagttctgccacctctgatgcaccactgccaatgctgtacatgctgcatttgccccttgagccaggtggatgtttaccgtgtgttatataacttcctggctccttcactgaacatgcctagtccaacgttttttcccagtcagtcacatcctgggatccagtgtgtaaatccaatatcgtatgtcttgtgcataattgttccaaaggatcttattttgtgaactatatgtatcagcagtgtacattaccatataatgtaaaaagatctacatgtaaacaatgcagctaactatccaagtgttataccaactaaaacccccaataaaccttgaacagtgaaaaaataaataaataaatgagttaatgcatgtaaa

SEQ ID NO: 203442 - DNA, 431 bp, Homo sapiens
aaaatggttaagctataaagaagaacaaagtaaccataatgataaaagtgaagataaaagttactttgcagaggtaagcagtaaaagggcagtttctggggggaaagtatgttctttatcagagttagataacctggtgtttgattcacaaccattcattcaagttcacttataatcaaggttgccagacacaatgcagtatacccagataaatgtgaatttcagataaataagaaatatatctatatctgtatataggtatgtatgtgtatatataacataaatatgtcacaaggaataatataataatatttggaacatatgcatgtatgcttagcacaatatttgcctgtgtgtatctcaaatattatatgggacacacttaataccttatgtgtatgtgtgtgtgtatgtgtgtgtgtgtgtgtgtg

SEQ ID NO: 203443 - DNA, 307 bp, Homo sapiens
tcccaggtgatagcagggggttctgagacacatctggagacaaagccaagagggtttcccagcaggtgggatatgtgcaagaagggacaaggtaaagttatatgtaactttgatccactcacgtgaacactatgcctccttcaaagcacctgtctgaagaacatctgatggcatgaactgcttgacatattaaaacggggatggagaaacgtttctataaagggctagacaggaactatgttcagctttgtgggccatacagtgcctgccacaatactcaatcctaccattgtggcatcaaagcagc

SEQ ID NO: 203444 - DNA, 639 bp, Homo sapiens
aacaaacaaaaaaaaaaacggtaagtagcaaatctgagatttgaattgagaattgactctaaaagcccatgctgcttctaaaacagaaccttctgcaccttctctctatccctaatacttcttttccacctatacaagaatagaccaaaatagtattttggtataagccctgattctgccttacagcacaaattccagccattcattcactcaatattcaaagttcaatactctcctgaaaagacaggtcctgacaccaacagaacagcttcttgcacagcaatggcagcccctttccctgactcacagatcttctatttgagaaggggaattaatttacacaagaaagccaggcacggtgtctcacgcctgtaatcccagaactttggaggctgaggcaggcagatcacttgaggtcaggagttcaagaccagcctggccaacatggtgcaaccccatctctactaaaagtacaaaaattagctgggtgtagtagtgcaagcctgtaatcccagttactcaggaggctgaggcaggagaatcgcttgaacccaggaggtgaaggttgcaggtgagccgagatcgtgccactgaactccagcctgggcaacagagcaaaactctgtctcccaaaaaaaa

SEQ ID NO: 203445 - DNA, 375 bp, Homo sapiens
ccaggagcaccatcttctgtgggtcctgcctggatgtcacatcccggccccaagaagtcactgcaaaccttcgtattattgagcttcacatcctagaatttgctgtcactgtggctgctgcatgaagttgtcctgagagaaacgggcattgtcattaacagggaaattgatggtctgggggaaaagtcatcctcattctcttgcagatctatgggtgattgagactggctgatgttgaaggggtttctcagccatcgtgtgccatgttatggaacagtggtgtagccagccatttgacacccagcgctgacctttgtttaacaacctcacctatatatgacaaaatgattgtcagaaataatcgtgtaatgaaat

SEQ ID NO: 203446 - DNA, 482 bp, Homo sapiens
gaagaatgactaggttatctgaggagttggttatcatgtaggtttatttggggagttgggatatgaatcagaggatgaacatgttagatgagaaggtatgcccaatggaggccacattgccacaagagcccaggcacaaatccataaaccataacaggagctgcagatactttagagttccccacagctgtgcacttccccagctcagctacctggggaagctgggacatcctcccactcttctccagtccccttacaccacagctctgtgcttctgcactccagcccagtctgtgaatggttcctgggcccactgaagtcagaaggtagaagagcttcagtcacccagtaacagccattcccaaggtcaggccactggcagggacctagctggctgaaaagcttcccagggagctgattaacggtgcagactcctagctgtgctgaggagcatctgactcagttggactgggcggccaggt

SEQ ID NO: 203447 - DNA, 398 bp, Homo sapiens
aggaagtggttgtgagtgtttgaagtgaaggttgtaatgtcagtggcaggcattaaaggtataaaataattatgtgacattgaaatcctggctaaatcacttagaaacatttctcccccacccatgctgtagagcagtattctctaccttgtttgcacattagaatcacctggggagttaaaaacaaacaaaaacaaggccagacacccaccccagaacaattaaatgactctaagattagaatagaggaccatgtcccagctttgccctgtacaactgactgactctgctggatatttattcctgtttgtatataaagccataccgtcttacatgtctgctcaggatgtttatgtaaaaataaggggtcaggacctccagtagaggttgaacttctg

SEQ ID NO: 203448 - DNA, 552 bp, Homo sapiens
aggtgagtgaatgaccaggtgactaatagataacaataaaaaggaaggagagaatggtattgctggatggtaggagccccagaaaagcatggagttgctaagagtgagggggaaataaccatctgaaagtggcagtgaagagcaaggaaaatactgtagttatcctctgaccctgatgtaaatggagtatatgataataaactgagagaggactagcagaaaagtagtatccggagggatcagccaagaaagtgacgagggaagagaattttcgttcagagaagattggtagctgtatgatagtttcctgatcacatagaggaagttccaggagagtggagaggtttgaggagagaatgagtaggggattgggtcagattaagggataaacagcactgtagagataagaattcaggtgataaggaatgagaagaaaggctgtgtcttatcagtaggtgagatggaactggtcctggtagtgttggagcaggacaggcacttagttctgatgctgtggtcctttgtgatagtagagcaccggggttaaccacc

SEQ ID NO: 203449 - DNA, 649 bp, Homo sapiens
tatttttatagcgcggtgccccactcttgatatcaatttactgtattagtctgttctcacattgctgtaaaaaaaactgcctgaaactaggtaatttataaaggaaagaggtttaattgactcacagtttcacatggctgggcgaacacaggaaacttacaatcatggcacaaggtgaagaagcagacaccttcttcacaatgtggcagttgggagaatgaatgcaggaggagctaccaaacacttacaaaaccatcagatctcgtgagaactgacctcactgtcatgagaacagcatgggggaaaccacccccaccatgattcatttacctccatctgctccctcccttgacatgcggagattatggggattataattcaagatgagatttggctggggacacaaagcctaaccatatcacatatactagaaaaccctgtctcaaaaaaaacaaaaacaaaaaccaaaaaacggtaataaatactaaaaactcatcactttctaattgttttgttacattttgttattatggatgctctcctattctgtttatatggtgaaatactgtatagtaatatatactgtgcatctcttctgaactgtgttcagtgacatcatttagtagcttgaagctgccatggtaagata

SEQ ID NO: 203450 - DNA, 490 bp, Homo sapiens
cagaaagtactggaaaaaatgctttgtctttccctaaataatatagtgagagtgagagatctggaatggcagccaccattttgctaccatgatgtggcagaggttagtgctgccacatatccatcatgtggaatatgaagataaagccagtactacagaagtcaagagtagaaagatgtagagcgactgggttgtcatgccattgtttgacttgttgtatcaagctttgtttacctctgcaattgtaagttatatgtgcccctccatatttcctttattacataaattaattagagatgtgttttcagtcacttaaaacataaagttctattctacaaaaatggcaaattgactttgactatgttgtatttgtcacttaagtgtgaccacctgtttcacagatgcatccaagtttcggttgaaagtgattttgtcacttgagtccaggagctggagaccagcctgaccaacatggcaagaccccatctct

SEQ ID NO: 203451 - DNA, 277 bp, Homo sapiens
aatatccttactgactcatggtggttgttttgtcagttactttagaggtatattaaaatctcctggccaggcaaagcggctcacacctgttaatcccagcgctttgggaggccgaggcaagaggatcacctcaggtcaggagttcaaaaccagcctggccaacatggcaaaacactgtctctactaaaaatacaaaaattagctgcacgtggtggcgcacacctgtaatcccagctacctgggaggctgaggcaggagaatcacttaagtctgggag

SEQ ID NO: 203452 - DNA, 557 bp, Homo sapiens
cagcatttttattttcatgtttttctatttcatctgtcatattgtagggatttggggagggatgagcggcaagtgcatattttcagttaaccttttgaaattggaaatcagttcttttctgtgtagttttgttttcttatcgccttaactgctggttgcacagtagttggatagtaacttcacaactcaagtagtaatagatagacttcactttatttttttaatgaaaccaaatgtctcagtggaatatactcattcagaaaaaatgttgatatgttgtcactaaatatttaaatagtacttttcaaacttaaaagtaatcataacatttagaactataaggaactttacagatcattagaccagctgccttattttatggatgaggactttgaggccaagagagattcaatgatttatctcaggtgacaaagtcagtgatcaagacagaaagcccaagtctctttacttccattctgcaatgctatttgctgtcatacacattcatgctgttctccttacctatgtgataaaggaggtatttctgttaatacaaa

SEQ ID NO: 203453 - DNA, 685 bp, Homo sapiens
tgccttccgctatgtgaaggaagagagggtaacaccttgccatgtgacctgaagaagtcatctgaagatggaagtggagaaaatataatcgagaaggtgtgaaagtgaaggcaagctccacacagagttaagggatgttagggagtgtcctccgggccctctcccagaagatccattcatggccaagacaaatattcccacgtcaatatcactggagttctctttcaagtgcagacctcgtgtaccattcctttacttaaaaacttcaatgtctcctaaagcttatagggtcatgtcaaatgccacagtccaggcccttccaggttgatcccaacctagctttgttccctagctgctctctcctccctgccactctgctccctacactttaggatttagctattctggcctgctaaccactttctactgagtcaagccttccatctgtgataggcctttctccttgctgtgggatcagcctggagagtcctttcctatatacctgcttgtgaactcctcaaagggcagaaacgttaccccctgggctgcctcctgagctaccacccatcatagtggatgactgtgctccgatcatctgcctggatgtcttcccctgattatgagctccatgagggaaccatggtccctgttggcccagggcctgtaggtgggggaactctcagta

SEQ ID NO: 203454 - DNA, 977 bp, Homo sapiens
ggggcctatgccttgggacgtcgtctggctccactgcctcagtggttaggtcttgactacacactggagaatacgcacatgcccttcggcggatatggccttgcctccaaggtgacggcctctgactaaatatagctcatgtccaagaaggcagtccttatttggaccccttgtgaaaaggatgggaagcatgaattaggagctgccattgctttgggttcgcatttaaagtcttcggtgcagggttttacttgaggctttgtccgctcaaccgccattatggggatcaattggcacgtgaaggaggagtaaagctatatttccaggaactgaaaatctcagcctgagcatatcggctagtaaagatgattatttggctcttttggctgtttctgcccttaggatgaccgcagtagttatctatctggtggctttagggtctggtcagtttactgtgcccatgatgaaatcccacaagtaacttagtggtatgagaggacaaacccaggatcttgatgagtgctgaaggttagctgttacaccagttagtagtagaccgaagttcagagcctgcagtctggcttccacattatgtttggattctgttttaggcggttatagaaaattcagaaaaacgaacttgaattagggagatatttgttctccctcctaacaatagatgacaaagcagggagacatggattcggaatacgtttgagcatcttctacactgttgagcttttgtttcctgcgcaactcctaacagcaaaatcagataattgccattattagtcagaaaatgcttttcatttaattgtttaatcgaattatcttgttgctcattataattggtgttccttaagattagggaaactggcctacctgtggcctcagttctaccagactcccaggtgcagaggggtttggtacagttgtggaagtgaatatgatatagggcaaattctgttctttaaagg

SEQ ID NO: 203455 - DNA, 981 bp, Homo sapiens
gcgaattccagctcggttccctcccatttcacctgcactgcctcagtggttaggtcttgactacacactggagaatacgcacatgcccttcggcggatatggccttgcctccaaggtgacggcctctgactaaatatagctcatgtccaagaaggcagtccttatttggaccccttgtgaaaaggatgggaagcatgaattaggagctgccattgctttgggttcgcatttaaagtcttcggtgcagggttttacttgaggctttgtccgctcaaccgccattatggggatcaattggcacgtgaaggaggagtaaagctatatttccaggaactgaaaatctcagcctgagcatatcggctagtaaagatgattatttggctcttttggctgtttctgcccttaggatgaccgcagtagttatctatctggtggctttagggtctggtcagtttactgtgcccatgatgaaatcccacaagtaacttagtggtatgagaggacaaacccaggatcttgatgagtgctgaaggttagctgttacaccagttagtagtagaccgaagttcagagcctgcagtctggcttccacattatgtttggattctgttttaggcggttatagaaaattcagaaaaacgaacttgaattagggagatatttgttctccctcctaacaatagatgacaaagcagggagacatggattcggaatacgtttgagcatcttctacactgttgagcttttgtttcctgcgcaactcctaacagcaaaatcagataattgccattattagtcagaaaatgcttttcatttaattgtttaatcgaattatcttgttgctcattataattggtgttccttaagattagggaaactggcctacctgtggcctcagttctaccagactcccaggtgcagaggggtttggtacagttgtggaagtgaatatgatatagggcaaattctgttctttaaagg

SEQ ID NO: 203456 - DNA, 327 bp, Homo sapiens
gtggagactttattttggcatgtttttgatatattagaacatacccaatgtcattattataaaacagaaataacagaccaggtagcattcagggatctttgcttgcttcattgtttggaggggaggtgtaggtgggtaataattcggtaaatattttttgtttaaagtatagttcctactttcttgctaaattgagcaagccattgcccttttatagacaactttccttctctcataacagaaagtacttcaggaattgggcgtgattatctttatgagtgcagaataagctctacctttgtatattaagtcagtatattcattact

SEQ ID NO: 203457 - DNA, 268 bp, Homo sapiens
agttcataatatgtaaggcgcttggaacagtgcctggcacatggtgagtgctgtatgtggtagctgttactgcactagtaattattaccccctgctgggatctgtaaatccctgaaggtggggttggcatccgttgtttgatcactccacacctaggatgctgcatgaacataatagctcttcaatacctgtctgttcagcagagtggcgtcctagtgaggttcttggtaaaagatgaaaggtgagatgtggaattgcaaaaaaaaaa

SEQ ID NO: 203458 - DNA, 412 bp, Homo sapiens
attcaaaggtgattgtgcactgggtaggcactatgcgtactgttcgttgaacataaaaattagtctcgttattttaattacaatacatataatatccatatctttaaaacacctttatcagggaaaaagtggcctccattgacttgaattatccatttttttaaatttagagttttatcttgatccattatgtaacccttgaggcaaaatgaaggtgtgccattttttcagaatgcagcaggctattaaaagagttcatcctctttcataaccaccatcactctactcccacaagcctatcagatctcatcacccaggcactattatgatatgttatgtgctgacatcgtatgggtattagaatgtcattgtgttttctgattgtctgatctagaggtggcttgaatgagtg

SEQ ID NO: 203459 - DNA, 155 bp, Homo sapiens
aaagtaggttgaagtaggatcatggaggcctagtctaccatggtaaagaactaagactttgtctgtctgaatacttgaaaagttttacttgtgaggtaacatgctaagtaaagagaaacttcattgactccagggcatccctaatgtaaaaacag

SEQ ID NO: 203460 - DNA, 295 bp, Homo sapiens
tactgaacattaccaaaaaaaacaaagcaacagagaaagtttcaacaaatcccaaaagaatatatcatttggcaaaacaatttctatccatattgttgttatattagaaatatatgaaaagtaaccctctccccagagacatatagaaatggaaactaaagtggaaatagaaccaagcctacctaaagaaaattgtgcatccttaatagactcattttaacaggaaagcctgaaataaataagtattcagcaagaaatcaaatgcaggctgtggctcacgtctataatcccagca

SEQ ID NO: 203461 - DNA, 372 bp, Homo sapiens
ccttgtaagaaattattggcatgattctctagggacatatataagaaacaggcgggtcaaggctgatcatctggacccatgaaaatagagcagttgtgttgaccaaatgaatggcatgaaaccatcaggacctactctcatgtcccagaactattaaaagtctctggtctctttctatgcaaagcagcagaggtgagggcagtagtaatgagcctcctgaggctttacagactgagcagggtagaaccttctggggcttggtgagttctcggctcttgtcttttttctttttttttaagtgaacgtaaactcaagatttttttgtcttcataataaaacaaaagatgacacttaaaatgagatatcttggcc

SEQ ID NO: 203462 - DNA, 146 bp, Homo sapiens
atcttgaaataattatagatgcataggaagttgcaaagattgcctagagaggtataggtggacctgccatgcattttccccagtggttacatctgttgttcttatagtacaatatcagaaccagggaactgacgttagtacaatgt

SEQ ID NO: 203463 - DNA, 1171 bp, Homo sapiens
catgagtgtgtacagtgggaaagtcttactccagacaacaccaccccatgttattggtcagttggacaaactcatcagagaggtatctaccttagatggagttttagaagtccgaaatgaacatttttggaccctaggttttggctcattggctggatcagtgcatgtaagaattcgacgagatgccaatgaacaaatggttcttgctcatgtgaccaacaggctgtacactctagtgtctactctaactgttcaaattttcaaggatgactggattaggcctgccttattgtctgggcctgttgcagccaatgtcctaaacttttcagatcatcacgtaatcccaatgcctcttttaaagggtactgatgatttgaacccagttacatcaactccattggaagattaattttttccttttttttgacatggagtctctctctgtcgcccaggctggagtgcagtggcacgatcttggctcactgcaaccccacctcccaggttcaagcaattctgcctgcctcagcctcccgagtagctgggattacaggcatgcaccaccacacttgcctaatttttgtattattagtaaagatggggttctgccatgttggccatgctggtcttgaactcgtgacctaaggtgatctgcctgccttggcctcccaaagtgctgggattacaggtgtgagccactacacccggcctgattaatttcttttacttgcttcaagtgtctcctttattccagcctacacatagaggtaaatattcctaggaaactttcagcaagttaaatcctattataaaatgccagagtcagttgtctaatttttattttattttattattattattttttttgagacagggtcttgctttgtcacccaggctggagtgcagtggcgtgaacacagctcaccacagccttcacctcccaggctcaagtgatcgttccagttcagcctccttagtagctgggatcacaggtgcagaccaccacacccgactaattttcttttttttttttttaagacaaggtctcactctgtcgtccaggctggagtacagtgagctgagattgtgccactactccagcctgggtgacagagcaagactccatctcaaaaataaataaaaataataaaacctccataagtaatcctgaaaa

SEQ ID NO: 203464 - DNA, 1299 bp, Homo sapiens
catgagtgtgtacagtgggaaagtcttactccagacaacaccaccccatgttattggtcagttggacaaactcatcagagaggtatctaccttagatggagttttagaagtccgaaatgaacatttttggaccctaggttttggctcattggctggatcagtgcatgtaagaattcgacgagatgccaatgaacaaatggttcttgctcatgtgaccaacaggctgtacactctagtgtctactctaactgttcaaattttcaaggatgactggattaggcctgccttattgtctgggcctgttgcagccaatgtcctaaacttttcagatcatcacgtaatcccaatgcctcttttaaagggtactgatgatttgaacccagttacatcaactccagctaaacctagtagtccacctccagaattttcatttaacactcctgggaaaaatgtgaacccagttattcttctaaacacacaaacaaggccttatggttttggtctcaatcatggacacacaccttacagcagcatgcttaatcaaggacttggagttccaggaattggagcaactcaaggattgaggactggttttacaaatataccaagtagatatggaactaataatagaattggacaaccaagaccatgatagactctaacttatttttataaggaatattgactccttggcttccaatttatttagtaatccaactttgcattgactgtttaatcatttactctaaatgttagataatagtagtcttgttcacatttcatgaaacctatgaaactatatttttgtaaaatgtatttgtgacagtgaaatcctcgtaaatgttaaaggctttaaataggcttcctttagaaaatgtgtttctttaaatttggattttggtatctttggttttgtagttgactgcagtgtgatgtgaccttacctttataagagccacttgatggagtagatctgtcacattactaagatacgatatttctttttttttccgagacggagtcttgctctgccactgtgcccggccaatacattattattaacttaaggctgtactttattaaggcttccttagtttttgttttgttttgttttttgagatggagtctcactctgtcgcccaggctggaatgcagtggcatgatctcagctcactgcaacctctgcctcctgagttcaaatgattctcctgcctcagcctcccgagtagctgggattacaggcacctgccaccacgcccagctaatttttgtatttttagtaaagacgggggatttcac

SEQ ID NO: 203465 - DNA, 1323 bp, Homo sapiens
catgagtgtgtacagtgggaaagtcttactccagacaacaccaccccatgttattggtcagttggacaaactcatcagagaggtatctaccttagatggagttttagaagtccgaaatgaacatttttggaccctaggttttggctcattggctggatcagtgcatgtaagaattcgacgagatgccaatgaacaaatggttcttgctcatgtgaccaacaggctgtacactctagtgtctactctaactgttcaaattttcaaggatgactggattaggcctgccttattgtctgggcctgttgcagccaatgtcctaaacttttcagatcatcacgtaatcccaatgcctcttttaaagggtactgatgatttgaacccagttacatcaactccagctaaacctagtagtccacctccagaattttcatttaacactcctgggaaaaatgtgaacccagttattcttctaaacacacaaacaaggccttatggttttggtctcaatcatggacacacaccttacagcagcatgcttaatcaaggacttggagttccaggaattggagcaactcaaggattgaggactggttttacaaatataccaagtagatatggaactaataatagaattggacaaccaagaccatgatagactctaacttatttttataaggaatattgactccttggcttccaatttatttagtaatccaactttgcattgactgtttaatcatttactctaaatgttagataatagtagtcttgttcacatttcatgaaacctatgaaactatatttttgtaaaatgtatttgtgacagtgaaatcctcgtaaatgttaaaggctttaaataggcttcctttagaaaatgtgtttctttaaatttggattttggtatctttggttttgtagttgactgcagtgtgatgtgaccttacctttataagagccacttgatggagtagatctgtcacattactaagatacgatatttctttttttttccgagacggagtcttgctctgccactgtgcccggccaatacattattattaacttaaggctgtactttattaaggcttccttagtttttgttttgttttgttttttgagatggagtctcactctgtcgcccaggctggaatgcagtggcatgatctcagctcactgcaacctctgcctcctgaggcaggagagttgcttgaacctggggggcggaggttcagtgagccactgcactccagcctgggtgacagagcaagactccatctcaaaaataaataaaaataataaaacctccataagtaatcctgaaaa

SEQ ID NO: 203466 - DNA, 1023 bp, Homo sapiens
catgagtgtgtacagtgggaaagtcttactccagacaacaccaccccatgttattggtcagttggacaaactcatcagagaggtatctaccttagatggagttttagaagtccgaaatgaacatttttggaccctaggttttggctcattgacagagtttcactcttgttgcccaggctggagtgcaatggcgtgatctcggcccaccgcaacctccacctcccaggttcaagtgattctcctgcctcagcctcccgagtagctgggactacagatatgttccatttaaggctctgaagatggggagagaattctggatgatccaggtgggcccttaataatggtcccttattacagagagccagagggagatttgaaactgacaggagaagtcagtaagaccatgaatgcagagattcgagtaatacggctacgagccaaaagatgccagcagccacctgcagctggaagaggcataaatggattctcccctaaagctcccaggagtgtggccctgctgacaccctgatttcagccccatgatactgatgttggactggtcctcagaactgtgaaagaataaatttctgttgttttaaaaaaaaaaacaacaataaaaacagaaaaaaaacaaaaacaaacaaaaaacaaaaaaaaaaacaacaacaaagaatagccaagcaacaggatagacacacaccactaaacgaatcaagaacaacaacaataaaacagggagcgccagcaacatgagactcctcctcatacttgatgacgaagcaagaacaagcacgcgaggccgaccacgatgagagtatgctcaaagatggggacggcgcgcacccacatggcacaagcgcgccgccaagaatgccacacggacagggagactcggcccggcgaggccgtaaaacagagacgagggcgagcggcggcaaactaacggccgggccagcggccagatcggggagaccccaacgaatcacggggcggggttgcagcagcgcgggccgacagccccaa

SEQ ID NO: 203467 - DNA, 423 bp, Homo sapiens
aagtcagaactttcccttttgatggtggagtaagctggtgttcacgattatatgatttactgatgaaattcggaaatgcaaaaataagtctggctttaaatatccttttcatgtcatgttaagttatgaataaattaacagatcagggccaggtgcagtggctcactttgggagaccaaggcgggctgatggcttgagctcaggagtttgagaccagcctgggcaacatggcaaaattctgtctctataaaaaatatacaaaaaatacaaaaataagctgggtgtgctggtgcgctcctgtagtcccagctgttcaggaagctgaggtgggaggattgctcgagcctcggaggcagaggttgccgtgagccaagttcacgctactgcactccagcctgggcgacagagccagaccccgtctca

SEQ ID NO: 203468 - DNA, 510 bp, Homo sapiens
tatcacaatgtacaaatcagtgcaataaatacacaaaactatattacagctagttaatcagtttaagaattgttcccgtcagtcacattttattggccctcagaagttcattcctaaagattgcaactactctaaatttctagctaccaagaagttaagaatgattataagaagctttccaaggagttatgagatctttgtagaccagaggccaactatcatcacctcaagtctgctctcaccaacagcccttgagtattgtataaagcgctttatacaatactcaaggggaggaaataattagtggagcaagtcttggaatatttggaggggtagagttaagggcacaaatttgataagctaactgtggaaaagaggagagagacttccttttctgagatggcagggagtagaaaagcgagaattactatatggagaaatgttaaagtggagataaaagaagttgggagtgctggcgtctaatggtctttgtttcagtgaagtatgagg

SEQ ID NO: 203469 - DNA, 878 bp, Homo sapiens
cgaacgagacctatttagttcagtggacagagataagtgaatagacaaagctctctgctcaattacaacggtttatcgtggcgtgggagacgtctacagagaaagacatcagcgtttgggcttctaaccaccctgtctccagactgctctgcacacatggacagggacctgggaaaggtgggagagatgctgagcccagcgaatcctctccattgaaggattccggaagaagaaaatgatccggatcattttcttcttccggtgttggccttcacgaaagatgggtaaagtggagtgacctgcagagtagtggtccaagtctgggtccccctttaacaaagggtttcgtggagggcccgtgtgcacagcacgtagccgccggggggatgaaaagatgtgtcactctttgctcttgaatgattatgaaaatgtcagatggttttatggatctgtgatctcaggattgtaattaccaatccacaatcgcattgctcactgggaattgcttcaagcgtattttccaggtagtgaatgatgagctacttaattcctcttcccttgaattcatcagatttggacttggactttagttctttctagatgcaatcctgatccacacaggaattagaaagtaattcttcctcccctcccacctaaagcaggagcaaggcagaggctcaaagaggaggaaaatgctgtcgtgactcacatcccctcctccccactttgaaaggcatttcaggccaagctgaaagttctgggggaacttccccctggtacttttaattccttctgtgttaagctcctcaactacctgatgacttggcaaaggcagtttttaaagcattaataataatcgtgcctaaatgtttccagcg

SEQ ID NO: 203470 - DNA, 473 bp, Homo sapiens
cctgtttgagaatgaagcctacacataggaaaagcaaagcaaacagggcaggaaggatggaaagatgctgtggtagacagcctcaaagacagcccccattgatcctcaccacctaggattcatgcccttgtatggtgtcttcccacattgagttagggctgttctgtgtgtccatcagaatatgacagaagtggctgggtgtggtggctcacacctgtaatcccagcactttgggatgccaaggcaggcagatcactctaggtcaggagttcaagaccggcctggccaacgtgttggccaaaccccatctctatgaaaaatacaaaaattagccgggcgtagtggcgtgtgcctgtaatcccagctacccgtgaggctgaggcaggagaatcgcttgaacccaggaagtggaggttgtagtgagcagagattgtgccattgcactccagcctgggcgacagggactgtctcaa

SEQ ID NO: 203471 - DNA, 453 bp, Homo sapiens
gactaatacctattatgaaaataaagggctccttctcttccaggaatcagcacttggaacaggggtcaacataatatccatcaattggtcaaccaacaaatgatttattgagaacccattgtgtgctcagcatttaactcaaagaatcaaaacacagacatcaagtatgggtttttagagagacatgggatatgtggtgaggggttctctcaaatcgtgttactgcaactactgtatttccaagcctacctttgggccctgaagcaatctatctgtagctgttcttgcactagctcctctttcccccacccctgatcccttggcctccagactgaatgtttggctcaacaagacaaaatgtttggctccgaagtctcagctggagacagattacattcaactgagcaacagaatttgttctatggggcagcaataaaaatactagtttgtaat

SEQ ID NO: 203472 - DNA, 460 bp, Homo sapiens
gctgggccaaccacagtcctctctggagcaccagagccagacccgggatgggctcactgtggccaaacacatacataagcttccaaggactgcggcctctgtctggggctttgaagatttcctggggggaaatccctcctaagaagcgctattcctggctctgctgacaagcagaaagtttcaagaaagaagtggaaaattccaggggcaataaaaatttagaaattaattcaagactgaaactccagctgtatatccctggcagccagtacaacacttggcttatgaagaacgctcaatgaacttttgttgaatgagatgaatgcagcaacctgcctaacacaaaatgaccttcaatgagagattgttgtttctatatttgtagctgcattgtctcagatcagatacttactaagctctggtttttccaaagctctggtttctccaaccacaagctgca

SEQ ID NO: 203473 - DNA, 377 bp, Homo sapiens
aaaggtagaatgctggccacaatctgaatgataaatctctgtatacaactattttaattttttttcccctgggagaagacactgtcatgatcctgttctagtcatagaagatgtgcttgctgccattgaacgtctgaggtgtagatgtctgtgttgctgaccactggaaaaaggattatcaggagggaggtgaagatgggaaaagtaaatttgagagtcagccaatcagggggctaagcgaagctcattggcaagctctgggaggtgaaggcagaaaagaggttgaggacaagcctgcaggaacagctacatttggggagtggtgaaaaggggtcagagaaagagaagcaggagaggacatgggcaggaagtgtaaa

SEQ ID NO: 203474 - DNA, 3108 bp, Homo sapiens
gcccccaggagacccagaggacaactgggcaaggtgggccggagagtgtgggggaaggcaaaggagttctgtgagctcagcgtctgaagctcatttcatgcatcaggccccagggctcagcttccgccttcggcttccccttctgccaagagccctgagccactcacagcacgaccagagaacaggcctgtctcaggcaggccctgcgcctcctatgcggagatgctactgccactgctgctgtcctcgctgctgggcgggtcccaggctatggatgggagattctggatacgagtgcaggagtcagtgatggtgccggagggcctgtgcatctctgtgccctgctctttctcctacccccgacaagactggacagggtctaccccagcttatggctactggttcaaagcagtgactgagacaaccaagggtgctcctgtggccacaaaccaccagagtcgagaggtggaaatgagcacccggggccgattccagctcactggggatcccgccaaggggaactgctccttggtgatcagagacgcgcagatgcaggatgagtcacagtacttctttcgggtggagagaggaagctatgtgagatataatttcatgaacgatgggttctttctaaaagtaacagccctgactcagaagcctgatgtctacatccccgagaccctggagcccgggcagccggtgacggtcatctgtgtgtttaactgggcctttgaggaatgtccacccccttctttctcctggacgggggctgccctctcctcccaaggaaccaaaccaacgacctcccacttctcagtgctcagcttcacgcccagaccccaggaccacaacaccgacctcacctgccatgtggacttctccagaaagggtgtgagcgtacagaggaccgtccgactccgtgtggcctatgcccccagagaccttgttatcagcatttcacgtgacaacacgccagccctggagccccagccccagggaaatgtcccatacctggaagcccaaaaaggccagttcctgcggctcctctgtgctgctgacagccagccccctgccacactgagctgggtcctgcagaacagagtcctctcctcgtcccatccctggggccctagacccctggggctggagctgcccggggtgaaggctggggattcagggcgctacacctgccgagcggagaacaggcttggctcccagcagcgagccctggacctctctgtgcagtatcctccagagaacctgagagtgatggtttcccaagcaaacaggacagtcctggaaaaccttgggaacggcacgtctctcccagtactggagggccaaagcctgtgcctggtctgtgtcacacacagcagccccccagccaggctgagctggacccagaggggacaggttctgagcccctcccagccctcagaccccggggtcctggagctgcctcgggttcaagtggagcacgaaggagagttcacctgccacgctcggcacccactgggctcccagcacgtctctctcagcctctccgtgcactataagaagggactcatctcaacggcattctccaacggagcgtttctgggaatcggcatcacggctcttcttttcctctgcctggccctgatcatcatgaagattctaccgaagagacggactcagacagaaaccccgaggcccaggttctcccggcacagcacgatcctggattacatcaatgtggtcccgacggctggccccctggctcagaagcggaatcagaaagccacaccaaacagtcctcggacccctcttccaccaggtgctccctccccagaatcaaagaagaaccagaaaaagcagtatcagttgcccagtttcccagaacccaaatcatccactcaagccccagaatcccaggagagccaagaggagctccattatgccacgctcaacttcccaggcgtcagacccaggcctgaggcccggatgcccaagggcacccaggcggattatgcagaagtcaagttccaatgagggtctcttaggctttaggactgggacttcggctagggaggaaggtagagtaagaggttgaagataacagagtgcaaagtttccttctctccctctctctctctctttctctctctctctctctttctctctcttttaaaaaaacatctggccagggcacagtggctcacgcctgtaatcccagcactttgggaggttgaggtgggcagatcgcctgaggtcgggagttcgagaccagcctggccaacttggtgaaaccccgtctctactaaaaatacaaaaattagctgggcatggtggcaggcgcctgtaatcctacctacttgggaagctgaggcaggagaatcacttgaacctgggagacggaggttgcagtgagccaagatcacaccattgcacgccagcctgggcaacaaagcgagactccatctcaaaaaaaaaatcctccaaatgggttgggtgtctgtaatcccagcactttgggaggctaaggtgggtggattgcttgagcccaggagttcgagaccagcctgggcaacatggtgaaaccccatctctacaaaaaatacaaaacatagctgggcttggtggtgtgtgcctgtagtcccagctgtcagacatttaaaccagagcaactccatctggaataggagctgaataaaatgaggctgagacctactgggctgcattctcagacagtggaggcattctaagtcacaggatgagacaggaggtccgtacaagatacaggtcataaagactttgctgataaaacagattgcagtaaagaagccaaccaaatcccaccaaaaccaagttggccacgagagtgacctctggtcgtcctcactgctacactcctgacagcaccatgacagtttacaaatgccatggcaacatcaggaagttacccgatatgtcccaaaagggggaggaatgaataatccaccccttgtttagcaaataagcaagaaataaccataaaagtgggcaaccagcagctctaggcgctgctcttgtctatggagtagccattcttttgttcctttactttcttaataaacttgctttcacctt

SEQ ID NO: 203475 - DNA, 946 bp, Homo sapiens
gcccccaggagacccagaggacaactgggcaaggtgggccggagagtgtgggggaaggcaaaggagttctgtgagctcagcgtctgaagctcatttcatgcatcaggccccagggctcagcttccgccttcggcttccccttctgccaagagccctgagccactcacagcacgaccagagaacaggcctgtctcaggcaggccctgcgcctcctatgcggagatgctactgccactgctgctgtcctcgctgctgggcgtgctcagcttcacgcccagaccccaggaccacaacaccgacctcacctgccatgtggacttctccagaaagggtgtgagcgtacagaggaccgtccgactccgtgtggcctatgcccccagagaccttgttatcagcatttcacgtgacaacacgccagccctggagccccagccccagggaaatgtcccatacctggaagcccaaaaaggccagttcctgcggctcctctgtgctgctgacagccagccccctgccacactgagctgggtcctgcagaacagagtcctctcctcgtcccatccctggggccctagacccctggggctggagctgcccggggtgaaggctggggattcagggcgctacacctgccgagcggagaacaggcttggctcccagcagcgagccctggacctctctgtgcagtatcctaccagagaacctgagaagtgatggtatccccaaaggacaagaccaggacaagcaccctgtgaacaaaccctaagcgagagacagggacagcgatacaacgtcaccccaaaggacatgggaagggggcccaaaagacccatgtaggccgcgaggtacctggcgggtcgacaacaaccagagcgaagccccacccaagccacggctagaagacaggaaagccccagaaaggagaaaccagggctatcacaggacg

SEQ ID NO: 203476 - DNA, 462 bp, Homo sapiens
ttagcgacatcaaggtgggaaaagcaccgatagttctgaattcaaatcctgcctggcacttactagctatgagacctcagccacgtcactcaccccctctgagccttcatttcttcctctgtctcctttgagagttggtttgaggattagaatacatgcactttctcaatctgtagccattgttccattattactgccaccattgacatgactacacttaactgcttaacaattatgtgtatcatcgggaggctgggcatcctagggattcagcacagggggtctgaaatcagcctgcatgggttcaaatcctgctgtcatcactgtgtcatgaaacaagtgtcttaacttctctgtgcctcaatttctttagctgtaacatggagacaatactagcggccacctcctaggatgatgctgggtgttaaatatattgtacttgcataataaaatattcagaat

SEQ ID NO: 203477 - DNA, 3393 bp, Homo sapiens
gcccccaggagacccagaggacaactgggcaaggtgggccggagagtgtgggggaaggcaaaggagttctgtgagctcagcgtctgaagctcatttcatgcatcaggccccagggctcagcttccgccttcggcttccccttctgccaagagccctgagccactcacagcacgaccagagaacaggcctgtctcaggcaggccctgcgcctcctatgcggagatgctactgccactgctgctgtcctcgctgctgggcgggtcccaggctatggatgggagattctggatacgagtgcaggagtcagtgatggtgccggagggcctgtgcatctctgtgccctgctctttctcctacccccgacaagactggacagggtctaccccagcttatggctactggttcaaagcagtgactgagacaaccaagggtgctcctgtggccacaaaccaccagagtcgagaggtggaaatgagcacccggggccgattccagctcactggggatcccgccaaggggaactgctccttggtgatcagagacgcgcagatgcaggatgagtcacagtacttctttcgggtggagagaggaagctatgtgagatataatttcatgaacgatgggttctttctaaaagtaacagccctgactcagaagcctgatgtctacatccccgagaccctggagcccgggcagccggtgacggtcatctgtgtgtttaactgggcctttgaggaatgtccacccccttctttctcctggacgggggctgccctctcctcccaaggaaccaaaccaacgacctcccacttctcagtgctcagcttcacgcccagaccccaggaccacaacaccgacctcacctgccatgtggacttctccagaaagggtgtgagcgtacagaggaccgtccgactccgtgtggcctatgcccccagagaccttgttatcagcatttcacgtgacaacacgccagccctggagccccagccccagggaaatgtcccatacctggaagcccaaaaaggccagttcctgcggctcctctgtgctgctgacagccagccccctgccacactgagctgggtcctgcagaacagagtcctctcctcgtcccatccctggggccctagacccctggggctggagctgcccggggtgaaggctggggattcagggcgctacacctgccgagcggagaacaggcttggctcccagcagcgagccctggacctctctgtgcagtatcctccagagaacctgagagtgatggtttcccaagcaaacaggacagtcctggaaaaccttgggaacggcacgtctctcccagtactggagggccaaagcctgtgcctggtctgtgtcacacacagcagccccccagccaggctgagctggacccagaggggacaggttctgagcccctcccagccctcagaccccggggtcctggagctgcctcgggttcaagtggagcacgaaggagagttcacctgccacgctcggcacccactgggctcccagcacgtctctctcagcctctccgtgcactactccccgaagctgctgggcccctcctgctcctgggaggctgagggtctgcactgcagctgctcctcccaggccagcccggccccctctctgcgctggtggcttggggaggagctgctggaggggaacagcagccaggactccttcgaggtcacccccagctcagccgggccctgggccaacagctccctgagcctccatggagggctcagctccggcctcaggctccgctgtgaggcctggaacgtccatggggcccagagtggatccatcctgcagctgccagataagaagggactcatctcaacggcattctccaacggagcgtttctgggaatcggcatcacggctcttcttttcctctgcctggccctgatcatcatgaagattctaccgaagagacggactcagacagaaaccccgaggcccaggttctcccggcacagcacgatcctggattacatcaatgtggtcccgacggctggccccctggctcagaagcggaatcagaaagccacaccaaacagtcctcggacccctcttccaccaggtgctccctccccagaatcaaagaagaaccagaaaaagcagtatcagttgcccagtttcccagaacccaaatcatccactcaagccccagaatcccaggagagccaagaggagctccattatgccacgctcaacttcccaggcgtcagacccaggcctgaggcccggatgcccaagggcacccaggcggattatgcagaagtcaagttccaatgagggtctcttaggctttaggactgggacttcggctagggaggaaggtagagtaagaggttgaagataacagagtgcaaagtttccttctctccctctctctctctctttctctctctctctctctttctctctcttttaaaaaaacatctggccagggcacagtggctcacgcctgtaatcccagcactttgggaggttgaggtgggcagatcgcctgaggtcgggagttcgagaccagcctggccaacttggtgaaaccccgtctctactaaaaatacaaaaattagctgggcatggtggcaggcgcctgtaatcctacctacttgggaagctgaggcaggagaatcacttgaacctgggagacggaggttgcagtgagccaagatcacaccattgcacgccagcctgggcaacaaagcgagactccatctcaaaaaaaaaatcctccaaatgggttgggtgtctgtaatcccagcactttgggaggctaaggtgggtggattgcttgagcccaggagttcgagaccagcctgggcaacatggtgaaaccccatctctacaaaaaatacaaaacatagctgggcttggtggtgtgtgcctgtagtcccagctgtcagacatttaaaccagagcaactccatctggaataggagctgaataaaatgaggctgagacctactgggctgcattctcagacagtggaggcattctaagtcacaggatgagacaggaggtccgtacaagatacaggtcataaagactttgctgataaaacagattgcagtaaagaagccaaccaaatcccaccaaaaccaagttggccacgagagtgacctctggtcgtcctcactgctacactcctgacagcaccatgacagtttacaaatgccatggcaacatcaggaagttacccgatatgtcccaaaagggggaggaatgaataatccaccccttgtttagcaaataagcaagaaataaccataaaagtgggcaaccagcagctctaggcgctgctcttgtctatggagtagccattcttttgttcctttactttcttaataaacttgctttcacctt

SEQ ID NO: 203478 - DNA, 1660 bp, Homo sapiens
tagagacagggtttcgctatgttggccaggccggtcttgaaattccctggatgacctattaaacagtcatcccaccctccctttcgctgccttctaaaggtgctcaaatttcttgatggcatttgtcacttaccagtcattgtacttttgctaattattgtctgttcctccttccaagatggaatgcaagctcagcaaggcaagggcagggacttagtttcactctgtgctgtaaatcagtgcccgacgcgtggtaagtgctcaaatatttgctgaatgaatgaatgaaggatggtggttcttccctcaggctcagaagcggaatcagaaagccacaccaaacagtcctcggacccctcttccaccaggtgctccctccccagaatcaaagaagaaccagaaaaagcagtatcagttgcccagtttcccagaacccaaatcatccactcaagccccagaatcccaggagagccaagaggagctccattatgccacgctcaacttcccaggcgtcagacccaggcctgaggcccggatgcccaagggcacccaggcggattatgcagaagtcaagttccaatgagggtctcttaggctttaggactgggacttcggctagggaggaaggtagagtaagaggttgaagataacagagtgcaaagtttccttctctccctctctctctctctttctctctctctctctctttctctctcttttaaaaaaacatctggccagggcacagtggctcacgcctgtaatcccagcactttgggaggttgaggtgggcagatcgcctgaggtcgggagttcgagaccagcctggccaacttggtgaaaccccgtctctactaaaaatacaaaaattagctgggcatggtggcaggcgcctgtaatcctacctacttgggaagctgaggcaggagaatcacttgaacctgggagacggaggttgcagtgagccaagatcacaccattgcacgccagcctgggcaacaaagcgagactccatctcaaaaaaaaaatcctccaaatgggttgggtgtctgtaatcccagcactttgggaggctaaggtgggtggattgcttgagcccaggagttcgagaccagcctgggcaacatggtgaaaccccatctctacaaaaaatacaaaacatagctgggcttggtggtgtgtgcctgtagtcccagctgtcagacatttaaaccagagcaactccatctggaataggagctgaataaaatgaggctgagacctactgggctgcattctcagacagtggaggcattctaagtcacaggatgagacaggaggtccgtacaagatacaggtcataaagactttgctgataaaacagattgcagtaaagaagccaaccaaatcccaccaaaaccaagttggccacgagagtgacctctggtcgtcctcactgctacactcctgacagcaccatgacagtttacaaatgccatggcaacatcaggaagttacccgatatgtcccaaaagggggaggaatgaataatccaccccttgtttagcaaataagcaagaaataaccataaaagtgggcaaccagcagctctaggcgctgctcttgtctatggagtagccattcttttgttcctttactttcttaataaacttgctttcacctt

SEQ ID NO: 203479 - DNA, 340 bp, Homo sapiens
cactggggagggaccctggggacagcctatgggctgagcagagagggctctcagggacccctgcagcacaagaatctcccaccacggtctctgtcccagccctgactcagaagcctgatgtctacatccccgagaccctggagcccgggcagccggtgacggtcatctgtgtgtttaactgggcctttgaggaatgtccacccccttctttctcctggacgggggctgccctctcctcccaaggaaccaaaccaacgacctcccacttctcagtgctcagcttcacgcccagaccccaggaccacaacaccgacctcacctgccatgtggacttctccag

SEQ ID NO: 203480 - DNA, 336 bp, Homo sapiens
ggtagtaaacgtggcagtctgtcacagggaggtgcagcagggcacaaacaggtgggttcatttcctcagcatgaagattctaccgaagagacggactcagacagaaaccccgaggcccaggttctcccggcacagcacgatcctggattacatcaatgtggtcccgacggctggccccctggtgagtgtctgggccatgcttccactttttctcttctctaaagctgacatcccactttctgacttttgcaccccttgtcttagcgacatcaaggtgggaaaagcaccgatagttctgaattcaaatcctgcctggcacttactagctatgagacc

SEQ ID NO: 203481 - DNA, 377 bp, Homo sapiens
ggcctcacaatcatggtggaaggcaaggaggagcaagtcgcctcttacacggatggcagcagggaaagagagagcctgagcagagaaactcctgtttttaaaaccatcagatctggtgagactcattcactaccatgagaacaatgctggaaagacccacccccataattcaatcacctctcactgggttcctcccacgaccatgtgggagttgtgggagttaaattcaagttaagatttgggtagggacacacccaaaccatatcagaagtccaatttatttatttttttcttggtttcttatgcttttgctgtcatatctaacaaaccattacctaatccaaggtcatgaaaatttatacatatgttttcttcta

SEQ ID NO: 203482 - DNA, 259 bp, Homo sapiens
gtattatgttagcttctgtctatgtcgtagtccaatttctcttgtcgaagcggaggtgtggagtctcagcaggcacaggaaaaggagttaggattgaatttgatgatgaaaatgatataaactgtggtggaactaacacagctgtaaattagccacacattgtgactatgtgatagtaaagtaggaaacgtaagtttattttctagtgcgagacattaccaaaagcatgttaatgcagtgcatgaagacaaagggaaaa

SEQ ID NO: 203483 - DNA, 449 bp, Homo sapiens
gctaatacatgaatttagcaattccacatgatacaggatcaacacacaaaaatcagtgatatttctatacactagcaataaacaatccacaaagaaaattaaggaaacagttccatttacaatagcatcaaaatgaataaaatatttaagtacaaatttaaccaaagaggtataagagttgtacactgaacaaagaaagcatggctgaaagaaattcaagaatatgtaaataaatgcaaagacattctgtattcatggactgaaagatgtaatattgtaaagatagcaatattccccaaggtgatctacagattcaatgcagttccactaaaatcctaacagctttttgttgctattgcagaaataaaaaagctgatcctaaaattcacattgagttgcaacagacccagaattgccaaaacaatcttgaaaaagaacaaaactgaagc

SEQ ID NO: 203484 - DNA, 509 bp, Homo sapiens
tcagctttggtaagttgtatttttctagaaatttgtccacttattctcaaatttaattttacaaagttgtttatcttcagaccattttatcgtttatcatttattgcatctggactgatgttttctcttacgtttttgattttaggacattctttcccttttttccctttatcagtgtcagcagtgttttacaaattttgttaatccttttgaaaactgggttttggttttgttaatcttctctattgtatacttgatttgtccattaatatttctgtccattatttcttgcttttatttttattgttgatttctttctacttactttgagtttaattggtattttttctgactttttgaagtgaaagtctatataattaattttcagcctttctccatttctaatacatatgtttaaacttatatgatttttgtaacattttatcttcattgtataagttttaacaagtatcttttgtcatttaattaaatttcattatgatttctta

SEQ ID NO: 203485 - DNA, 519 bp, Homo sapiens
tcagctttggtaagttgtatttttctagaaatttgtccacttattctcaaatttaattttacaaagttgtttatcttcagaccattttatcgtttatcatttattgcatctggactgatgttttctcttacgtttttgattttaggacattctttcccttttttccctttatcagtgtcagcagtgttttacaaattttgttaatccttttgaaaactgggttttggttttgttgctcttgtaaagtgtatcctccagccagaaggaaagcaccaagcccaatgaacttggtggcccttaaggaactgggatataccaggcctgagttttttcttggttgggaggtgtaagaccccagaagagggagttttttccaacccccagccacccttggttcggggtggggcctggtgaaaaaggttggttttttcttttcccttggaagtgccttccgccaccacaagtgaacctgtgtttgaagatccccggggttaccccttatcaccttttttttcttta

SEQ ID NO: 203486 - DNA, 236 bp, Homo sapiens
tctagatatacccaagaaggaatacaaaatgcttacttacatatccaaggtactaagatacttcagatgtagatatgctaactgtaacttaattacaaaataattttttctttttttttttttgagacggagtttcactcttgttgcccaggctggaatgcaaaggcgcgatctcagctcatctcagcaacctccggctcccaagttcaagtgattctcctgcctcagcctcccaa

SEQ ID NO: 203487 - DNA, 380 bp, Homo sapiens
gtccagcccgcctggtgtgggggagtccaggctcagggaggacacagcagtaccgcctgcttgggctggcagggagctcaagtcagcatggggttcaggccccgcctgcctgatgggcgaacacacccccaaggcccccgttagggccaggaggcaggctggcagccagcgcaggtgcagaggggccccgaggcttccatcctgaggtcagcactgggaggacagaggctgcctccttgcagcccgagggttgaccaatggcactcgccgcatcccttcccagagcaggccagccccacgggcatcatgagggcctgcgtttggtttaatgctccgctgtcaacatcttgaaattctctgtaatttttaaataaggggcc

SEQ ID NO: 203488 - DNA, 382 bp, Homo sapiens
ggttggaatcctggctctcccgctgtctggttgggtgaccttgtaaaatggggaatacatcattcgcctcatcctgcaagttgtataagaaataaatggctggtgcaggggcttatgcctgtaatcccagcactttgagaggctgaggtgggcggatcacttgaggtcaggagttcaagactagcctggtcaatatggcgaaactccgtctctactaaaaatacaagaattagcacggcatgaaggcacacacctgtaatcccagctattcaggaggctgaggcaggagactcacttgagcctgggaggtggaggttgcagtgagccaagatcaccacaacgcactccagcctgggtgacagactgagactctgtctcaaga

SEQ ID NO: 203489 - DNA, 444 bp, Homo sapiens
caggcagcaatattagcctagtgagtgcttccccccagtccactcccactcccactcagatgaggtaaggttacataggtataaactaatgaacccaaattttgtacaacccacttctatcaggcccttagaaatgccggcataaagttgagaaacacagctacagtttgttgcttaggagtcatccctgcttcctgcacttgtacttgtagccctcatcctaggaccactgcatcaggtaggggaaaaagaaacctgaggtgatgtggagaaaaaggaaaaaatcatagtcattatactagtgtactcttcccttgtcaagaattgcagtcataccagcatcctccctgcccctcctttcccaggtccactagaaaaatagaggaaaactgaatggggacccttctttagccccactcctggtacataaaagcacacacttgt

SEQ ID NO: 203490 - DNA, 254 bp, Homo sapiens
tattttataagggcaacatactctcgatgccaaaacctgacaaacaaattataagaaaagaaaattacagaccaatttctctcatgaatccagatgcaaaaattctcaacaaaatattaacaaaaaatttaaagagttgatccatttctctaattcaagacagcttattaagtaaagatgctcatggaatcctaaacttaccctaaattgggataaactgaggtcctctttttcctttttttttttttgtttgt

SEQ ID NO: 203491 - DNA, 207 bp, Homo sapiens
atttaaaaacatctgatgagagttcagaagtaaacccttttatccaaggtcatttgattttcaacaggagtaccaagacaataaaatagagaaagaatgaatagtcttttcaacatatgatgctgagacaactggatatccacatgcaaaataataaatgaagttggaacccttcctaacaccatacacaaaaatcaactgaaaatg

SEQ ID NO: 203492 - DNA, 382 bp, Homo sapiens
atcctatcctgtgcgtccacatgcactaactcattctcagggccttcactatccacatcccccgctcagatggtttgcctttagcaacaaaaattaatccaagattttggtctgtggatgcccttgttccctggtttcagggctactgcatgtttcccctgtaatattcctttcatgtttgtttttctctggtgatactggctgatacctggttgcgggagttgcctgaggctccttgggctgccatcttgcccggaagactccagtgtgccccgcacctcctatgctcatccctgagtagctaggttggagtctgtctctcttacttatctgtgaactctgtgagggtagggcgcaggtctgattcatctctccaagtgag

SEQ ID NO: 203493 - DNA, 177 bp, Homo sapiens
gttatatatcacagctgctgaagcagaggttcagaaaagtcaaattacttcactgagattgggtaacctaactcccaacttaaataaatctaatgcctttctaccactgtcctgccctcttttctgattgtggaaggccctgaaagcattaccaaagtttcaaagttacctaaataa

SEQ ID NO: 203494 - DNA, 550 bp, Homo sapiens
acagccacccatgggaacattgttcacgtcttccagccacagatttcctgtctttcccattttaactgagtccgtatcatgctctgtggctgtaacttttgcattttgaggtgtgacagcaaaactagcatgaatttctttttctttcttcacaatttctttaatagaagattccctctgaccctagttcttagcagcctcagcaaacaattattttatatccttataaagtgtagagctttcaccttttcatttaaggaagcactttacggcttctctttggtgtacctgaattgttggtatcactactctagtactttggggccatggttaagtgaaataagggttccttgaacataagcactcagaagccacaagagtggatctgataacccagatggccaccaagtgatgagagggtgggagcgcccacagcctggagatgctggacgaagggaggattctcgtccaggcaagatggggcagacagcatgaaacttaagcatgcaattcagaatggtctgcaatttaaaacttatgcattgtttat

SEQ ID NO: 203495 - DNA, 494 bp, Homo sapiens
ttcttgggcaatcatatcagaaataaacactaccccttatctgaatagaccttttctggtcttggtcttacctccctggctattctggagcagatgggtggattaaggcaaaagggcactacagtaatcaatgcagggctcaattcactctcaggtgaagttcatttctctattctctcaaggttggattcttagcctttggcatttgtgctatgtgccatgaaattcctgccccaagaaccggttcaggggatcaaagagctattattaatgactcagtttaggccaactgagggagggaatgacagtagaggcaggccactcacccctccattcagccaccctcctccacaacggggccattgagcaggcgccacaatagagggctgagaataaaaggctgaaggaaagcatacagagtccctttgcacagactcggtcattcatcaccaggcaagtgccaatatctgggaacagcaatctcaatttctgca

SEQ ID NO: 203496 - DNA, 520 bp, Homo sapiens
ggtggtgttctagaggatcctcggattggcgacatttcaatatgtaattaacatcaaagaatgggttcatgagataacttggcagtgtgcagtggctcacgcctgtaaccctagaactataggaggctgaggaaggcagattgctggagcccaggagctcaagaccagcctgggcaacacagggagaccccagctttaccaaaaaaaaaaaaaaatttagcccggcgtggtggcacacccctgtattcctacctactcgggaggctgaggtaggaaaatctcttgaacccgggaaacggattttgcattgagctgaaattgccagtgcactcctgcctgggaaataaaataagactttgtctcaaaaaacaaacaaccgcctcggtctttgtgcaaaatctataatcatttgcaagaggctgcaatcaggtatagcactggattttgtgaccaaaactaggtttcaggatttaattaaaaacaaaaacaatgtcaggtcataaaacacaagacatataca

SEQ ID NO: 203497 - DNA, 781 bp, Homo sapiens
catagattaggaataattgattctacagtaggtctgggtggcatggaatataagctccgtccagcaaggatttgctccatcgaagataaacgcagccagcgtggggtagatatgaggtgctcctgtcttccagcaactccagacaactgatacatgttagaagacagcacattaattatgaaacaatgcagaaaagatcttaagggagaaagaaaggatgacaaacatcaataatggtaggagcacctttcagcagtcaacttggactttacttacatatgcatgaattgagaggcagacggaaggaaaaattcaagaatacacaatacaaaataagtgttggaatcttgttctcaataaagcatacatcttgttatcagttttgggagcatcgtgtgacaggaggttatctagtattatctgtaagaatcacctgctatgtgtacagttcagtagtagtgctaggtatactttggtaccttgacggattacacatgaaacctgttgcccaacataagtgtgttacagggagttcggcaaagagaaatgcatataagatacaatagttgggaaggattttcatagaatgctcttgtttggaggtgggagcattagacgaccattcagaacaaaaggggaagtagtatctatcttagtgagtgtgtccagagatttggggaggtagaaatacctaggtatcaacttcaaatgagctatatctgtttcggggagtagatacgatcagagtgggcccaccgtgagcaaaggctgacagttgata

SEQ ID NO: 203498 - DNA, 651 bp, Homo sapiens
agagacaccgcctgtttcagtcccaaagagctggccagaacggtggggcgtgtgtggggaaaatggtgtgatgctgggctggcttgggaccctgtgaggggagggaacggaagcaaaagcttgatgttcttggctccacttgggaaactgaaaccagccttctctgtggtttactggcccagaactgaagtatctccattcccactcaggattgcagggtgggccagggggtgcagctcagctgtgtccaagaataggctctcaggagaacgggctgggctctctcagccgaggctgggtcagaacttcaggaaatctaagtcctggactcgttagccccaagctggggtgggtcccatgctgtgctggcctctggagggtggggcagaaagcctgagcatatggcgagcttgtggtctccttgaaggaggagaggcgcactcctggaccagccagagagccagaggtggctgaggtgttctcacctgaaccgctacccatgtgttgcacaggtgtccccagtttgggacccattctgcactctgcatctcactcctctattctacctccttacctcaaaacaactccgcttttcctcttgaatctctgatttcatgaatgctcccccatccatcccgaggcgaggaatct

SEQ ID NO: 203499 - DNA, 438 bp, Homo sapiens
ggacacaaaacaaattaagttgtcaaaataagcacatggtaatcagagtggctattgatctcagacagtaagcaggtgagtttagctggatttggtgtacactgtcagtcctcaaagtacagctactccatttgtgaatgtatgttgatttttcttatgattgtctgtattctgtagtttcctctcccccagtgtattcgagaatgtcttcctattgcttttactcatgaatgacatcttagattggaaaataattttctgggtcacatccagtttttttctcttaccataagacattactccattgtcttctggcatttagtgttactgtggaaaagtccaaggtcagcccatttttgttttgtaagtgatatgcttctgctgggatgcttttagaatttttgttaatgggtaaaattcagcagctccaccaggata

SEQ ID NO: 203500 - DNA, 494 bp, Homo sapiens
agaatcaggaatagattgtatacatatttttcaaattctttctacttagtgttatatgatagtcaataatatatgtgtatgtaagtagcaataaatcattcctgaaaacttgttttttaagcttgtataacattccgtcatatggatgtactgattttgctaatttgttaagtttaaaataatattcattttcatttctttgactactaggtataattaattttttcatacactcactacccttcatacttcttttattgatttcctttttatgttaattattaagatttctatttgactctcaacattttcttaatttttttatcattaatagatgtaaaaaaattcttaatttttaaaaaataaacccttttcatcttaaagatagcaatctattttccataatacttgttataaatatttccccagtttgatgttggtcttttaattttgtttaaagtatttttgacaaataaataagtttttgtggcttg

SEQ ID NO: 203501 - DNA, 878 bp, Homo sapiens
ccatcgtgtggattctggttaaggtgtgtgacgcctgtgtcatagccgggcttcacaaatggaagctgttgtcataaaaggctcagcagcacaggactgcgatcagtaggggttttgcaccaacttagcaaactggaatatctctctctcacacacacccctatcctgagggctgacagtcacaaatccagaccaagcaggaattggccagctggtaaagtcctggaaggaacaggctgagcattttagaggacttggtcagtaggtgatcctgagggtcttaggacatgtgtcctgaccactgcagcgtctggcctgcgtgagcttttccagcccctggcagcaaatcaaggagaagggagcaagtctcattcatttgaaaccccaagaattctcctaaaggggtcaggaagctgtcccgaaggcttgtccctctgggtgctcctgcctcaccaggtagttaaccagaagctacactgagctcacaccatcttccaggcatctttgagctcaaaatcactgagctcacaccatcttttcagtccctcactgttgacctcagcctgcacacgattggtgccgccccagccgacacatggttcttcctaagccttctctgctcatccaccataccttactgcttataccttacaggccaatgctcttcagttctgtcttgcttcttcccagcatcactctatcctgatggttctcagacattagtgagcatcagaatgcctgaagggcttgttaaaacagtactgggcccagtccgggagcggtggctcacgcctgtaatcccagcactttgggaggccgaggcaggcggatcatgaggtcaggaaatcgagaccagcctgaccaccatggtgaaaccc

SEQ ID NO: 203502 - DNA, 603 bp, Homo sapiens
gaggtaccagctagcagtcagtgtgagtatgcatgtttgtagcctgattccatagcaataaaactgtctgcttctccatcggactctcccccttggctgtgagctcccagaaggcagggcttcccctgccttgtaactctatctgcagtttctggcatcatctggctgagacttcatttaatacaatttactcctctgtaccagacactgggctgagccccagaaggaacagtggtgagtaaggctgacttgatgcccgtctgcatggtgcttgcagaagcctgctaggctctcagaagccaaggctctcagaaagtgtctgctgaatgaatgagcttgtgtaagaggtggccatcagggggactggggcagctcgtgtgtgctgtggggggcttagggtccagtgatgatgggtctttgggagcagactacttctgtctgtggggaaaaaaaggaggctctttgcctttcacaacgggaaatcgggtcaggacccgagtgattataggatcataagtaattataggcctagatctccccgtgatccatccctccctttcctcgaagggcctggagccaggggttacagctggggcggccgca

SEQ ID NO: 203503 - DNA, 943 bp, Homo sapiens
aaatctcaaattttttaagaacctgcagattctttgatacaattcacgaaacaaaccagtgcaaagcaaacgcagtacacccattccaatgtaattccaatggcaggcccattccaaccctcagactaccaatatttgaactcaggtttgaatgtcagaatccaatcattggcagtcctgtgccaaagcttaactgataatgtggaattcactactgaacatcatgtttactgctgactaaacaaattgctattggaaagcctcttctctccatcttctgggtataactgcattgtgtagtagccattctggtcttttctgcaccagaaggaacactggagtaagaactcagaggtcatgctcccataggaaatatttcccagtggggaaatactttatagacttgtttctcctaagttcagttgtcccagggtctgtagacagaaactgaaatgcataaaactattattgtgtttcttggactaagctttttattgtggaagattctagaaaacatgctataagtttaattgtactaaagccacatttaaattctgagacatctaagttatattttttacttgaaacatccgtgtttatgagttgtggctctatagcccttgtaagccatgttcccttttccctgaatttgaaactccaatctttccaaacatccctggtgtgtattagcattccagaggctgccagaaagaagctgggaggaagcctaatggctagatttgtactcaagtacctattttttggacaagaagactatgtctgtgccaacacaccacacaataaaataggggtttggtgccagtttctatcgatttggtcaggatgggcagccaaactagaaatttcatgccagaaatatgagttggtttggctgacttagcctgattaaattcactggataataattaaatgtcacatctgg

SEQ ID NO: 203504 - DNA, 603 bp, Homo sapiens
tagctgttcagaggatccgtgataatccgtacatcataaaaaatatcttgttctcttgtgcataaatctagacgataatttccctgtatataatagtatcatttagctgttatgtaatttttgtatcattagatcaggttgtctgcatttgtcggtgtaagtgaacatcatcacagtaatcctgagttagagtttaagccaaatacatgcatagaaaagggtctatcctattaatggaagaaggtaatttttaggatgtgtattattacagtgtcgtatgtttaacttttattaaataaacgtgtttttaaaatctccagggtgtgttcacacaaggataaagtctttagactgtcagcacttagagcagttaaacctccaagtacttgctcacggcattcatgcaagagaatactgagtgtgtgagacgtttcagtaaatgcttacgtattccttccatttttcttattttcagctttaaaacttagctgtcgttcagttaagcttaaagataggttaatttgtaaatggcaaagtttgttttgaggtttttcctcaataacttgtttcctaggcctattaagccatctccaaaattgatct

SEQ ID NO: 203505 - DNA, 714 bp, Homo sapiens
caaacaaacaaaaactcaacaccttaaatactgagatttgagatatacaattttccatatatttgatatgtataagtaaatataaatgagatcacttcaagttagcatctgcacagcaaaggatacaatcaacaatgagaaaaaaccccacagaacaggagagaatattttcaaactacctatctgtcaggatctaataacccaaatatataaggagctcacacaagtctataggaaaaaaaatctaataatacaatcaaaagatgggcaaagttcagctcactcttttccccactgcaatagtactactgaaaaaaatctgcccttaccattttagtgatgtctggctttatctttgaaagtgcttaagagcatggagtgtttccagatcattttgtttcaagtccagcagagtcgctataaaaccttggtcaagtcacctaccttccttgcacttcaatttcctcatctgaaaataaaaataatcatagtaggtttgtagacaggattatgagtgaatccatgtaattaacttagaacagtgcctataatggctatataaaggctataatgttgatttttacttattatgatagtcactattcttcaagcaacatgcttcccataaattgatggaaaattgacaaaaggaaatatatttgcataaatagttgtaatatatatatgtcaaacagtggatttaataaaaggcat

SEQ ID NO: 203506 - DNA, 493 bp, Homo sapiens
ccacagacttctatcactttagttttctatcattttaattttgcctcttctaggattttatgtaaatggaatcataaagcatgttgtcttctacttctgatctgttttacttagcatagtgcttttcctccatttggttgatcctttttatctctgagtagtgttatatggaaatatatctacttgcttctccaacagttgagggacactgacatggtttccaattgttagccattgtgaagaaaattgctgtgaatatatacatacaaatttttgtgtgaacgtatttttttcatttctcttgggtaaatttggagtaggattgctgggtcatgtggtaagtgtgtgtttcattttattttttaaaaatggagccaggcacaatggctcatgcctgtaattccagcacattgagggcctgaggtgggaggatccgttgagctcaggagttcaagactggcctgagaaacacagtgagacctcatctctaaaa

SEQ ID NO: 203507 - DNA, 358 bp, Homo sapiens
agagtttcgctctgttgcccgggccggagtgcagtggtccaatcttggctcactgcagcctccacctcccgggttcaagtgattcttctgcctcagcctcccgagtagctgggattacaggcatgcgccaccacgcccagctcattttgtatttttagtagagacagggtttcaccatggtggccaggctagtctcgaactcccaacctcaggtgatccgcctgcctcaacctcccaaagtgctgggattacaggcatgagccactgtgcccggtctacttctgtgattccatttaacaaagggaaggtccctggttatccttcttgtacagatgaggaaaacagcttgtggaggggt

SEQ ID NO: 203508 - DNA, 428 bp, Homo sapiens
ctcttatttcctgtgtgattaatgagttagaattagtactggagctatctctatgagatgtggatttcattttggggggtggtacatactcaacagatgaaattttgggtcatatggtagttctattttgattttccaaggaaccattatactgtttttcataatgtaccaataacatttctgccctgtaagggtccccttttctgcacaacctaaaagggtttcactctctccacacctttgccatcattactttttatctcttgactttttgctaatacccgtcctaacaggtgtgaggtgatagttcattgtggttcatttgcattctctgattattaatgatgttgagcacattttcataaacctgtcagccagttgtgggttttctttcgagaaatgtctattaaagtcctttacctattcgt

SEQ ID NO: 203509 - DNA, 490 bp, Homo sapiens
ctcaaacttggcccagaagtaccaaagggagttgctggacctgaggggctggggcttcagtgaccataatggaatgacccatagccccatatgggcccataactgaacaccaaccagatggggctggtggaaggctactgtcaacctgaaatgaagaaactgttattgaaccagaatggggtccaattgcctggtgcagtaaaagtagatatccacaccaaggttttgcagcagtagtgaagaaggaattcatgaattttaaaagcataatcaaagaccagcaagacatttttactttttccttcaaaagctaagtgtactgtagccccccaccccacatagtcatagtctaagttagagaagaatactaactgcctgtttttccttctgtgctcagcaagccttatctgtactcaccagtttcacattccttgaggctcagcaagttcctgctttacctccctagcgcagctgcaaagttacaaggttg

SEQ ID NO: 203510 - DNA, 674 bp, Homo sapiens
ggacttgtaagacatagtaaggatcatggaatttatttaaagtgagctgtaaagctactaaaggattttaacccaaaatggcacaatctaacttgcatttttaaaaattacttttgctactatgtagataattaaatgaagaacggcaaagaggaaaaaaaaagatgatgatgacctattcatcagtaaagaattagggaaagaagagagtagattcaaggaatactttggaagcagaatcaacagaatttgctactagattcaattgggggtggtggtgagacacagatcaaaataaagtatgacaccaagttttctggcttgggcaaataggtaaacagtgagagtagagggggaaggttattttttaagtcctgttctgggcatgttgggtttatggtattctgaaacaacactgaagtgaaattttcaagtaaacagttacatatgcatgtctaaagtgcaagtgacatctggaccaaaagtgtaaggttgggaactttcacaataaagatgacatttacatgccttggaactgattgatatagagaaggctcagagagcaaaagatactcagagacaagccctgagaaatcttaatatctaaaagtgggacagaacatgattaacagccagatgagaggacaccaacagagaaaacaaaatggcaattg

SEQ ID NO: 203511 - DNA, 596 bp, Homo sapiens
gtagctagattcacaacgtcgtgtgagtgtactcagccaggtcgatacaggtcacaagactagttaagttatacagctgaaatacaagcataggttttttttgtttgttttttgtttgtttgtttttaagacagagtctcgctctgttgcctaggctggagtgcagtggcatgatctcggctcactgcaacctcctcctcctgggttcaagcaattctcctgcctcagcctccctagcagctgggactacaggcgcatgccatcacgcctggctaattttttgtatttttggtagagacggggtttcgctgtgttggccaggacggtcttgatctcctgacctcgtgatgtggcccgccttggcctctcaaagtggtgggattacaggcgtgagccactgtgcccggccagattttacatttagctaagttttgattaattgtgcctttatgcactggaccaatcctacagcttaacttcgtctttgtcacttccctgtgcagttctcaaagaattcaaacgtgtgatattgacaatccaagactctttttccaagcctcattttccttgataccctatctgatggctggaaattc

SEQ ID NO: 203512 - DNA, 127 bp, Homo sapiens
tttatgaaaattctgaaatgctaaagaggcatgctggggagtgttcataacttctctctttctttgttccgatggtgtgctttcacacaatgctcacctcattatttcagacggtcactattttgta

SEQ ID NO: 203513 - DNA, 687 bp, Homo sapiens
aactcctggggctcccagaagccagcagaggcaaagatgcatcctctccgagagccttaggcaggagccagccctgctcacaccttggctttggacttcgggcctccagaactgagaggataaactggtgtttcttcacgccccgtggtctgtgctagttcgttatggcagccctgggcagggaaaccttgagtgacgttactcgaggcaccaaaggcaccagtgcattttatccttaaaggcccacgtggtctgaagggtgtggccgagcctcacgcttgtcacttcagaagggtgggaacctgacatgtcagagctaatccttctcatatttttagatcctgatttcttttttagaatggaagaaagttttttgacttaaaaaaatgaatatgcttcatgttttagagcaattttaggtttacagaaaatggaacatagtgtagagcattccgggatcacgttacatgattatttgttttgttttgtttgagacggtctgctctattactcaggctggagtgtggtggtacagtctcgatcttggctcaccacaaccttcgcctcctgcgctcaagtgttcttctttctcagcctttccagtggctgggaccacactcagtaaccaccacgcccagctgattttttgtattttttttttgtagagatggggtttcaccgtgttgc

SEQ ID NO: 203514 - DNA, 563 bp, Homo sapiens
atggccaaagttaagaaggtgatatcatcaagtgttgatgaggaagtgcaaagcttgcaagtctcacacactgctagtaggaatgtcaaatgatagtcattttgaaaatggtctgctagtttcttacaatgtaaaaagaaatataccacatctcagcaatttcattcctagatatctacacaacattacttgaaaagatatgcccatacaaagacttgtaaacaaacgttcacagcagcacagcagcgtgattcctaatagcctcaaatataaacaatccaaacatccatcaactggtgaatgaacaaaatgtggtacatcacacaacacagtatacacagcagcaacagggaatgaacagatacacccaaagtggctgaaacttaagaacattacattaggcgaaagaagacacaaaaaattacatattgcgattccatgtatataaaatagactttaagtcaaaaactgtaacaagagacaaagtcgttatagaatgatacaagggtcaattcattgagaggatataactactgcaaatatatattcccccaacattggag

SEQ ID NO: 203515 - DNA, 182 bp, Homo sapiens
tagagtctttgaagtgatgggtatgtgtgtattggcagagttgaagataaacaatgccaaaagacctctaaaaagattagactgttaaccacaaatacgcggtttcagttgagaagatttatttatggtaattttatccactagcaaatcttgatttagtttgatagtgtgtagaaattgaa

SEQ ID NO: 203516 - DNA, 516 bp, Homo sapiens
ctgtaaggattgcatgtccaaaaaattatgatagttggcaagatcaagtctccataaaaatggtaggtcggaggaaaaaagaagtggaatcaactgtttttaaaaatcacggcaaataagctttctagaaagtattaactttctgccttaaaaattgtccatgaaaggaaatacttctccagtgagcagcaaaataccgggaattctgtacccaaactggtgttaaaccctggctctccctcttgttagttctgtgagtctgggcaagatcctttactcctctgtgcctctgttttctcatctgtacaatggggatgataatagctgcactaactttgtggaactgttatgaagattaaatgagaaaatacttgttaaaaaaaaaaagacagttctcgtagtatggtcattgcaatattctaagataaacaactcacctttctaggctgctctcttaatttgctgaagcagattcccccaagtgtcatgttactcagattatgtccttttcaagtt

SEQ ID NO: 203517 - DNA, 529 bp, Homo sapiens
tttctcacgtttcagttcagctcactttgttttccgtccccctccctctactgtaaaagtatgtactcagtgtttcatttcctgccggatctgattcaggtcagtgatgaagatctttgcgagctcagtggggaggcgtttcctccctttcataccggccctgcttagggatgcatggttggttatatacttgcttcactcggttaggcatggaggagaattcattcagacctcataggtttaaatcaaatgcatgacccttcacattttccagagatttagacagttacagtgagacaattaaacattcaccccacaagctgcacttggagatgtgtaagcagtaatgtagtcatgcgctccccatgatatgagagtgtgcagaatgccactccccacagcaggtccaccaggacctcctcagggagcatcttgcctacaaaatcacccatcccttttcccccactttcttcactttccctacgtttccactcccacacccacaaataaacaaagaaactttgagctt

SEQ ID NO: 203518 - DNA, 1198 bp, Homo sapiens
agttcgacggagactctcaagagggatcagaccatgaggggtttgccttcctgaatgaattaatgccattattgttatctctggagtgggctccttataaaagatacatttggccctcctcttgccctttctttgcctttctgccatgggatgatgtagcaagaaggccctcatcagatgccagaccttccatcttggacttcccagcaaccagaactgtgagccaacaaatatattttcattgtaaattacctagtctgtggtactctgttatagcagcacaaaacagaccttagtgtcttaacacgatacatatatatcctatctggaagcaaatgagaggattatgcctttgagagccagatggaataacttattagttttttaatttgtctggcacattatttatttttgacacaactagtgaacaactagtgcaggttaatggtagagcaatctacatctatagcaacaatgccaccaccaacaacaaaatcatagcaattcacttttctgaaaattaaactaaaactagatcttctcaacagagaagcccaataccagatatcaagagaataaggaagtggtctgaccttttagaactattgatagcacttaaaagttaaggagacacttgcagatcttatgatgagagtggtctccttataaaaatattatctctccccctattaaaataggactcccccattgcacatagaaaatagaattcaggccaggcgcagtggctcatggctgtactcctagcacttctggaggccaaggctggcatatcgcttgagcccaggagttcaaggccagcctgggcaacatagcaaaaccccgtccatctctacaaaaaattagccaggtttgctggtgcgctcagctacttcggaggctgaggtgggaggatcacctgagcccagaaagtcaagactgcagtgagctgagattatgccactgcactctagcctaggcaacataacaaaaccctgtaaaaatatatagacagccaggcgcggtggctcacgcctgtaagcccaacactttgggagatttagaccctagcagtttgactcctgaggccatgctataaactactaggttacatgagatgtatactaatctacatgagtgtgcttatttcagagtgttatatggtatctgaaaatgggacgtggtattatgagactgtgaa

SEQ ID NO: 203519 - DNA, 367 bp, Homo sapiens
tgctctagaggatctgtcacacgggttcgagttcataaaagtggtaatactttcacatattttgagcattctatgtgacagacagttcaacactctacttgtctcagcaatgctctgaaatgggtactatcattatcactattttaatggcaaggaaagtaaggcagaatgagattaagtaatttgcccatagttaaactgccagaaagtagctgagctgggagatttagaccctagcagtttgactcctgaggccatgctataaactactaggttacatgagatgtatactaatctacatgagtgtgcttatttcagagtgttatatggtatctgaaaatgggacgtggtattatgagactgtgaa

SEQ ID NO: 203520 - DNA, 313 bp, Homo sapiens
ttcctgtcgcaggatcctatctatacagcatattatgtttagtccccatgtactccttaggctcctcttggctactaagtcttttgcaacctaacatttattattattgctttcagggccagagttcataaaagtggtaatactttcacatattttgagcattctatgtgacagacagttcaacactctacttgtctcagcaatgctctgaaatgggtactatcattatcactattttaatggcaaggaaagtaaggcagaatgagattaagtaatttgcccatagttaaactgccagaaagtagctgagctg

SEQ ID NO: 203521 - DNA, 569 bp, Homo sapiens
tgtcctgtacctattaagagaagctatcaatatactttgtcaggataaaattcaacagaactgttttagactaaagattttagggaccacaaggaatttcccagtgggcaaattgtgagggaggtatttagcttttaaaaaaatctttgtagctatctcatttagaaataaaatgggaggcagattgcctgatgcagctcctaacttgacttttcccttttacttcataattttggggtcctgaggtttattttcctttcacagaatataaacatgtacatacatttattattaaaaactctgaaggaaataacaggttttgtgaaagagaacacagaagggaatccgatttagatcaatgttcagacagccctggttgaggaagtaacaacagaagagggaaggaggatccaggcctcagaggtaccagactgtccagtcaggcagccagtgggagtactgatgaaacacctactgtgtgcaggctactattctagtgctggagacagccataaataagacagatggactttctactcagaaagagttggatgaagagtaagtccaaa

SEQ ID NO: 203522 - DNA, 1306 bp, Homo sapiens
aacccacagcaaatagcgggaagcagaaaagcaagagaggaggtctctaagtggatacactgttgctgagtctagacaccagaagaacgttgcaggcggcgactcacagttctagcactgcctaggagagcgtggtggccccagctcagaatctgcagaagtgcacagctccatccacaccactcagggtatggagcctccggaccagtgtagccagtatatgaccagcttgctcagccctgcagtcgacgacgagaaagaactacaggatatgaatgctatggtgctgtcgcttactgaagaggtcaaagaggaggaagaggatgcacagcctgagcctgagcaaggcacagcagcaggagaaaagttaaagtcggcaggagcccaaggcggagaagaaaaagatggcggcggagaagaaaaagatggcggcggcgccggagttcctggccacctatgggaaggagacctcgagggcaccagcggcagcgatggcaacgttgaggacagcgaccagagcgagaaggaacctgggcagcagtattcgcgcccacagggcgccgtcggggggctggagcctggcaacgcgcagcagcccaacgtccacgccttcaccccattgcagctgcaggagctggagcgcattttccaacgcgagcagttccccagtgagttcctgcgaaggaggctggcaagaagcatgaatgtgactgaactcgcagtgcagatttggtttgagaatagaagagccaaatggaggagacatcagagggcattaatggcaagaaacatgctgcccttcatggcagtgggccagcctgtcatggtaaccgcagctgaggccataacggcacccttgttcatcagcgggatgagagatgattacttctgggaccacagccattccagcagcctgtgtttccccatgccaccctttcctcctccgtccttgccccttccactcatgcttcttccacctatgccacccgctggccaggctgaatttggcccattcccttttgttatcgtgccttctttcacattccccaatgtctaagggatagcctctgtgccactttttgccagagtgtctttgagccagattcatattttgcatagcaccccatcaaaagtagttcatcaaatgtctattaaacgttttaaagaaaagtacatcattgacccatttttagggcacttgtaaaaatgtttctataaatatgtgaagggtatgtacatttgttttgtgtgtcacatggggtcagtaagttctcaataaaaattgttaagaaatgccattcaaacc

SEQ ID NO: 203523 - DNA, 412 bp, Homo sapiens
ggcatctcctttatttgtggcatgagagaaatgttcctaatgtgaggctcagctgggtgttacagaacagcctactgggtgtggggagttggtagaataaaaaaattaaacacaagaatgaaacgacacccacaactccaaatgctgaacacgtgtggtttcttccatagaaggaggctggcaagaagcatgaatgtgactgaactcgcagtgcaggtcagtaaaccgaaaaagcaatcgggcaggggagccattctaaaacccgcttcagggcttggacacactttgacccagacattgccatcttggtgtttttgtggcctttttcatgtataggcaatgaggtctgaactttgggatctttgtggctggaaaatgcagtaaggaaagctcagcttgtggaaatttccca

SEQ ID NO: 203524 - DNA, 569 bp, Homo sapiens
acagttctagcactgcctaggagagcgtggtggccccagctcagaatctgcagaagtgcacagctccatccacaccactcagggtatggagcctccggaccagtgtagccagtatatgaccagcttgctcagccctgcagtcgacgacgagaaagaactacagggtcagtaccttgatgggacacatgcttttgcgaactcaggaaaccaaggttctctgggagaggcgagtagactggatgatacccctgcactaccactgctctcagagtgtagcccctcaccacctccttccaacaccctcaggaccaatgccttgatctttctcttggggtttctacttttccagatatgaatgctatggtgctgtcgcttactgaagaggtcaaagaggaggaagaggatgcacagcctgagcctgagcaaggcacagcagcaggagaaaagttaaagtcggcaggagcccaaggcggagaagaaaaagatggcggcggagaagaaaaagatggcggcggcgccggagttcctggccacctatgggaaggagacctcgagggcaccagcggcag

SEQ ID NO: 203525 - DNA, 275 bp, Homo sapiens
aataatacatgtgaaacatcatacatacgctttccctgtctcagggaatgaaggatagctgtaaaaatattttgaactataaataattaatcataaatttcaactgatttgattttgcaattttaattattgagaacagtaagtaaaaaagagatagcttattcatgttaaagaatataatagacaaacctgtgctactctttcttcttctactaatcaatcacttactcaacaaaactgtaaaattcactaataatcttgccttttacatttgc

SEQ ID NO: 203526 - DNA, 316 bp, Homo sapiens
cacctgtccacgacgcaggatcccaaattacccactgcctttaatgacaaatgccgtcatgattcggttgtcgtctgagggtgggggtgggataaactcccttcaaagggggacctggatgaaaattacctctaacctgttaactattctaagagatcacagcatcagtgtgacagaaccaaacaagcaagtagctagaatacagcaggtgctccacacacatgagctgaagatggcggtatataggctgagcaagaggtggtgaggttgatcggggtttatcgattacagaacaggctcctctagagggatatga

SEQ ID NO: 203527 - DNA, 519 bp, Homo sapiens
caactaaaaagctttaataaaagccagctaaacctattggacatcgtttcttttgatgtttaagagatgatattgatgaatgagatataaaaatgagaatataattaatttcagtgactactttagacattcattcattccataaatatttatcaggctgcttttctgtgccaggcactgttctgcacactggagatacaacaatgagcaaatcagatttttaaaaagcaaaaaattggctgggcacagtggctcacacctgtaattccagcacttcaggaggctgaggcaggaagattgcttgagcccagaaattcaataccagcctgggcaagataatgagaccccatctctgcaaaaaatgaaaaataaactagccaggtgtggtggcatgcacctatgcccccagccactcaagaggctgaggtgggaggatcacttgagcccaggaggtcgaggctgcagtgagctgtgattgcactacactccagcctgggtgacataatgagaccctgtctc

SEQ ID NO: 203528 - DNA, 1008 bp, Homo sapiens
ggacctgtcctgcctactgccactccctgccttggtccttcaattctgcacgtcacttcacccccccaggcctgggggcaatctatgtcctgtccagctcacactggggctccctggacttgggggctgacatggattctctaagccttctgcctggttgagaggctgatgcagttcaacaggtggacaaccattttacaaaaacaggagacggaactaacacattcttccgtcctgttgaaggtgccaagtcactgttacaaaggcttcccacaagatgggcagtctccccatcaacctctgacagccacagcaaggctctcagtgcctgagcagggactccttggccccacctgggctgtgggatccagggaagccaagggcaacaagaagactgggaaggggacaaggaacacatggcgcccatgaagtaagagcatctgaccctgtaggaaaggcagaagacagacaaaggaaacagtgggacagcagacagacacctccttcccctgcaaagtatacactagttaaacacagagcaatcctgaacaacacacacgtatatactcacactcatacgcatgcacagttttcatcccctcctcctacttctgagtcttgctcaattgtctcagaaaacatctttctggccaggagcagtggctcacgcctataatcccagcactttgggaggccaaggagggaggctcacttgagtccatgggttcaaggctgcaatgatcgcaccactgcactgcagcctgggcaaaggggcaagaccctgtctctaaaagtaagaagaaaaaaagtctttcttctgcatttaattctgaacaaaagaacagtagttctcaagagcaatcagcgtccacacagctactgatctacttgtctcaagaatatggaaaaccacaaagtatggttttcagacacaagggccggaatcaccaagttgtagagcatgtgaaggagcccagagccctgctgagtctcacacgcattcccacc

SEQ ID NO: 203529 - DNA, 304 bp, Homo sapiens
cggtccccatgcacagttcggtccccatgcacagttcatggcttctgctctcttcacctgggcaaaggggcaagaccctgtctctaaaagtaagaagaaaaaaagtctttcttctgcatttaattctgaacaaaagaacagtagttctcaagagcaatcagcgtccacacagctactgatctacttgtctcaagaatatggaaaaccacaaagtatggttttcagacacaagggccggaatcaccaagttgtagagcatgtgaaggagcccagagccctgctgagtctcacacgcattcccacc

SEQ ID NO: 203530 - DNA, 919 bp, Homo sapiens
tctcaaaaaaaaaaaaaaaaaaaaaagaactataagtcagttattatctcccaacatagctcttttattttatttttaatttttttaaattatattttaagttctggaatacatgtgcagaacgtgcacttttgttacataggtatacacgtgccatgggggttagcccttttattaactgttctctgaaccgcaaccatctcctgatatttggtagagtaacacctttatatgtgtgcttgcctcctaatttaaaatactgtattcacatgtagatataatgtacataacagtttaacttcaaagttgctggggtcagggccccctgcacttgagacactaatacagagtgtgttcgcgcttagccatggactggactcaagaacctgataccagggttgatgtggattacctggaacccttcctgcagtattcctacagtgtttttattttgttgtcattgtgtgtgtggtttgtgtgtgtttttaaggagaatcttgttttaaaatgtaatttctaaagttgaacatgaatgttttatttgttgtacagtatatattatacaatagagaggtaacttaaacatttttgttcttattctttttctcataagtactcctgagtactagtggtcacttcccgtagtattcatttggcttcactgtcaaaaatcattattctgtgcagttgtggccctgggaaggggaaataataaggccctattgacgggctgtcctggctctggaattcatgcatcctgtccttgccaaggttctggcagggcccgctggtgtgttggagcctgcaggtcaggtcaggctggttcagaggtccatgctgaggggagggcactcctaagtggtgtaaagcctcaagtccatgaatcccaccccagtcatctctggtgtcacgtgctgct

SEQ ID NO: 203531 - DNA, 432 bp, Homo sapiens
aacatgttttagatatttcccaagcatatcgtttgaccgctagctagaggtgtgactgaattggattccataatccttgtctgaatcactgcttaataatattagtaggttctatttatgtaggtcttgctctagcccagagatatacattaactcatttaatcctcacaacaacttttaagttataggtagtattgtcctccctgttttacattattacataatgaaaagttaaagaggttaaaatcataccttaatagatggtagaccatagattgttgtccaggtctttctaacttcccagcccatattcataagcgttggactttattccttcttttctgtggccataaaaaaggctaaaaataaattaaaaagacttgatttaagtatggtattgaggtttgaataaggaaaaaaatgagtggaata

SEQ ID NO: 203532 - DNA, 639 bp, Homo sapiens
aggaactgtttcagttggccctccatatccatgagttgtgcatctgtggattcaacaactgtaaatcgaaaatatttggagggaaaaaaaggatggttgtgtctgtactgaacatgtgcaggcttttattcttgtcattatttcctaaacaatacaatataacaactgtttaccagcatttacactgcattagatattagaggtaagctagattatttaaaatatactagaggatatgtgtaggttatatgcaaacactacaccattttatatgagatttaagcatgcatggattttggtatccaaggggagtcctggaaccaatcccccacagatactgagggacaactatacttaatacagtatcttccagactgtaataatgattgatatgttcaatgccattcttacgctctcatctttctataaaactttttaaaaaattaaatatatccttattgtctcaagaaactgctttatccccatgttttctctcatttaatatgatgttgaattataaaaggcttatagagacatgtgatttgtagacagtgatacacaaattcaaagtggtaaaattttaggacagagaggcaatgctaagtggttattaaaacataaactcttatcaaatgaaaa

SEQ ID NO: 203533 - DNA, 203 bp, Homo sapiens
agggttcctagtggcaggacagtttaaagtcaggcagcgacgccattggcaccagttgtgtggtctgtacaaaagggactggaaggaaatggaataagtctcagtgctttcatctgcatgatgggcatattaacaggctctatcacacaggtctatggaaaggattgagatataaaaagatcatacatttatttttcttaatt

SEQ ID NO: 203534 - DNA, 328 bp, Homo sapiens
acacctgggctgagtcctaaatgacaagagctagctatgcaaagaactagggggaaggcctgtgtgtctccccaaactagaatgtcaggtcacaccattgttgtattcccagtgcctgaaacagtgcctggcacatagtagaggctcaattaaatgtgttgaatgacagtgttagggctcagaaactgataccccacaatatggtgtttggacacactgaattgaagaagcttccaggtctttctgatctctcccaaagtacaagatgaagtcaaagttccttgatttgcctaagatccagatctaccaaggagatcagctgttgttc

SEQ ID NO: 203535 - DNA, 126 bp, Homo sapiens
gaaaactcagttctatagacagatttaggcagggttaattattgaagaatatagctatttggtgtgaattgagttatctctatagacaaaggaagagagttgtgtgtgtgtgtgtgtgtgtgtgtg

SEQ ID NO: 203536 - DNA, 684 bp, Homo sapiens
ctacattccagcctgggtgatagagccagactttgtttcaaaaacaaagcaaaacattatgagatttttttaacagctcattagctattgttagtgtattttatgtgtggcctgagacagttctttttccagtgtggcccagggaagccaaaagattggacatctctgctttaggtaatagatgtttgccttgatgttgccagtagaatatttcagtagaacagttacagatcttccatctttttgctgaatagttagttgtattaaataactgaatgaaaaataatgttctgaaggaataactacaggtgggatgattagaaatgtctgttgtcttttctgtttgttggagtaaatgacaggaagtaacttgaagaacatttgactagttttcttataattgttagttttccaattttgttgattagtttccattaatatggccagcatttgcattatctggaagttttatacatattcctaatagaaagttttcatttgaacatttttgtattttagtattaatttgttcctctcttcaatatctttgatttcaagttactgtgctatgaaaaagcttaaggctgggcatggtggctcacactggtaatcccagcactttgggaggccgaggcgggtagatcacttgaggccaggagttggagatcagcctggccaacatga

SEQ ID NO: 203537 - DNA, 151 bp, Homo sapiens
aatactagtagtcataaataaatccctaaggatccctgtgaacacaaacatgttgccaaactttcagataatcacacttcagctaacccttaattaaaatttagattcagttgtcctttaattcaagcagccatactcattactgattctg

SEQ ID NO: 203538 - DNA, 511 bp, Homo sapiens
gatgagaaagtgatcccttctctccattcccactctttctttttcttcctctaagtacagagatggaaatgagccaggcactaggccccaagcttggagggctaatactgacctctttgacagagaagctggcttcaaatggattccatagaggttcaccagagcccctcacctggaactctctttccctcctgcaaacatttattgagcagctactatataaacgttttctgttacacattgagaatacaacagtgaagatggagcatgttgccctccttgaatttctagtctagtttatactgcagtgttatgatgatgtgagtaggaatgaacattcttggtgaactcatagaagggaacttgatgtagacttgtgaagtcaaggaaggctccctggaaggagtgacatttaagcagaaacttctggactaagatctggactaagtgtgggcaattggtgtgagaggaatagggaggaaggaagagagaaggaggaaaagcaggggat

SEQ ID NO: 203539 - DNA, 411 bp, Homo sapiens
gcgcttttcacaggtactcacaaagttccctttctttactttcggacagtttcatcgtgaaaggtgggaggggtgagggaggaggaaagcaggggttatggattcctatccatggctggtgatagagccaaggcatggggtggaggtcgtcggcctctgtctctagaccagctgtttggaaaagaagcggaggaataatggatgaagagcccttcgatgcaggcaaactttaggatgtattttttttcaattttcaagtttttagttaaagctcctctcactgtgaaggcagaaaaattaaacaaatgccaagctcacaactctatgtcttctcataggaatgggtatctccaatcacggttccttggcagcccagtgtagaaaatgtgaagaggagataaataaaaggaa

SEQ ID NO: 203540 - DNA, 242 bp, Homo sapiens
aggaccggccccggctgagcccccatcagctactctaagttaaacactcaggactccagccactcctaaagctgccgcctctgcccagcaagaggacaagagcagagcttcaagaacttccctttgaagaggctctcttcactagtcccgggacacagtcaggaaagggaaggcaaaccttttcccctctctataaaaggtttgcttactgttaaaatattaaacatcacacatatcattga

SEQ ID NO: 203541 - DNA, 401 bp, Homo sapiens
taagtaggagtgcgagtattctacacacccacccagaacacaactccagtgcgtaggctggagcaagtgctgacggggaaggccttgggccctgatagggctgcaggaggcaggagccatggccgtagcacccagctggatgcccagcgacaggaggtctcagcactggctaacctgagcctcacacacgggggtgttatctcatcatgcttgccctcagatgcatctgcttcctcctcttgcttcacagtcacagaacagcacttttctggtccatgatccacaactctcagtatcttcaaatgccagttccagcccacccactgtcctctagttaggcagacccatccatgtaccacctcgtccctctgtgcctggccctgcatatacactggctaact

SEQ ID NO: 203542 - DNA, 756 bp, Homo sapiens
gaatgctccgacagagctaccaaggaggaggaatggcacaacatgatgacaagattaattagcatctgcaagactggacatggctccccaagggattcttcccatgctctgccatggctgcctctggtaccctccccctgccttgagatgtcacctctgatgtgtctgggtccccagctggcttacaagctcttgtgacatcagtggcacattttgtggcactgcatttagaaaactgtaaagctggtatatgcactagagatctgtccttcattttcttcattttgtatttaatgctgtcctaactccacaaaatagagacctggaaatgtcaacaattggatatagtataagaattttaaaagtagattttaaaagcacaaaggcaaatttaagttcaatattatggataatgcagtattctgtatttagtagcaatgagatctttcagacctttctttattttgaaatatattatcttctaaggagtgtaagaaagatagcctctgtctaaaccaggggcatgaaaattacatcctctaggaatttgaggaaacattgcagagggcatttgactgcctggagtctgtcggaaagataaggctttatatgcttcagtaatatcctagagcaaaataacagccactgttgagcactgatttatgtaacaccccagtgtaccgggcactattgtatatgataccccagcgaaatagatattattaccatcttcgttcccaggattataaagttgag

SEQ ID NO: 203543 - DNA, 344 bp, Homo sapiens
gccaatgttatactcaatggtaaaactaaaagaactttcattaaagtgaggaaacaagacaaggatgtcagctgtcaccactataatgcaacgttgttctgagaactctagccaatgtaatgtaataagaaaaacaaaacatagcttttggaaatgaaataaaattgtcattatttgcaagatattactgatctacaaaatctaagagaaccacctaaagagttattaaaaccagtggaattcagtacagcgacccctataacacgacagattccacatgcaaaaattaacagcatttgtatcaaacaacactttagaaaatctaacagagaatggctgggtgc

SEQ ID NO: 203544 - DNA, 537 bp, Homo sapiens
acatgtgttcactttatgaaaatgcactgaactaggccgggcacggtggctcacgcctgtaatcccagcactttgagaggccgaggcaggtagatcacctaaggtcaggagtttgagcccagcctggccaacatggtgaaaccccgtctctactaaaaacgtacaaaaattagctgggcgtggtggtgcgccagctactcgggaggctgaagcaggagaatcgcttgaacccaggagatggaggttccagtgagccgagatcgcgccattgcattccagcctgggcgacaagagcaaaactccatctcaaaaaaaaaagaaaaaagaaaagaaaatgcactaaactgtactaataatgtctgcctttttcagtctgttagactccaataacaatttttagaaagaactattaaaaagggggacggaaggaaggtgaagaaatataagtgagctcaaattcaacagtgtcaagtgccgataaatctggaagtcacagaataagctcattatttgtaagaactaaaacattgtctttgc

SEQ ID NO: 203545 - DNA, 861 bp, Homo sapiens
tgcccttctcaaatagtggtgagctccacgaggactgctgggatgcataccatgtattcctgactcaggccggcagtgtcctggcacccatggagacccatcgaaccctaacccacctctgagcacacctccacacagcttgagcattgctcccccactacaaactgtttctctgactctgacatcctggccagcctcctgctgaagatgaacattctcctctgtgctgggaagcagttcacctagtcgactggtctgccttcagaccaggtcctgtgtgtcaacctcaaccacagcagctctcattagttgcttagcaatgagacaacctcctatgaaatcataactggaaacaaagtgtcagaggggttgcaatacaattcactacatgcatatgtcctcatcctcgggggatgatctgtcctcgggtaaagctcatctctccagattacagcaaggatgggaatctgaagcccaccacatccttctttccaagtcaaagaacgtaacactgagagggctctgagtgccagcatgtgcagagttggaacctcccactgacagccagaacgatgagccactcccgaagagctgctcctactcaggaccaatgccacactccaggattccccacctcccgtgaaaccagtgggagcatatggcaggccaggatctgtggatctttacaggctctggacacatggcgaacacacatccccagaaagagcccagctcccactcaggcatcacagatctgtctgctgttgcctgaaagcccctggagaaatcccacaccccggggatttcttaaacctttgattaactgggatgctatcctgtacttcaaagaaaagaggaata

SEQ ID NO: 203546 - DNA, 2197 bp, Homo sapiens
  misc_feature (2019)..(2020): n is a, c, g, or t
  misc_feature (2024)..(2026): n is a, c, g, or t
  misc_feature (2035)..(2035): n is a, c, g, or t
  misc_feature (2038)..(2038): n is a, c, g, or t
  misc_feature (2041)..(2041): n is a, c, g, or t
  misc_feature (2044)..(2044): n is a, c, g, or t
gctcatctttcacaaaggccttcacaacctacgaaactacagttcagatttgggaaagcagccgaaaaaggtgcctaaacgtcgccaggccgcccgagagctgtccattcagcgccgttctgccctcaatgtgaggctcttcctcagagacttctgctctgagttcctggagaactgttacaaccggctcatgggatcagtaaaggatcacctgcttcgggagaaagctcagcagcatgatgagacctattatatgtgggccttggctttcttcatggccttcaaccgagctgcctccttccggccaggcctggtttctgagaccctcagtgtccgtaccttccacttcattgagcagaacctcaccaactactatgagatgatgctgactgaccgcaaggaagctgcctcctgggcacgccggatgcacttggctctgaaggcctatcaggagctgctggcaacagtgaatgagatggacttatctccagatgaggctgtgagggagagcagccgcatcatcaagaacaatattttctatgtgatggagtaccgagaactattcctggcactttttcgaaagtttgatgagagatgccagccccgctctttccttcgtgacctggtggagaccacccacctcttcctcaaaatgttggagcgattctgtcggagccgtgggaacctggtggtgcagaacaaacaaaagaaaagaaggaagaagaagaagaaggtcctagaccaggccattgtttctggtaatgtcccatctagcccagaagaagtggaggctgtgtggccagccctggctgagcagctacagtgctgtgcccagaattctgagctcagcatggactccgtggttccctttgatgcggcctcagaggtgccagtggaggagcagcgggcagaagctatggtacggatccaagactgtctcctggctggccaggccccacaggccctgactctcctgaggtctgctcgggaggtgtggcctgaaggagatgtgtttggctctcaagacatttctccagaggaagagatccagttgctgaaacaaatcctctctgctccacttccccggcagcagggcccagaggaacgtggggcagaggaagaagaagaggaggaggaggaggaagaggaggagttgcaagtggtccaggtgtcggagaaagaatttaattttctggactacctgaaacgctttgcatgttcaactgtcgttcgagcctatgtgctgctactaaggagctaccagcagaatagtgcccacactaaccattgcattgtgaagatgctgcaccggctggcccatgacctcaaaatggaagccctactttttcagctgtcagtcttctgcctcttcaatcgtctgcttagtgaccctgctgctggagcctacaaagagctagtgacttttgccaaatacatcctgggcaaattttttgcactggctgcagtcaaccaaaaagcctttgtggagctgttgttctggaagaacacagctgtggttcgagagatgactgagggctatggctccctggatgacaggtcttccagtcgcagagcacctacatggagccccgaagaagaggctcatcttcaggagctgtacctcgccaataaggacgtggaagggcaggatgtggtggaagccatcttggcccacctgaatactgttcctcgaacacgcaagcagatcatccaccatctggtacagatgggactggctgacagtgtcaaggacttccaaaggaaaggaacccatattgtactgtggacgggggatcaggagttggagctgcagcggctttttgaggaattccgggactcagatgatgtcctgggtcatatcatgaagaatatcacagccaaacgctcacgggcccgaatagtggataaactcttggctctggggctggtggctgagcggcgggagctgtacaagaaacggcagaaaaagttggcatcctccatcttgccaatgggcggagccctgaagatttgccggannctgnnnagaggaacngcnganaanggaaagaaaaaggggccaacaaacgccggtgtttccttaggaaccttgacgctcaaaggttttccccttggtcaagctccctatcgagaagtccccctgcccaagtggaaactggcagccccgtgaacaaacccgttagaaacttttgataca

SEQ ID NO: 203547 - DNA, 1289 bp, Homo sapiens
gctaggtacgaggctgggtgttaatcggccgaggctgaggtctgctcggaggtgtggcctgaaggagatgtgtttggctctcaagacatttctccagaggaagagatccagttgctgaaacaaatcctctctgctccacttccccggcagcagggcccagaggaacgtggggcagaggaagaagaagaggaggaggaggaggaagaggaggagttgcaagtggtccaggtgtcggagaaagaatttaattttctggactacctgaaacgctttgcatgttcaactgtcgttcgagcctatgtgctgctactaaggagctaccagcagaatagtgcccacactaaccattgcattgtgaagatgctgcaccggctggcccatgacctcaaaatggaagccctactttttcagctgtcagtcttctgcctcttcaatcgtctgcttagtgaccctgctgctggagcctacaaagagctagtgacttttgccaaatacatcctgggcaaattttttgcactggctgcagtcaaccaaaaagcctttgtggagctgttgttctggaagaacacagctgtggttcgagagatgactgagggctatggctccctggatgacaggtcttccagtcgcagagcacctacatggagccccgaagaagaggctcatcttcaggagctgtacctcgccaataaggacgtggaagggcaggatgtggtggaagccatcttggcccacctgaatactgttcctcgaacacgcaagcagatcatccaccatctggtacagatgggactggctgacagtgtcaaggacttccaaaggaaaggaacccatattgtactgtggacgggggatcaggagttggagctgcagcggctttttgaggaattccgggactcagatgatgtcctgggtcatatcatgaagaatatcacagccaaacgctcacgggcccgaatagtggataaactcttggctctggggctggtggctgagcggcgggagctgtacaagaaacggcagaaaaagttggcatcctccatcttgccaaatggagcggagtccctgaaagatttttgccaggaagatctggaagaagaggaaaacctgcctgaggaagacagcgaagaggaagaagaagggggctcagaagcagaacaagtccagggtagcttagtcctttcaaatgaaaaccttggtcaaagcctgcatcaggaaggcttttctatcccgctcctatggctcagaactgcctgatccgagcagctgatgatcggcaagaggatggt

SEQ ID NO: 203548 - DNA, 2229 bp, Homo sapiens
gctcatctttcacaaaggccttcacaacctacgaaactacagttcagatttgggaaagcagccgaaaaaggtgcctaaacgtcgccaggccgcccgagagctgtccattcagcgccgttctgccctcaatgtgaggctcttcctcagagacttctgctctgagttcctggagaactgttacaaccggctcatgggatcagtaaaggatcacctgcttcgggagaaagctcagcagcatgatgagacctattatatgtgggccttggctttcttcatggccttcaaccgagctgcctccttccggccaggcctggtttctgagaccctcagtgtccgtaccttccacttcattgagcagaacctcaccaactactatgagatgatgctgactgaccgcaaggaagctgcctcctgggcacgccggatgcacttggctctgaaggcctatcaggagctgctggcaacagtgaatgagatggacttatctccagatgaggctgtgagggagagcagccgcatcatcaagaacaatattttctatgtgatggagtaccgagaactattcctggcactttttcgaaagtttgatgagagatgccagccccgctctttccttcgtgacctggtggagaccacccacctcttcctcaaaatgttggagcgattctgtcggagccgtgggaacctggtggtgcagaacaaacaaaagaaaagaaggaagaagaagaagaaggtcctagaccaggccattgtttctggtaatgtcccatctagcccagaagaagtggaggctgtgtggccagccctggctgagcagctacagtgctgtgcccagaattctgagctcagcatggactccgtggttccctttgatgcggcctcagaggtgccagtggaggagcagcgggcagaagctatggtacggatccaagactgtctcctggctggccaggccccacaggccctgactctcctgaggtctgctcgggaggtgtggcctgaaggagatgtgtttggctctcaagacatttctccagaggaagagatccagttgctgaaacaaatcctctctgctccacttccccggcagcagggcccagaggaacgtggggcagaggaagaagaagaggaggaggaggaggaagaggaggagttgcaagtggtccaggtgtcggagaaagaatttaattttctggactacctgaaacgctttgcatgttcaactgtcgttcgagcctatgtgctgctactaaggagctaccagcagaatagtgcccacactaaccattgcattgtgaagatgctgcaccggctggcccatgacctcaaaatggaagccctactttttcagctgtcagtcttctgcctcttcaatcgtctgcttagtgaccctgctgctggagcctacaaagagctagtgacttttgccaaatacatcctgggcaaattttttgcactggctgcagtcaaccaaaaagcctttgtggagctgttgttctggaagaacacagctgtggttcgagagatgactgagggctatggctccctggatgacaggtcttccagtcgcagagcacctacatggagccccgaagaagaggctcatcttcaggagctgtacctcgccaataaggacgtggaagggcaggatgtggtggaagccatcttggcccacctgaatactgttcctcgaacacgcaagcagatcatccaccatctggtacagatgggactggctgacagtgtcaaggacttccaaaggaaaggaacccatattgtactgtggacgggggatcaggagttggagctgcagcggctttttgaggaattccgggactcagatgatgtcctgggtcatatcatgaagaatatcacagccaaacgctcacgggcccgaatagtggataaactcttggctctggggctggtggctgagcggcgggagctgtacaagaaacggcagaaaaagttggcatcctccatcttgccaaatggagcggagtccctgaaagatttttgccaggaagatctggaagaagaggaaaacctgcctgaggaagacagcgaagaggaagaagaagggggctcagaagcagaacaagtccagggtagcttagtcctttcaaatgaaaaccttggtcaaagcctgcatcaggaaggcttttctatcccgctcctatggctcagaactgcctgatccgagcagctgatgatcggcaagaggatggt

SEQ ID NO: 203549 - DNA, 375 bp, Homo sapiens
accaggtaggggtaaaggagggcaatctagatcaaataataagaaggtaatagctactaagaagaattttatggagaaagggacgcgggcgggggatatagggtcgaagccgcactcgtaaggggtggatttttctatgtagccgttgagttgtggtagtcaaaatgtaatgttaggtctacctggccaggtagacctaacaaactgaaattattttaaagttctgatatttagagtgtgctgcctctctacaactaagacctttttgactttaactttatatctgtttaaagaatcaatatcccttcagaggttctacgattacagattgaaattactttttaaaaagttaacgtcccaggttctattaagact

SEQ ID NO: 203550 - DNA, 7222 bp, Homo sapiens
  misc_feature (749)..(749): n is a, c, g, or t
  misc_feature (771)..(772): n is a, c, g, or t
  misc_feature (920)..(920): n is a, c, g, or t
  misc_feature (931)..(931): n is a, c, g, or t
  misc_feature (988)..(988): n is a, c, g, or t
  misc_feature (1494)..(1494): n is a, c, g, or t
  misc_feature (1587)..(1587): n is a, c, g, or t
  misc_feature (2137)..(2138): n is a, c, g, or t
  misc_feature (2140)..(2140): n is a, c, g, or t
  misc_feature (2166)..(2166): n is a, c, g, or t
  misc_feature (2194)..(2194): n is a, c, g, or t
  misc_feature (2198)..(2198): n is a, c, g, or t
  misc_feature (2218)..(2218): n is a, c, g, or t
  misc_feature (2277)..(2278): n is a, c, g, or t
  misc_feature (2413)..(2413): n is a, c, g, or t
  misc_feature (2620)..(2620): n is a, c, g, or t
  misc_feature (3255)..(3255): n is a, c, g, or t
  misc_feature (3312)..(3312): n is a, c, g, or t
  misc_feature (3361)..(3361): n is a, c, g, or t
  misc_feature (3477)..(3477): n is a, c, g, or t
  misc_feature (3556)..(3556): n is a, c, g, or t
  misc_feature (3582)..(3582): n is a, c, g, or t
  misc_feature (3606)..(3606): n is a, c, g, or t
  misc_feature (3610)..(3611): n is a, c, g, or t
  misc_feature (3617)..(3617): n is a, c, g, or t
  misc_feature (3661)..(3661): n is a, c, g, or t
  misc_feature (3676)..(3676): n is a, c, g, or t
  misc_feature (3764)..(3764): n is a, c, g, or t
  misc_feature (3771)..(3771): n is a, c, g, or t
  misc_feature (3777)..(3777): n is a, c, g, or t
  misc_feature (3904)..(3904): n is a, c, g, or t
  misc_feature (3910)..(3910): n is a, c, g, or t
  misc_feature (4663)..(4663): n is a, c, g, or t
  misc_feature (5168)..(5168): n is a, c, g, or t
  misc_feature (6215)..(6215): n is a, c, g, or t
  misc_feature (6217)..(6217): n is a, c, g, or t
  misc_feature (6377)..(6377): n is a, c, g, or t
  misc_feature (6701)..(6701): n is a, c, g, or t
  misc_feature (6726)..(6726): n is a, c, g, or t
  misc_feature (6731)..(6731): n is a, c, g, or t
  misc_feature (6735)..(6735): n is a, c, g, or t
  misc_feature (6760)..(6760): n is a, c, g, or t
  misc_feature (6767)..(6767): n is a, c, g, or t
  misc_feature (6777)..(6777): n is a, c, g, or t
  misc_feature (6789)..(6789): n is a, c, g, or t
  misc_feature (6800)..(6800): n is a, c, g, or t
  misc_feature (6822)..(6822): n is a, c, g, or t
  misc_feature (6834)..(6834): n is a, c, g, or t
  misc_feature (6864)..(6865): n is a, c, g, or t
  misc_feature (6867)..(6867): n is a, c, g, or t
  misc_feature (6874)..(6874): n is a, c, g, or t
  misc_feature (6891)..(6891): n is a, c, g, or t
tgttggcacaagattacaacctacaatttcaatgcccttccctcctacacagctcaaatggaaggaaactgattaacacatagaaaggaacggcaggctcacaggtttaagcatttgtttttacaaaaaggagtgggatatgggggtggtcaagttttacgggtaataacaacattctctctagatggcagggggtaagtctgcctgtcctccattgctggtaccacataagggatacattagtaaagtaaggtaagggttatatgtgtggctggcctgttctttagagaggaaggtgggatggtatctgctgtgtacctgtctcagaccaaacctggggctggaccagtgcccctttcttctcagccctcctccacagcctgactgtactgccagccgcacccatgagaaggaagtgttgaaggaagcctgaagacatccacctcgagaaaaggaaacaggaaaactattccttccgccttctctggaccaaattcactccctcagctccagagagtgctgcaaaaatcttccttagggacgctgtgaagacacggggaagaggccagccctgagcgggcaagaagaaagcttgaactttccatgcagtaccaagcaaggctattttggaaacaagcaaacaaacaaaaaatggaaaccaacaccatataaccacaggttgggtagctcctaaatcctggacagcatttggattgggggtaagggcaattttactccagctccttgtnttataacccgcacaaggtgccnngaggttaaggaccacaactgacctctctttccctacaagcaccattccttggattcccagttttgttgagctcatttgaggtcatccttgccatcctcttaaaaaatgacacagcctcttggttattccattttctatccctttctanaattatgaacncactctctaaacaggagatctatatatgctctcatcctgcaacccaagagattaggngacctaatgatgagaaggctaacttatttgctttcctgggtggtcctgatggaaatgaacagcagcagagttctggtgggatagagcagtctagtctgagccactgtgtgattccccaggggactggtccctgggtacatgggtccctggctctctgtctcagttccacagatattactcaacttggccatttacgcctcagctaaaacatatgagcatgagggaaaagggacaagaaatacttttgtcctctagaaaaacttaactcaatacatcttggctactttgcctcaacccacggggttccctggaaacatttgttgaacttggccaagaggagattgtatatggatggcacacctggaaaaggggagaaagcacactagttcatctcttttataagtagaatggtcccagggatgttaacctttctgatgctgatagtagatgagtggagtggggtaatcgtgaaaacttaaaaacccttaagctgtttggagactacncaccacagtggagcaaaccaaggtggggcctcactgccctcctcagagcccatccctgaccatgtcattggataggatggaagacaaagtctntgaaatggaggctgggctggcaaaagtaagtatgaagatgctactactggccttccacttcctctctctgatacacctaagaaggtgagagacactagcttcaattccattttacaacagttctcaacaacctgaaatattcttgacttccttaagcacatggaaaactggtaagctatatctttctaactgaaattttacttattctaaccaaccttttctttgattatcaaccagtttgacagtcttcagatcacaaaacaatagaacagacctgacatttacaaaactgtactacatacttatttcttttacagtagagctgaccaattacttttctaactactaatgcaacaccatgccactgggccctggactctgatgtttctgatccctgagcaacacatctatgtccattcacagatggaaatgaaagagtgagattctcagaggctaaacaacattctgggaagcaaattggatttttgaagggagagtcctccttagaaaattctggagccaaacatgctcccagtcacgagggaatggnntnagccgggccaggtttcctgtctgtgngctatagctcccttcctgaactccctcntgtnctttgggaaggacacaagcntcttgctcattaagcaaaggccctccaagtctcctttttacttcagcactttggaaacnntccaagacttaacttccgatctggggaggttctacgtggagcagacctatcccttcttattcctgttcctgggtgtctccataatcagcctctaccttccctggcataagtcatatctgttatgctgcaggaacngagtaaccaaagctagatatcccttggaccactgattagtgacacattttctccacaacaaagggaggttaaagacaaaggtttaaccctgagaaactttttttttggcaagataataaagaggttaaagaggctacgtggatctgtcactgctttagcttaccattttcaattcagcaccaaagtgctcagaaagacaggctcagntcaggacgacttcttaaagggatacacaggcaatattactggcaaaatgattttccaaagctgagccacgcgccccaccctacagggaggggagtagaatcttatggcccagcattggcattgaggcatcttgctttttttcctcagaattccacaaaggcttaagagtgatctaaatgcctggctggaagctcaagtctaggagagctattttactgcactgttgagatgttctctgcaaggtagtcacagataataagcaatttagtagataattattctatacaagaattaatgttctctgaaacagtgattaatagaatcttcacatctggcctggctgggaggcttgggggcaggaaagggagggtggaaggatgggtagcacatcaaaatggtgatgaactggcaaaacgacaatgctgctgtttttgtatcctttaaagcctatatcccagggttttaaacgacgccgggggtgtgcttcacatctggcctggctgggaagcttgggggcaggaaagggaaggtggaaggatgggtagcacatcaaaatggtgatgaacctggcaaaacgacaatgctgctgttttgtatccctttaaagcctataacagtttaatgacgcttttttngtgtgcttcctgataggaagtcaaataagttttagtattaagaactggggatataanccaaaggaaacctagagtcaactgactgctggaggaacagaagcaatgnctttctttccacccttcttagatagtaatcttacttttgttggctaaaagcactttcttcagcattctgagttaacacgggttccctataagctcccctccccaggtggacagtcntattttctaagacaagctcaaagctcaaactcaccaaattaccactataaacaaagcttcagggaagagacataacctnacttcaaaagcttcaggtcagagacngccaaaatcatgtgactgctagcntcanntcaagnagtgtgcccaaatcattcacaaaatgggattccctttccttttnttttttttttttttngagacggagtcttgtctgtcgctaggctgcagtgcagtggcgggatctcggctcactgcaacatccacctcctgggttcaagcgattntcctgcntcagcntcccgagtagctgggactacaggagcgtgccactacacctggctaatttttgtatttttagtagagatggggtttcaccatattggtcaggctggtcttgaactcctgaccttgtgatccacccgcntcggcntcccaaagtgctgggattacaggcgtgagccaccatgaccagccctccatttattaatttataaggggactagaaggacaaactatttgattaatttgaaggtgagaggtatcattttctcagatgctccaactaggcttctcacatccctcaaaggttatcagctaaagacaagagtttctgaggctaatgcaaaaacatggtcaaatgtgaaaccgcccttttagaggcagggtttgtgaaaggctgctggcctccaaaggagagtatgcctaaactctctgggctcccaggacctgtggtgacctcaagctaacctgatgcacagacaacagtatcttttagggactgcagccaatgttccccaatttactttttttttataccttaaaatatcaaatgtttcatttttaggtgatatcccaagtgacacagaaacacagctcctccggatggtgaagtctccgctgcaaaactcacgaaacagcacagaggatgactctagggtgctctcccacttgctccaagttaggcaggtgccctgatggaggcaaggctgagccattaacatgcacagctccatatcctggaagcctctgtagccttgaggagataggctctatccaacaggactcagaataaatgactgccacctcaactgagcagtatgaactgcccacctcaactgggcagtctgacctcttccacagtctttaagaaacagaagagccatttgcattatttaatcaccantcaataatctcctccctccccatagctgcttgagttaactgtcccacaagtgtcctgtgttttgtaaagatgagggttattttctgaaatgcagatgggactaggatgaagctgtattatcaattacagagacagccaactctcatttctcttaaagcaaaaattcattccactgtgatttctccaggtatttcctgcaattctaaatccgcccttgatattagagaatattaaaatcacacagttgtggcaaaaatcacattgtggctattaaatcctttttgtgaactaaaaaaagtgaatgtggcttaggctaagctgtttttttttttttttttttaaagatgaggatgcggactccaacaaaggcattaagaaagtactagatgaaaatgagaaatatgtgaaggataacatgtgaaatgtacactcaggtctaacaaatacctattatttctctggttaagaaggtttagcaggagcctccaatgagcactgtatgtanagaaaagggaaggagcaggaggaggaacagatctgcacagaatttttttcttaaaaaccacaaagggtgacttttttcttctaagcaagcaagcctgagaggcattacatgggctggctcctaatatcaaaacaaaatatttctttgccacaaaggaacttgactatgtagcaacacatttacaaaactactgcaaaacactcccagagggcagtgacctactctgctccccagaggctccaagaagcaaggcctcaagtgcctcatgttccatggggctgtgcagtgcaatgcagaaggcggaaatcctgctgtgacgccaccctcgagaccttctgcagcctgagagggggtgatactcccacaccctttgatccttccagatggctcagcctagatctagcagtgagagagccctctccatgcagggcagatggagtggtggacacttgtgaaaacaaaacactaactgttccatcctgttatatttgctgtgaggaaaattaagattcctgttgtatgggctgcactgtttctggaagactacagaaaatctaacatggttgacacttcctggtagcccttctgtacatacacacacacacacccagagagaagacagagagaaaatcctggtccaaagatcacatgaccttactagtgtttccccaatgactgtaatttataaactaaaaatttttacaaatccactgctatcttcttctgtcctgagtttggtagactttaatggatgctccagcaataaccagaatctaggacatgcagactcactgtgagcgagaggctagggatctgccctaaacataggaacctgtttctatcaagcctgaatgaggtcagctctggtagaattaatgacaaatcaatgtcagtgaaatattctgcaaacagggtagcttttgtgctttcttttgattattttctttggggagataaaggtattgcaaccatgggtctaactaatctatcactaaaggactgtgacgacattcctcagtaaagacagtcatggtgtttactgtgccnanggagggaaaatcccagatcatcagaatcccagtgcaacagaaaacagcaccagtttcaacaattctgatgttggacaaagcctctttttgtcagttaagaaagcgtaagcacaatctctcagtcaattgcattaacaggatccattcatgtcactgaaanatacttcttggcacagttcactttccgtgacccaaagacaccaacaacaatcaaaactgcactttcagggtagtatattgttacactagcccagtcaaaacatactcagaacatttaaaaatgtataaattactgttagcactgcagttccgttttattgtcttatttatttattgagacagagtcttactctgttgcccaggctggagtgcagtggcatgatcttggcttactgcaacttctgcctctcaggtttaagcaattctcatgcttcagcctaccaagtagctgggattacaggagtgcaccatcatgcccagctantttttgtattttagtagagatgggnttttnccangttggtcaggctggtctcaaactcntggcctnaagtgacccncctgccttggcntcccaaagtgntgggattacaggtgtgagccantacacccagccntgcagtccctttttaaagagtactgactgnntncctgcanagtactttcaaatccanaccataaaggtagaatttatctggaagaatgtgttttttgaattccacctggcacttggttaaatccactttattttgccctttatttatttgaacagaactttagaatgctctaggtcaggaaaagaaacagtgtgttcgtttttaagaaggatgtgtgaatagtaagttggcattcagactcaagtcccatggtattgttcttatccaatgggacctctccttgggaatataattcctttaccagaggtatcatggtatcccaagaatataactgctcccttggctctgtgtgtgaagattgggggagaggatgtaaactaagagtata

SEQ ID NO: 203551 - DNA, 156 bp, Homo sapiens
ttttgaaagttactaacttgctatatttactttggtttctgtttgaggtatacatatgttttaagaaactatcaatggacatcttcaaacaaaaataatagaataaatgacccacccactaggtgcccattttccaacttcagtgattatcagaga

SEQ ID NO: 203552 - DNA, 577 bp, Homo sapiens
taccttggaatgttgatagaatatgaaattgttgtaatgctgaaatacaaatcacctatttattaataagttatattctaaaaatatttacaaagctttttagagcaaggaaaactaaaggtagcttccagaaacctaggtgagagaggattgtggggaggtctcaggcattgccattagctactaattgatacttggggccagtagcaaggtaactccagcttaaatgatgaagtttacattctaggattggaggaaattgcttgtttcccaatgtaaaatttgctaattttaggttgtcttccttgatatgatattgagataaaagctgtgctacttgtggcttattaaagtgaattgtaccatatagtggctatatagttagggttaggttgcaggttgtgttttatttcaatgaatgataaaataataatttgccatgtcttctaataagagtgaaaaagtgaaaatgaatctgtatgcaacattatttttatttcttaatacattttgggaaacttaattgcaactgtgtggttcagggatttagtgcaagaagaagaacagttgatggaag

SEQ ID NO: 203553 - DNA, 431 bp, Homo sapiens
tcagagggagtgtggccccaccaagaccttgatttcagacttccagcctccagaaccgcaagtggatgaatttctgttgtaaaccacccagttggtagtggtttgttgcggcagtcacgggaaaccattataccatagccctgttacatgcggaatctctcagcagcgcccattggtgcttgacacccagagatgggggagtggggtccactggccatgatgggcacactggttcatacctgttgacaccccaggccattcagaaatgtctccagccttaattcattgagttcaacctttaagaggccttaggccaactcagtcacctcactgctcagacaaagaatcagaggcgtcagcatagccagaggacacctgtaatcatgtgtttgatggtgatgctcaaagattaatggggagcttgatgaaga

SEQ ID NO: 203554 - DNA, 455 bp, Homo sapiens
tcagagggagtgtggccccaccaagaccttgatttcagacttccagcctccagaaccgcaagtggatgaatttctgttgtaaaccacccagttggtagtggtttgttgcggcagtcacgggaaaccattataccatagccctgttacatgcggaatctctcagcagcgcccattggtgcttgacacccagagatgggggagtggggtccactggccatgatgggcacactggttcatacctgttgacaccccaggccattcagaaatgtctccagccttaattcattgagttcaacctttaagaggccttaggccaactcagtcacctcactgctcagacaaagaatcagaggcgtcagcatagccagaggacactgtgcacctggcagccccctggggccactcatggcccctccagggacttggcagagttaacgcaccctcccccagatgca

SEQ ID NO: 203555 - DNA, 469 bp, Homo sapiens
tttcaaactatataactgagccttatttataattagggatattatcaaaatatgtaaccatgaggcccctcaggtcctgatcagtcagaatggatgctttcaccagcagacccggccatgtggctgctcggtcctgggtgctcgctgctgtgcaagacattagccctttagttatgagcctgtgggaacttcaggggttcccagtggggagagcagtggcagtgggaggcatctgggggccaaaggtcagtggcagggggtatttcagtattatacaactgctgtgaccagacttgtatactggctgaatatcagtgctgtttgtaatttttcactttgagaaccaacattaattccatatgaatcaagtgttttgtaactgctattcatttattcagcaaatatttattgatcatctcttctccataagatagtgtgataaacacagtcatgaataaagttattttcc

SEQ ID NO: 203556 - DNA, 1006 bp, Homo sapiens
tttcaaactatataactgagccttatttataattagggatattatcaaaatatgtaaccatgaggcccctcaggtcctgatcagtcagaatggatgctttcaccagcagacccggccatgtggctgctcggtcctgggtgctcgctgctgtgcaagacattagccctttagttatgagcctgtgggaacttcaggggttcccagtggggagagcagtggcagtgggaggcatctgggggccaaaggtcagtggcagggggtatttcagtattatacaactgctgtgaccagacttgtatactggctgaatatcagtgctgtttgtaatttttcactttgagaaccaacattaattccatatgaatcaagtgttttgtaactgctattcatttattcagcaaatatttattgatcatctcttctccataagatagtgtgataaacacagtcatgaataaagttattttccaaaaaaaaaaaaaaaaaaaaaaaaaaaaaaaaaacaataagcaaaaaaaataaaaaaaaaaaaaaaagagggggggggggcccacaaaaattctccccgcgggggggccccaatttggccccccccgtttttttaaaaaggggggccccacaaataggggcacgattattaaaacgcagagcgcgaggggcgcgcgagtatataaaaaacccgcggtgcagctaatggtagcgaagcaacacctcgttccgacgagcgaggggtctcatagtatgaggagaaggagcaccccacacaatccacgtgaggggggggggggggacaaccaataatgcggcggacacgcaacaccaacgcaagaagaatatttctacgcccccagcggaggcaaaatatccaaacagcttgacggaagttcattctatgtgtgttacacaccacacggccgcgattaattcggcagcgggcatcaaaaaaaatcgcttctgtcccaaccagcagtaatgtatattagtaaaagcaaaattttatagcacg

SEQ ID NO: 203557 - DNA, 818 bp, Homo sapiens
tttcaaactatataactgagccttatttataattagggatattatcaaaatatgtaaccatgaggcccctcaggtcctgatcagtcagaatggatgctttcaccagcagacccggccatgtggctgctcggtcctgggtgctcgctgctgtgcaagacattagccctttagttatgagcctgtgggaacttcaggggttcccagtggggagagcagtggcagtgggaggcatctgggggccaaaggtcagtggcagggggtatttcagtattatacaactgctgtgaccagacttgtatactggctgaatatcagtgctgtttgtaatttttcactttgagaaccaacattaattccatatgaatcaagtgttttgtaactgctattcatttattcagcaaatatttattgatcatctcttctccataagatagtgtgataaacacagtcatgaataaagttattttcccaaaacacttgattcatatggaattaatgttggttctcaaagtgaaaaattacaaacagcactgatattcagccagtatacaagtctggtcacagcagttgtataatactgaaataccccctgccactgacctttggcccccagatgcctcccactgccactgctctccccactgggaacccctgaagttcccacaggctcataactaaagggctaatgtcttgcacagcagcgagcacccaggaccgagcagccacatggccgggtctgctggtgaaagcatccattctgactgatcaggacctgaggggcctcatggttacatattttgataatatcccgtcgacgc

SEQ ID NO: 203558 - DNA, 426 bp, Homo sapiens
gtattccataatgttgatgtactgtagtatgtttagtcattaccttgttgaacatttgccctgtttgctgtttatttgcattataaatagggatactatgtatttctttgttcaaatttctcccccatttacattcctgaacataaataccccaaagtaaaattactaggtcaatggataacaactagacttttgttaaatatttctgagtagcttcctgaaagtattggaacaaagtcatgtacggatgtcgctttgttatttttttcttttatttttctcctgtttgatgtgtttccccctagtagataactatcttgatctctatttcttctccttgttacttctgcagagttttaagccttttcattcagtgttggccattcttctagtatgtgtgtgtctctgcccagattgttaaaaaaa

SEQ ID NO: 203559 - DNA, 448 bp, Homo sapiens
atttccttgcctttgacagatcttccaagggccccgcggctctaggcaggccagaatttgcgagtgtattagatgcctcttgtgaaaagctgcatgggccaggaggggaaactgacatgtggccccagcaagaagaagaggcagtgttgagagccggcaggggttttctaggaagtcttcctggcctgggtagctgggccgaggacttcctcagctggcatgctgacccggctgggcaggtggggaagcatggagccccttgcctagcatctctccaccaacttgagggaacaacacaaacgcttttggaataacgagtggaagttgagtttggtagatgattttgtatgcctcccacgtgccaagccgttcgccgtcaggcactctgctgtgtagtgcagactgcatctgttgtaatggtttcaactgtgggcagccgtgagagatg

SEQ ID NO: 203560 - DNA, 415 bp, Homo sapiens
aatgtaggtacatcattcagtaagaaaacttctctgttgctttctgttttgcaagtagtattgatagcgtagcattctcctacaggtagcctccatgaataaatgtttaaaataaggaggctgggtgtagtgcctcacgcttgtaatcccagcactttgggaggccgaagtgggtggatcacctgaggtcaggagttcaagaccagcctgaacaacgtggtgaaaccccatctctactaaaaatacaaaaagtagccaggcgtggtggcatgcgcctgtaatcccaggtacttgggaggctgaggcatcagaattgcttgaacctgggaggtggaggttgcagtgagccaagattgtgcctctgcactccagcctgggcaacagaacgagactccatctcaacaaaaaataaaat

SEQ ID NO: 203561 - DNA, 374 bp, Homo sapiens
attctcgtgcctcagcctcctgagtagctcagattacaggtgtgtaccaccacgcctggctaattttttgtattttagtagagatggagtttcaccatgttgcccaaggtggtctggaactcctgagctcaggcaatctgcccgcctcggcctcccaaagtgctgggattacaggcttgagccactgtgcctggcccagcacattaacttttaaacatttccaaattggacaaaaacacatgtataactgatcacaaaagacggcccatcattttgtacctgaggtacctatgcagaagagcagcaatagtaatcaaataaagcccaatttggcatgaaagttaatttttttgttttcagcattaatttgttag

SEQ ID NO: 203562 - DNA, 313 bp, Homo sapiens
tgggacaaagtacacttgtcttaaaaggagttggctcaggtggttcctacttgaggtaagtgttggacagtatcaaaacaacaggtgcaattgctgctctcaagtgtggttcttcaccaagttccactacgatggggtataaagtaatgtgtgcatgtgcatgtgtacattttcctgtgtgcaaaattttcatcagattcttacaatatgggagttatggaccctcaaaagtttaagcataattgaatacaaaaccaaacataatttgaaatcacgttttcacacattaaagtaaaaattaattttaactctg

SEQ ID NO: 203563 - DNA, 206 bp, Homo sapiens
aaggtaaggcgagtgatggacaaactgctgctactccacaaggccagcgcctccctcctctgaactcccgcggcccttggtgcacagccttttgaaggtatttttcgtttcttccttttactagctatttagatgtttatttcgcatttcctccacttgtagtgtctacacagtcagggctcgtaagtgatcctcttttacacccc

SEQ ID NO: 203564 - DNA, 670 bp, Homo sapiens
tatattgctcttaaatgtccaaaagcttattagagataaatttaagtcagtaaaatctgcctaaggcttagccagaacctgacaatgtgacactattctgtctttagacaatttcatgcaggcttaataggctctgtccagtttctcaagctttcctctaggcagtggatattgtaccaatatcagtggctgtccccacttcatgccctaacgccaccccattccctaccacctccaggtcgtagactactgaaggaggcacatttacagggagcattctaaagagaggagacacttgctttgccttctctagaaaggaatggagaatcttcatgggaagctatatcatgttgacatagcaaaaatttaagcacatatgaaatgtaaaatgaaaagttaatgcccttagtcctttttcgtttgaaattcatttggggacaagaaattgaatttttaaaaagcagatctatctttgtgttcctggagtatctgtctgtcactgaggaaaaaggatagaagtggggaaaaaaaagccttaaattttgttggaggcctgagttgataaggatgatggcagctagattgtgagaggccaagcggcatggggaggtggggttgcgggggttagagctgtgggtgatcagaagggaagggcttcatttctacgctc

SEQ ID NO: 203565 - DNA, 480 bp, Homo sapiens
ttaaccatctgggaatgcagcagttggtttcagccttatttcacccagctcctatttaagatggagttgctcttgttcaaacgcctctgacaaaaccactgtgctttggagagaacaacatggcggtggatggttgtggtattatgcaataacaacacaaaatggacgaagacacatcgttagacccagctgggtaacatacctgaactccagaatagggagaaaaatctaggagctgacaaccaaccaagtcattagccagcaagaaaatggagaccacagtcctagaactacaggggactaacttctgctaacaacctgagtgagcttggaaaaggatcccatgcatcagatgagatagcaactccttctgacaccttgacttcagccatgtaagacactgacaaattagctaggccaaccttggacttctaacctacagaaactgtgaaataataaatttgtgtggtatatgtatgt

SEQ ID NO: 203566 - DNA, 803 bp, Homo sapiens
ctgtcactcttgggcagcgcctagcatctgctgctaaaggctctgcccaaatcaagaactctcccttgcaagactttgacaagcgcctggattagtccaagacagtctccttgtccatgttgctatccttggactggttcattaacatctttccctatactacacagttttctctcaatgttaaatgttactgtgatgtggaaattttaatctaccatatgcatgtattaattatactactatgtatggtttgccatattgactaacttgtagatcagcttgagcctgtgtgttcttggctgtgactgccaagtgaagagataatgctaaggagagttgtctccttgggaactccctgtagcttgtggcttttatgaataaataagcatcagtaaaagcctgaccttaatgttgtacctgatcaagtcagagaaaatgccacactttgagatgaattaaagagtccgtttattcagctggtggccaagagacggctaaagctcaaagttctctcggccccgaagaaggggctagattttcttttatactttggtttagaaaggggagggggggtctagttaaaacaattttacagaagtaaagtaggcaaaaaagttaaaaggataaatggtcacaggaaagtaaacagttccaggtgcaggggctttaagactattacaaggtgatagacgctgggctttgggcattatcaatcggacgaattcctgggaactgcggatattgctcgccacagtatcttatcagttaattgcattcttggatgtgctgggagtcagcttgca

SEQ ID NO: 203567 - DNA, 199 bp, Homo sapiens
tgggttgagttgtttgcctagacagtcccagtgtgagaacctgaatatctcaattgacagtgctaaattcactcaccccgtttcattcctctccctgagtgccatggaccacagctgcttctaattggccatcttgtagaccctgaatagttatcttcttactgtctgaaagacttaatatcaggtttgacccttcatt

SEQ ID NO: 203568 - DNA, 625 bp, Homo sapiens
tataattctgggaagttttaacctggttacagagcagaaggtggaccagtgtggggtaagaggagcaagcccttaaagaaagatgctacaaacattaggatggggcttcctccttcaatcttcttctgcctctggtctatttaaagcttctgtccagaaggcagagtaaatccagaaagaaacctcaccctcacctttatggcaatactaggtgtctgcattgtcaaagggaatagtgggtttcattagcttgcctgagaatatacaaatgcttaatcagaaaacacatgagcccctcagcccaggtgacaaccaagaccttggcagtttgctgatattgtctcagcaatcaaaggcgggctaactatcagcagcttgtgtctgactcctatcagacagcatgcttgaggggttccattaatgttccactttgggtaccatcataagaatttgggcccagactgcagttcctgatagtggccttttccttttaggctcaccaaaccatggcacaagcacatgaaaatactgcccagaccacctttcttggagcttctgtgtaagccgaaatagttcccctgagctttaacctgtaaatctgactgtcaaccagatggccccactt

SEQ ID NO: 203569 - DNA, 473 bp, Homo sapiens
tgagatggagtctcactctatcacccaggctggagtgtagtggcgcgatctcagctcactgcaacctctgcctcctgggttcaagcgattctcctgcctcagcctcctgagttgctgggattacaggtgcacattaccatgcccagctaatttttgtattttcagtagagatgcggtttcaccacattggtcaggctgatctcggaactcctgacctcgtgatctgtccacttcggcctcccaaagtgctgggattacaggcgtgagtgactgtgcccagccctaactgtcttactttacacaatataacagaaattagatctttgcaattccttaaattgaagatgaaaaatttcagacaactatgcgagagggggtacaaaattattttagaggatacacaaggaaaggatacacaaggaaaaggttggaagaccacaaataaggtgtaagccaaattcccataagactag

SEQ ID NO: 203570 - DNA, 406 bp, Homo sapiens
taatttaaaatagcaaaggatcgaaacagacatttctcaaagaagatacacctgtggacaacaagcacgtgaaaagatgctccgtgtcaccagccacccgggaaacccaaatcaaagccacgatgagaggccacctcacacccatgaggatgcttatgtcaggaaaaccaggctgtaggtgttggtgaggatgcggagaaacaagtcttcacgcactgctggcaggaatggagaatgaggcagccagtttggaaaacaatttaatggttcctcaaaagtcggaacctagaattagcacatgacctggcaattccgttcctagccatctacccaagataactgaaaatatatgtccacacacacatttgtatatggatgttcatagtactattcacaatagccaaaa

SEQ ID NO: 203571 - DNA, 456 bp, Homo sapiens
gagcagaggaaaaagaaggatttgaattctgtcactgtactagcaacaccacctagggatgaggaagacaatatctaatagaataacaaataaagtaagtatacatgattcatcaagctcttcaataaaaatgtattttagaatttatcaacatcccttttgaatcatgtttcaaaaatcacacaatctgttcaaacacggatagacccccagataaatcagaatctctctctctgttaccacgcctctgtggacttagaaatcaccacttagatttgtaaacaaggcttagtttcattattgtaaatcaatttggcaggacttatcactccacagagagctgaaataattgaatttctggacttctaaggaagaaggtttaagtacattaaggcttccaaaaggaagatcaccaactcttctttagcagaaaatgcccctggagaattttgaacc

SEQ ID NO: 203572 - DNA, 198 bp, Homo sapiens
ttgtagagatgaggtcttactgtgctgcccaggctgtctcagacccttgagcttaagtgaacctcctgtctctgcctcccaaatgttgggattatggggcctgagccactgggcttggcttaggaaggctttttgaataattatcttcctcactcttctttccacccactctccattcaaccctgatgaaccctgctg

SEQ ID NO: 203573 - DNA, 190 bp, Homo sapiens
tgagagagggagggaggggactgcacgggaggtaaggatgaatgtagtattttttaaatgaggggttcttgaatcaaaagcagagaaaagtcttatagcacaggctacagctattgctcagtcaactgctcttactcatttttatatcccaagcacacagtgcagtgcctggctccacagaaggtgttaa

SEQ ID NO: 203574 - DNA, 401 bp, Homo sapiens
gcatcagctccacccgaggtcattctaccccaccccaagggccagctgggggttgtcggcttggcctctggatttcccaggtcttagagtcagaggttggccctgccagtcatttgctggggaacctgggggcatggcggctactcttctctgagcctcagtttcctcctttggaaaacgggtttaataaccacctcttcctacctcataaggtgagaacagtgagagcaggtgtatgagacacaggcacgggtcctggcacactgtttaaagtgccaagaactgttagctactatcattgttactgccctggctccaggcctggtgttggcagtggcatctcacccctggttttctgcctgcttctctggctgctctaggtactactttctttctttttt

SEQ ID NO: 203575 - DNA, 786 bp, Homo sapiens
taaatgatgtgggtctattcttagaagagcctaagtaatcagctgaaaaacttagaattaataataagagtttaggccaggcgtggtggctcacgcctgtaatcccagcactttgggaggccgagatgggtggatcacaaggtcaggagatcgagaccatccttgctaacacagtgaaaccccatctctactaaaaatacaaaaaattagctgtgcgtggtggtgggcacttgtagtcccgctactcggggggctgaggcaggaaaatagcatgaacccaggaggcggaggttgcagtgagctgagatcgcgccactgcactcctgcctgggcaatagagtgagactctgtctcaaaaaatatatatatatactaataataataataagagtttattaatatcactggatagaaggataaatatataaaaagtgtaaatatattttaaaaaatcatttatataccaagaaagtaaatgaataccaattttttttgttcccaaacttaacaaaactaagaaactgcctaggaataaccttagttgggtatatggagtaaactgttactgagaaatatttttaaagtctgaggaaatggaaatttctttttctttttttttttttcatgaatcatacgtgagcctttgataaatttcatgttcattatggaaagaatatatatatgtgtatatatatatttctttctctttctctctgtctttatatagttcccatgaaactgccttgtttttggaatttgattaaatgattctgaagtctaccttta

SEQ ID NO: 203576 - DNA, 198 bp, Homo sapiens
tgggaagatcacgaggtcaggagttcgagaccagcctgaccaacatggtgaaatcccgtctctactaaaaatacaaaaatgatctgggaccccagggaatctgaagggaagagaccagaagtctatggcaattgctcatgaagagatgagggtctggccaaggggccaggtgggaggaaccaggtaagagatattatc

SEQ ID NO: 203577 - DNA, 368 bp, Homo sapiens
catttccaccttttagccattgtgaatcgtactgtatgaacatttgtggcaaggttctatttgaacacctgcttccaattcctctgggcagataactaggagcggaattgctgggtcatgtggcgactccgcgttcagccttttgaggaaccaccagactggtttccaaggcggctgccccatcttgcatcacacatcaattctcaatgccaaggcgttcctcagcttttaaacaaggcactgaggcaggaggcaggcagctgattgttgaaggtcaccccgtagccattggcagagccagaacttgcagctgtgatttgtgccgcggctcctgcccaagccctccttccctggcttcagtgctgggc

SEQ ID NO: 203578 - DNA, 483 bp, Homo sapiens
  misc_feature (30)..(30): n is a, c, g, or t
agaggaggtgaaatgccacattcttccagnaggcccatctgtatccagatcccctgaaagctactcagaaaccttcaaaggaccatcagaacgcactttgagaaccactgtgatggataagccttcagaggcgtttccctgcgattcccactgcactctaatccactggctttccgcacaagggcagctccaacaaggaacccaaccagagttgagggaaattcaagtttgggcagttgaccagaggtgctgactgggtccacggcagctgcattcttcaggacctgcactggccgtcatcattccaggacacaagaaagaccccgccagactgtccccgatggaagtttggctgtggtcaccatgcattgcctcctatagagcctgcctattttccatgtctgattcttcagctcttctggcaattctgtaaattaaacaaaatcctttcaataaaatctatttatgattaaaccagccaaa

SEQ ID NO: 203579 - DNA, 577 bp, Homo sapiens
gccattgagaacagaggcaggcagaggactcagattggtggagaacagggagaaacagtttagccaatgcaacgagtggggtttggtttacacaggattaaagaacaaccacaaagctaaaaaggacattttgaagaaaatctgggaaatttgaaaatgggggaaatttcaaaactgccactgcattaatgtttattgtcttaggtatggtaatgatgatgtggcagagtaagagaaggtctttgtttctagaaaatgcaaattgaaatggttaaggaggagtgccatgatatttacagaaaacttcttttaatgatttgggaaagtgtgtgggtgtgtgtacatgcatgtgcatgtatgtttctgtgtataaacagcaattgtgggaagaaatcaatagttcatgaacataaggagaagtaaacaggggtacactgtacattcaatgttttttttgttttgatttttttgagatggactctcattctgttgcccaggctggagtgcaatggtgcgatctcggctcactgcaacctctgcctcctggattcaagtgattctcctgcctcagcctcct

SEQ ID NO: 203580 - DNA, 558 bp, Homo sapiens
aaagcagacataccatgtgactcatcagactcagatattgtgttaaacacacagaccacttgacttccgcaaccatgagaaaacagaaggcatccatcccattaagataccagaatacaaaaaactttgaggcaggaaggaaatttttatgtggtaatgacctttatcattaatacctgaacagcttactacctaagcaatgaacaggaccacaccattttattgacttgtgatctttagaacacaattccggattattaggaaaacaaatctaggagaggggaaaaatacctaaaatggaataaaaagtaaattgtatagttggttgtcatcaaggatatcctgtaattcaagtaagcacactggcaaacactcccataaatcagtttataagttcaattctatttagcaattttctagactctactacaggtctaagattgcaaatttagttcatcaagaggcaaggctgataaaatcacaaaacttgaattcaatttcaattacagaaggtggtcaccattaagtgatatacagaccatcttatctgtcattaag

SEQ ID NO: 203581 - DNA, 453 bp, Homo sapiens
tgaactctctccaatacctcaaatgttttttgaaacttttttttttttagtttaaagatcttaattaattttatttgcaatcgggaatacttcatttcataaaataaaatgtgttccaatgagctgagcagaagaggttgattttatagatggagaagtcctgaagaaaggataaacacagaccacgcatggtggctcacgcctgtaatcccagcactttgggaagccaaggcgggcagatcacctgaggtcaggagttcgagaccagcctggctaacatggtgaaaccccgtttcttttttctttttcttttttttttttttattatactttaagttctagggtacatgtgcacaacatgcaggtttgttacatagggatacgtgtgccatggcacccattaacttgtcatttacattaggtatttctcctaatgctatccctccccctgcc

SEQ ID NO: 203582 - DNA, 397 bp, Homo sapiens
aaaacaaaacaggtagacctttcaaaagcaaccaacaaatccataataatcctcctagccataatattgttcacttaataacttaaaactatgaaagatttttgcaaggcatttataatgtattctagtatttttcaaattggaagctgtaactaccaaaaattgagaagactaccatgaagagctacagaaagtgatctctatgaaagaaataatgccagatggaaacttggatctatacaaaggaaggataagtgctggaaaaagtaaatatgtgaataaatataaaagactttttttcctcattggcaaaattttaaaactaaagcaaaaatattaagtgtatgtgcaatttataacatctatagaaataaaatctctgacaacaatagtaaaa

SEQ ID NO: 203583 - DNA, 1081 bp, Homo sapiens
tacatgtgtacttttcttattgggttgtgagctcctagatgtcaagtattggggctctttaatttctatcctcccagtgcctaatacattttttcatcaagcaataagagagaggatcttcagcctggccaacatggtgaaatcccgtctctactaaaaatacaaaaaaattagcaggctatggtggcagtatgcctgtagtcccagctactgaagaagctgaggcgggagaatctcttgaacccaggaggcagagactgcagtaagccaagattgcaccactacactccagcctgggcaacagagtgagactctgtctcaaaagagagagagagagaggatccatgatgttggtgctggcatgtgggtctgggacacaggggaatgtagctctaggccaggctgtgccagcttggtgaagcattagcaagtcactctgtgcttttgtttcttcatctataaaatggtggcctgcacaagatcatctttcagttctcttttgctctaacgttctgtaattgtataagggaggttcctttttcttcctttttttttttgtttgcagtcaatatttggtaatacaaataaaagtttacagaggtggatgtcaagtggtaagtgcactgtgaagcacaggtcggccaaaagtttacatgagctatttcctgaagagtgggcaatgactctggttcaattattcacacggtaaaaggatgcatttttcctgttgtgggagtacagaattgtctcctcaagtgttgactccttttaaaaggaaataaacagaacttggactagtcttcttcttattattataaggctttaagttttcaaatacattttgaagacattagaagcctgagagacacccagcagttttgtccaccttaagttagttctctatttattaattcagcatagtacacagagctctaccaggttctccatgtccctctcataactgttgcctgtctttgacttggtaaaatatgctgtgacatttctgcttcatcagcacattactggcctgatcaccagaatttaaaattcaggatctccagcaacagagccaatttctatt

SEQ ID NO: 203584 - DNA, 488 bp, Homo sapiens
cagactcctagcggggcgagcatctgtcttacgtgtctgtacatcttaaagcattagggtatggctttgaatggggtacattctccattaaaattagttaaacacacacacacacacacacacactacacacacacacacacaaacactcactaatagagccatgaagataatacaaccctaagccaggcatggtggtgtgtgcctgtaatcccagctacttaggaggctgaggcatgagggtcacttgagcacaggagttggaggccagcctgggcaatgtagcaagatgttgtctctaaaacaaaaacaaaaacaaaaacaaaaaaagacaaaaaccctaagacaatttctgtatgcatcatgtgctaaattttttaaagatacttcacaatatgattagtgttcctcagtcttgctgggtctctgtgacccccagttctttgtgcttcttccccgctgtgaaggcccaccccagccctcctccct

SEQ ID NO: 203585 - DNA, 509 bp, Homo sapiens
aaaacaattttatcaataatagctaatatgctaaaacaagcacctattcttacaagcaaatcaaaaacataagagcaaaaataataaaactcagtgtgataagattataagaaaacagttattctattttatatccttttggtgaaattaggttatattcttttggtggaagcataaattagaaaaatctgttattgaggataatcttagaaaatgttcaaattttaaaaataatttgctttttagaatttacccttaagacgtaatcaagaattggaattgtcacttacaagaaaaaacaaaaactgttcaattaaaggagaattgttcatcagttagtgagtgagtgtgaagtgccactcattttcaagatgttgggaatatagtgattaacaaaaactgaaaatatctctgtcttcatttcatttacattctagtaggggatgtagaaaataaaatgagtaaatcaatatggaacataatatcagctggtgatacatgctatgaag

SEQ ID NO: 203586 - DNA, 454 bp, Homo sapiens
taagatcaaataccaagttagaggcaaagttggaactgggaccgagattgccagcctcccaatatagcacttttatattcctctgttttgctgctactcttgattgctggcagaagtgttggtttcttggtctctgtgatgaaaaagactttataggcttggttattcttcatctttcccagcaatttgaatcaattttgttagatatatacaaccacttaaataacagactatcacttacttatgataacagaatatagaagatgggtcatctgaaaacttgtgcaagggagactaactaaaaataccagcagtttttgtttcccgaagactgtgttaaagtgagctttagagtcgagccctgtgtactgtatagtcctgtttttctctgactgcattgtgctagttctcttttcaaatgtgaattaaattcagttatgaaagattattaaag

SEQ ID NO: 203587 - DNA, 572 bp, Homo sapiens
tgtggagagtaaactgaagatgtgcaggccaacattctggaaatcctatgtcaatgggtttggtttggaacctggacttctgcatttttaaaagttacccagagatgcttctaaagatgagccatagtctagaagattgtcaaccacaggagttcattgagtgggacagctagacacatacattggcagctacaatagtatcatgaattgcaatgatgtagtggggtataaaaggaaagcgatggatattgccggatgggcatggccagtgatgtttcacgtcattgaggtgacagctctgctggactttgaattacatatggaggctctccaggaagacgaagaagagaaggacattctaggcaaaaagaagactaggcacaaggcacacttatgtttgtctgttagcttttagttgaaaaagcaaaatacatgatgcaaagaaacctctccacgctgtgatttttaaaactacatactttttgcaactttatggttatgagtattgtagagaacaggagataggtcttagatgatttttatgttgttgtcagactctagcaaggtactag

SEQ ID NO: 203588 - DNA, 572 bp, Homo sapiens
cagcaccgttcgtctcgtgtgtctgtagcaaatacttacctttttatactttcctgctaagactgtagcagcacccaattagtcatgttttaggcttttcttccttgtgtttttggtcattgatcagctttctttttttttttggactatttcctatgtactagatactgcagtaagtgctagagatacactggtgaataaagatagttccttggcccagagaattttacagtttagtagggagacaaaggagttagcaggcacttaggaagtaggataataaatgctctagaagcagacaacttaaagtgctgtgggagcaaatgtgtatccagtgcagccttaggtcagtgagcggcttcttggaggactcactgcctaggcggaaaccttgaaaggatagtagtacatactggctagaaaggaattgagggaagaagggattccaaataaagggaactttgatccaggttggtagggagagcaggagtgcttgagacagagagggaaatatagaacccgtagcatggttgtagttaaaatggaattagtcgtaagagatggcaggagtt

SEQ ID NO: 203589 - DNA, 526 bp, Homo sapiens
tcgatctcgaggatcccgtatcgcccaacaccagcctctatttccacagagagaagtgggatggcagctagaaaggattatgctttatatcaaagttttttctccagagaggaagaatttcaaaagtaaggtgtggctgggcgtggtggctcatgtcagtaatcccagcactttgggaggttgagtggggaggatcacttgagaccaggagttcgagaacagcctgggcaacagagcgaggccttgtctcaatcatcaatcaatcaatcaataaagtgttttcctgcaaagtaacatacacacatcgtagtagaatttctgtctccagaggcaaccatcttgaacagtttgtttttatccacacacttttttggcaaacatatggacacttctgtgcacgtacagaggcattcttttcttttcttacaaaagatgaattattcattgtatattatctacaacttgctttttttttacttagcaatatgtggtgggcattttcttgtgttggggatacatagatcta

SEQ ID NO: 203590 - DNA, 123 bp, Homo sapiens
ccatatattctcaaagtccatggaatatcttgctagtgattcctctttgcatatgtgatttacattttaaatattcaattattattcccagaattccttataccaacagctaaatttttttag

SEQ ID NO: 203591 - DNA, 1408 bp, Homo sapiens
atcttgcttgactgcaagctccgcattccgggttcaagagattctcctgcctctagccttctcgagtagctgggattacaggtgcctgccaccacacttggctaatttttgtatttttagtagagatggggtttcaccatgttggccaggctggtgtcgaactcctgacctcagtgatccacctgccttggcctcccaaagtgctgggattacaggcattagccactgcgcccagccgtatgtctccatctttttatttcttgcaatgtgttgttaaagaagtcaggtggtatgtgtacacaagtaacgtatacttgttgaatatttcttatttatcataccctgtctcgttccaaaaggattttacatgacttataattttaatataatccgggggagatgggcagattcagctctgggaggccagcagaatggcttttaggtcctccttggattcagaaaatacttcttgaaagatatttgaggtaaatcttacaggattagaggttagccagatgaaaagaaatcaagaggaggagagaggagcccccacaaaggactgacccagggcaataacggggaaagaacttggaggtacagaggcagaccttggtgtttcccagggtgtgggacgttgggggtagtaaggctggagtgggtagaggaaagggctagggtgacaccacggggtattaggtggaactgagggaaacagaaataggagcagagaaaagggaatgagaacgggaaagagggaggtgggaaatagaagagggagtttccaaacagcaacaacaacagaaacaagtgttttgggttgtggagcgtttgccctgcagagagctgggtctgcccttgtcccttttggggattatggatcagtgcgtggagccgcgcggccacatccaccattcacttgcacttgagtgacagccaagctacagtcatgaatacgtttctttctttttacagaagaacagtaaattgactttattccttataaaggtgatactggagaatgtgacatagatttgctggcacatgggtttcctatgagcaaaccccagaattggacacacgtatctggtgctgtattggaatcatcccaaaaaaccaaggcttgcattgcatatctatctgctgtctgctgaaggagccctgtctgtgtgcccaaggaagtgacatccttgccaagggctgtccctgtcgcaggagatgaaggagccctgtctatgtgctcaaggacagtggcttccttgccaagggctgtccctgttgcaggagatgaaggagccctgtctatgtgctcaaggacagtggcttccttgccaagggctgtccctgttgcaggagatgaaggagccctgtctatgtgctcaagggcagtggcttccttgccaagggctgt

SEQ ID NO: 203592 - DNA, 424 bp, Homo sapiens
attaaaatattctacattgtgaaatgtgcacaggggtttccataatagaggaggtttcatttcagaaatgtatattttctacatcaatttagtagttgatccagtcagcaaatttgtattgaattttgggctcatcctttgtatcagaccctgagaataaagggcaattttgcccaagttattattcttagtctttgaaacactgggggagagagtaatttttctttgttcacttgagatcgtattgggaatttttgcatattaattttcatgtagtattttactgtgaaaatttgtttttctatactttgatttcattttcatattcaggttagtgtcaatgaaagagtataaatataatgtttaaatggactatacaattgttctatgtggcattcacaacaacaaatacattcatatttct

SEQ ID NO: 203593 - DNA, 200 bp, Homo sapiens
gccgagcgaaatacattgaggcggggaaagaacaaatgagactactaagccaagtcgctctgaaagatgagtgagagaaaacttggcagatcatctggcgcaaaggtaggaagcaggtttaattctcttcttggtcaaatgccacaatagcgtgaactgggctcactatgactattttttttttttttttttgaggcgga

SEQ ID NO: 203594 - DNA, 445 bp, Homo sapiens
gatgcttagtttacaaagtggggaagatgtttttagttcactcaccatcaggggtgagggaggattcaactcagtttccccaaaacatttagccctggaaaagctaagttcaaagcaagctgaagtttcttcctattagaaagcacactagtaaatccagggaacaatcagtcttcccttcttggtcatggctaagatggctcatcagttagggcccactttctgtgaccttgatgcagtgtggatcccagcttttcaagatcagtgtggtcatagaagtctctggtccacttggtgtaccggtctctggaacctcttgtgaagacagtcagtcctctcatatggagaatgggcctggatgttatgggacagaatactacatcatccatttggcctgggaaattcctgaaccgtcccaaatgctccagatattcactcctaaaat

SEQ ID NO: 203595 - DNA, 331 bp, Homo sapiens
gttacttgatctctatgactttagcaaagtagcagaggattgaatgactgctaatcatgaacatgtctgatgttagcaaaagcaacaactcaaagcaaaagggagacatacatggggaaaacgaacacaaatacttaaaattaaatacatgacgagactgtgtgtgtgttttaaaaaatgatattgggccaagtgcagtggcttaagctagtaaccccagcagtttgggaggcaaagacgggaggatcacttgaggccaggaagaccaggctgcagtgagctatgattttactgctgcaccacagcctgggcaacagaacaagaccctgcc

SEQ ID NO: 203596 - DNA, 232 bp, Homo sapiens
aatcacatcttggacccctcagggtgagaaaggatgggatcaccacatctgctaaggcaggccgggactcactgcaacacagaatgttcccaggagcctcaaagcatagtgtcagctgaaaattcactgacccatgagctgtctgcctccctcctccattgaaagagcagtggcctgccccggttctaaaagtcctggggcttctgcaagctgataccgctttccaggacaa

SEQ ID NO: 203597 - DNA, 497 bp, Homo sapiens
  misc_feature (3)..(3): n is a, c, g, or t
ccnaggattaaacgaccaccctcctctttcttccatttgaccacattccctgagggcagataatttggttcttatctttctttacatgaggtgggcattggggaggggaagaagctatcttcctcatacctggcacaatataggttttctatatatttttaaaattatgtataaagcatggaggacatccagtggatgatactatgtgtaccttcaacttaaaaagaaaaaagaagtcaggccgggaatggtggctcatgccagcactttgggaggccaaggtgggaggatcacttgagaccatgagtttgagatcagcctgggcaacgtaacaagaccccatccctgtaatttaaaaaaaaaaaaaaaaaaaatgtaatcccagttacccaggaggctgattcaggagattcatttaaccccgggaggcggaggttgcagtgagccaagatcgcaccattgaactccagccgtgggtacgagcgaaactccttctc

SEQ ID NO: 203598 - DNA, 311 bp, Homo sapiens
caccttattgaaaagagtagcttttatggatacccttgttctggtgtgtattttgaaaaattaatcttgtttgacagccccatggcattgagctggatttttgaataagataaatcattaatatgtcacgcttagctcagcccttggttacaactttctgtcctagcctgtttaagacttagcacttcagggttgaaagttcatatgactggctaaaaagggccttcatactatatttgtattctaattactagagttctccatggttctctctcatgtgactaattcagggatactctttgaaatgctcc

SEQ ID NO: 203599 - DNA, 546 bp, Homo sapiens
gagttacagaagtaaattgtctgtatcatgcatactgtatcgactgtgtaaatatgtaaatattcttgactgagtagtaaaccgggctttagtagcaaaaaaggagtgtttcactttaattcactagcttttataagtcaataaaatttgtaacagttaaagggttattattccaatcaataaaaattcttaagaaatcaatccatagaaaaccatttacctattgaaaaaaagagcagagaatgtgaagaggcaactcataaaagcaaaattgaaaaaaatatctgtgaagatgcattacacttctctgctaaacagagggcttcaaagtaaaatacagtaagatgccactttttgactaagagatttgatgaagcctaaaaaataaaaaaaaattaaaaaaaacagactcttgcccactactggaagaagcataaactgtagtgagcttttggaagggcagtttggcattgtgaactttggcaaccctgctgccgagttgttgccttagtttcaactctaggaactcatcttaataagacattt

SEQ ID NO: 203600 - DNA, 435 bp, Homo sapiens
ttttttttttttgagacggagtttcgctcttgtttcccaggctggagtgcaatggcgcgatctcagctgactgcaacctccgcctcccaggtacaagccattctcctgtctcagcctcccaagtagctcgaattacaggcatgcgccaccacgcctgcctaattttttgtatttagtagagacaggatttcaccatattatgctggtcgcgaactcctgacctccggtgatcgacccgcctcagcctcccaaagtgctgggattaaggcgtgcgccaccgcgcccggcccctgctataatcttttcagaattcgtctgcaaggtcttcaacactgttaccctgaacacacttccggcatgaaatatgaatgccctacatttcttaaattgtgcatctaacaatggagaagattagtctctaaaaattataattcc

SEQ ID NO: 203601 - DNA, 183 bp, Homo sapiens
gggagggagggaggagaaagaaacgaaagaaggaaggaaaggaagaaaggaagaaagaaacagagaaagagaaagaaagaaaagattgatgacagggtctcactctgtcgctcaggctgcagtgcagtggcaccatcacggctcactgcaggcttgacctccccaggctcaggtgatcctccc

SEQ ID NO: 203602 - DNA, 580 bp, Homo sapiens
ggtgaaatataaaaggaaatctctcacagatgcaggggaaataaataaaaaaaaataaagtgagaaggtaaacaagcatctattttttaacctggcaaatgacatagaatcaagagttgctacctatacctcttcaataacaatcgccctaaaactgaaccatggaattcccccaccctgatctcagtctcgattctgatccacgcacaccttgtcagaactaccagttacttgacagatacatggctgctggggcaaaagacttggcacagggtgtgccttccctttgagggtggtgagaggagagtgtttgagaccaaagacggagaacatgtcggtgtggagagcatctgcaagctggagtcccaggattcagattccccatgtccccacacatgtgtacataacagaaactctgacaagcccccacattatcagtgctgcatttacaaaatgggtagactatcattgtcttagttttcttagctttctataatgtgaatacacagtggcactgcatggaggttagaaagcacagagtctaggttccaattccaactccttcagtcacctgctatgt

SEQ ID NO: 203603 - DNA, 443 bp, Homo sapiens
taagtagcatataacccacaacagggctatagttatctaaaagaaaacatataaaaacataattacccacttctcaagaagatgaataataaataagttactttggaatgtgaaaataaggcagtagtagcaatacacacgagtaaataagaagtgaaaaatacatcttgtcatctatattattccaaatctctttgtagaaagcagcacatgctcattgtgataaaatctgaaaaagttcaaggccaggagtcagagttcttaccctggacttcacttaccagctgtgtgagcttgggcaacacatttaacctctctgagcctcagggtcatcatctgcaaaatggggcttaagaacacctgccctaccacctcatagggtagtattgaaggagataaagtatgggaaagggctttgaagtagataaagttctatactgtga

SEQ ID NO: 203604 - DNA, 779 bp, Homo sapiens
ggcctggactccaaggaagctggtgggcagagcagtcaggaggaaaggatagagagggaggaagaagggaaggaggagagaacggagaaggaagaagtgggggaggaggaggaaagcaccagaggggaaggagagagggagaaagaggaggaggtggaagaggaagaagagaaggtggagaaggagacagaaaaggaggctgagcaggaaaaggaagaagacagcctgggagcggggacccacccggatgctgccatcccctccggggagcggacatgtggctctgagggctcccgctccgtcctggacctggttaactacttcctgtcccccgagaagctgacagcagaaaaccgctactactgcgagtcgtgtgcctccctgcaggatgccgagaaggtggtggagctgagccaagggccgtgctacctcatcctcacactgctgcgcttctctttcgacctgcgcaccatgcggcgccgcaagatcctggatgacgtctccatccccctgctgctccgcctgccactggctggtggccgtggccaggcctatgacctctgcagtgtggtggtgcactctggagtgtcttcggagagtggtcactactactgctatgcccgtgagggcgctgcccgccctgccccttctctgggaactgccgataggccagagcccgagaaccagtggtacctgttcaatgacactcgggtgtcattctcttccttcgaatctgtcagcaacgtcacctccttcttccctaaggacacagcctatgt

SEQ ID NO: 203605 - DNA, 612 bp, Homo sapiens
agttcttgggaaggttagaagctagacaggtaccccacaatgtctgcttacagggtttaccaactccttggagatgtttagttgactcaggcagctacaggtttccaggaaccttcctctccatcttaaagcaaaatcccactaaatcccactttgcattatggtgaagagtgcaaacatctttggaaggagttgcaagtagttctaatttcaagcagctgtcacagaatctcctctctgagttccctgggcttgctatgggctcaaaagcctggaaattcttacaggtgataatcagcttgatgcatttcaggcttgcagcagtaggagtgagtggagggcagcaggtctgaggggtttctcactgggccttccacggagatgctccgttttagacgtaatgggcggagtttcatctggaggagccaggccgaggtgaatgaaagggaggagacctggaggagcgggtcttctgttggcatccccaagcctggtgctgctgcagtggggactctacccagaaggtaaggattccagcttaggccacggtctccttgttgccgggatgaaccgaggagatgttggggcaagtctacactcttgaaatggttt

SEQ ID NO: 203606 - DNA, 752 bp, Homo sapiens
tcaaagtgctgggattactggcatgagccactgcactcggcctgctggctgattcttagagaagacagcagttttgaccattctgtggatgcctgcaagtgcgcatttaggtgatgggaatgcatgccatgaactctctctttcttgccatatgctctcttggttttctagggcagctggtgaatactgttctatgcatttgtatgcccatgtgtgttagctgtgtacacagtccttgctcattgaggctgcaggaaaaatatctgtggctttgcagtcagtggcacagagcatttcaagcgtgtctgctctctggcttttgaccagggttcagaaacccacctctgttgtcgatatatattcccggaggaccccgtgggtctggcacgaacacgcgcgcacacacacacgcactgcgtgggctggcttgctgaggggaactccttaagcacggaatggttcttgttcttggtctaagagtggtggggagtcttgagtgcagataggcttggttggaaccttctaggacttagatttccttctccgtgggtagaacaccttttcatttgttaggccataaagttgtaactggatacctgtcctctcttgctgtctcttgagctcagccacatgtttatgaaaaatgcccagaagccaccgtggaagcatattgaaccagtcgatagccgagggtggcaaagatgattatgagtatggaaggggaaagaggctgggagcggtggctcacgttg

SEQ ID NO: 203607 - DNA, 1811 bp, Homo sapiens
ctcagtcacaggccaggcccaacagtggcccctcagagcaaggagggcaagaagggcccccgcctgcctgagaaggagactctcctgagcctgccagcaaaggacactcccccaggtgttcctgaaaagagtcttggcggcagcagcctgacagagacagaggctgcccccagcctgaccctgccctctgtggactacattccccaagactctccaactcccagtgtgcggcagatccggaatgagctggaggcccggctctcctcagcagcagagaaggaggctaagcccagcataggatctctgccccctaagcctcggctagaagggggaagaatttgtgaaaacggggctgatgatgacaaactctccaagcctgtggccaagaatctgccacctcaatccaccaccctgctgccaactacatcactccagcccaaggctatgttgggaccagccataccacccaaggccacacctgagccagccataccacccaaggctacactttggccagccacaccacccaaggccacacttgggccagccacaccactcaaggccacatctgggccaaccacaccactcaaggccacatctggccctgccatagcatctacagccacaactctgcccaccaccacatcccaactgatggcagagaaggactcaggcccagctggccagccagagaagccagcatctcaagaagtttccactccctcccaggcaaggggagaggggtccccctcagaggccactaggctgcccacacagggagcccgctcatctgcagccttcccaccaaagacatctcctggtggaggagaggtgccatgtctctacaagccccactgccaccagagcagcctcagccgtgaggttgctgtggtgatgcccaccctggccagaggaggggctgcagggccaggggagcccgtggaggtgaaggagcccccagggctgccagccaagcctcctgcctcggcccagcccactgatgaactcctcaggcacccggtgactggggaggtggtggagcggggctcgccgatggccctgctcctggcggccaggcagagggctcagaagggaaggtctgtaggggctgccctgggtcggtcctctctgccaggaagtctccgtgaccacagccaccaagccgaggccagctctgacagcatcttccacagccagggcacgcccaactccttcactgtggtgcccaagttacccaaggaggctgagaaggactccccgctgacgaccgaaatacccaataagtgggggccgcggctgggaagagacgcagagggcacagagctgagccgcaggcacaactggacaaagccagagccccaggcccctgtggcctgggaaagagtagctccctccaacctcccccagggccacccgctgcccaagtccttctcctccccaccttctccttcgaacaagagggaggaggaggaggaggagttcaacttcgaggtcatcccaccgccgccagagttcagcaatgaccctgagcccccggccccggccctccagtatctgggccgccagagctcccctccccggaacaactactcagacttgaggcagctcccgaacgctggccccggggcgcccccggctctcggcttctcgcgctttcccgcgggcgcgcgctacgccggggctgggggcctggagcgcttctcgggagggggccgctcgctcataaagaagcgcctgtacgtcggggagccgcaccgaggcccagggctaccccacggtggcaccggccgcagcctgagctctcccaactg

SEQ ID NO: 203608 - DNA, 503 bp, Homo sapiens
  misc_feature (33)..(34): n is a, c, g, or t
  misc_feature (37)..(37): n is a, c, g, or t
  misc_feature (50)..(50): n is a, c, g, or t
  misc_feature (56)..(56): n is a, c, g, or t
  misc_feature (124)..(124): n is a, c, g, or t
cactggcagatgagtctggaacagactcctttnntanaactgaacttgancacatnaaaagttgtaaaacaatctccatggtaattaaacttgcattcaacaccatatggtaacagaagatggnaaaggataagattcagatcttagacctttccaagtagggcatgttagatgatagaaggattagttgcaagctggatctgagctcaggcttgggcatgaaggaaactgtctcccatgtggtttggaagagttaggggctccctgagctctattgtgaactatacgggtttcatccaaggaatggtatgatgtgggcataaaaccattcttcagacaactgaagatggtccccttctgtagccagaaccacaaatatcgcctttcttcaatctctatttaagtgtacctattttgctgaggtccagattaaataattcaaaaccatctctagttgatagtatgtatcatggagcaacgggccaaaaccacagtattctggg

SEQ ID NO: 203609 - DNA, 451 bp, Homo sapiens
ggcttcttgtgatggttggcaagcccaaatctcagcacatagcacggtggtttgagtgtatagtggcaggttggctattcttcaggactgaggtgaatgtacaaatacttaatgattgagttcttgttcataattttggggtttggtctaaggacccttagtttataaattctctgattactttttaagaagaaaagtgatcttgaatttaaagaaatgtaagggatagtggtggggtgggaaattcattatgttagaggagatttcctggcattggaagggagattttgaaattaatgctgtagtgaaacacaagaagattaaggtgaggaggaggctggtcatagttttgtatttgaaatgcctgtcttgcctctcagttagtagaattagtaccataatctaggacccttgacttcttaacaagtttactctgccttgcaaccatcgt

SEQ ID NO: 203610 - DNA, 348 bp, Homo sapiens
tccagaggctcaggccactaaaagaataagatttaatcataaaagtataaacagattctcctccaacactttactaccacatcaacagggctccagtataataacagaagattataagtgagagagctacaaggcacagaacctatttaaggagttcataaggaaacccaaagacaataggaaaggagagaaaaaaacactagagaaactgaagtctctggcacctatagctacaataagcattaaacacaacccagctcctagccaaattaacataaagccgcataataaaagcctattacctgatacataatatctctctttcaactaaaaaattacaaggctaaa

SEQ ID NO: 203611 - DNA, 263 bp, Homo sapiens
ctaatacatcatcctggttcaaacagtaaaatgtaaattcctcttctatcccaacacccatcttttagttcacttgaaagagacacatatcagtaccagattcttgtatatctctctagaaataaccatatatgtacataggcatatcagtaccatatatagtaatgcaaattgtaacataactatgcatacattttctgtaccttttctcaaagggaaataatacatcattagagtttgaatattaaaagtaagatcaagca

SEQ ID NO: 203612 - DNA, 448 bp, Homo sapiens
ccaaatggtccagagtgactatactatttcacattcccaccagcaatggaggagtgactctggttttgtattcttactggcatttggtgtcatcactgttttatttttgctcttctgataggtgtctagtagtatctcattatggtcttgatttgccttttcctaatggctaatgatgttgaactttctttttctattacagactttttgtgttagaaacagacatgattcgggatgatttttttcctggcttacatgaggagagaaataagagataaggaggttaggttagaagctgttgaactagtctagttgggaacttcagaaggcttcgtgggtggccagtgtgagaacagagagaatgatgggtaagtctgcatggctggatgggaaggattatggaaagaaaaagtaagatgaaaatttgggtatcgatgcctggtgacca

SEQ ID NO: 203613 - DNA, 246 bp, Homo sapiens
tactactttacaccaaagtaaactgtgtcatttagatctctgtctaatctctgctcttagatttaaaatcccttaatggcagaaattgatttggtctttgtagcccttagtacttatcacatgccttgaatatgatagctggtcaataactgctaaataacaaatgctttggacggtagtaacccgattctgtagtcttccccagccacaccacacgtctccctcctctgtgctatctcatgggct

SEQ ID NO: 203614 - DNA, 112 bp, Homo sapiens
tacagcttctctctatcccatctctgtccaggagaaatagaatatgagctacaaatataagttaaaagtttctagtagccatattttaaaaagtttaaaaaaaggcctcttg

SEQ ID NO: 203615 - DNA, 1300 bp, Homo sapiens
  misc_feature (12)..(12): n is a, c, g, or t
  misc_feature (14)..(14): n is a, c, g, or t
  misc_feature (1111)..(1111): n is a, c, g, or t
  misc_feature (1146)..(1146): n is a, c, g, or t
  misc_feature (1300)..(1300): n is a, c, g, or t
aagtagaacagngnagaagggaaacatcatgggaagaaagactatttgtttctgattgcaggggtccttggggcatattatgtttatactcctctctcagataatattgaggaactctggtgactggtgtggatagctacacctgtgaaaatggtaacaaatttgctttgtttaattatgactttctgtcaagatgaacagctgatagacttgatgctgttgttgtatcaaccaactcatagaagacccagatgtcaagatcaaactcaagcttcagtctttaatatatcctgcccttcagacgcttgacatggatttactatcacatcagaaaaaaactagactctctagttctgtccaaaccattcatggtcaggttctgtagggaatactttaccacagacagatcacttgaaaaagtcatgttcttcaacatgtaccaatggaatcaaaccatctgttcagatttgttaattggagttccttgctcactgagaagtttaagaaaggccacttttgttatattccaactcgtggtagttctgagctagctaaaaaatatccagggttcctagatgtgagggcagcccctttgttggccaatgacaagttacatggtttacccctgtcctatatcatcacctgtcaatatgacatcttaagagatgatggactcatgtacatcacgcgactgtagaactctggagttcaagtgacacataaccacagtgaagatggattccatggagcactttcctataatgggcttaaaattgagtatggaatagaaaatcagtatatgagttggctaagtgaaaatctatagtaaaaatgtaagcaatggtttatttaaaatgtataaggctcagaacaggaaacaaattagtgaaaatcaaagggttgatgtttgaattggtctttatcatctgtgacctttctaaggtcctcatagccatagtgggttttggttttgtttttatttattggccgctagcaaattcttctccattttatttattatcctgttattcactcacttctgtgaagatactttagtattttcttctgctaccattactcacttgttaaatctctagtttacagctatagntttttgattgccgaatagtattacagatgagaagnaagttttaaacaaacacgtctgatttgtaaaatgccagttttagtcaacatgaatttagagacttaaaatgtttccctgtgagaactgatatgaaatatgtgccatctcttttaaaaagcatttgcctcaatataatgctgtttgcctgtcacn

SEQ ID NO: 203616 - DNA, 613 bp, Homo sapiens
  misc_feature (12)..(12): n is a, c, g, or t
  misc_feature (14)..(14): n is a, c, g, or t
aagtagaacagngnagaagggaaacatcatgggaagaaagactatttgtttctgattgcaggggtccttggggcatattatgtttatactcctctctcagataatattgaggaactctggtgactggtgtggatagctacacctgtgaaaatggtaacaaatttggctttgttagttgaactcttgggaatcaatcatttcatgaatactgcaacgttctttgtgagctttcaagaagtcccacctacatctgatgaaaatgtcaccatgatagagacaactttcagtaacattcctgtccgtgtatacatgccaacactaaagtcagagatactaagaacgggcttagtttatattcatggtggtggttggtgtatgggggatgctggtatgtgttccatattaaaagttttagtttatcatataacatacattttactgaaatgttgactccatcatatcaagacaaacatgttagataacaaaacacttcagctgtccaaaatttatttctttggagctatgtagatttaaaagaactattttaaatctcattctgaaagagggcataataaataccaaaagctgtagcaaatctcaggtaagaagagaa

SEQ ID NO: 203617 - DNA, 1230 bp, Homo sapiens
  misc_feature (12)..(12): n is a, c, g, or t
  misc_feature (14)..(14): n is a, c, g, or t
  misc_feature (1041)..(1041): n is a, c, g, or t
  misc_feature (1076)..(1076): n is a, c, g, or t
  misc_feature (1230)..(1230): n is a, c, g, or t
aagtagaacagngnagaagggaaacatcatgggaagaaagactatttgtttctgattgcaggggtccttggggcatattatgtttatactcctctctcagataatattgaggaactctggtgactggtgtggatagctacacctgtgaaaatggtaacaaatttgctcatagaagacccagatgtcaagatcaaactcaagcttcagtctttaatatatcctgcccttcagacgcttgacatggatttactatcacatcagaaaaaaactagactctctagttctgtccaaaccattcatggtcaggttctgtagggaatactttaccacagacagatcacttgaaaaagtcatgttcttcaacatgtaccaatggaatcaaaccatctgttcagatttgttaattggagttccttgctcactgagaagtttaagaaaggccacttttgttatattccaactcgtggtagttctgagctagctaaaaaatatccagggttcctagatgtgagggcagcccctttgttggccaatgacaagttacatggtttacccctgtcctatatcatcacctgtcaatatgacatcttaagagatgatggactcatgtacatcacgcgactgtagaactctggagttcaagtgacacataaccacagtgaagatggattccatggagcactttcctataatgggcttaaaattgagtatggaatagaaaatcagtatatgagttggctaagtgaaaatctatagtaaaaatgtaagcaatggtttatttaaaatgtataaggctcagaacaggaaacaaattagtgaaaatcaaagggttgatgtttgaattggtctttatcatctgtgacctttctaaggtcctcatagccatagtgggttttggttttgtttttatttattggccgctagcaaattcttctccattttatttattatcctgttattcactcacttctgtgaagatactttagtattttcttctgctaccattactcacttgttaaatctctagtttacagctatagntttttgattgccgaatagtattacagatgagaagnaagttttaaacaaacacgtctgatttgtaaaatgccagttttagtcaacatgaatttagagacttaaaatgtttccctgtgagaactgatatgaaatatgtgccatctcttttaaaaagcatttgcctcaatataatgctgtttgcctgtcacn

SEQ ID NO: 203618 - DNA, 1313 bp, Homo sapiens
  misc_feature (1124)..(1124): n is a, c, g, or t
  misc_feature (1159)..(1159): n is a, c, g, or t
  misc_feature (1313)..(1313): n is a, c, g, or t
gtattccttagaagcaactcattaagttcagcccacactcaaggagcagggaaaattgaactttatctcctataggctacagaatagcacctaaatatcattttccagatcaatttgaagatgtatataatgcactaagatggttgttatgccaagatattcttgaaaaatatcgtagagagcctaaaagaattggcatttctggagacactgctggtggaaatttagctgcagcagtgacccaactgctcatagaagacccagatgtcaagatcaaactcaagcttcagtctttaatatatcctgcccttcagacgcttgacatggatttactatcacatcagaaaaaaactagactctctagttctgtccaaaccattcatggtcaggttctgtagggaatactttaccacagacagatcacttgaaaaagtcatgttcttcaacatgtaccaatggaatcaaaccatctgttcagatttgttaattggagttccttgctcactgagaagtttaagaaaggccacttttgttatattccaactcgtggtagttctgagctagctaaaaaatatccagggttcctagatgtgagggcagcccctttgttggccaatgacaagttacatggtttacccctgtcctatatcatcacctgtcaatatgacatcttaagagatgatggactcatgtacatcacgcgactgtagaactctggagttcaagtgacacataaccacagtgaagatggattccatggagcactttcctataatgggcttaaaattgagtatggaatagaaaatcagtatatgagttggctaagtgaaaatctatagtaaaaatgtaagcaatggtttatttaaaatgtataaggctcagaacaggaaacaaattagtgaaaatcaaagggttgatgtttgaattggtctttatcatctgtgacctttctaaggtcctcatagccatagtgggttttggttttgtttttatttattggccgctagcaaattcttctccattttatttattatcctgttattcactcacttctgtgaagatactttagtattttcttctgctaccattactcacttgttaaatctctagtttacagctatagntttttgattgccgaatagtattacagatgagaagnaagttttaaacaaacacgtctgatttgtaaaatgccagttttagtcaacatgaatttagagacttaaaatgtttccctgtgagaactgatatgaaatatgtgccatctcttttaaaaagcatttgcctcaatataatgctgtttgcctgtcacn

SEQ ID NO: 203619 - DNA, 423 bp, Homo sapiens
actagagcaatttttgtggggcatttaagctgcttcacagttaagacacctaggacaaattatccctatctagatagtcccttgcaagtactgagttttcaaatgttaacataattattttttaaattggtttaaatctatttactcttcagcctctgccaagttccatcgtgttttctactatgtaaagcaacataagaaactattacttaccatggtggaggaaagaagattgtaattaccagatacacactgccaaaaaaattgtaagggtagcagcaataatttaaatgattctgaaggttcctgctattgcaaagcatagaaatatcagattttcaaatgacatcagatgttttaaaactgtggctttcagcctaggcaacatggtgaaacctctctacatgaaaaaaatcaacaaca

SEQ ID NO: 203620 - DNA, 296 bp, Homo sapiens
ctacaatgcccaggacagacgccacaacaaagatcggctggcccaaaatgtcaacagtgccagggttgaaaaaactcgctttaggagaagacaagaaaagaagaaaatgcttcataatataaaatatcctaatattctcttatgctacttcttctataagcacaaatagacaaagcacacactgtatcttaaaattccacatttagagttaatgagaattgatgttatatgacaagatctgcagccgggcaggagggagaggacaggtcagctctgatttcccaacataaacccct

SEQ ID NO: 203621 - DNA, 401 bp, Homo sapiens
ctgtctgcttgcttctacactggcccctgcagatggagggggtggggtacaggggttcctataagaagcagacacttggggtttttcccaggtcctgttgcaggagggtgcgtgggctggtttccctgaaggcgcctgggcgtgttggtgttaactgatctgagatcttctgtggccctgatgtctatgagcatgccccagcttgcagggggctgagtagccgggcaccaccaggaggctgcgtgccctgtgcttgggtgtacccatgccctgtcagcatcgttggtctgttagggtcagggacttcggcttcttgtttagtaccctccatcccttccagttgatcatcagaaacattctccttagatgcggctgcctgaccccggtgagggggcctgcct

SEQ ID NO: 203622 - DNA, 507 bp, Homo sapiens
aaggacacggattggaagctttaaatgccatgttactacttgggtataagggtacacaaggtggtatttcatcttcctaacgcacataatgtgtagcacatggtgattagacagtgtaaaatctattgcagtcaagattttacaatctaatggtagcagttaacagatgagagtattagctaatgtacaaaataattggaaaaatgtatgaacacattttggaatgttaagaatgaattccagcttttgttttttctagtacaagaagctacaggtgcacatgtaatttccaatatatactgaataactttcacaaagcagtgtttgtgaagagttggatttggtaatactaggatttagtttggttgtaggggaatctgtgtctgttacagggtaggttttccttggacttctgtaagcaggagtaccttcaacaagggtgataaattttggcccccagatatgtcattgacatttacatgctttgtaattctatttgggtcagtt

SEQ ID NO: 203623 - DNA, 555 bp, Homo sapiens
tgaatcagcagacagaatggaactaagaaggcacaaagaaatcagagtgactgagtggaggaatttctaccaaacctgtgttgcctaccctactcacttctttctcatatttcagagccactggaaatgatgacatatatcctcagggcaaaaggggaagcaggctttctaaagaagtaaatcaaggtacctgaaaagcaatagagctaatgtgtatgctgtcacacaagagtgaagcttccttattttttgcatggatagacttgcttgtgcaaatccattaatgcaccctaaagttaaaactgccagccaacagcccttagtcagctatctcattaagggatgcagctctagagatggtgaagagacaataaagtttaccatattttgattaaaaggccacaaaagagaagtaacaaggagtaaaaacaaaactaatcaccataaaatttattcagaaaatgtaagaaaacccctttaaaaaattctatttgatgttctcaaagagagggggaaagatactgcatccataaaataagaacaggttgccattaa

SEQ ID NO: 203624 - DNA, 1662 bp, Homo sapiens
tggagaagcaacagctgttactgactctacttcttcagcgcatcagaagtatccagaatgttcctgaaagctcaggggctgtggaaactgttccagcatttcaagaaattacttctatgaaagaacgatgcaacaagcttcttcagaaagttcagaaaaataaagaattggtgcagactgaaatccaagaaagacattccttcacaaaagagataattgctttgaagaatttctttcaacagaccacaacttcattccaaaatatggcattccaggatcacccagaaaagtcagaacaatttgaggagcttcaaagcatccttaagaaagggaaactaacttttgagaatattatggaaaaactgcgaatcaagtattccgaaatgtacaccatagtccctgcagagattgaatcccaggtggaagaatgcagaaaagctttagaagacatagatgagaagattagcaatgaagtcttaaaaagctcaccatcatatgcaatgaggagaaaaatagaagaaattaacaatgggcttcataatgttgaaaagatgttgcagcagaaaagcaaaaatattgagaaagctcaagaaattcaaaagaaaatgtgggacgagttagatctatggcattccaaactaaatgagctggattctgaagttcaggacattgttgaacaggacccaggacaggctcaagaatggatggataacttgatgattcctttccagcagtatcagcaagtatcacagagagcagagtgtagaacctcacagttgaataaggccacagttaagatggaggaatatagtgaccttctgaagagcactgaggcttggatagaaaataccagtcatttgctggccaatcctgctgactatgactctttgaggacactgagtcaccatgctagcactgtgcagatggctttggaagattcagaacagaagcacaatcttttacattcaatctttatggatctagaagacctgtcaataatttttgaaacagatgaattaacccaatccatacaagagttaagtaatcaagtaacagctttacaacaaaaaataatggaaagccttccacagattcagcgaatggctgatgatgtggttgctattgaatctgaagtaaaatcaatggaaaaaagagtttcaaaaatcaaaactatcctattatcaaaagaaatatttgatttttcacctgaagaacatctcaaacatggggaggtcatacttgaaaatatacgtcccatgaagaaaaccattgctgagatagtgtcttaccaagtggaactgaggttgccccaaacaggaatgaaacctctgcctgtgtttcagcggacaaatcagcttttacaagatataaaactattggaaaatgtgactcaagaacaaaatgagttattaaaggtagtcataaaacagaccaatgaatgggatgaagaaatagaaaatttgaaacagatcttaaataattattcagctcagttctcccttgaacatatgtcaccagaccaagctgacaagctgccacaactacagggagaaatcgaacgtatggagaaacagattctgagtttgaaccagagaaaagaagacctgttggtggacttgaaggccaccgtactaaaccttcaccagcatttgaagcaagaac

SEQ ID NO: 203625 - DNA, 344 bp, Homo sapiens
cctgtagctggccactagagcggtagctcccaaccctggccgcacaccacagtcacgtgtggagcatgttacaagtttccatgctttggctcaacccgcagagattctgattcacaaggtctctggtaaggctgaggcatcctatagcttataaaccctacacaggacctttggaattgtatccaggatggaaaggagctataccgtaccagagactagcttctggctttgtaaaccaaatagcaaagaaaaatcttcagcccttgtaccaaaggaagcaggctgctctgggcctgcagaggcctcagacttctcaaacctatgcaaacactctttctacacag

SEQ ID NO: 203626 - DNA, 305 bp, Homo sapiens
tttcactaaccaggctttggcaccttgtatcacttaaaaccagttccattgttctctccttctgtatcatattgctgagaatgcttttggttttatctattaacattttttatgctacagatacaggcagaaatttatctactaggatctacataacagcattatgttgttgataagggaaacaatttaaattttaaagcatgactaatggccgggtacagtggctcatggctataatcccagcactttgggaggccgaggcaggcagatcatcggaggtcaggagttcaagaccagcctgacca

SEQ ID NO: 203627 - DNA, 543 bp, Homo sapiens
ggtcctgtcacccaagctaggtaggcaccatcaactgagagagagagagagaggtatggggccaaagatagcaatcaggtttgaaaattatgtctaggaaagaactagggaggggactacttctgtagaagaacagctctgccatgacttcctctattgataagcttacacatatcaatagaggcaaaggcttgaattgcaacttatctgagccctggcacaacaccttgtcatccttaagggaggtgtctaaggagctactagaaaggcatctctcactcacctttctatctctcctaagaggctgtcatgacatagtttctcatcacctcccaggttttgatgagatatggggctttctgccccactcccctcatgataggcctgcagaatataaaagcactagctgccatctagatttgactccttagtaatagagtatcctacaactcgcattgcaatcatcagacccagggagaagacatctttcacttattcttctctgttgctatctatggaagtaataaaccatctaaatctaaa

SEQ ID NO: 203628 - DNA, 505 bp, Homo sapiens
ggtcctgtcacccaagctaggtaggcaccatcaactgagagagagagagagaggtatggggccaaagatagcaatcaggtttgaaaattatgtctaggaaagaactagggaggggactacttctgtagaagaacagctctgccatgacttcctctattgataagcttacacatatcaatagaggcaaaggcttgaattgcaacttatctgagccctggcacaacaccttgtcatccttaagggaggtgtctaaggagctactagaaaggcatctctcactcacctttctatctctcctaagaggctgtcatgacatagtttctcatcacctcccaggttttgatgagatatggggctttctgccccactcccctcatgataggcctgcagaataagtgaaagatgtcttctccctgggtctgatgattgcaatgcgagttgtaggatactctattactaaggagtcaaatctagatggcagctagtgcttttatattctgcaagt

SEQ ID NO: 203629 - DNA, 228 bp, Homo sapiens
gatggggttttgccgtgttggtcaggctggtcttcaactcctggcctcaagtgatccatctgccttggcctcccaaagtgctgggattacaggtgtgagccactgtgcccagccacaataaatcatttttaaaaggttaaatttaacctcatttaagtaatacatgtaagtctcatcgaataactcaagtgatccatctgcctcggcctcaactcaggatgcttcttg

SEQ ID NO: 203630 - DNA, 345 bp, Homo sapiens
ttgcccatcacacttaaaacaggaaggcttctcatacttcaaatatttggtctggtcaactctattcagttgacctagtgtacccttgtacctcaccattctatttctttataaccgttagctttcttatattggtttgcttaacttctatctccatccgacagaatgtcggctccttaaggacttctctgtttgttgtcacatttctatgctgaacagagtatccagccacggtacgttaaatagatggatgtgaacatacagccctctcatgaggaaagggttaatagatttttttccttcttgaaaacaaaaaacagtagcatagcagcagaaattggcaat

SEQ ID NO: 203631 - DNA, 473 bp, Homo sapiens
tgggattcagaaccaagtctgtataatgcctgagcttgtgtgctggctttcatggagtcaaaatgtaaaactaggggacagtagggcattactactaataagtcgaataataccaacgcgtggatagagaaaaaaaaatcaagagaattccaggaaaaagaaaaaaacaccacggttagatgttttctagaattttctataattattggagaaggtttctctggggtatttggaggagttctttcagccagaaacaatagccacaacttgtcccagctgtgggatgggcttggcctctttaaaggacagttgagactctcttgacaagaacccaacactgtaaaataaaagacctggccgggcgcggtggctcacgcctgtaatcccagcactttgagaggccaaggcgggtggatcataaggtcaggagttcgaggcctgcctggccaacatggtgaaaccctgtctctact

SEQ ID NO: 203632 - DNA, 451 bp, Homo sapiens
acgctgcattatgtgaacaggtgcgcgggccacagcaactagaaagcaattctcccgctgtactcagtgtcttggctgtttaaagggctggaaagcaaaagccaggacacaagatgaaaggcaacgggattgttcaacttgaggaagagaatgtggaggttgcattaatgctggtctttgggttcatgatgcagaggatattaatgagctccctactgagggcagaatgagaggaaatggatttaagcacagtgcaaggtacttatgaaaagcaaaagaagattcattgaaaagatgatgattttttgtcagaaaggattctttttttttttctgagaccgagtctcgcgatcttggcttactgcagcctccaccaccagggttcaagccattctcctgcctcagtttcccgagtagctgggaagacagacgtgtgccaccatgccaggct

SEQ ID NO: 203633 - DNA, 575 bp, Homo sapiens
ggtgggagagaatgctggatcggcggggaagagaatgtgaccagtgagaatgcaactcggtgcaggaatatctgccacacaagcctgttgtcttgcaaccttgaaaagtggtgtttggatctggagtcagatccagaaggaacttgaatggcagactaacaacaataacaacttctattcatagaggactactatgtgcctgttatttaataaccttaagcagcaggtagtgatattagctctatatttcagctgagaaaactgaggctcaggaggttaagcaacatatccaaggtcaaacacagccagtaagtgatggaagtggggtaggaatccaggcctacatgggtttcaaatttttatttatttatttttgagacagggtctggctgtgccaggctggaggacagtggcacaatcttagctcactgcagacttgacctcctgggctcaagcaattctcctgcctcagcaccccaagtagctggtaccacaggcacatgccaccatgcccagctaatttttttttcctgtggagttggggtctcactatgttgcccaggctagtcccaaac

SEQ ID NO: 203634 - DNA, 537 bp, Homo sapiens
attgaatctaaaaaaaaaaaaattacaaatcttcagggttgaacattttgatgagattcatgcctagggttactttagtaaaaaatagtgagccaatagttgaagtattggtcttatgctatcaatttttattaaagtaacatattcaaaataagttgggatcttaccctaatattttattaactgagaaagtaatataaatgtcccaaatctaatgtaatatggagcctcatagttttgacacatttcccaccatattagatgctatgtcatataattaacattagaattctgtgccttctttttggtgattatatgtgttgaatcatttccaaatattttcatgtatcagatgatattgatgctatttacattactttagttctgactagttatttcattttagttttgtaatagatgaaaattgctatagtttctatgataatagagtaattcacacctatgtcttctctataactctgtgtttcttgttgaaaatgagttctcacttgtgttacatttagttttctgttgcag

SEQ ID NO: 203635 - DNA, 528 bp, Homo sapiens
ctatgaaagatatgtggaagtaattacaaaataacaacaaagatcaaattgtatgttctaagaaagaaattctgaagaatattataatgggaaaacaaagcagcaataaggatatttttcataagttatttgataaattccttttggaaaaatgatatgtaaactgaggcatgagtcccaaaaaatgagaaactgtgagccatgaaaaaggatgagaatgtgcatttcacacctaggacctagcaaggacaaaggttctgcattaaagagtacttagcttgttaaaggattgtgagaagaaaaagagtatattaagttagcatgagaatggcacaaagtgaggttgggaaaaaaatttgccctgtaaagagttgaaatttattttaggagcaatggcatataacatgaccttctttcccgaaaatctcactctgtgtatactaatgcttggaatggaagagtgcaaaataggaggctatctcagtaggcaaaaaattatggacatccacaataactatgggtatctta

SEQ ID NO: 203636 - DNA, 396 bp, Homo sapiens
gggaagtggagcaagggcagggataatttgtaggcattcaagctagaattattgccaagataggtggcttcagccacctctttgtacagaagagactgaagcacagagaagtggcttttgggaggatacaatggcatagagtagagagagcctagggcgaaagttctcaaccctggccacactttaaaattgctggaaggcatttaaaaagaagccccatggccagggctcatccagaggagttaataggattctgaagttgggccctggtcagtctcaaagtgattcaaacagcaggcagaatggagaaccactggacagcctggttggcagcctctgcacttcctgggttcagatctcgctcagctagtatggtacttgggcagttcacctgtc

SEQ ID NO: 203637 - DNA, 650 bp, Homo sapiens
caattgttatccgctatgtagactacgaggtaccgagccagctgcagaaccacatgatgaagcacaaggacatccggccctacatctgctcagagtgtggcatggagtttgtgcagccgcaccacctcaagcagcactccctcacccacaagggtgtgaaggagcataagtgtgggatttgtgggcgggagttcaccctgctggccaacatgaagcgacacgtgctgatccacaccaacatccgcgcctaccagtgtcacctctgctacaagagcttcgtgcagaagcagaccctcaaggcacacatgatcgtccactctgacgtgaagcctttcaaatgcaagctttgtgggaaggaattcaaccggatgcacaacctgatgggccacatgcacctgcactcagacagcaaacccttcaagtgcctctattgcccaagcaaattcaccctgaaggggaacctgacacgccacatgaaagtcaagcatggagtcatggagcggggccttcattcccaaggtctgggaagggggagaatcgccctggcacagacagccggtgtcctgaggagtctggagcaggaggagccctttgacctctctcagaagcgccgggccaaggtgccggtgttccagtcagacggggagagt

SEQ ID NO: 203638 - DNA, 722 bp, Homo sapiens
caaaggatgccatttcctgagacacgtcaaggtatctgcatcttagacagtggtgttaccatgtccgcacatcagtcagtgcattttctcttggccccaggccagtaatgtggttgtgtacactggtcacagctcaaaaaactgaaaaatgaactctgagctttactgcaaagaatgccagctaacaaaaataactctgccagagcagtgccctggacaggtttgcagctctgagatctaacagtgctgatgtatgggagtccagtagaatgcttaaaaagaaaggaaaaaatagaaaaaatccatctgctgtgccgttaacattccaaaaaggtaatgcccaagaactccaaatgggtcctaatgtgctgtttaagactcagaaaactcagctttaagttctacaccactctgtgctcccagactgggaacaaaaacagggtatttccgtgaagtgcaaatagatgattgtatggaggaatcagtgggtaggaattattttgctagcatgttaaaaatacttcaggtgtaggcatttcaagaaataataaagcccaatactctaacccttagaccagaacttggggctacagatggaatacaatgctttgaataaaactataacccctaccagagacctctttgaaaacacagcagtgctagtatggatgtgcttcccctagcatgcaattccccatggatccagccttattgcgtttctc

SEQ ID NO: 203639 - DNA, 428 bp, Homo sapiens
ccctggagagtgaacacgtagtttccagcctgggttgggatcgggtacttctttgagggatcttaagccaccatgacaaagggagggtgtggctgttgtcaatgaactcaccaggccaaattcagcccaaagatatgttgtatctagctcgtaccctgttataatttttaaaaagtaggtgtccacatttaaaagttgtggattttttaaaatgtttaaatccacatttaaaatggttaaatccacatttaaacattgccaaccacggtacttagcaacatctggatatttgaaagctcccaggtagccgagtgtggtggctcacgcctgttatcccagcactttgggagactgaggcgagaagattgcttgagcccaggacttcgagaccagcctgggcaacataagcaagaccctttctctacaaa

SEQ ID NO: 203640 - DNA, 746 bp, Homo sapiens
gacagagtcttgctctgtcacccaggctggagtggaatggcgccatctcggctcactgcaacatcgcctcctgggtacaagcagttctcagttctcatgcttcagccacctgagtagctgggacgacaggtgcgcaccaccgcacacggccaagtttctaaagtttgctctttcattttgtttgctttttatggctagcctctccagtttgaaatatacttaaaatgactgaattttttttaactggatactttactaaactctattctctaaggggaaacaaagttcactatgaaagttattacttttcagtacatgcaggcctcattgacacacattggtagaagctatatatttgaagaaggaatatctaacttagagaaaatttgcacgtaaggaaacaagtcctatttaaactcatttgaaaatactgagttaattgaaggcaaaagaatattagatgacacctaatactttcaaacttaatttaaaaacaaagaaagttctaaatatttttctccatgatgttccttcttcagttttcaaatcttgctctcacagggctgcatttcacctgcggctggtaaaatgagcatggaactcagcccacactagctaggaagggtcctacagggagctcctcaagcccagcacacctccccgccccctgggctgtgcctcatggagcaccatccagaattagtaaaaggtgtttccccaaaaaaagagctagagctccaagtttg

SEQ ID NO: 203641 - DNA, 178 bp, Homo sapiens
ctggtattcttgttggcatggagagtggtgattacagtaaaaactggtacaaactttttgatggaaaatatgtctgtatgacctagaagatttaaataattgtgtatttttcaataaaaatatttaaagcataaaattagaattttagcaattatttctgatagcattataggtaatt

SEQ ID NO: 203642 - DNA, 268 bp, Homo sapiens
actgtatatacagttatatgttccacataacattcttctcctgaggtattaaaacagaatattatttctttagttgatcatcagtaaagtagttgtcttgtgtttgggaaccattgtgaaagaaaaatatgtaggtttgctctgatgtttctttccctagtgcatcagttgaacttgtgagaatggacttcactgcaaactcattccatttgttgtaacggaaaaagccacagccaaggagccagaatattctcactctaggtttagt

SEQ ID NO: 203643 - DNA, 411 bp, Homo sapiens
  misc_feature (67)..(67): n is a, c, g, or t
  misc_feature (75)..(75): n is a, c, g, or t
  misc_feature (81)..(81): n is a, c, g, or t
  misc_feature (117)..(117): n is a, c, g, or t
ctttgtattcccccttgggttcaaagggggaaaccgtttccaaaaaaaaaaaaaaaaaaaaaagtgnaattgctnacccanatctacagttaactttcgttttttaatgcttgatgnatttgcatgtcattcttgggcacacattatggagaaatgttcattttgttctctcctacctcaaatttactggcttggaaagccaaggattgttcactttagttcacaatactaaaatgagtcagtccttgttaccttgtaagagaaaactcacttttgatctcacttaacttattggaggttatattgtgagcaaagggaagacatttgggtgaagtgctgcctcaggaaactaggaacacacagtccatttgaaaaggtaagtccaagagagtggtctgtagaaactgaatc

SEQ ID NO: 203644 - DNA, 393 bp, Homo sapiens
agcaaaaatacaggttaatgacagctcagatttgcagccatggcctcagagatatttatagccaggatttcttgctggttttgtctttgctggtttctgggctagagtgacatcctaagttggtcttgggcagaaatgttcattttgttctctcctacctcaaatttactggcttggaaagccaaggattgttcactttagttcacaatactaaaatgagtcagtccttgttaccttgtaagagaaaactcacttttgatctcacttaacttattggaggttatattgtgagcaaagggaagacatttgggtgaagtgctgcctcaggaaactaggaacacacagtccatttgaaaaggtaagtccaagagagtggtctgtagaaactgaatc

SEQ ID NO: 203645 - DNA, 581 bp, Homo sapiens
gacctgacctccaaaggcaggaggaaggaaaccacatgataaaaatcatcactctgaggggaggatgctttctgcgcagctagggctaaggaagttgtttcaaaacagactcaagaaacgtgtaggctgctgctaggagacttgggtccaactgctccctccagatcctgccacacctaaatgatcccaagaagataactatctcggagaagcagtgtgaggtaatggtttaatgctagggcgtggtcaacagccaggtgcaaaggccggctccgccacactaataactgtatggcattctctccaagccttgctttcctcatctgtaaacagagataacgcctgaccctatctctagcattcttctgattgtgaaattagataatgtatgtcataaatagcacagtctggtacataagtgtccaataaatgttggctattgttactggaaaggtgtctgtttccttcattagaccagttgaggggacctgagaacaaagacaaccccaacatttgtgtccccccacaaaaatttcttagatttaattatgagtttgtattttccatacggggttcatgca

SEQ ID NO: 203646 - DNA, 474 bp, Homo sapiens
gacctcagggaataggggtcgaaggggcggcgctcgtccgcggaggtgggcgggacggcccggggcctccggcctctagagagcgggagtgaccctcggtttctggcctccgaggggcgggagcgatcctcagccatgtccctagtgtctggcttccggctgatttttaaatttttggtagaggcgggatcttgctctgttgcccaggctggtctcgaacttgtggcctcaagcgatcctacctcctcggcctccccaagtgcggagattacagacagagccactgcgcacggccgtggtcagctttgaaagctgggtagatccctttggctcatacgcctttctgctagcttaccctgattctgcttctggttcagatagtattttaatatttctagtgtgtctttttctaagatatctgaaatctttttgtggaatgaagtggcatgaaaaataaaccaataatcattagta

SEQ ID NO: 203647 - DNA, 182 bp, Homo sapiens
gtggaggaggggtccagggtggggcgcctggaggcggagaccgggctccagactcttccagactacccagcacccggcaggtggccagggcctcgatggtgctacccacgcctgcccacgcccatctcctggctcagactcgcagcctcccccgattgaaggagcgccagaactctccctgg

SEQ ID NO: 203648 - DNA, 219 bp, Homo sapiens
ggaagttataaaaatttcaacataaagcgcagatctatcgtcttgttttctgctattcagagcactaaagacactgggttttgtgtctttatctgtgggtttctctagtttatccatttgatttactgagtttgtgtgaaaatattgattaaatcttttcttagaaccagttgagaaccatttgctactttccccagctctgatattaacttctaattt

SEQ ID NO: 203649 - DNA, 288 bp, Homo sapiens
caggcaggacttctatatctaccattgaaactctatattgactgtcttaagcaaatcactactattattttcaataaatgtgaatttttacattccacatacaggaaactaattaagaattgagaaacacattagggatataatgtcatctatagcatctcagacttcaaatggcttacaatttagttgggtggacccaggacataattcacaaggtccagtgtaaaatgaaaacgcaggactcctcattttaaaattattaggaaattcagtagagcaatagaagag

SEQ ID NO: 203650 - DNA, 552 bp, Homo sapiens
agaactggattcaccctccccaccatgtagttgtttggtggctttgggtgagtccagtaacctaagagttttatttcaagaaagggaaaggaggtagaaggttggcaataatacctagtttttcaacttttgggggttccgttgaataaaatgatgtcagtaaaagtattttgtagagtcctagaaaataatgatattattgtctctcccatccctccatcatcaacactgtagcagattcactgttttgttcttaccaaatcagtatttagcattgaatccactttaaggccaacaagagggtagcgtgcacatttttaaagagctgactatttctcactatttctcaggcactagatgattgtgggggttcaatgcattgattaatttgcatatcagtcattcagaatgtatggccatccagataagggttatgctggcttaagtttacaatctagattatctataaagaccttgctgagcaaattaataaagtaagcacgattgagacagaaaaacagttataccaaaacctcttcaggagttcatttt

SEQ ID NO: 203651 - DNA, 158 bp, Homo sapiens
atgcagcaccaatcttggggcagaggtgaaatcaccacccggctagcgactggcaaggctcagaaggacttgctttcctaaaatctcctcccctggtctcataattccctgtagcagcttggggcttgggtgtgtgcacacctaatttctctgagaac

SEQ ID NO: 203652 - DNA, 328 bp, Homo sapiens
caaatgttcacacgctaacactgccagtaggttgaggaaaggatggtggcaacgtttcccagtgactgcaggcttgtgtcctcgctcagggcacactccccagaatccaagcctaaggtaaggaggccaaattagtgtcatgagaggccctgtgggaggggttggaaccagagggctgcagccacagaaggacctttctttaccctggtgggcctgatgtgcccacgggagcacaatcccttgatctgcagcttccaccccagagtgtgctggacacacttctgcacactgaacctgagcctttttgcttcacccgcttctgtggaat

SEQ ID NO: 203653 - DNA, 289 bp, Homo sapiens
atgttgcctgaactttgactggtttaagttggtttcatttatttcataagaactcttgttaaggggtgcaccttggtattttgatattattctcttgatagtcataataatagttccctggtgtgctgcatcctctcaagtcataaatgttttgtatgcagccatacattgagaattgaatggtctcacttcaactaggtcagcaagaacataaagaatcatttacctagtgtgaagttgtgacttgtgaacttcatagtgacaccaataaagacttgtgaactccata

SEQ ID NO: 203654 - DNA, 231 bp, Homo sapiens
agaatcgcttgaacccgggaggcggaggttgcagtgagccaggatcacgccattgcactccagcctgggcaacaagagtgaaattatgtctaaaaaaaaaagagagagtgaaaatatagagatagcaagtattatagatatgctcttctatgattgacagtacttctgaccagtcagtggcaattattagtgcttgggcatgttttggtatacaatttctaacagactttt

SEQ ID NO: 203655 - DNA, 405 bp, Homo sapiens
acacctactgagtctaaaaggagaagttagagtaagaggaaagagaatgaacataaagagcagcatgggcaaagataagatgctgggaagggcaggacgctgcaagaagttcagagttgctggagtggagttgagaatctcaagggcagagtagatgacaaataaccaccacttctgcacacaaggagtatagtctgctctaataaaagcttgtctgctataggctggttgtgaggagccactgcgggggtctagcagtggggtgacagaaacagatctgcatcctaaatagactgccttgtggctgcgcagaggacagaaggcagtgggacaatccacataggagactgaataagagagagttgaacagggattgaggcaggtcagtgatggcaggatggagag

SEQ ID NO: 203656 - DNA, 267 bp, Homo sapiens
ccactgttcccagctgagcacatgacatgcaccatcccagctatctgtgaggcaggtacagtcatcagcccgctttacagaggaaggtctggggctaaaagaagttccaccatgtgttacagagctggagcttgctccccatccttttcgttttgtttcgttttgttttgttttttgagatagagtctcactctgtcacccgggctggagtacagtggcacaatcttggctcactgcaacctctgcctcctgggttcaagcgattct

SEQ ID NO: 203657 - DNA, 309 bp, Homo sapiens
acatctcaggttcctctatataggtaatgttaagactatactttttaaaaatgttgctttagattaacgttattttaaaataatagctaatcaaaactttatcttattaaactctaaaagcatagatatttctctagaaatacagatgatgaatgggtggatagatgacagttaatagatggattccaagggtttaaagatgatagatagatgatagatagataggtagatagacagacagatagatagatagatagatagatagatagatagatagatagatagacagatgacagatagataatagat

SEQ ID NO: 203658 - DNA, 854 bp, Homo sapiens
cttctgcaggtaatgggaagctagagagggtttaaagcaggaatgaggtgggaaggcactcagaggagactgatgttaccggagacatacttgtggaatctctggcagcagtgtgtgtgatgggccagggctggggctgagtgaggggatttgccaggcagggaaatcagctgggggctggcagcaacagtcctctccagctgctctcagtggggttgggatggagaggagaggactgatgtatgagaatactggttgggggttgggtaatctcaacatggggactgctgctgtgggaggtgggagagaagggaaagcatgaggtgacttcagagtttcaaacctgtgaggtgtccaggggaaaataacaaggcatgcctctggcactgatgtagaagtcagactgtggcattccaggaagtgaaactaccaggaaatcgggaaaggcactcagaggccacaagtcactgtgatccaggacaaagttttccttaggtcttggagagctcaacattcgaaatggagagggcaaagggagacctttatctgctgtgggaacagaataaactgtctgggttctgtcctgccttcctcagaacgcagcacagctatcctgggatctccagtgctccttaacagatctagttatcggtccccacgggcactttctggaacctgtagaataggcaagcattaaatgcagtcattcagacttcctcaccctaacatatccttttgcataattggctttaggtctagatttgattagttaatgattctagaaggcctggagaaaataatgccatggttagccggccctcctgagaacagatttcttattcaccttttttgcc

SEQ ID NO: 203659 - DNA, 435 bp, Homo sapiens
aaggaattagctttgtagatcactttgtgtggcgtgggcattttaatattaattcttccaattcatgaacacgggatacaattttacttgtgtattctacattttctgtcattaatgttttacagttttcaatgtggagatagttcacctccatggttaaacttatttgtaaaaattttgttcttcattaagaagcaaacaacagacactgggttctacttgagtgaggagggtgagaggagggaaaggagtagaaaatataaatattgggtactgggcttagtatctctgtgatgaaataatatgttcaacaaagccccaacatatgtgtttacctaatgtaacacaccttcacatgtaccttcaaatgtaaaataaaagctagaaaaaaaaacctttctctactattaaaagtgtatctggctatagctatta

SEQ ID NO: 203660 - DNA, 280 bp, Homo sapiens
atccctattgtcacagaaacttccagagaagcagacagtaccactgtgtatttgaacattcactaaaataatgttttctatggttagaaaaacacatacaaacacatacacacactttgttagagtgtcttataacttaagctcttgttcctaaataaaaatatatttctggaaatttctttcagaggaggactaacttctacacaagatgcattgtacacattgatgagttaaacagttcacatgaaaataaccctttttatttataggctttgggaac

SEQ ID NO: 203661 - DNA, 367 bp, Homo sapiens
ctgatactgagattttcctattcctccagcaattaaaaacagggagggaaaggagaaatggaagaacagatacaatcgcccaagggtaataatctgcaaagatagtaatgcctacttttttcagaaattatgaatatggattagctacattttttattatgcataagctatacattttgtgtttttaatataagaaatttttgccagtcacagcgcatatgcctataatcccagctgctcaggagtctgagacgggggatcaagagatctttgaaccaggagttcaaagctgcagtatactgtaatcatgcctgtgaataggcactacactccagcctgggcaatataatagcaagatcccttctca

SEQ ID NO: 203662 - DNA, 475 bp, Homo sapiens
gtgataaagaaaaaatgcaaaacttaatttcacttccctgctacactgctcattcttttttaataaccctctcttatcagcctcctggcagcttttgcacttcctgtgcatgttaattactttattaattacattgatatctttggttctgcccagcatttcttggtactttttgtttgcaacgtgcacccattttgccttgctcattggcatatgcgggcccagttcccatttctaaaagggattctttgagcctcggtaaacacatggctttcaattagtcgcacaatcatcatttcccatttttcaaatcagccacgtcactaatagagtgtttttaacattctcccaaatagaggctgtattgttaagtttctgacattcttcctcaatccttgttttctctccacgtcacagctcaaagaaccccatataccctagcatggagtgagatgctagacactaagaagtctag

SEQ ID NO: 203663 - DNA, 133 bp, Homo sapiens
agcactgggtgagaactctggagtctaaggttcaagtcccggttctgcctccatcaagctgtgtgccttagggaaatggccttctcttctgggcttccttctccaaaaatgaaggggctggacttgcagattt

SEQ ID NO: 203664 - DNA, 433 bp, Homo sapiens
cagagtgtgatcaaagcccagctcagctctcctctggtcgccgaatacctgtctggggcacattggagaggagcaggggacctgactgtgcccatcaagacagcgactgccattttctgtgcctccaggactggggtcatcatcagggctgtgcatacagtagggacaaaaagctctcatttttccatctggcattcctcatctctggatcggcatgggcagcagtaaattccaggagagaccttagccaaccatcccctttgtttcctgaaagaagagaggtttatgttctcctggaaggctgaccagcagtaacttagggaagccacaggccagcagcacactgaaatgcagatgtgattagataaacgagggagcaaaggcatgttgtgtcattatagctttacataaactctccttttccaataagctc

SEQ ID NO: 203665 - DNA, 347 bp, Homo sapiens
cttgagccataaagatctactccctgattctctaacttgcatagggtataagctcgggtctcatgcgggtggaagtctgggtcgtggaatgctgagtgtctactggtccacttatgataggcagaactggtgctgcgcgatgaaccgtgcgccgggttaaagcgctcgatgccgactctcatcataccccatataagtggtcggttgatatatgacagcaggacggtggccatggaagtcggaatccgctaaggagtgtgtaacaactcacctgccgaatcaactagccctgaaaatggatggcgctggagcgtcgggcccatacccggccgtcgccggcagtcgag

SEQ ID NO: 203666 - DNA, 341 bp, Homo sapiens
taccccggaatttgatccaactatactcaaactttaaatgttaagaagcacggatcactaggcagtggagccgaggagtgaatgcgagtgactagtggagccaatatttggtaagacagaactggcgctgcgggatgaaccgaacgccgggttaaggcgcccgatgccgacgctcatcagaccccagaaaaggtgtaggttgatatagacagcaggacggtggccatggaagtcggaatccgctaaggagtgtgtaacaactcacctgccgaatcaactagccctgaaaatggatggcgctggagcgtcgggcccatacccggccgtcgccggcagtcgag

SEQ ID NO: 203667 - DNA, 434 bp, Homo sapiens
tgctttaattttaaacgaatgtgtagacaaaggattcctggacatcctccagtttatctcatgctagaaaagacagcaagaaataccaagttagaatgttattaactctgaaaaattctctttaggtcccatgtgtaaaatactatcttaaaaaccaaattggccagtcatggtggtttacatctgtaatctcagcactttgggaggccaagccaggaagatcacttgagaccagcctgggaaacatggcaataccctatctctacagaaaaatttaagaagtagctgggcatggtggcatgcagctgtggtcctagctacttaggaagctgaggagggaggatcatgtgagcccaggaggttgaggctgcagtgaaacataattgcaccattgcagtacagcctgggaaacagagccagacactatctcaaga

SEQ ID NO: 203668 - DNA, 571 bp, Homo sapiens
tagttcagggcttatctctcacctggcttcaggtgatagcttctaaggcacttcttggactcctgcctctccaaacaccaacccctctccctaccaagccactccccacactgtgcatgcaaatccacttggaaagttaagagagaagaataatgtttatgctatggacagtaggtgccaggctctgtgtcagcaactctgcatgcataatctcattctgtttcacaactatattttacatatgtggacacgggcttaaagagtcatttgctcggtcaccctaagggaagaatcaaggaaaaagggaggcaggaccccagaagtatgccaacatataacaccctaaatcaaaggtcaaatgccgcacttgacctccaagatgcctgcttgggcctcttccaagtgtactttcctttctttcattcctgctctaaagctttttaataaacttccattcctgttctgaaaaaaaattattcatgaatattttatacttttatcctattatgaatgaaatgttctaattgtttaccacaagtacatacaaataaaattgctttgtgtatattga

SEQ ID NO: 203669 - DNA, 218 bp, Homo sapiens
attctggaatccggttctgattattctctggagagctacttaagagctgcttcagggtttaaaatccctcattcagacctaatcttgaaataaaagactacatttaaatgaaaaatacattacagctttctctttagggccgtcagtactgatgggcaggataaaggaaggcattgaaggaaaatgaaggagaagagtaagagagaaaagaaaaatgg

SEQ ID NO: 203670 - DNA, 264 bp, Homo sapiens
atcagattaaaaccagatgactgttacagaaagaggccagtcctcagcaatggcaaaggaagtaacaggatcacaaccctgaaggatacatccaagatatttcaaatcagatttgaaaatcaacagaaatcaaaggcaccctaatccagatggcaggtgccacgctgacggcaggcagtattcacacttcccatgcatcgactgcctggcatggaagctcccatgccatctccagctgacagatggggcgggactgaagcacag

SEQ ID NO: 203671 - DNA, 485 bp, Homo sapiens
acctgagctgggtcgctctttctgaccattcctcccccagcctgtccattccccattggtgggggctgcactggccccagctcagggcatttgaggaggagctttttgtctgaattctgaatctgctgagttcaaaagtctcagagattctaaaatcacatgatcacatttcaacttgcttgtaatgaattgggtgacgcgggatccaacctgtccgggagcttgtaatgaattgggtgatgcccattccgacctgtccgggagccagggtcccagccttcaggcccctgccccctgctctctttcagagcagactgtgggtgtttaccgtttggtgacacttccgctccttctcttttcctgtcttcttccttccattgttcctctttctctgccacttcttcccaaatggttcatcccaagcaccatcatgagagatcagaaataaaaccagtgaggaaggaaataaagatattgtagttctc

SEQ ID NO: 203672 - DNA, 716 bp, Homo sapiens
aattaataggcttctcaccaggaatttatcgtttagttaggctcagatatcacacacaaaacattaaataattttgaaatcattatttaaaagcccaggaggccctacacttacccacaggaaggaatctatgagagatctcgccttgacccgcaggcatcatgcttgttcagcctggaaagtgaaatggggcaatagaaaggaatcagacagccaatctctgttttttgttaagttttgtgtgtgtgtgtgggtacatagtatgtgtgtatatttatcaggtacatgagatgttttgatacaggcatgcagtgtgaaataagcacatcatggagaatggaatatccatcctgtcactgtttttaacacatcactccttgaatagcatgtatttcttacagcacatttattagacccatttcacttctttcttcagatcccacataacgtctcaagaaacattgtatttgcaaaatagcttccattggccacacttagatataatgttcacagaacatttgttatgctaggctcttgtctgtttgttcaaaatgtagaccaacttcaactatgaatttatgagttcaactatgagtttctaggcagcataatgggcatcttgtacctaactcgtggggctcagcttccaagatattcattcgttcattcattaacattcattcatttattcattcaacacttgccaagtgtgtact

SEQ ID NO: 203673 - DNA, 475 bp, Homo sapiens
cactttgcataagctgaaataagtcaaagttcctctaaactgccaacgtcaaccacaacatttttccagggaagataagcaggttggagtatcacgttgcacaagcatgactcttaacgtgcccacaacatccatgcaatgtgctctcagggtggcagctgcggctcctgcacccctgttgacaggcgacccccatgggttcccagggactggaagtttatttgcatgaagcttatcaagttccttctaacgtcccccaaacatatgtgcccagaacaaattatgtatcgtctctgtcttcactgagctacaccctgaaaacagatgtcaacaacgaacgctgcctggatgggaagcagggagcaaagtccccttggcttctgtccccatcaaagcagacgggggtggagagagaaaacagtgacattgaagattaaggaaaaattagcccaggaccctttaccctttactttct

SEQ ID NO: 203674 - DNA, 328 bp, Homo sapiens
ggcgctcagaggatccctcataggtcgcaggatggtttattataaaggctcttttttgattttcctatcttatttacctgaatttagatattttaactttgttaaaacaaactatatgtaatgaggggcctttgaaaagtggtcttgccttttcctgatataatgtgggaagataaaaagctaagaactaaatatttactttttattgttgattcactgaatgaaaaaatttgctttttctgtttttttaaacctataactagagatgttaatctgactatctgaaatggattcatgaaaaaatctgagatctgcgaaacacctttta

SEQ ID NO: 203675 - DNA, 335 bp, Homo sapiens
taactcagatgttggttaattagtaatatagggatactccacttgttattgcgactttgatctaaacagctctgtaaagcccattttcacatttttaaaataatatgctttagcagcaggtgaggaaaacttaaggcatggcacatttattggaaaagcagcagtgggcggcttggtttaatggcaacaccactagataactgtctaaggccctttccagatccaatggtcaaggtaacaggtaagtaagatagactccaaaggcaggggtttgaggggagtggggagtgctggtgagacatcagaatgaaaattgtttatttcacatggagctc

SEQ ID NO: 203676 - DNA, 881 bp, Homo sapiens
cacaattactattctaatactcttctgtttttaacaggtatttagcacacttcttgaaagcataacaaatagatccattaaatatattaggaatgttttaggttagtagagggtatgattgaataacatgattaaaaaaaaaaacaccagaacttttatttttttagtacacacgaataaggcctccatcaaagtaatgctcttagaaaagtatttacttattccgacaatgattcctctgcccagcatatttttggaattcttttaatgatattttctgcagcatttatccaataaacactgacgtaactgatttgccttttggtctacaatacaatcttataaatatgctctgtgttaaaacagaatatccctcttttctttcccctccctctttccatattcagcagaaacaaagaaaatctcagaggtctcttcttatgtctctgctaacaataaaaagaacagcttttggggaagtgggctgctttatcctgtagccctcctcagatgccaagactgctgggctggccaccagactcacgtcctcaagagagtgtctcactatgttgcccaggctggtctcaaattcctggcctcaagcaatcttcccacttcagcctcccaaagtgctgggactacaggcacatgccaccatgcccagccgcaagtgtttatccccattccatagggggtgaaactgaggcacaaaaagaggaaatcaccatcaggatatgccactgcagagagatataagatgagagtaattcagcttcatgggttattttcaaaaagtaaggaagaaactgcaacaagaactgaatcacgctttactacagcattgccttctacttcctccaccagccaactgggagatgaac

SEQ ID NO: 203677 - DNA, 715 bp, Homo sapiens
taactcagatgttggttaattagtaatatagggatactccacttgttattgcgactttgatctaaacagctctgtaaagcccattttcacatttttaaaataatatgctttagcagcaggtgaggaaaacttaaggcatggcacatttattggaaaagcagcagtgggcggcttggtttaatggcaacaccactagataactgtctaaggccctttccagatccaatggtcaaggtaacagcagaaacaaagaaaatctcagaggtctcttcttatgtctctgctaacaataaaaagaacagcttttggggaagtgggctgctttatcctgtagccctcctcagatgccaagactgctgggctggccaccagactcacgtcctcaagagagtgtctcactatgttgcccaggctggtctcaaattcctggcctcaagcaatcttcccacttcagcctcccaaagtgctgggactacaggcacatgccaccatgcccagccgcaagtgtttatccccattccatagggggtgaaactgaggcacaaaaagaggaaatcaccatcaggatatgccactgcagagagatataagatgagagtaattcagcttcatgggttattttcaaaaagtaaggaagaaactgcaacaagaactgaatcacgctttactacagcattgccttctacttcctccaccagccaactgggagatgaac

SEQ ID NO: 203678 - DNA, 358 bp, Homo sapiens
aactcttccggcatataacatttatcaacttatgaggtcacattaccatgataccaaaaccagatatcaacaagaaaactataaaccagtatctcaaacagatatatgtaaaaattgcaacaaaacatttacaaatagatgctggcagtttataaaaagctgaaggatgcccatgtaagcaaaaacaaaaaagaaaaaaccaagaaaaataaacccaaacccctcaaacaatttcgaacacaaaacattcttctcacgccggcatccctgcttgcaggtgtgaggggggcaggaatcagcgaggtgtcctgggctgagtccccggagtgggaagaggtggccggaagaagaaaatgat

SEQ ID NO: 203679 - DNA, 461 bp, Homo sapiens
cagagaattttataatttacatctggtcttagtccattcagggtgctataacagaataccatattctgggtggcttatgagcaacaaaaatttatttcttacagttttggaggctgggaaatctaggatccaagcacggcagattttgtatctggtgagggccagcttcttggtttgtagttgaccatcttcttgctgtgtcttcatatgggaaaaagggcaagggaactctccagatttcttttataaggatactaatctcattgattaggtctctgccctgatgaactaatcacctaccaaaggcttcatctcctaataccttcacattagatgttagaattttaacgtatgattttgtgggggaggacacaaacattcagtctatagtgcatctcttgtgcaggatcatgctggacactgcagttgttgctttgggtgacatttaaacattgagcata

SEQ ID NO: 203680 - DNA, 513 bp, Homo sapiens
cactagaatggctaaaattaaagactgatcataccaagtgttgatgaggatgtggaagaattggaaccctgagactgccagaaatgttaaaacactctttaaaacagtttgacaatttctaaaagagttaaccatgcattcatcctatcatccagctattctactgatatgtattttacccaagataatttatagcacatatccatacaaagccttgtccataaatgtttatatcagctttatttataataaccaaaacctggaaacaaaccaactgttcactaacaggtaaatgaacaaattgtgcatttctatataggaaaaaaactacacaacaatttaaaaaatgaactgttgatatgcccaacaatgtgaatgaatctcaacataatcatgacaagtgaaggaaaccagattaaaaagagagcacatactgtatgccttgatctatataaaactattgaaaatgcaaactagtaatcataatcattcattgactggtgagacagaaga

SEQ ID NO: 203681 - DNA, 494 bp, Homo sapiens
gaggggcacccgccagatgccagttggagctctcctgtatgaagtgtctgtcaacacctgctgggaggtatctccccatcagaaggcaggggggtcagggacccacttgaggaggcagtctgtcccttagcagagctcgagcactctgctgggagatccgctgctctcttcagagctggcaggcaggaacatttatgtctgctgaagctgtgcccacaaccgccacttcccccaggtgctctgtcccagggagatgggagttttatctataagctctgagtggggctgctgcctttctttcagagttgctgagcttagagaagaggaatctagagaggcagtcagtctggctacagtgactttgtggcactgtggtttttttaatgtcaaaagtacagaatataaattccacaaattgtgacagtcaacttgatgttgattctgaaataaatttaaattgcattattaaaagatggtttgtggcccagtgcggt

SEQ ID NO: 203682 - DNA, 314 bp, Homo sapiens
ttttgcttttgctcaattggtttcctttttgatcatcttcctaaagtttttcagttttgatttaggaagtttgttttctgtcgataagaatattaacataacagttttaaaattaacatagggatcgagaaccatgtacctagtggtatttttagtacataataggtctgcaataaacaaaattcttggaattttgacttgatggttttattcttttttttttttttgagacggagtctcactctgtcgcccgggctggagtgcagtggcgcaatctcggctcactgcaacctccacctcctgggttcaagtga

SEQ ID NO: 203683 - DNA, 336 bp, Homo sapiens
tttagtgagcaccatcccgggtttatctccagataccaacagtctatagccttaggtggggaaactgaggcacgggggcttggaatcactttttcagcgtcacacagcaggccaggggcagaggagaatttgagaccatgctccatgaacctcaactatgaggctaaggtggggtttctcaacctccacactgttgacagctgaggctggataattcttcatggttggggggctgccttgggcattcattgtaagacttcaagcagcatgcctggcctctacctgctacatgccagtagcactctcttagtcctaataaacagaaatgttgaggca

SEQ ID NO: 203684 - DNA, 357 bp, Homo sapiens
ttactatacaaggtaaatgaatataaaaacaaaacgaaacaaaaacctcttcctatttacataaggccccaacctaatatttagtgatatatattaatgtgaacaaggaactaacgaagactgggaagaaattcacagacttgagagaagaaatggcaggatttcctgggaacaatttcatgtaacgtcaaaggtggtaaaaggtcaaatagaatgaagatggagaataccggattttcttacaaaatgatttcccaggagatctcatcaaatgcacgaggataccttctcagtttcacctagtgagtaaaagactggtaacatagctcacttacaatttggataaacaaaactaaa

SEQ ID NO: 203685 - DNA, 239 bp, Homo sapiens
gcattttgtaagtgtcatgtaggaggtatcatgctgaggtgctgcatgcagtgttacactcctaacaatagccttatgggggaagttctcttatgagtccttttggtagacaatgaagctgaaactcaggaaggtcacatggtatcataaggctggtaagcattggagtggggctggcagggatgctggacaaggttgcagacatgagagccttcctgagttgcggaagtgtgtggccc

SEQ ID NO: 203686 - DNA, 559 bp, Homo sapiens
tcggctcgactctgaggatccccacgcgcaccgcggtcaaacttggaaaaaatcctaatattagaagttatctttaaataggatctttattcagaagcaaatgtaggaaactgatcaaagggagcaagctgcttttgttgaagcaggcagcagaggctaaatggtgttgctcacaagactaggggcttggggaaggatcagaggggctcaagaagtagggaaagggtgaattctggtaggccatggctgccaggtgaagttggaactgaaatctgcagcattaggtttcagcaatgaaaggaacagctgggaaaaacagcctggtctggttagttgtgggcctgctgcatttggagaaagaaacaagccaagctaggaaagcacagtacagaactgggtgcagggggaggtgggaagtcaggaatgatcactgtcctctctctgtctcggtttcctcctctgaagtcctttgtcatttgaatgctctttgattctctctctccattattccagtgttcccctttgaaccgcggtggcgtggggtgcatcaatggatgat

SEQ ID NO: 203687 - DNA, 821 bp, Homo sapiens
tagtgaccatgacattaaggagagaaggaagagaagtaagccgaggcgtctttgattgtgtagtaagggtggaaggtgattttatcggaatgggaggtgatacctagggggttgtttagatcccgtttcgtgcaagaataggaggtggagtgctgctagggctgcaataatgaagggtacgatgaagtgaaaggtaaagaatcgtgtgagggtgggactgtctactgagtagcctcctcagattcattgaactaggtctgtcccaatgtcatgggtcaccagtcgtcacgccgcaccgtcaaacttggaaaaaatcctaatattagaagttatctttaaataggatctttattcagaagcaaatgtaggaaactgatcaaagggagcaagctgcttttgttgaagcaggcagcagaggctaaatggtgttgctcacaagactaggggcttggggaaggatcagaggggctcaagaagtagggaaagggtgaattctggtaggccatggctgccaggtgaagttggaactgaaatctgcagcattaggtttcagcaatgaaaggaacagctgggaaaaacagcctggtctggttagttgtgggcctgctgcatttggagaaagaaacaagccaagctaggaaagcacagtacagaactgggtgcagggggaggtgggaagtcaggaatgatcactgtcctctctctgtctcggtttcctcctctgaagtcctttgtcatttgaatgctctttgattctctctctccattattccagtgttcccctttgaaccgcggtggcgtggggtgcatcaatggatgat

SEQ ID NO: 203688 - DNA, 307 bp, Homo sapiens
caagcagttaatacagactcatttcagtactctagcaattaccacacaatacttcaaaagcttgacttgctgtaatcactcatacttatttactgaattaactgtcataaaattatgacattatttctaaaacccaatgaattactgtatacatttcctgctacatgtgggatgtactttattcacttgagtttgagcaaataaactacttatcaaagaaaattttgagtagagggcacaagatatttggtgtatgtttgctgttgtgtgtgtgcgcgctctatgtgagtgagtctgtagtactgct

SEQ ID NO: 203689 - DNA, 987 bp, Homo sapiens
tatatatatatatacatatacatacatatatgagttggagatggaaatttgttttaaatatctaacagcttattggctgcacttccaaatcagagcagaataaaatagaaagggagaaataaaataaattatacataacttactaatctgggaacagctgaccattattattattattactattattattattattttatcatcatcatcattacaacactagcaaaaagaggcagttcaaatgtaaataaagtcatcaaaaacaaacaaacagaaaaacaaacaaaatgaaatctctgacatgcaggatatgatcagctcctccaagcaaaaccccagagcaagtcttctgagagagagaaaaataaaagggattcttttttatttatatgtaaaaatccaactttagggtggtgtttcggggggtgagataggaaaatgatgactggagtgaaaactatagcacatcaagctactagttgcagtatttactatctatctgatacttcaatacaaataatggcaattgacttgaaatgattttgcatttatttgtacaggccctacaactgccttggcatttggctggcaaaatctacataagcagtcccatcacattcagttgttgctctttgcaaatactctgcttgaaccaaagttggacttcagtggattaatctgacagcaagggaagagcagtggcaaggatccctgggtgcagccaggctccattttattgggctgcaatgacttttaattaaatcctactttttatggcatgaactacatgtggcccacacttctgaaatgctaaaggcctccacctcacttcatggaggggtgaaaaataccttataaaatcatcagtttcatttcctgatcgggaaaggatggaatgttgaagaaataagctaattctatttgtctgaaaaaatggccaaatatattcaatgaaaacaatgattgttttgctcaaaatatcaacag

SEQ ID NO: 203690 - DNA, 605 bp, Homo sapiens
ctaaaaagatgtgccatgttgcaggatttctctaaggtttgagacattttagttccagtagcttcttcgttaggaggtgctgctcctagatgcaaatactttggatttattattgcttatgcagtcatcagacaacctagccacctccaccaattttgctacaaatgcatttgccccataaactcaaatggtgccaactgctatcatgggtttgaagacaaatcctaaaatttttgtagcaaaaactttgaatagcctgcctgcttttcctttttaaaataacatttactatttttaaaaataaaagtagcacatattcagtgtagcactttttgaaatataaaaaagtgtgaagatgaaggaatagaatattattgataattccatcacccatgtgtgagtatgttaagactccctgcggaccttggagtcttctgcctgattcacgttagatgtggttttctttgttccaccactcctcttctcttctctgctcatagttgccctttctctcatgtctcctgtctccttttgtgtctgtgattttggctcattgactctgcctttggggtactcacttgcttcctttggaaacttcactgggg

SEQ ID NO: 203691 - DNA, 438 bp, Homo sapiens
gaactgctgggtatcttaacaccatcacctactgagttcagaatgggcatctgaccccccaagccccatctcttcctctcactgtcaacccttttttcagttaaagcggctccatccttccaggtgcttgggccagaccttgaaaccactgactcctttcttattccccacatccaatgcttcagcaaatcctgtcagctgtgccttcagagcacctccagaatctcagtggacccactcccatctcatcaccatctttggtcctgttttatttattttttgaaatggagagtctcactcttcctcccaggctggagtgcagtggtgtcatcttggctgactgcagtctccacctcctgggttctgcctcagtctcctgagtagatgggactataggcgtgtgccaccatgcctggctaatttctttttcttttttct

SEQ ID NO: 203692 - DNA, 1076 bp, Homo sapiens
attgctaacattcatttgttatgaactatggattatgtaatcacctaacaacccatgagacacaaagtactattacgtccattttacaaatgagaaaacaagtacagagaggttaaataattcatccaagctctcatggccaggatgtgataaagcctaattttgaatccaggcagtctagtttttgagcttatcctcttaatcattatttgactctaaaattcattttagtacagttttatgaacagaggactcaggtatatgcaaaagtgtaaagtacagggaaaaaatggagaaagaacgtgatcacattccaagttgaggttaatagtgccttgaatgtgcccagttttcctgggtagaggggctaggtttgaagttgatccttcccagttacggtaactctcctacttcctccaaggtaagtgtttttcctggtgcagttaaggtgcctcatgatgaaaatgtcatctaactctctgcatctgtttattttggtaccatttaaccaacatttgttttgactgagttttcaagtaggccttgccttccacacattggctgctttctaggaactgggaaatgttgcttcttaagggtcttcacgttggtggttagtgacagaattgtgcagtctctagacgaaggtgtagatggatttgggtgtacaccatgtgcatatggagccttatttcagtttcattgtgcctgctgtaatactaaatctgagttggaatgtgttacacaatttttatgaacataatcaacttttgattatctttgtccatgtagagaaatagcagtttttgtaagcttaaggtgatttgtgttttgtttggattatttctaaacaaacatgtttccatatgagaggagctgattattcaggcattcaaataaaagactggaagctatattggtgagagatggaacattgtcctgtttctctgactctcacactttatgttaagcagcaacttgagcagagtctatggccctgtgggaagtggctgagtaatttacttaacagagcttgtctttgataatagcccaagttgggggttagtggtctgaga

SEQ ID NO: 203693 - DNA, 271 bp, Homo sapiens
cagtgccagatgataagacaatgcagaagcaacagtgccagaacacaaagttgatgttagacatccgacagaagggttccgattattcaagattgcttttgacttccttcatggcacagacccttctgatacaggcactgaaaactacacaaatggagaaaaaaggatgagtatcatatacaaatattttttaaaaaaatgaaaaagcaaaaaagttgaattacagtgtttctttaaagttgcaggtgtgcctgcttcatgcctccccttc

SEQ ID NO: 203694 - DNA, 662 bp, Homo sapiens
gagaatgaatttcctttgaatcccaaatatgccaaagactaaatgaatactgatatagtttcagatactcttgaatagtgctattaaataaacaacaacaaaaaagatccatgtaattcaatcagcaagactttggagtaaagggaattccttttgacaacattttgtttattgaaaaataaacgagagacccttcctcccgcaagcaatttacaatccaacagggaagataagacacacctgcaaataactgaaactacaccttgaaaggtggtaagtcccaaaggagaggtataaataaaacacttatttcctccacctccctattccaacatcacagtaagaatttcaggagtggctagcaagcaaatctagctcgtgactagttcacagcagccccacccatggtgcttcggtggaggctcaggaatccctcgaagacagagaccagccagaagtggctgagagtcaacgccattacttcccacacctccttccacacacattaaaaaagggttgcagtttgcttattataaaatgcttcctgaaatacagtgaagtgaacaataggcagttttcaaaagtaaacagtataattacaacattttatcactttttaaagtgtgtgactgtctctcagagtattttcctagtatgcattt

SEQ ID NO: 203695 - DNA, 311 bp, Homo sapiens
gggtcgtcagaggacccaaaagtgcactcttctatatctactgttactttaatggaggctcctagatgtcagctatttgatgaaactgtctcctacaacttagtttttactctaaatatatatttctcttctttaatctataaatctcacaaagaaagttagttctcagctttggtaattgtctgcctggcaagtggtctcttcctgggtgtttaaacaaacttactctgttttctgaattcttagccaaagcataaacttagttgtgagatttgtagatatagaagagtgcactttaaggatcctctaga

SEQ ID NO: 203696 - DNA, 108 bp, Homo sapiens
tccccttgtccaactctctgatatgaactcgacttttagatgaagatgttcactgggcaccaagaacaaacctcctgttcacttccatggtgccctgaagaaatcctt

SEQ ID NO: 203697 - DNA, 137 bp, Homo sapiens
ggggagaaatatatatccatactaacatacagtacatgttgtgtggtaaagtagcacaaatgggcaaatatttaggtatttaaattagttattttgaatatttctcaaactgaagtataatcaatctttcttttttt

SEQ ID NO: 203698 - DNA, 410 bp, Homo sapiens
ctgagattacaggtgtgagccactgtgcccagcctaaatataaaggattttaaatggacagttgaggtggggatggaggcagatgaaattgttccagtagcttattttgcaattacagtattcagttgagttgcacttttaatgttttaaccaatcaaaatgggctgagcacggtggctcatgcctgtaaccccagcattttgggagactggggcaggcagattgcttgagttcaagaccagtctgggcaacatggttagactcctgtctctaccaaaaatacaaaaaattagctgggtatggtggcatgtgcctgtggtctcagctactcgaggctggattgggagggctgcttgagcctgtgaggcagaagttgcagtgagccaacattgcgccactgcactccaacc

SEQ ID NO: 203699 - DNA, 567 bp, Homo sapiens
tgggttcaagcaattctgcctcagcttcctgagtagctgggattataggtgcctgccaccatgcacagctaatttttgtatttttagtagagacaaggttttgccctgttagccaggctgggctgttctcgaactcctgacctcaagtgatcctcccaccttggcctctcaaagtgttgggattactgtgccccgtcttaatcagttatttttgagggttatgggtaaacatacacaaaggtgaccttaataccaaatgtgatagagtgatctgcatcttacttatttaaaactatatattctgagagaatttggtcagagaattcgataggattatccaggaatgattaaatcaaattgacatggtctttacttgcagacagataagctgtttgtatacatatgtctatgtgatactaactttgaacatcaagactatatatttgcgtgcatatgtgtatatatcttttcttttcttttttttttgaggtggaggttgcagtgagccgagattatgccactgcactccagcctgcgtcacagagttgtttttgttttgttttgttt

SEQ ID NO: 203700 - DNA, 473 bp, Homo sapiens
cttccagacctgtatattaagggacattactgtaagtaggaccaaaaagagtcctcggtaattctcctcttctggcaagaaaatgagtaaaacatactaaccgcattgtccaaggaatagaattggtcaccgacatgacaaaaaactcaaaagttccaggaggtggttgtccatttttgatccctattctgttaacctatctggcttctgccaaagccagatggattatcagatgaatgcacattagcataaacttaaatcacacttgcagatgctctctaggatgtggtaccttcactgagaaaacatggtttctggttctttgtatgaggcgtttgatttggtgaatgctttttaatctacatcgattgggagagaaaatcaaaatgatttgttttggtgaggtaagaacaaaagcactgcttcactgttttatgtcatggctacgtcacttctgttttcagtttaattgg

SEQ ID NO: 203701 - DNA, 649 bp, Homo sapiens
gtcatcccaatgctgggattacaggtgtgagccacatgcccggacataaaatgactttttaaaaaactgacaataccaactgctggtgaggatatggagcaactagaactctcctaatggagcaactagaactcttgtacattgctagtgtgaatataaaaatagtacagccaccttgaataacagcttgcagttttttatacagttaaacatacacttaccatacgacacagcaataccactctgacatatttacacaagtgaaatgaaaacttatgtttgcacaaaaacctgcacatgaatccagcctgggtgacagagcgagactttctcaaaaacaaataaataaataagtaaaagtcctcccaataggttaataaagattataagagatggtggtggggggaagtaaaggcacaggcatcagtgtaaatgaatactgcatggctctttcaaaaatgttctcaaggaagatttaatgacaagaaaatactaaaaaagcataaatggtgaggaaaaggtatatacaaccatatacacagtatgagtctgaggccatagaatattctgtgtatgaatatataagatcttttgttgaataaacgtgtattgagcacctacaatgtactagatggtagggatatagcga

SEQ ID NO: 203702 - DNA, 393 bp, Homo sapiens
accttggagacataggtttcagtgagccgagattgcaccaatgcactccagcctgggtgacagagcgagactttctcaaaaacaaataaataaataagtaaaagtcctcccaataggttaataaagattataagagatggtggtggggggaagtaaaggcacaggcatcagtgtaaatgaatactgcatggctctttcaaaaatgttctcaaggaagatttaatgacaagaaaatactaaaaaagcataaatggtgaggaaaaggtatatacaaccatatacacagtatgagtctgaggccatagaatattctgtgtatgaatatataagatcttttgttgaataaacgtgtattgagcacctacaatgtactagatggtagggatatagcga

SEQ ID NO: 203703 - DNA, 594 bp, Homo sapiens
tgacaatgaggaaaaagcatgaggaatacagtggaaaaacaagaagcgtggtgctaatgaactacaacaggaactccaggtcaagatcatggactaagacatgtaaaggcctaaatttcaggtttgcaaaaacaaatccccaaatataaggtcatttccaaattccacaccaagagtaaattttactctgcaaagaatcttttattcaggtgacctttcagtctttctcatctctctttaaagtgtttcatgatcaatatagtagcagattgggaaattttactttgctttttgcttcctactcacctccattggtctctcacaaatttaaagtcagacctgatttagaaataatgacctataaacctgaacaggtgagtgatcacgttaatagtgaattacaaaccaaaacctcccttctgtggaatccatccacccactcccaaaaccataggtggaagtcaaggcctatagcactcatgcatgtggaggaggagcccagagagaaaaggcatggaatcaaaaccacaccacataacattcccagttccttgcagaaggtagaggtaaataagcagagggtgacaagatagt

SEQ ID NO: 203704 - DNA, 593 bp, Homo sapiens
aaatgaatgccaacacctgaaatctgaagagctcactcatcctgagcaccacgtgtaaatatctccctgtgagtacatatgccatcaccacaaaggaattcaagcactccggggcagaacacagctaaagcttgaaataagtatttttttatttttttaaaaacttcactccttctctagatgtctgtatgaataatagcttctttacattttacgaatatcatgtataaatatcagggaaaacagcaggtagtccgacaatcagatgctggtaccgtgagctgagaatcttggtgccagtcctggaccaccaggcctcagctcactgcagctagagtcagggtggcaggtgactcgtagggaaattttgagagcaggtataaaaccgtgacattcttaattcccttggtgataaatgggtgtgctgtaacgtgagaacccctgattcgtaatctatacggtaacttgcagggtgttttgttttgctaggataatatgttgttagcatcttgcttttaaaaagtttatttttctaagctaactcatttaggtgtagcctaggatttgtagcctatttcatattttttgatagg

SEQ ID NO: 203705 - DNA, 318 bp, Homo sapiens
tcagcctgggcaacaaaaggagattcccatctctacaaaaaatttttaaaaaatcagccaagcatggtggtgagcacctgaagtcccagctgctcaagaggctgaggtgcaaggctctcctgagctcaggagattggggttaccgtgagccgtgatcatgccacagcactgaagcctgagtaacagagtgaaacactatctcaaaaaaaaaaaaaaaggaaagaaaaacctgttttccagggtaaaaccattttccatgtctcatttctcctcattgaattaaaatgaataagaaaaacccagtcactttaaccaagg

SEQ ID NO: 203706 - DNA, 266 bp, Homo sapiens
tacagtcctgtctacttgggaggtggaggtgggaagataacttgagcacaggaggttgaggcagcaatgcgcagtgatggcgccaccgcactccagcctgggcaagagagcaagaccctatctcaaaaaacataagtaaaataaaatatatgaagcaaaagccaacagaattgaagaaatagacagttctatggtaatagttggagactttaataccccactttcaataacgggtagaacaactagatagaagatcaataaagaaa

SEQ ID NO: 203707 - DNA, 445 bp, Homo sapiens
cccctaaagatggaattctactgggaagtagtagcaagaaaaagaaaaccatgaaaaggaccctggaaccgccatgacctttccaatggggaataaggaagttcctggagaagggcagtctctgctacagtaactgcatgagtgggagaggcattttcctttggcaaaaatttcctggtcagcctgtatcaaaacctctttttcccccatggaaaaaggctgacaactctgcaaaaaaattaataaaaaaaaaaagaaaaaaaaaagagccatacagaattccctattttttgcctcataccatctggttggggttggagatctaagtatagaatggcaacggcattgatttaggacccaacaaaatctgtaagtgtctggaaaggcgatggcatggctagagtgggtcccttcactctgtggcctgcgctgtaggctttacact

SEQ ID NO: 203708 - DNA, 533 bp, Homo sapiens
caactacagcatgattacttcagttaggaaggggagaggagacagacattaatgttttgttgtagagggagggggaaaaaaaacagtggagagaagaggctgtgattttggtatgcaggatcattgacataagaggaaaaggagtggttgagatttgaagaaggccagattatgcttagccagaaatagtggtcgagatacaacacatctttttttattttgttttaaagacaggttcagctgggtgtggtggctcacacctgtaatcccagcactttgggaggcagaggcaggtggatcacctgaggtcaggagttcaagaccagcctggccaacatggtgaaaccctgtctctactaaaaatataaatagccgggtgtggtggcatgcgtctgtagtcccagctactcgggaggttgaggcccgagaatcacttgaactcaggaggtggaggttgtggtgagccaaaattctgccactgcactccagcctgggtgacagagggagactctgtctcaaaaaaatgaaataaa

SEQ ID NO: 203709 - DNA, 399 bp, Homo sapiens
aagacaaagagaagatattaaagtagccagagagaaaaataggtaatacaaagctggcagcaaacttctcaacaactatcaaagccagaaaacagtgcaataatacctttttctttaaaaaaaaaaaaaaaaaaaaaaaaaaaactgttatttcaagttcaagggtacatgtgaaggatgggcaagttttttacataggtaaatgtatttcatgaggatgtttttgtgcagattatttcacccaggtactaagccttgtatctatttagttatttttttctgatccctttcccctccttcctcaccctccatactccattgtgccccagtttatgttgttcccctctatgtgtccatatgctctcatttagctcccacttataagtaagaacatgcagt

SEQ ID NO: 203710 - DNA, 620 bp, Homo sapiens
cacacacacacaggcatgcacatacacacgccctgttgattctggagaaccctggctaataagttacatgtcacttttacttcattacagttattaactgcatttattacctgctacagtttgaatgttccctccaaaattcatgttgaaatttaattgccattatgacaatgaagaggtgggactttcaagaggtgattaggtattgagggctctgccctcataagtgggctaatgccactgtggagagaatgggttagatatcttgggaattcaggcccgttttccctgtctcatgtgcctgctttcccttcctccgtgggatggccctgtcggatgctgatgccaggctcttggacttcccaagcctccagcaccatgagccaaataaaactggtattctattatagcagcagaaaacctactgataccttgccttacattgctttatgcagaaaagtcttttcttcctccagagaatatcaagatacctcaatgatgaggagcagatgccttttacttttttgtagatgagtttgggcaaagtgacaacaaagggcctgcagtactggggtccctgatgaagacgtatttggtgatatctggaaagcaaatttgtg

SEQ ID NO: 203711 - DNA, 740 bp, Homo sapiens
ggtgaaagcatggacaatgagagcagctgtaagcatggaaaggaagttaggtggagaggcatgttaaaagaattttgacgatacttagtgtactggacattatcttatctgaccagaaaaatatatcctttattttccaaaagttgcccctctcccactccagccatatgattatggaggggactgaggtgcagccatgagaatgcccttggtagaactcctaccaaaaagagcgcacttgaataagggcctcagctgctgcacttggaaatccatctccatgtatgcactgagaccacatctcatacaggttgctgccaccagtaactgagtgtgatagggacaccaagggagctccattccaggaagacaagagactacctttcagcaactttgcctcaggaactacctgataatcttgcagaaccctctatagactgcctagcaatctagacccaaactattctctcttttaccttcacttagagtcagattgcatcatggtctgatggcttcccagccatttccagcaccctccctatatatatatccttttacacagatatataggttgtatatgtctaagtatatctaataaaatccttatacatttaatcctgtttggcatctgcttgttagaggacatgaatgaatgcaactgccaatcctattctttctctctggctctgtcttctgtctctctgtctccctctctctcttttacacatacacatgcccca

SEQ ID NO: 203712 - DNA, 811 bp, Homo sapiens
ttcaccaggcaggctgtgttcacattcaggtcacaactcagcaaccccaggaataataacaacaatccctcttgttggtagagtactttttcatcatatattttgtctcattttacctcaagttctttgtgaaataaggctgggtataaatgaatacataactgtcctgtttttgccaatcctacaaagtgtgggtattactcttctaacagttgaggaaacggaagctcagagaggtaaaataatgttagcaggtggcagaactgaaacctaaacccaggtctatctggttccacagctgctttcaccatgacacactgcatctaacttgctatttgtagccattctgcagtagtataagctaatgtatccgagggccatataataagtcagcttattggttgggaatagaatctaggaatcctactactaggttgtcccctcctctatcactaggatacattaattctaactgtaactgaagtgttggctgccagggtgaaagagggagagcaagggagtgtaaggagctaagattggtgcctgattctagacctagaaatttaaatgagagacatagtatgtggcacagggaaaaataaaaaccgcgggcttatgggctttggagcccagccgacctcaatttaagttctatctctagtccagacatggtggctcatgcctgtaatcccaacactgagaggctgaggcaggaggatcccttgagcacaggagctccaggcagcagtgggctatgattgcattactgcactccagcctgggcgacagagcaagacccctacctcttaaa

SEQ ID NO: 203713 - DNA, 454 bp, Homo sapiens
agtttggggggaataattatttacagcatgcgcaaaagaacccatattctataggaataaacacaataaaggggttgcatgataaattccagtttatattgagtaagttatgttttaaaatatagatgcagccttggagaccaagaagaaataaaatatttataaatgtggggtgggcacagtggctcaggcctgtaatcctagcgctttgggaggccaaggcaggtggatcatttgaggttaggagtttgaaaccagcctggccaacatggtgagactccgtctctactaaaaatacaaaaaaattaggcgggcgtggtggcgggtgcctgtaatcccagctacttgggaggctgagacaggagaattgcttgaacctggcaggcggaggttacagtgagccaagatggtaccactgcactccagcctgggcaacatagcaacactctgtctc

SEQ ID NO: 203714 - DNA, 457 bp, Homo sapiens
ccccagcaccagtctggatattttcttatctttcatttcattacctatctcttaagttgtgtctatcagagccatctactgatttcttaaattgttatattatttttcaattctagaattttaaacatagtgtccagttctctcctgaagttgttccatttggtcatttaattcatgaacattttaatcatagttattgtaagacaccggtcagataatgttaactacgtgaatttcctggaggtctgtttctattgttcactttctcattgttggtcgaatcttgtgtttttgcattcctatttcttaagcagactttgaaaacaattaatagagaaaatttgagaaattagaccatgtcctccttcagaggggctttgtttttgcttctggctatccactagatctgaggctgggcttcagtccttgtgaggacaggcccataaccaattcacct

SEQ ID NO: 203715 - DNA, 527 bp, Homo sapiens
aaaaaaactccacctaaaaaataaatttaaaaagccatttttagcttttagggacaagtgagaaagaggctgtcgaaaaacaggccaccatggccgtctttgcacacccgctctcaagagcaaggcgagattgcaccccaagctgtgcctcagcatagcgctgctttgaaaattggcatcacagagctgcctccaacatgaactttcctcagaacctcagcctgttgtgtcctccagggaaccccgggaggaagcctgggtgaatcctccctcagtcccactttccagataggaggccgaggcccaggcggtaacagtgccgagcaggaaccagagagctcaagccctgggcctcctgcatgcgtagagggtttgcctctgaaaacctcaccctgtataccgaagaccccaaaaggggaccctgggtctgctcaccaggttctccctgcagtcctcggaaattctggagctccctgtcccatggcagtaaagaaaagagtgccatcccattccagcaggtacagcta

SEQ ID NO: 203716 - DNA, 234 bp, Homo sapiens
acttctcagaaaagtctttaaagattgagaagttgttgagctcatgggtgttttcaaaattctcacttttgtttgagagctcatattttattattgtaaataaacaccatgagttactttcgttgaagtgattggctcactttatttcaagagaattactgccaaatacttgagtctgaatatctgtggcttgtctttcagttggactttcaagtaaaaacaatattccttaaa

SEQ ID NO: 203717 - DNA, 329 bp, Homo sapiens
cttgccttatttcttcttctctttggtgacctacattgtcaaaactaccaattccaggttaactttgttggagaatttcccccacccccatccagtgggtcacccaggagtaatgtccctccagcaacgttccccctatggcctccagcagagctgatctgcctctcacacaggtcctggtgtctgcctctgcaccgttccctaaatgcagccaccttggcaggttccaggtggaagttggtagaaggcccctgccaggtcacagcaatgctctccttgtcaaggcatggaccagggtcattcagacacattcagatactgcactgaga

SEQ ID NO: 203718 - DNA, 373 bp, Homo sapiens
gacattagtttataatctattttagaatattttatagaattgatgccaactttattgaagtacaattgataaataaaaattgtaaatatttaaggtgtatggccaggtgcggtggctcacgcctgtaatctcagcactttgggaggctgaagtgggcggatcacaaggacaggagatcgagaccatcctggccaacatggtgaaaccccgtctctactaaaaatacaaaaattagctgggtgtggtggtgcgtacctgtaatcccagctacttgggaggctgaggcatgagaatcacttgaactcaggaggtggaggttgcagtgagctgacatcgcaccgctgcactccagcctggtgacagagagatactc

SEQ ID NO: 203719 - DNA, 247 bp, Homo sapiens
gtttgtagcaaccctgctttgagcaggtctgttgggaccatttttccatcacatgttcactttgcatctctgtcacattttggcaattctcacaatattttgaactttttcattaccattatatctgttatggttatctgggattagtgatctttgatgttactgatgtaattgttttgggagccactaactgtgcctatataaggtggcaaacgtaataaacattgtgtgttctgactgctccaca

SEQ ID NO: 203720 - DNA, 718 bp, Homo sapiens
aaacaacacagagcatggcctggggcgtgaacaaatgggaacttaccataataaaagtcacatacattgtagagttatcattacaaagataacctaattttatcttgtgaacctctctgtagtctcctagacaattgaagacaccctggtttgtcagaatttacagacgggacttgctgatccaataaaaaactatggctttgtgtcttcccaactctaagtcaataatgtcagctaaaggattgtcattctacctccctagatgttaactctgacaacttctcggccaagcatttttgtaagacagtcatccaggtagccacagcttgaaagtgaagaatcgagaaggaaggtttggtcttgccaattataggaatttggcaccaggttccaaagcatggtatggctttgctcatctagcccctggaatgtgtacatggctagactgatcctaggctatgaggaccacccaaggtaggtttgagattcctgagaaatatctattctctgactccctgtgctctgcactccccaacaaaagaatgtgacattatgagaatggaacattataatattattgagaataggcaacctgggtgtttagagatcagtaaaaacaaagttaacaaaaataatggatgccagatattaaatgacttctttacacttgctgctttaatgtgttatttaaagcacactagattttggctaaaagggt

SEQ ID NO: 203721 - DNA, 189 bp, Homo sapiens
atgactgggctttaggatatattaatatataacttatgataaagaaaatcccatgtaaaagcttagtagcattgttgtaacagtaacatatttcattgtacttcagggtcgtccagggatgcagtcttaccatccaggagttcaaagccactatcaacactattttcctgatgacagcaccaactatag

SEQ ID NO: 203722 - DNA, 443 bp, Homo sapiens
cagtttcctctttgtccctgacccacatttcccacagacagagaaggcaaagtatctgcctgagaaatgcctcgactcagctgcctagctcacttgctgctttacctgactcaaaagacagcagactcagaagaaaacaaaaggaagggggctgggtgcagcggctcatgcctgaaatcccagcactttgggaagccgaagtgggcgaatccacttctcgaacctgaggtcaggagttcgagaccagcctggccaacacggcaaaaccccgtctctactaaaattacaaaaattagctgggagtggtggagcacacctgtaatcccagctatttggaaggctgaggcaggagaattgcatgaacctggaaggtggaggttgcagtgagctgagattgcaccactgcactacagcctgggtgacaagagcaaaactctgtctca

SEQ ID NO: 203723 - DNA, 490 bp, Homo sapiens
aataaggttcaaatcatttattatcagtattctttctttctttctttctttctttctttttgagacaaggtcttgccctgtcacccaggctggagtgcagtgacatgatcatggctcactgcagcctcaacctcttgggctcaagcatccctctcattcagcctctcaggtagctggcaccataggctcatgccagcaagcctggctaatgtttttaaaatatatactatttttagagatgagggtctctctttgttgtccaggctggtctctaactactgggctcaagcaatcctcctacctccacctcccaaagtgctaggatcacatgcatgagctaccgctcccagctggtactctttcttattattagtctgtgattattctatttgtaagaaaagatcattgaccaccagtgcagaattatggtaaacttatcttgttttgtttttgaataatgtcagaggctgttattttgcagagtatggtg

SEQ ID NO: 203724 - DNA, 325 bp, Homo sapiens
aaaaggcatcagaaaaatacgagaagtgaggaaaatagaggttgcttttgttacggtaggttaagatagaagaaataaagaaatatttttatacaacagcaaacgaacaatattaaatacaggcaaaagatggtagaaattctggaacagtatccttcagtaggtgagaaaggtgggatttgcagattttgaattaaaggaaggaacgtgggtagaaaaattagtatgttgctatgcacagtacatgagtgtgagtgcatgggcagaagtatagtggggttctgctgttatctgattctttcaattgtttgatgtgtaatgttaa

SEQ ID NO: 203725 - DNA, 690 bp, Homo sapiens
ggcttgggcccattttatagaagaagattgaggcccatcgaggagctgggctttcctggaatcaccttggtctcctgactcttcacttactattgttgcctgtctcccagttttctctaaacccatataatcccaagtgaaacctgaggtccattgtgtcttaccggggtcctatcaggatcctgctgggcagccgtactgcacaccttccaggcgagggaagctgccacgtaggcagccgaggcaacaggggaatcccgtgggatgagacttgtccttcctcatccctgctctggctcaggaggccatgaagagccagggctgagtcctagatctggcactaacttgctgtgtgacttgggacgagtcctggtccctttctaggtctgtttctcatctgtgaaataaggataatggtagtccctgcttcgaagatttgttaagagggatggatacgttcatatgtataaaaagtctcagcacagcctgtcatccagctgggactcagtaagtgtgagctgttatccttattagtaaccactgcacactgtccccctgcagacctacagactaactatgggctcagctggggggatgtcctacccctgcccatcagtcctggctctcccatctgcctcccagccccaccctgttcactctgtagggatctgcagaccctggcccgcattg

SEQ ID NO: 203726 - DNA, 400 bp, Homo sapiens
gtttcctgagttttttgaagattatgttgcagccttgccaaaggagaaggtgtacttgccctgcatgtggaacatttattttatccatgtagcttattagtggctaaagcagcatcttcactgtgcaaatattgtgcagtgtttaataaaaacagccttgggctctggtctgggccttgttgccttgtaaccttggacgagtcaatcaacaaatcttagcatttctgtcttcatttctccaactctgtggagcctgcagaactatttaaaatccttagcagattcagcccccttgcagactgttggtctttcctgtttgtctttgtttccattgggtgctaggactgaaatcttcaaagaaagtgatctgtgtgaaagtactttgagatttataacatgc

SEQ ID NO: 203727 - DNA, 520 bp, Homo sapiens
ggatattgtggcggctgtgcttttccgtcctcctaatgtgcattttatccttcttaaacacatggagttaaaagaaatcaacgcggaaaatgacccttctattcatacatttgctaaaaaacaatgaaagtggatagtttttattttttaagtggggtagatacatacgcatctccattgccagggcctgagagggcacaggcacacccttcagacaacgttgctttaatgtggaggttttgtttgacatgcttctattgtcagctcatgctatgactcagaaaaaaatgagcaagcacagaaggggtacggcagtctcaatgtgtttgcaaagaataaagtaagtctagataatgcctggagggccttggtgagtcacttgggccgggaaaagttgcctttttacacatgcgtagagattcttgccaatttgggaacttatttatcacaattgtaaaccagctgcctttgtttcaataacaatttctgacatttattactgtcaaagaaaactttaggc

SEQ ID NO: 203728 - DNA, 402 bp, Homo sapiens
aataaaagaaagaaaatatatttttggctctgttcttaagtatataattgattttacccatttataatatttgaaatgaaaatttataattcatttttgttattgaccattcaaagcttagggagcagagggtatgcaaaagaatttgtaattttgtgggggcggttccaagatggctgaataggaacagctccagtctacagctcccagcgtgagcgacacagaagacggatgatttctgcatttccaactgaggtactgggttcatctcagtggggactgtcagacagtggatgcagcgcaccgagcgtgaaccgaagcagggtgaggcatcgcctcacccaggaagcgcaaggggtcagggaattcccttttctagccaaggaaaggggtgactgacgg

SEQ ID NO: 203729 - DNA, 406 bp, Homo sapiens
gaatcactgttagagcacactgcttataagagaaacctgacccaagtatttgactgctcctgcacacagctcttaagtgtagataattaaaattgctagtcacactatgaccgttgtctctgtagaaagggtaggctgtgtcatctcactcctttgttttgataacttcttgacaccattgtgctactaacccttgtctcgttgaaattcagactcctgttttaaaaacactgggtctctgtgatttcagtgctgtcatgaatacatccagtattgaaaggaacattcggaaacttccagtacaataatttcccttaataaaagacaaaaattagatccagggagcaagtaagttgctcaagagaaatggaaaactagaattgctatctaggatgtcatgttaagc

SEQ ID NO: 203730 - DNA, 846 bp, Homo sapiens
ccacgtggggctgtgaagctctggaaatgagattaacgcaactgaagaactgaatttttaatttttttaaaaaatttagttaaccttacttgaaatagctgcaggtggctagtggctgttggatttgagggtaaagaagcatggtagagaaggcaggtgggacagcctcccatctgcgcagagatctatatgtcaccgccaccgacaggaagacttgtgcatcctaacccttagcctccttgtgctgtgggcaaggtccctgctgttgcagaccccactaaattcccagtccgtgcaggtaactgttgtgcttctgtgagcccccgccagtactctgggtggggacatgtcttgctcagacagagatcaaaggagagctaagagagggagagagatggacagttaaatattgaaggagggcgttggcctttttttacacagcacagggaagagactagtatgtggagggagcacttacatttggtagatgttcttacacagatcagccacctgaacgtgtgtgggatatttttattacctatattttacatttctattgtctgtattatttaccgtaactacatttgacatctacatattgctatgttttagaagcagaggtttattttcacctctttcctgaaggccatgttttataaaactgacatgttatctagtctagaagggaaggcccagctgggcatggtggtgcatgcctgtaatcccagctactcgggaggctgagacacgagaatcgcttgaaccgggaaggcggaggttgcagtgagctgagatggtgccattacactccagcctgggtaacaagagagaaactccatctcaaaa

SEQ ID NO: 203731 - DNA, 400 bp, Homo sapiens
ttatgttatttatttgcatacttatttgttgtgcttttctagattattattgtctcagaaacaataccataagctccttgagactatggatcatgcctcttgttttgtaggcatacgaatgccaactgtccgggatgctgtccatggtcctgaacttctgccatgaagtctaagccaaggggatgcagacaaaagtaaggatttcctattaactgtcataattgttttggggtataaatagagacaagaaaaggatccctggacttgacatgtaagccaaatgaaaatctgttatgtgatcacttccacgtagggcaaaaaattgatttataacatatcaaacacttcagaaacattgataagtaacagaaatttcaccttgaattatggattctgagac

SEQ ID NO: 203732 - DNA, 435 bp, Homo sapiens
ttaggcctcaaaaagtctccacaaataaattttcatggatagtgcctagcacacaatttaaagagtgtacatagattcactgcattatgggcacaaaaagagaaaaaggaaaaagcagaaacatcagtttgcagaaataaactcgtaagcacttcaggcagtgaaaatgtcagccatggattgatcgtaaaacaatcaggtttgctgtgtttaaagaaaaaaatatatgcaggaatagaaccctataaaaagtgacctaccaaatctaaaaaagaaccaaatggagtaataaatggaaaatagaaagactaaactttaaaaatttgttggatgtgtttaacaaaagattaaattctaccacagataaaattagttaactgaaacataggggagaatgtttcatctagcctgtattattgagacacaaagagatgc

SEQ ID NO: 203733 - DNA, 543 bp, Homo sapiens
aaactgagttggtagggtaagtgattgggacatgagatgatgagagagagatgtattgactgttaggaaatttaatttttatgaaatcagcattatggggaaatactgtaatctgattcattcctgcagaattcccaggaggaagaggcccagcctcgggagttgaaatgtttcattatgtacatgcgtgggaaaaagatgaaatgtggtttccgtgtgctgattttctgtaaaacatctattagtatgagagtagccaggctaggcaacaaagcccccaaaccatcgtagtctagggaaaagtgaacccagaaggcatttctctgatggatgctgacatcaggagcaataagtttgaaagtagcaagaaaaagtaatgacagtaaaataatgttgaaatagtagctaaggaatgatcacatgctgaagatgaggtcagtcctttattcctcatcaatccctgcttaactttgcttttagaaatgtaaggttccccaaaaatgaggaaactgcaaatgtaagctttttataccaactcagttt

SEQ ID NO: 203734 - DNA, 654 bp, Homo sapiens
ccttgtcttaggcagtactttttggtctttgtacaattgcaaacgtgtcttatctcatgggttgtggaataacggaactaaatcagtttcaagactggtatagtttacaaataaacatggataagatcttttaagtcttcattcagaactcaaaaaaaaccgcaagtaaatccaatagctgaattcacttaatattcttctcaaattacaacacgatttcaaataaatggctttcttttattgttcctataaatcttctaccagccaactcaaacaatgtttaagaaaatggccaggcatggtggctcatgtttgtaatcccaatacttcgggaggctgaggcaggaggattgcttgaagctatgggtttaagaccagcttgggcaacatagtgaggcctcatctccttaaaaacatttagaaacttagctgggcatggtggtgtatgcttgtagctactcaggaggctggggtgagagtatagcttcagccttggattttgaagctgcagtgagccatgatcgcatcattgcattacagcttgggtagcagaggtgagacctcaactctttaaaaaataaataaataagcaaaattaactcaggtttattaatagtggcagcaaaaaaaagaaaaaagaaggcataagtcaag

SEQ ID NO: 203735 - DNA, 396 bp, Homo sapiens
gactttaattcttaaattcaaagaaatgttgacagctttaaaagaaaaatcataatagacactaggtaaaaatagcaaggaagagtttattcaagactatggcaataggaggccaaaagcagtggttaatacttgtaatcccagcatgttgggagtctgaggcaggtggattgtttgagcccaggagtttgagaccaggctgggcaaaatagtgacaccttgtctctacataaattttttgaaaaattaactgggcatgatggcatgtacctgtagtcccagctactcaagaggctgatacgggaggatcccttgagcctgggcattcaaggatagagcgagacatgatcacaccactgcactccagttggggcaacagaaggaaaccctgtctca

SEQ ID NO: 203736 - DNA, 382 bp, Homo sapiens
atcaaattttataatttgtaaactggactatgttgtgcatcctttcatagtttaggatgattaagagtttggaccttataagtaaactgccacattttgaatcataggccccaactgggtactactagtgaattctcagagtcattaatctagattgtttcatgcctctccttatcttcatctataaaaatggataataggactaactgcttcacaatctctttgccttgaattaggtgagataatgcaagaagaacaacaaataccatacatgtgatagtcattaataaatttgagttgttattatctaattattaaggagaatttagaaaattcataaaagcaaatgaagaaataaatcattccttgcctattacccaaa

SEQ ID NO: 203737 - DNA, 371 bp, Homo sapiens
aggtatatagtataatctcaatttatgcttttgcccttagatgccagaagttaatattctttcaatacttattctcgtagaagcaaaagagatcctgtttgtgtgatgttcctacagcctctgctgtactgtattatgaaagctcaagaaataggagttaatgatgaggcacagcaggaagaaaaatgtctctaagatgccaaacagggaaaatttaggaagaaataagaaccaaaaaataaatcagttgatcagggtaaaaaatgtcttatgctctgaacttataactctatggagtaatttccactaatgatctcagtgtctacttaactaatcatgtacttttctagccagaaagacagtacttgtag

SEQ ID NO: 203738 - DNA, 260 bp, Homo sapiens
gcagtataatccaggttatgaattgtaaatcagatgccatgcaaagtactcgcgaaaattcaataaagctttctttgctcccagcacagcaaagttgggcctagggaggcaggaggaggcatgctggaacttggaggaaaggagacctgtgactggggaggagtgggtagggagtgggtgggcagggtgtgggggctctgaccctgcttggccaagacttctcagggggaggagctgcccattttcctgttggaggagtc

SEQ ID NO: 203739 - DNA, 473 bp, Homo sapiens
atcaggtgagaatcctgggttattgtactcaaaactaccactgaggagtgtggttcctgagaagttaagaaacgttcccaataatcagtagttactttctgggaccaaaatgaaccccttttttctggggacacagtcagtagagacagtcgataaggttgctaatgcagtaccacttccagaaaaaccagtcaagtcactgtgttccagaggtggtagttagtgatgtctacaggaatggatgacatcatctcaaacttagcatgcgattgtgttgaagatatttctagaagactagtgcttaaatcaagttctaaaaatttttctgctcgtttatcaaaatacttgacttagctctatagtttaaatacttgtatggtacttaatgggtaataaatgtatgaaataattttactcattgaagactttgatattttcaaaaactgcttgttcttccattcacaaattaataa

SEQ ID NO: 203740 - DNA, 138 bp, Homo sapiens
atcactttacactgaactatattgcttcagagttaattacatgtattttgcttttgataaatgaaaatactagatgcaattaattgaaagacaatcaatatgatcccacgattagacatcccaatgaaacagccagag

SEQ ID NO: 203741 - DNA, 662 bp, Homo sapiens
cgcacctgtcatcccagctacttgggatgctgaggcaggagaatcgcttgaacctgggaggcagaggttgcggtgagccgagatggcaccattgcactccatcctgggtgacagggtgagactgtgtctcaataaataaataaaagacttttggaaaggtggagactctagactgcaggagatgtggccgccccgaaaactggctgaactttgttaaatacaactcatgattagaggaatgaatagtgctgtgttttaactttgtaaaatacaactcatgattagaggaatgaataatgtcaactcacatctctgtgactagatgcaggcttcttaggatatttgtaacttgaagaaatctggaaggacctcattctctaattgcccattttcccaatttgctttacaaatccttctgtggaaagtctttttgaaaatagcatttttgctccctcttagcctctggggttctgaacgctttggcagtgaccattgagaatcaccctgccttccatcagttaccttgtatcaccttataaaagtcatttggccgttgcagtggctcacacctgtaatcccagcactttgtgaggctgaggccagcggattgcctgagtacagaagttgaagaccagtctgggtaacatggcgaaaccctgtgt

SEQ ID NO: 203742 - DNA, 446 bp, Homo sapiens
tccaggggtattaatcaatgttttgattaattacacgtacatagaatttaagacaaagtaaaggctcttccatccccgcaagtccccagagaaaatttataacagcaaagtatcatcattactaaattagagcgtgaccagcctactggtcttgcccaagtccacgctgacttgggaaaagtgactgcctgccgtgatggaagggaagtactcaacccgacagactcagccctttttaaaaactggaagcaggggtgagtcatggaactccctctgcagcagcacctctatcttcccagccctgggctggcgacagagggggaaaaaaagttggctgaatggaccagcaggtgagatgaagagttgattgtcttcaaacgtaaaatatctcaagcaagaaaagaagaaaaaagtctcttcaataaatgttggcaatattttcgaaa

SEQ ID NO: 203743 - DNA, 289 bp, Homo sapiens
gtccggccaaggatgagcaaggaacaaagagcttttagaacattaagcatacatctaaatttatttgacctgaggatccagcctggcctctcaagagcagacgctcacatgataaaacgtgctgggaactcaccatgtactcagcaaagggaagcaaagagggggaaaaaaagttggctgaatggaccagcaggtgagatgaagagttgattgtcttcaaacgtaaaatatctcaagcaagaaaagaagaaaaaagtctcttcaataaatgttggcaatattttcgaaa

SEQ ID NO: 203744 - DNA, 273 bp, Homo sapiens
tgaacccaggaggcggaggaggtggaggttgcagtgagccaagatcgtggcactgactccagcctggggaacaaagtgagaccctatctcaaaaaaaaaaaaggaatatatattattaacccaaagactgttttgttctagcttctgtttttgcttttcgcctttggctgccttgtgaataaaatcttaaatgaccgtgatagaaaaattatgtaaagtagtattcactaaaactttacttctgtaattcaatatgaagaagcttcacgtcta

SEQ ID NO: 203745 - DNA, 525 bp, Homo sapiens
gcttatatgtctatttggttttataatttaggagaattataaagaatcagggaacatatgttctatttgttttagtgttatagtggtagaaagcattgtactttatgctgtgtcaatattcgcatctcagaagtattagtatttgcaatttgtaaaagatgatgtttgaaataaactattttcaatgaaatttaccatttgaaaatatctacttgcaaattttgaggaagaaaacaacttttgaaactgagcaccatttagaagttttattcatgttatacctagaacaaaaggaatttttcaaataaaatgttaatgacaaaagccacatttctacgtattcattatagaggttatcataaggactgggataggtataatttctaagagctaaaattaaaattggtctgttctctgttagccagatgttggtgttggaacaatgtaatgcattgcttaacagtaggaggcacccaccaggctaatttatgggatgaggaatgttaaggccaatcaagtgatcta

SEQ ID NO: 203746 - DNA, 310 bp, Homo sapiens
acacacacacacatgcacacatatatatagatgggactgtttgggcaaaccagtatgtttggtcagcctagctatactaccccttgtagcctatatagtatccaatgtagttctaagaaaatgggaagcaatcaataaagctttgataattgaccaataaacctaatagttattgcagtaggctgaataagggctccccaaagatgtccacatcctaatccctagaacctgtgaactcctgagggctcaggaggaagtgaggaacaccttgagtgtatagaacacttttaccatcttagagaaatcatcc

SEQ ID NO: 203747 - DNA, 258 bp, Homo sapiens
aaatgtcccagcatgttaacaattatctccagatgatgagattatgggtagtttattttctttacaattgtgatattgtaaatactgtatttggtttctgactccatttcctggcatgcaactcctaaaatccttagatctccaaagtgatgtcttgtttatgctaaaacaaaatgaggccgggcatggtggctcacacctgtaatcttagcactctgggaggctgaggggggagaattatttgaggccgggagtttg

SEQ ID NO: 203748 - DNA, 305 bp, Homo sapiens
aataacgtttttgagcacctccagtccctgtgataactattttaaattctgttaatactctcataagtattattacttagctctactttgcaatgagaaagcagactcggaaatgttgaatgattatctaagggcgcatagttcaaaagtggtagaaccaggtgacaaaataaaaacttcatccagattaaatttaaaggagtttaattgagctatgaacaatttgcgaattgggcagcccccagaatcaccacagattcagagagactccagggatgcctcgtggtcagaacaaatttatagac

SEQ ID NO: 203749 - DNA, 440 bp, Homo sapiens
attcttgaagtgtcacttctcttattttttccgtaattctttcctactgttgccatacgtcttacatgtggagatgcaatagaaataaaattgcttctgctaaaatcacaaccttttagtctgaaggcaaagctgctttgttctagaatgcctgcggtattaagaaatcaccatgtgtccttttatttttgagttttaccatgatttttactagtgcctacttcaatgagttcttccaggatgcaggctattttgatgacatcttaaacaaagggaataagaattgtctttgccttaccttccttttcccacctttctcttcccacttgtcagagaaattttgcatgacagaggtgaatctctgtggaaccttctaggggtgtgaccatctgcttgccctggagagaatcagtctcttctttccaagaaacgatctgtca

SEQ ID NO: 203750 - DNA, 390 bp, Homo sapiens
ggtgcttgctgaggacaaaggaaatgggtgatggaagaagttataaagagcagctaagatcatgtaaccggttgcagaagtggggactataattatgagtattcttccttattttgtcataaatatatctttgtgtgtttatatacatgtattaattaaatgattttgttttcttctctcttatcctcttatcattacacgtatatattaatagtagttaggtttatgtcatagtatttaagttacaggatatcacgagagaagagtgggcatcacccaagtacatcacattctcttctgcagaagggttagcacgttttcagttgtatgcaggacagttgtgttatgttggatgggagtatgactttgttattatctttactgggagat

SEQ ID NO: 203751 - DNA, 497 bp, Homo sapiens
ctaaaaatagcaattaaaaatcccatgttaccaaaacaaaacaaagaaaacagtacaagcatagggactgtgcatattaaaagtaactaaatttaaaaagtattaaaagtaactaaatttaaaaattaaaccagcagcagcagcagcagcatctgaggcttctacagggaaacaagtggaaatagttcaacccctctgtacagttcctggggcagtcccagagcttgagcaggtgggagggatgagcattctgtccctgccgcaggggccattacacccacaggggcagcgcccacacaaggggtctcggctgcagctggcatgactggctcagccacaccaatgcttctgtgtcctgggcagcctggcttcccaacccccaaggagtcccaagccactgactaggtcctagaatagacaacccatgtcctgggctctggctggctctccagtcagttccttcacatctatcctagatagaggagcccttggagtct

SEQ ID NO: 203752 - DNA, 689 bp, Homo sapiens
aaaatcagccggtaccggcatgtgctgtaggccagcgaatttattttgtatcatgaaagagaagaggctgtatcagagaaaattccacagtgtgctaaatattattttgtgaaagctgttcttcagttacacgtgcacacacacctgtatgtatgcatgtatgtcaactagactgcaatacaaaggccactgctttaaagaatggttcatgatccagccttattcagccttactcaggctctgaccaacaagcagcagagcaccacacgatcacacggtaattatatgagtaacgtgaggaactgaacaaagaacagggtgatcgctggcctacagcagctgttttagcaccagaatgcctagtccaaaacctacatttttataatgaaaaagtcagattgctctaaagcatactgacttataaacagatactatagcttctcttactagagtcctcctccattttaagaagctatcaattacaagtaccaaagagtcattaatttgagatgctttttttcatgtaaacatctctaaagtcagaatgtatctttgagtctcttacaatcattatcagccatttttcccccacattttgacttctatgaaattggaatcttagattcaatgaaatactttaacagttttctgaaagaataaaaagaaacaccacccaatatgtacctaaa

SEQ ID NO: 203753 - DNA, 379 bp, Homo sapiens
caaactgccactcttaactcttgaagtaaataatctttgctggcaggactatgctgaatctccttaggcactctctaatcagatgtcctaggtcctcccaattcttagacatttaatacccatttttctcctccttttattcggaccttgtatcttccatttagcttctcaaatcatccaaaaccgtatccaggccatcaccaatcattctatacgacaaatgtttcttctaacatccccatgatatcaccccttaccacaagacctcccttcagcttaatctctcccactctaggctcccacgccgcccctaatcccgcttgaagcagccctgagaaacatcgcccattatctctccataccaccccccaaaaatttt

SEQ ID NO: 203754 - DNA, 490 bp, Homo sapiens
gttggaagaaaggttttcaaatattcccattgcaggcatcaccctgtttaatcctctctatgaccccatggggtgaatagtacctgcctctggattgggaagagcagaacctgtgatcatccaacagagaaaaaggtgaattctctccttaaaaatatggggagagggaatgctggccaaaaagcaaaatggattctaagagacaaaaagaaaaggaaaagaaaagtctgccaaacaccatgactatccctattttgtaggtgagaaagttgaggctcacagaagttagataattgcctagaaattgggaggagctgctggaattcaaacctgatttcagcattagcatctcagtccacaaaggtcaggccatggtccttgggacaactaccatggactgtgtaggccgccctgcacttggaaagttgaatctctgattaatggggtcaggaagccagcatcctggctggacaggggaaccttgcaaatg

SEQ ID NO: 203755 - DNA, 562 bp, Homo sapiens
tattgaaaaataattaagatagttaaaatatagaacttgggaaatggcaaagataatacagaaagatcctgcgtacccacccttcacccagtttctttcattcattacatcttatttaactacggaacaatacaaaaccaggaatttgacacaggtacagtgtttgcatgtttttatctcaagtgtagattcccgtaaccgtcaggatacaaactcttctatcaccacaaaaatctccctggtgctttttatactcacacctagcccctccctccaccatctctaactcctggcaaccactaatatgttctctcttaacttttgtcagaacattacgtaagggaaatcatacaatatgctgccttttgatattgaattttcttcgctcagcctaatgccctttaaatccatccaagttgttgcatgtattaatggctgtttctttttattgctgaggctgtatcaccgtttatttaaccatccacctcttgtagaacattttggttgattaccattttgagctattaaaaataaagctgctataaagaatcatgtaaaggtt

SEQ ID NO: 203756 - DNA, 241 bp, Homo sapiens
ccagccagaggacgatgcggctgtgagagcctgcaagaaggtgagcttctgagagctgccgagggccgagctccaggaagaaaagaccccgctggaagagtaaggctgacccggtcagtcaggttccaccctccctgcacaccgtcccctctcttctgaccccacgccccctcaccctggaggactcaggaagcacagctggtggacagggctgcaggtataagattcgctcaagactagg

SEQ ID NO: 203757 - DNA, 521 bp, Homo sapiens
ttataatttgtgtatttgtttatagtagttttttggtggactctttcagtttttccaaatataagatcatatcattggcaaacaaggacagtttgatttcttctattccaatttggatgcctttatttctttctgttgtctgattgctctagttaggacttccagtactatgttgaataacagtgatgaaagtgggcatccttgccatgttccagatcttagaaaagaggctttcagtttttcaccattcagtttgatactagctgtggcagcttccatgagaatcacgcagtttgaagaagcatttcactgaaaaatagggattgctgttctggaaagacaaaacaattgtctacaattctaaagaagaagtgaacacaataattaaatcaatgttattctgggtctaaagcttatattcttaattactatattatcccatcttaaaattttaatttggaaattatatatctaaatattataatcaataaagttgaacacacatgatgaagtgtgaaaag

SEQ ID NO: 203758 - DNA, 697 bp, Homo sapiens
catagtggtgcgtgcctgtaatcccagctacttgggaggctgaggcaagagaattgcttgaacccaggaggtggaggttgcagtgagctgagatcgtgccattgcactctagcctgggcgacaaagtgagactccgtttaaaaaaacaaaagataagcatctaacattttaaatgtattttttcagtatcaggaattttgctaagcatttgacatatattatctcatttaataacctgatgaaataggtgcttttattatcctattaatatagatgaaggtgcttaggcttgtggtcatagagctaataaacggcagagttaggcttctaattcaaatggactgactgtcacctgcctcttaacgacacactatcctcatttctttagtaatccataattattaatgatgaacaagagagtttgagatcaagtgatatactgttgtttaaacgttcctagaaaatagaactgaaagaattttctgtacactgtttttccctgatcagcccagaaatctcattagtaaaagattgatcccttcttttctccctctctcttcgttcttactttcccacctcagcatttcatctatttagaattatatttaattatcttcacagacaattcctaggccttaattaagtttattttagtgatggtttcattagctgtcttttttccaggtggctttaaaaa

SEQ ID NO: 203759 - DNA, 313 bp, Homo sapiens
atgatcgtgtgatctgatggcagtgttaaatcactaaggagacaaatatgaaaagtgcccaggagtgtgtctagcacatagtgagggcttgtaatggcagcgagtgcttttcacaaggcaagccacatcctgtttcatacctgactttgttgttctcatggacatcgtgcagtggttgactgtagactctggagctagtccctgggtctgcatcctgacataccaactgcgtggattgggaaacttgcttaggctctcttgtctcagttttctcatctgtaaaatggggattaaaaactccacccacttagta

SEQ ID NO: 203760 - DNA, 529 bp, Homo sapiens
agatgcaccatattctgagatacagatcttcttcattatattcagctactgaattcagttgcatcactcaccacatttcatgtttacctcctcacccaacacactgacagaggcagttttcagtttcttgatattagaagaaatgcttcagtaaatatttttatattccctttgtgcttctgagtttctctaaagtgtaaaattagaagtggaactactgtgtcatatggtattcaagtttacatttttacccaatgctatcaaactctttttcaaagtgcagttatttgcttcccaccaggagtacatacatgatttccaatttcctttattcccactgtgacttcgtagtatcagtctctttagtttttgccaatatggtggatggtggagaggggactggttattgttttactagcattctgattaccatggaggtagcattttcatttctttattagccagttgagttttactttctgaatgacctcttcttcttttccatttttgctgttgggttattgctttt

SEQ ID NO: 203761 - DNA, 313 bp, Homo sapiens
gaatgagcagtccgacgggcttcagaacttgagtttggcagtttcacaaaggaagtgagggagggggagaaggataggtggtcaaatgggagaggcagaatgaggccagatccctagtagtctattaggttatggtaaggaggttgggattttattgtaagtcatagtacattggtactacactgtaatttttcaagtggggcagtggtgagatttacacatgaagtagaaaatggtggccctgtatgttattagtagaaagaattgtgtggtgaagaatagaagcagagagatcagataggagttcattgtt

SEQ ID NO: 203762 - DNA, 343 bp, Homo sapiens
aaaccatttggtgcaatatctcagtgcaagtctggcttggaacaggatagctcaggaggaggacaaagcccttggggcacatattccttggagctgtcatcccaagaaggtatttcagtcatggcctagtccagaccactgatctaatttggaatcatggccttctgagagccccagcgaccttgggaagccatggtaaccacaaagggaataacagctccccctttttgccctaaaacatgctccatctgcagccctcccccatctcaggaaaggacaactccattcttccacttatgtcaagaaccttggagtccttgcctcctttctcacacccaagata

SEQ ID NO: 203763 - DNA, 188 bp, Homo sapiens
ttgtaccactgcactccagcctgggcaacaaagcaagactctgtcttgggggaaaaaagtgtgagttaaggacttgctgtgtgtcagggactgccttgggggctggaggcacatcctcgaacaagacagggtcctttccctctagatgcttacattttaaggacagaagacagggaaacaaacagaga

SEQ ID NO: 203764 - DNA, 341 bp, Homo sapiens
catttctatatcgttgaacagaacttggtcatttgggctcacctagctgcgtgggaaatagaaaaatatactctgagcttgtgcccaggaaaaaaaaaaagacaaaaaaagatgatgttgactgaaaattgaaaggaaatgggcaaaccagggaactggaggttttactaaaatcagaaaaagtttgtgctaggattaaggaaaagaaattatgaggtgggaggttaaagtcagtgagtggcatgttgtacttgaaagtttaagagtaaagagcatgccacctgaaagtcagagatgttattggagtaagagataacagacactggagggaggggcacaag

SEQ ID NO: 203765 - DNA, 303 bp, Homo sapiens
tcccccagtctccctacatattgcccccatccacatccatgcacctgcagttccagactcttcacaactctgctcccttcaactcttgatgcatcttaaattttccatctgtgctttttggtcaagttcttcccttacttctccaaaaatggagctcttctctatacatacgctctacaatggtacttggctctttggctccgattatacatcaccgagcacttgcctctaatgcttcagtttttctctgtaattaggttgtcagatccggaagggcagagatcgagatttatttctcttgta

SEQ ID NO: 203766 - DNA, 517 bp, Homo sapiens
tcaaaaagggaaattcctctttactgctcacagtaagctgcaaaagaaagttgtcaaggtggcttatgatgctgttgtagcagagctgtgaaaggaagtgctttgctttctctcccgccttccggaatctggcgttccttccccttcggctactgaaaggtgtgtacaactcccagaggggtggctgtaaaagttgactggaggcaaagtggagtggccttattgccaggactagccctacagaagagctttacagagaggaggacagtacatcctatgtgtgttcgccaaaaatgggaaaggtgggtatttaggcaaaacaaaataaaaacctttggaaccctttaagaagttacataccttttaaaggtagtatagtttctcaccaagtgatgcattttagcatgacacttcttgccagaaattttgggataagttggaataaatgtgtttaaaacatcatccaccgccctttttaaattttgtctaaggaattacttaagtatagtatttctga

SEQ ID NO: 203767 - DNA, 332 bp, Homo sapiens
acaccccctaacactgacagatgtgctgtagccacagcaagtgcagccctgccctggggatcacactctccccccgcagccatccctcccctgtgtacagtgagcagaaactgtaccttcttcaacactttccctttgaagaccaccagaaaaaatcactctgcctttcgttgttgttgttaggtctacctggccaggtagacctaaccctaaacctcaacagttaaatcaacaaaactgctcgccagaacactacgagccacagcttaaaactcaaaggacctggcggtgcttcatacccctctagaggagcctgttctgtaatcgataaa

SEQ ID NO: 203768 - DNA, 474 bp, Homo sapiens
gcctttcaacaacttggaatttgggacatttctatatgattgggactgttcaccaagtggatgttgctgtgttttgtgacgagatggagtagaggacaaggggatcatttgtaactgaacatttttagcttgtcctatgggacttgttaactttctattaccgcggcctaatccatacagaactcccaacaactaaatttgtggctgatccaaccaatggcatgagttggactgacagttttagaaaaaatacgctttttggaatttttttttaattggacaagaaccatgcataatattaatagtcttaaagccagagaactgggaatgtaatctttttttcctgtgtctctaagtgactctcaattggagtgatgttggcatttctgacctgtatctacctgctgtttttattggcatttacctgctttattgggcttatatgcaatcttgaatacagatttggacacctca

SEQ ID NO: 203769 - DNA, 460 bp, Homo sapiens
ttttccttggttcttttcctatgcttttgtgaacagtttttctggaaatctaatgcatgatcccccctgctaagaacattgagtagagagcagagggtgatatatgtgtatcccttttctccatgatgatggctctggctcaaaaaacacttttacttcttttagttccttcggatgaatgcagaagacaagcagactgctggactgccagtaacgggcatatccataaggacaaaaaggagggccaggcgtggtggctcatgcctgtaatcccagcactttgggaggccgagacaggcagatcacttgaggccaggagtttgagaccagcctggtcaacatggtgaaaccctgtctctactaaaaatataaaaattattttttttgaggcggaggttgcagtgagctgagatagtaccactgcactccagcttgggtgacagagtgagactccgtctca

SEQ ID NO: 203770 - DNA, 374 bp, Homo sapiens
ccctgcaaaaatccagatatatttaaaagttatgattcactcttctaaaagagtcacagtgaaatctcttaaaaaagtaattaccccaagggtttcaatttccctgcatcctcaccaacatattgtctatatttcttttgggtgttaagtggtctctcactgtggctttggttacattttcctaatgactaatgatgttgaacatcttttcatgtgcttattgccatttgtatatctttggagaaatgtttattcagatcctttgtccatttaaaaaactgggccatcttttcattgctgagttgtaagaatatatattatggatattagtaccttatgagatacatgtctgcaaaatttttctcccattctat

SEQ ID NO: 203771 - DNA, 297 bp, Homo sapiens
aattttggaacatcaggaaggaagaaagaacaataaaaagagtaaaatatgggtaaacacaatagactttcccctccttttgaattttctaaattgtatgatggttgaagcaagaattatagcactgatttggttttcagtatatatattggaaatatttaaggcattatgttacagatgaaggagggtcaaaggatataaagggaggtaacctttctatatttcttttgtactgatgcaggcactttggaaaataatttcactatttgtttaaaaactgaacatactctgtatggg

SEQ ID NO: 203772 - DNA, 413 bp, Homo sapiens
ggactaaaagtcttaggtttctttccatatagattaactgtgtcctcacctcaaagaccgggcctctgaagctttttcaagattcacagaatctctcttaacttgtgctagatcttttcttgaaaaaaagccaatcatgacaagcagatataatccgtttaaggactacgggaagtgtgcagccttgtacggacgtcccattggaaaccctcggagtatggaatcaaactcctgtaaactttcctcttgcaaagtaactttgtttagtaattgcaattaattcataatcaaaatgtggcttattcatagcacttaaaaaaaaatcccaaccaaatccttcctagcctcaattttgtcactatgaatgacatacacagaaaaaataaaaaacatttctgtgtaaaaagtcgcag

SEQ ID NO: 203773 - DNA, 461 bp, Homo sapiens
ttattttacaacaagtctactaatgacaaattctcttgatttttcacttgagaacgcctttatttccctctcattcttgaagaatattttcattggatatagaattcttttacaaaattgtcacataatataaaattcaccattttaacaattttaaagtgtacagttcagtggtttttggtattttcataatgttgtgcaaccatcactattatctaattctagaagatttcatcacctgaaaactctgtacccatgaagcagtcattcctgatatcccccccgtccctagccccagcaacccctcagctgctcttcatttctatggatttgtttatcctggatatttcattaaatggaataatacaatgtgttgcctttttttctctggcttctttcacttagcatgtgcttttcttttcttttcttttttttttttttgggagagagtctcactctgt

SEQ ID NO: 203774 - DNA, 254 bp, Homo sapiens
aagtaatgtgtaatagctattaaagctgaagatgagtatgccccagaactcagcaattccaattgttgatctacagagaatctcttctacatgtgcacaaggaaacaatttataaatatgccctttgcagtattacttgtaatagtaaaaaaagtggagaacgggaaaatcaatgctttatagaaaacagctaaaatgaaaaatatctacttgtattaatagacataaatctcaaacatgttagttcagaccct

SEQ ID NO: 203775 - DNA, 657 bp, Homo sapiens
tcttgttacccagaaactatcttaagataatttttaatgtctaatatggcttcctttctggacaattaagtcttgaggacatgaactcccttctatgctgcattagaaggagaggttattaaaatgtaataaatcattttccagtccctttgggagaaaactttttatggagccaattgcaacaagtttctgacagcttattctcgttagttaaaaaaaaaaatccaagaaatcactattaatgagaccatgtttcctacctatgactggaaaacacaactacccagtatgaaatgtttttgagttctctattcaatacacacagattttatactcttgtcacttggatatagtgtgatttttatgatttgggacctttttttccctcagacactagttctgtccatgattaccatgggaatatcttcaggcagagctcaggtaacaatatgagactgcatctttgcatcagggcctctgagaaatatatcaaaataaggacatctatatttgttttatttgattttgatttccttgaaagcagaatcatttaccagatgaaacctttatgctagagtgcttctatttaccaaatagacttaaggtttctagtgtaggatttaggagaactcagctcgctggcattcccagctgtct

SEQ ID NO: 203776 - DNA, 478 bp, Homo sapiens
tttcgccatgttagccaggctgttcccgaactcctgagctcaagttatctgcccacctcggctcccaaagtgctgggattacaggtgtgagccactgtgcctggcccttgtattatatattaatcttgatatttttaggataaataaaaacgtgtgtcttaatgagcgctagatcacataacctgccttatctacttagctatttctcttgaacatctttccttgtcattaaatgatacatgaagcgttttatggttcccctcaccaggagtctgctcagtctggtggacagtatgctgggcttgaaatcaaaacaccgagattcagtcctagttctagcaggtgctagctgtgtttgggcaagttgtttaacctctctgagcccaagctgcatgggtgtaatgcttacctcccaaagtctctgacagcctaaatgagatcactcatctgatcatttctagcttggaacctgccttgg

SEQ ID NO: 203777 - DNA, 592 bp, Homo sapiens
tagggaaagaaaatctgagacgtgagtcatgtaaatggtattcaaaaccacaggaacagaaagaaagaggctaagtcttcgagaggcctaaactcagcttcacacagtgtgcattgaacaaatatgaattatgaagtaataataattcaaccttctactcagcaagcatgggaaataatgacactagcaaaattcactcagaagtgtttattaacagagtttaaacaaaagtgctactgatttttcagtacttggcaaatccaatggtaattcaacctaaaaataattacaaccaggatgagtttcatctgacataaagattaggataaccccaataaaccaacaggatatcttgatataaggggaaggcaatagagaaaatgcttcgggtgataaatctgaaatcttaaaaggtaaaatgaggcatagatactgatgttttccaagatcaagatacataaatttatgacaacattttagtgagtgaaagtcggtgtttttagctctgtcctatttaaatttttctcttggaacccctgaaaatagtcaagagtaggaatgagtactgtagtcaaaatgtcaattcctctaa

SEQ ID NO: 203778 - DNA, 357 bp, Homo sapiens
gagagaggaagagaaacaaccaaatgggactgaagatgaatggctggtgtcgtcacagtgtagtcactgtagatgaaaggccagcgtagatttgttgtgaagagactcctttgactacagcatgtaaaatggattgggcaggggcatgagttgacataggaagaccagggtaggaagctgcaaaaatgacttcacaaaggcctgagatctgggcctcttgaaggatttctgcctgagaggctgtccatctctcagagttcaaaaatgcccgtaagaacagcaaaggcaggcttttcaaatattaggatacatccaggagacacctggggactccagcagcccactcctctcacggga

SEQ ID NO: 203779 - DNA, 459 bp, Homo sapiens
cttttttcagtttgatagaaactcattttttcctagctaaaagctacattttttaaaaacatgcatagaaggtcgcagtccctgttatttttagtaacaggggttatggtaatgagattgttaatattctggggtttttctttctatctctaataggagagccttgcttgagttatgagtcttgggcaggcttgggctctgccaccagctagctggctgtgtgaccctaggcaggtcacttctcctcaccttcattttttttctttaattgtcaacagtaggatggggtctttaaggcccttttgggctctgactaccaattctagcctctggggtaataaacctgccacttgttgaaagctcaccttcagcctgatactgtggtgcattgtttcacttgatctgaactaccccatgcaattagtattaaagaataccaatttttagataaggaactga

SEQ ID NO: 203780 - DNA, 286 bp, Homo sapiens
gtattgttctctggccaactcttctgctccgtcttagtggggacagtagacttggagtggggtttgggctggagggcctgtgaatgtgacgtaagccaccataggggttccattcccagatgggctgagcagggcatggacggggacaaatggaggcccccttcatggaggaatttggccattctgggtggttgcagaggctggatttggggaaatagtgctgcagaaacatggggcgccggcagggcccgggccagtggccgggtgtggggtgagcccatcaggg

SEQ ID NO: 203781 - DNA, 905 bp, Homo sapiens
cgtggtggcaggtacctgtaatcccagctactcaggaagctgaggcaggagaatcacttgaacctgggaggcggaggttgcagtgagccgagatcgcgccactgcactccaatctgggcgacaacagcaaaactctgtctcaaaaagataaatttctaaatacataaagaacttctataaatcagtaagaacattaagaaacccactagaaaaattcacaaagtccataaaagaaattcaatactttcattaagtggaaacaaatattcttagacacttctagtataaattggaaggcaatttggcaggatccattataatataaaagtattacacacacttgacatttcagtatctatccaagagaaatacttgtgcatgtgtgccaggagacatggtttacaagaatctccactgtggtggcatttagaacagagaaaatggaaacaacctctatgtccatcaatagggaattgtataaataatagtgtatgtacaatcaaacactatggagttaaaaagctgtccaatacatatttgtaaatgaaaaacaccaaggagctgaatatatatgagatgataaattttaaataaaccccacacaacttaaactatttttatagataattatttaaggtataaatatccaggacaagacatgaaaaagaacagaactgaatggcagggagagtttggcgtttcccatataatatgaaagctttccaacaggaagatattcatgaattagttacattaaaaacaaagttttagaaacagaggactgtcattctccttctcagtctagtgcctaccatgcagcagctagagtaatcttcttaaaagtacaggccagattatgtgacttaaaaaaccctccaatgggtttccatctcattcaaaataaa

SEQ ID NO: 203782 - DNA, 378 bp, Homo sapiens
atacaggaaagtgctcaaattataaatgtacaacttagtgaatgttcacaaagtgagcctattgatatagccagcatccagattaagaaacagggcaggccaggtgcggtggctcatgcctgtaatcccagcactctgggaggctgaggcaggcagatcacgaggtcaagagatcaagaccatcctggccaacacagtgaaaccccgtctctactaaaagtacaaaaattagctgggcgtggtggcatgcgcctgtaggcccaactactcggggggctgtggcaggagaatggcttgaacctgggaggtggaggttgcagtgagccgagattgcgccactacactccagcctggtgacagagcgagactccatcttaa

SEQ ID NO: 203783 - DNA, 258 bp, Homo sapiens
agacccaggtagagagaggtatgagacagaagatgcatcttaggaaatgcgcattggcctgtatagctagggtatagagtggtgacaagtgcagcagagcacagtggcaaaggaggagaggcaggcatgtcagtgaagattgctaatggctgcaaacaagaacgcaaacaacataggcttaaataattaacaatttacttttctaagaagaagttttatggtaagcagttattgactctgatcagtagcttaattaca

SEQ ID NO: 203784 - DNA, 267 bp, Homo sapiens
gtgtagctttggaatatgtaatgggaagccactggatggttttaaactgggaataggatgattatgtttcaaaacataatattctctgtgctggggggaattgtttgaaggggtcaagcggtaaaatggaaaaatgagttaagaggctgggcgtggtggctcactcactcctgtaatcccagcactttgggagactgaggcgggcagatctcttgagcccaggagttcaagaccagcctggacaacgtggtgaaaccccatctctac

SEQ ID NO: 203785 - DNA, 328 bp, Homo sapiens
ttactctgaggcaagagaataaaaatgttttgccattaagtaaaaaatacgaggatgtctaatttggtatttaaaagtataaaatggctgggtacagccagctcatgcttataattgcaatacctcgggaggcccaggcaggaagattgcttgagctcaggagtttgagagcagcctgggcagcatagtgagagctcatctctacaaaaaaattaaaaaaaaaaaattagctggttgtggttgcaagcatctctggtcttagctatttgggaggctggggcaggaggaccacttaagcccaggagggcgaggatgtagcgagctgtga

SEQ ID NO: 203786 - DNA, 543 bp, Homo sapiens
cctgggtgaagaaagaagcggctttaactgagacacatcaatccctgcagctcagtcctgtgatcccacaccaggtgaatgctcagggaaagaatctcctctagagaggatggcagcagtgatgtggggtggggtgggagagcagtttctatgttgtacatacaagccatgttgacattgtatattatacttgcatattcaattccaagcatcctgtaagagacaggatataaaatgccaggaggccttaagtgataaccttaaacaaagctatatagtttttttgtttgtttttttttttgcgaaggcccagtcctagagaagcagagaaacctaaggaaggagaatctgacagatgcctctgccaaaaaaaatgatagcaagattcctgtttcagtctgccttgaatacatctgcgggaaaagcttcagaattaattcatctcattgaacgcacagtattttttaaatgttaaatgctaatacatattccatgtcatctgctaggcggttcttagttgagatgtaaaatatcttctgcccc

SEQ ID NO: 203787 - DNA, 498 bp, Homo sapiens
cagcataaagatactccatagtacaaagtaagctattaattcataaagtatactgaatataaattgcctttcattatgatgtttccacaaataaaaaaaatcattttccttttataagttaaagtacgaacagatattagagatgaaagccttaaagaatttttttagcctgttttattattgttttaaaatttactacagtgtacccctttattgcctgcactgggggcaatccacttctgccttgcacttagcatgacactgctttttattgacatgtaacatacattcagaaacagtgatcagatgtatccagatcaaacatcaccacctaggtcaagaaagatgatattacaggtatcccagaagcccactccacaacccctcctaattgctaacaccatatattagttttgtctcatgtttatcttcaaataaatggaatcaatcacacagtatctattcttatatgcctgccgatccttcaaatctcttcca

SEQ ID NO: 203788 - DNA, 570 bp, Homo sapiens
cctgaggctggacaggtcagcaagtcctaggcacaccatctgatagtcaatactgccccctaggcaaacacttcctcaacttcacctgcttccaactaaagctcttctcaaggacactgcttctctgagtcaatcttcacttgggctctggaccctaccccttccttctcaggggtcccctctatcaaacctagtatctccttgcagcccacaggctttctcagcagcaaataaggaggaactgatcattaagaaacgacaattcttggaagtattctctagccatcttcctttttacagccccaagcactctagaatatcatctgcacctgctggcttccagtatctcacttggccactggcccacttggagctggcttcagccctcacctctccactcagatcctcctactcaggtcatcagggtccttctcacctacagagccagtgggcttttctctgttcttccctcaaggtctctgcagcattagacatcgtggatctctttttctccttcctcaatgtctcaggcaacgctcttccctgcttctctttcggtgtcctggaacc

SEQ ID NO: 203789 - DNA, 364 bp, Homo sapiens
agccaggaaacctagattaacttctgttttccaacacctcatttcctcatcggttgagaaaagggaggaggggtttaaatcagtgttttctacacttttttttcctgctaagcaatagagccctttagttgagtgatgtgttatgtggaaccctaatatgtcaaatagccccacactgagctgcttctgactgaggtagggggctggagaccattctgattgaacccctgttgctccttacaggagtcttccagtgacacccagacctttctgaaacactgctaatacacatgcacacacacacaactgagcccttctaatggtaactctttttctgatgaccactaagataaattgtgggcct

SEQ ID NO: 203790 - DNA, 606 bp, Homo sapiens
  misc_feature (501)..(501): n is a, c, g, or t
  misc_feature (506)..(506): n is a, c, g, or t
  misc_feature (537)..(537): n is a, c, g, or t
  misc_feature (542)..(542): n is a, c, g, or t
  misc_feature (545)..(545): n is a, c, g, or t
  misc_feature (564)..(564): n is a, c, g, or t
  misc_feature (567)..(567): n is a, c, g, or t
  misc_feature (570)..(570): n is a, c, g, or t
  misc_feature (573)..(573): n is a, c, g, or t
  misc_feature (576)..(576): n is a, c, g, or t
  misc_feature (579)..(579): n is a, c, g, or t
tgtatatagtgaggagttagtggagaagagattggaagtatgaaaacaaagacaattaccggagagcaaaaacaagaaaaggaaaaaggaaggaaggagggaggaagtgagtgagggaaggaggaagtgagggagggagggagagaaggaaggaaagagggaaagagagagagagaaaaggatggaaagcaaaagttaagtttggcaaagggaaaagtaaagcttctctagagattagaggggagaagggctatgactaaaacaagtaaatctggagacacaatagctctacagtcaagatcgcctgtatctgaatcctagttcttcctaccataaccatataatgttaggcaagtttatttctcccactgtttccttatctaacctggggagaacagaattattgaaagattattgaaaagatcaagtaattcctgatgcacagtgagtactctaaagtggatagctgaaatctgtgtttgttttttttttttttttttnggaangggaaaaaaaggggggggggggggggggggngaaantanaaccccaatttggcaaaanttnttnggnggnggnggttgttgtttggacccaaaatcggct

SEQ ID NO: 203791 - DNA, 359 bp, Homo sapiens
tctgcataagaattaactagaaataacttgcaaggagagccaaagctaagacccccgaaaccagacgagctacctataagatcttcccttcaaggacctcaattaactttaataaatggaaccatcatattagggggaaacgtatatattgatctctgtttttcaaaaaacttgtcacaaatgcattttgaacatgcagttcataacgaactcaactattcataaaaccatccgtcgctgggcatggtggctcacacctgtaatcccaccaactttcagtttttaatggcagggttcattagtcttaggcactactagggcatataaatgcaaaaccatgcttaacagaaatagactag

SEQ ID NO: 203792 - DNA, 428 bp, Homo sapiens
acctgagatcaggagttcgagaccagccaggccaatgtggtgaaacccttctctactaaaaatacaaaaaagaaattaggctggcatggcgacgggcacctgtaatccagctacttgggagactgaggcaggagaattgcctgaatccgggagggggaggttgcagtgagccaagatccagcctggacgacagagtgagactccacctcaaaaaaaaaaaaaaaaaaaaaaaaaaatcctaactcaatctttgggaaccttcatgccaatgagagcccactgtagtttcttggatcactttctttctttccatgtggacataaggagcaggggtgtccaatcttttggcttccctgggccacactggaagaagaattgtctttggccacacataaaatatactaacggtaacaatagttgatgagcta

SEQ ID NO: 203793 - DNA, 271 bp, Homo sapiens
gggaacatctacactcacaagaaaacgctgtgtaatgctactctttatgtctggggagatagcacacacatacccacacccctctctctacgcctctatacgcatacatcatcactggcaggacagataagaaataatagttgcctttggtgagaatttgggagaaccaaaattcaagaattaagaattaactctctggttcttactcttaagagtatttttatggttgtttgtcgttaaaccatgtgcatgtttactttctaaaaacaaa

SEQ ID NO: 203794 - DNA, 407 bp, Homo sapiens
aggggaggcttctctgaacaagtgatgttcagctgagcgccaacaagaagtcagccacgtgaaaaccagagggacatacattctaagtgacgggaaaagccagtgcaaaagtaggtacccaggcgagagcaaataggtgcactggtaacagaaaggccagcaacctggcatcccagaggctagggcagtgcccactataaaagaaggactcagtaaacagctgctgggtgaatagagggagggagaggaggaagagaaaggaggactgggaggaagctctcttctcattaggggtcttgtagtcctttgagggcaggggggctcacaagttctgccagccgtgggagattcccaactcttcttaccacgccttgaacactgctgcacagaccagcctccacttctta

SEQ ID NO: 203795 - DNA, 697 bp, Homo sapiens
aagaaataaagtggattcctcttccagtttcttgcctagcttaaagccatgtaattcttgccagctcacattgtgacttttctggctttcaacactttgattgggatttaccatttaattaaataagcttaggagctggagggtgggtgctgtccggggtcagttcagtcaacccctggttctctttgcacttcacagaatgtggattgtctctctgttcatgggctctgctgggctctctgagctcagaaccttcagatttgttgggtgggaccacaggtatgcaccaccacacctggataattgtggtttttttgtaaagatgggggtctcactttgttgcccaggctagtcttgaactcctggcctcccaaattgttggtattataggcgtgagttgacaggctccggcataggccattttcaaactcccagattctctcccttttgatgctttttgctgataattatagaaattttactttcctttttccctcctaaatggagcagtattctggtttggaggatggctgctattcaagtagtccttgtcagaagcaagcctatgttgttgtatctaaaggtaaattgcacatctctggcaattttccttgccaacgcgtatactgaagccatcccccagcgctcgcctttgccaggtggccaggcctcagggtggggcttgcttgtcttcccc

SEQ ID NO: 203796 - DNA, 178 bp, Homo sapiens
aatttctggatctgtaagaaaggtgaatttcccagtaaatgcaggagactccatgagcagtgcaaattagtctgttacacaccattttaaaacatataatccatacaggaattccaactggttaacaaattccataaagaaatgaaagttgtctctatgaagagggcacaatgaagca

SEQ ID NO: 203797 - DNA, 90 bp, Homo sapiens
acagagggagaccctgtctcaaataaataaataaataaaacagtaacatacaaatataagtgaatatcctttaaaactataaagaaactc

SEQ ID NO: 203798 - DNA, 333 bp, Homo sapiens
caacaaaacacaagctcaaactatttaaaaaaaaaaaaaaagtccaaaaaagaaagagtccaatattgacaatttcatatggttttatctagcaccaactcactttatcctcacaataatcccacagagtaggtatcattattatctcccctttgcacatgagaaaactgaggccctagaagtgtgagaaatttagtcaaggtcacattttaaatggtggggccaagacctgaaaccaggctggctggctccagtgcccacactcttcaccacgatcagtcttgaaactggaaatggaaaacatggacatgaatctgctattattatggctta

SEQ ID NO: 203799 - DNA, 388 bp, Homo sapiens
caagtaactgctctttcattcatcacggttcccatatatctctataatctattgtagcagaagattcctaagaaatcattttctttctgcctagaaccagtcagccctattttagaaatcctaaagtaaatacttataatccctgtcctctttaagtgatcactcaaagaggacatgacatgttcttttaagtgccaaacagctggttcatttcccaattagaggagagcactgcaaatgatagctctaaataaatatgtaatataatctactgataaggacaatgtaaatatttacaacaattagggaaacaaatgtacacatatttgaatattctccagaagatgaaatctatccattgtaacatttgtcagaaagagtctgtttg

SEQ ID NO: 203800 - DNA, 484 bp, Homo sapiens
ccagggatggcattagcaaaagagactcaatgaggatgagaaaacagagatgacagagacccaaataacatttgaattggactctacctgcaagtggagctttaccatccaggttcttcttggtactccactcccatttgcacattaaagattgtaagagagttggaactttggacatggatggacctctcccagtaaatctagaaggcattcattccaacagcatacaaaacaatactggtgggtgcccacgccacaacactatggcaccataaatatactgctataggaaaagtttgatttccagccattgaacttgacattgaaattccagcctgggtgcagtagggtgagcctgtagtcccagctactctggagactgaggcaggaagagcacttgagtccaggagttcaaatccagtctgagcagtataatgagacccccttctctaaaaaacaaataaatacatacattggcatcaaa

SEQ ID NO: 203801 - DNA, 398 bp, Homo sapiens
ggtttcctgctggcgactgctcaactgcacactgaagcccggcgtgccctcgattgctgtctgttggctccgtctggctcccactgccttggctgagcatgacggacaaccctgaaaggtttctggggtaaaagcttctgtgttctccttgcagatcacatggagaactctgaaggcagatattggcctaattagggctgcagtgctcctaccattcaagggatgggaagggcctcctcggagctgcaggctttcttgttcataccaggaacacctcctctccatcctcgctgccctttgaagatattcgtctagctgcaaaaaataatgaatactccaacctctaaaacactggggtctggagctaaaagaggtagcagacccaatctgtgaaccaa

SEQ ID NO: 203802 - DNA, 706 bp, Homo sapiens
tgtgtttttgaggtcttatccataaaatctttccctagaccaatgtcctaaagtgtttccccaatgtctccttcattaatagtgatgttatagtttcatgcctcatgtttaagtctttaacccatcttgagttgattttagtatagcaagagatagaaacggtttcatttttcacatggatatcttattttcccagctccattaagtgaagagggtgctcttttcccagtgtatgttcttggcatctttgtcaaaaatcagttggctgtaaatacatggatttacttccaggttctactctgttccattggtctatcagtttttattccaataccatgctgcttttaatgctatagccttatatttttaaatcaggcagtgtgatgcatccaactttgttatttttgctcagaattgctgtggctattccagctcttttttggttccatctgaattttaggattttttctatttccatgaaaaatggcattggtattttgagagagactgcattgaatctgtagattgctttgggtagtatggtcattttaattttgttaattctcccaatccatgagaatgggatgttttttgtgtgttcttttcaatttctatcatcagacttttgtagttttccttgttagaggtttctcacctctttggttaaactcattcctagattttttgtagtggttgtaaaagataa

SEQ ID NO: 203803 - DNA, 482 bp, Homo sapiens
gaggtactgatcagtgtagaaatttattcctgtatttatcttagtttgtttggtactactgtgacaaaacacttgagaccgtgtaatttataaagaacaggcatttattgactcagttctggaggttggaagtcccatatcaaggaaccagcatctggcaggggccttcttgctgtgttatcacagggcagaagggcaaaaagagagcaagaggagatcaaatctccctttttataatggcaccaatcccacccataagggtggagacctggcctaatcaggccttaaatgtcctacttttttttttttttgagacaagagtctccctctgttgccaaggctggaatgcagaggcacgatcttgggtcactgcaacctttgcctcccaggttcaagtgattctccagcctcagcctcccaagtagctggggttgcaggcgcctgccaccatgcctggctaatttttttttgtatttttagta

SEQ ID NO: 203804 - DNA, 436 bp, Homo sapiens
aacacgctcccaatactgcctgtggaattttctacaactttcctctagttccattagttacctcctaccccaggactgggcttgataagcctcatgagaggctgagtagatatttaatctctagactaagcctattgatttcctactttctgccacttggtcaaactttggtctccttttataataatgttcttatataataaacttgcattctttcctttttcttccccagaatactgacctttcatacttttaggaactgtggatcagtatttaaaggcaagattttgatcttcaaaaatttttttctccttcttaggcaccagactcttacagttcatgagttagaaactcaagaacaaatacaatactttggtctttctggttctataggagtgagagagagagtgatgtctgcattctacaaatactagcc

SEQ ID NO: 203805 - DNA, 353 bp, Homo sapiens
aactaaatgtgtacttcaataatcaactttttgccagttgattcaatagccaattattgaaatatgggaaattctatagtctatgagctttgaaatcagagactcagggtttatccctaggacccgctctgtaggccaattgtttaaatctccctacacctcagtccccttgtttgtaaaaaagagttaataaaaattacttcatggctgggtgtggtggctcacgcctgcaatcccagcactttcagaggctgaggcgggtggatcacgaggtcaggagttcgagaccagcctggccaacatggtgaaacccctgtctctaataaaaatgcaacaagagcaaaactctgttt

SEQ ID NO: 203806 - DNA, 210 bp, Homo sapiens
agtcttatatatttccctgctgtctaacatatgttgaatgaatgaatgagtcaatgggcacctgttatgtgccagaaattctggtaggccctaggagggaaagtgcagtaagacataattcttgcccttaaggagtttaaagctcagatgtgtcataaggggtgtatcagtggctgaggatgaagggagaagagagaaggaggtattgag

SEQ ID NO: 203807 - DNA, 547 bp, Homo sapiens
cagatcacatggtgagaaaggaagcaggagaaagaggcgggaggtgtgggatgcttttaacaactatctttaatcgagaaagaacaaatagagtggtaactaatagagtgagaactcactcattaccatgagaaaggcaccaagtcgatcacgcaggatctgctcccataaccccaacacctcccactaggctccacctcccagcaccaccacactggtgattaaatttcaacatgaggcttgtaggggccaaacagccaagctacagcagtgtctaaattggacctaatcagatctgaattcagttatgcctgttacaatttataatagggatacattgaagcacctccataggcgggcttactaggtagtgagtggtctgtaaaacatattgggttttatggaaaactgctgagaaaacatactgggcaggaagtgagaagaaattaaaggtctatgataaatctcttcaagtatttgaagaggcagtttacagaattctgtgttgcttcagagggtaacataatccagctcagaataggactta

SEQ ID NO: 203808 - DNA, 654 bp, Homo sapiens
cactaggtggggctccccaaaacattctagataaaacatcttatttttagaaaggtatgaataattgtcatataggaagaaacagccaagaagctccaaaagaaactagatgtcacattctgttaggcatacctaggagacatagccataaaaacaggaatgggatagtaaaggagagaaatgtggattaactcagtgaaaattctaagaggccatgagaagacattccagcctctggctttctaagtggatcatctgaataaatggtgaaaataacactgcaatgggttctacactgtgggctgagactcccaggccaggcagggtgtagcatctttctttctctggggaactgatgagatctgaggaggagagttagctcagtggtccagtggtgatctgggctatgagttttcttcacttctgtcaagtggaatgattctgagctgtgatgtcagaatagcttatgtgtttgataaccttcagagctgtcttgagagtcttacaaacctatatgtagaaaccactgatttctttaaaagctgtatgtaaggtacaatgtgtataacatgctctcttttgtgaataaaagaagggaaggattatacacaagcaaatatttgcttatatttgcataggtaatttcaggaggga

SEQ ID NO: 203809 - DNA, 346 bp, Homo sapiens
atacttatagtgcaaataatgatattaataacttttctaacttaaaataccctttattgagggaaagtttgcagtgtgaacatgaaagctctgaagaacaaggttcctttttatttatttatttatatttttgagatggagtttcgctcttgtttccctggctggagtacaatggcacgacctcagctcattgcaacctccgcctctcaggttcaagcgattctcctgcttcagcctccggagtagctgggattacaggcatgcaccaccatgcccagctaattttgtacttttagtagagacagggttttccatgttggtcaggctggtctcaaactcctgacct

SEQ ID NO: 203810 - DNA, 217 bp, Homo sapiens
ttttgttctcttaaattgccttcacagataatttaagcctgtggctctggtctgtggatcctctttcatcataatcctgaaacatcatttgtcttttttactgatggtacagaaagcaatgatggatgataaaactgatgatgccttaccatgagtcaaggcagcggcaccaaactgtaatagtaaatgtagtaatagtcgtatgttctttagtaag

SEQ ID NO: 203811 - DNA, 314 bp, Homo sapiens
gcaagcctcctcccaagccagctggggagtatggggagggggtggccggaggaacctggcatccccgggttaggaccacagaggtggctctgcctgcagctgggcctctgcctcatcctgactccccctgctttggccatggctcttcttgtccttcctcttctcagtgcaggaggaccctgaatcaaatgcctcatcctggtttgcattttaccctcggatgaagcttgtggcgaacccctggactctgtgtctcctgagtctctgcagacctcgggtcctggacccagagactcttctccctgggacaggag

SEQ ID NO: 203812 - DNA, 388 bp, Homo sapiens
attaggaacgcgacatgctacgtctttttagaattcctcactttactcagttccaagggcctctgctattttattccattccacagaagggaaaacagattcaatgaggtcgggcagtggatggagctgagtctagaacgcgggtctgatcctatgtgaaagttccggtgactccaggctgaagtagagtctggattagcatctctcttcggagctgcttttgggagttgaagggtatagaaagttctagaattacttaccctggaaactggggaaataggtagccaggtgggaggtggggattttctcctccaggatgtcggttttgttgagaaagaggatgacggatgtgcttttgaaccagggtagttccaggatagtcccaaac

SEQ ID NO: 203813 - DNA, 676 bp, Homo sapiens
cggagtctcgctctatcgcccaggccggactgcggactgcagtggcgcaatctcggctcactgcaagctccgcttcccgggttcacgccattctcctgcctcagcctcccgagtagctgggactacaggcgcccgccaccgcgcccggctaattttttgtatttttagtagagacggggtttcaccttgttagccaggatggtctcgatctcctgacctcatgatccacccgcctcggcctcccaaagtgctgggattacaggcgtgagccaccgcgcccggccgggaaattttcttgaatatctttgtaattcctttcctcttctttccttctgaactcctagtatttataagttggacttcctgggttgatcctttgattttattattttctctacttcctaatagattttctcaaattcatgttcctattctatttgagcttttcatttctcgcgcataattttttatttctaagagctcctggcagatgttagaagtgttctggggccccggttgttccttttctcagagcccctcttcctggagtcccggattccctatttcctataatttcctttctgtagagtccagtttccttttgcccttgcattgcatttttcctctgtgttccatcctctcttgtgtttgctttgatctgtgcatttcgctttgg

SEQ ID NO: 203814 - DNA, 385 bp, Homo sapiens
acaggcaaggcaattgaaaaatactgtatcctccctcccagccctttactttgaaaataaaagaagtcccacacctttcatctgatacaatttaaacatgtttatacaaagtgactgcagcaaaagcactgtgtggtagcagcagcactgaacccagacttgaaagagaatacacgtcctgtcctgggaaggaagctgccccccaggctctgtgagagccccctctcagaagctgggccccacaagtgaaaatgagaagccctgtgggaggttctgagagatatggaggattccacccaagagcagtgctcttggacctgagtcactgcaaagggttttctctggatgggtgagaggcagggagtatgcacctgtgtgtacccca

SEQ ID NO: 203815 - DNA, 503 bp, Homo sapiens
agcaccagatgccacctaggcttggctcaggattggcatgttgtctatgcttatgttccattggcctgaacaagctacttatccaagccctacttcagtgagatgagaggctgctccatccactttggaccctgaggaggaggcatcttacagcagcaagagcctggaatgggaagcagtggaatttcaactctgttcatcacttctcagccacgggacattgggcaagcctctgagccccagcaccttcatctgcaaggcagttgctgtggggtatgtgggagcacagccttggaagcctggaagacacgcatctgagttctggtatttgccacctgctggttgtacattcctcgatgttcagtttccttatcgtgaaatggggataaggccacctctcttccttgttggaagtccagtgcaactccctgttgggagcggggggagatatggcatagggactatcagatcaaataagcaaacaaaagtgaagtatgtaacac

SEQ ID NO: 203816 - DNA, 578 bp, Homo sapiens
aagcagttatacagactcaccagttacagtatttcagttttactgcatttgctttatcattcactttctctacatgtttcttctgaatcatttgggagtaaactgaagatactgtggaccttaattaagcgttttatacttcagtgtgtatttcctaagaacaaggacactttcttatgtacccacactatatggatcaaaatcagaacacttagcatggatacagtaccatacagtaatccacaatccattatcccagttttatcagtcgttccaataatatcctttatagctatttttttcattgtccagaatcatgcattgcatctagtcatcatgtctctgggattcttttagtccttcagtttgagtaatttctgttgacctgtcctcaggtttactaattctttccttggctatgtcaagtctgcttatgagcccattgaaggtattcttcatctgttccattgatttggtctgtttttttatttataggatttccatttgattcttatagattccatctctcatctgaatttcccatctaaccttgtatattgtccagcttttccactgga

SEQ ID NO: 203817 - DNA, 625 bp, Homo sapiens
ccctcctagccctcttaccccctcttaccctctctgggccttggtttctttaagggtaacattgggatgataatatctcttacctggttcctcccacctggccccttggccagaccctcatctcttcatgagcaattgccatagacttctggtctcttcccttcagattccctgggggcccagctaatttttgtatttttagtagagacgggatttcaccatgttggtcaggctggtctcgaactcctgacctcgtgatcttcccacctcagcctcccaaagagctgggattacaggtgtaagccattgcgcccggccaagtgtgagttcttttaagctgtgtgaccttggccaaggtgcttaacctttccctgccaagtctcaaacacctctttgtccagctactatgcttccatcaagaatcaataggacctatgtccctacaggtgtcagggtagctggcagaatggtgatgcccttggcagaggcaggcaaggccaaaggaagggctggttctggcagggagtgaaggatcttactttgagaggtattgaatatgaggtggctgcagacagatggtgacgccatctgagaggcagcaggaagtaggtaagaggctaggagg

SEQ ID NO: 203818 - DNA, 415 bp, Homo sapiens
gacacagcaagaaggcatcatttatgaggcagagagcgagacaccaaatctaccagcaccttggtcttagactttaaagcctccagaactgatgtacacaggcaacaaagaaaggaaaatcaacatctctgttccactaatatatctttactttcaatagtatatgtggtagagagaccattctaccttgtaagtggatgataacaaggatctgaggaatgtggccaaagtctcaaatttatccccatatgttcctcggtaatatcccaagcaagaacagctctgcctcgcccatacagtttctgtaatagaactgttaccttaaaattaacctagcctgtaattttagggaagaaaatcagtaacctaattctattcaggataaaataagttaataaaacaattagaactcaat

SEQ ID NO: 203819 - DNA, 295 bp, Homo sapiens
gggaaaatgaatcagcttctctgtgcacccatttcctaaatgtataaaagggaaatgacctgcccatcacagggagaactcagtgagacaaaaatcatagctgggaacttggaatcagctcaaaaatatcaactagcacccctctgttttaactacttctattcttactgttcttggccttgtctgaagtctcagagcaaaccgttccatgatattttctgaaacatatacatgcactgatgatgtagaatccaggatttctcattattgtttttctttcttttttgaggtgggg

SEQ ID NO: 203820 - DNA, 181 bp, Homo sapiens
gatgaaaaggatgacaatgtctatgtgtctgatagattgtggaaagcctaccgccatgttaagtgaagaaagggagtatgtctgctgaagagattaacttctggtctcctatcagtatgtgtggtgtggtagggggactgcatgaccttaactttttgttcttgagaggcctagcattatc

SEQ ID NO: 203821 - DNA, 480 bp, Homo sapiens
cagaacagaatggagtctcctacgtctacttctttctatacagacacagtaacaatctgatctctctttcttttccccacagcacgtgcccagcttcctttcaagtctctggccaatgcaatgtgagcagaagtgaaggggcaactttcaggtgatgacttggaaaagaaagcttagtcctctgcttctcctgtcacccgaaagagaaacagaggcttgtcttgttgaagccagtgtgtttggtgtctttttgtatagtggcttagacagtggcctaactagaagaccaaggctcaaaggaacacattttgagcttctccacagtttgagaacctctacattacctacaccaagccttccccagcactcaatttatggaagaccatttctcttctcatgacacatgtcctcatgttgctttggcctgttttaaagctttctcaactccatctcaataaagaaatctgcagctttgttgga

SEQ ID NO: 203822 - DNA, 348 bp, Homo sapiens
acagctaactaagggcaggcgatacaatacaacagtgcaggccattacccaaaagccgtttcttccaaagaacgcataaggctgggcgcggtggctcatgtctctaatcccagcactttgggaggccaaagtgggtggatcacctgaagtcaggagttcaagaccagcctggccaacatggcgaaaccccatctctactaaaaatacaaaaattagccggacgtgctggtgggtgcctataatcccagctgctcgggaggctgaggcaggagaatggcttgaacctgggaggcagaggttgcagtgagccgagatcgtgccactgcactccagcctgggcaacagagc

SEQ ID NO: 203823 - DNA, 437 bp, Homo sapiens
tataaaacatcacagaagtgaagaggaaattagattctattaatttagtgctttactcagttgtttaaaaaatgtgtctgcctcaagctttcagttatagtctggttcacaataatattaagaccttttttttttcctttttcctcattgttaagcaccagtcctaagtttttaaacattacttaaaaatacatctttaggggttacaccatgtgtcaaattctcaaagatttaaggacacatggaaggcttttttacagttaggagactcagttatttatggcaaaattaccaatgtgatactgaaaaacatttcttccaagagctgtgcacaaataaatgcattaattattgctttaatattaagaactaaaaaacaaagaaactgtttttaaaatttcaaagccactccaataaacttcccagattaacttatc

SEQ ID NO: 203824 - DNA, 331 bp, Homo sapiens
cggccccgtagtgtcataaatctactgcttaaagtaatagtggactgggcgcggtggtcacgctgccactacacccagctaattttttgtatttttagtagagatggggtttcaccttgttagccagcatggtctcaatctcctgacctcgtgatccgcccgcctcggcctcccaaactgctgggattgaaacaccgcacctggcctagagggatgccttttaatgaatccatctaccactgctaattcactctgcagacagtctcattcctggcagaaagacctcccattttttccttcctagggccagaagcactttttccttctttca

SEQ ID NO: 203825 - DNA, 220 bp, Homo sapiens
aaaaatcctgttaggagagccatggctgagaaaatctgtatgtgtgttctagcatggagtttcaccatgtatgagctccagaccttgggggcacttggactgattacaagggtcctagcatttggaaatgatttaatgaataaccatctgacacatatgtgttctattttccacaagaatgtagatactgaaatgattattaaaatattaatttaaatgc

SEQ ID NO: 203826 - DNA, 371 bp, Homo sapiens
ctgtatccctagggtacttgttccgctggtcatgttatggatcaattgagtatagtagttcgctttgactggtgaagtcttagcatgtactgctcggaggttgggttctgctccgaggtcgccccaaccgaaatttttaatgcaggtttggtagtttaggacctgtgggtttgttaggtactgtttgcactaataaattaaagctccatagggtcatctcgtctcttctcttgtagccaaggaatgtcaatgcttctctcctagtttctagtgactggggacaatcattgacattccttggcttgtagcctatcattcctatctctgctactgtcttcacaccaccttctcttcccttaaacctccctatg

SEQ ID NO: 203827 - DNA, 646 bp, Homo sapiens
aaaaaaagaagaagggaggggagcatgttgaataggagagattggcagtgagaaacaatttgaagtttagggctgtggtgcagagaggggatgagttagggtttttgagctcaggaggcaataaggcttgcagagatgtttctctctttttccctctgaactggtttctgcactcctcagtgcagggctccaggctggatacttttgaggacactacttaagttcttttcttggactctgctgccatcctccataacctccctaacctccataacttccctaacctccctaacctccataacctccctcacctccataacctccctcacctccctaacctccctaacctccataacctccctaacctccataacctccctaacctccataatctccctaagaccctatcttagggaggtagctgagaacttggcactgcgcacacatactaggttgaaagagagttgaggaaaccagaaggccaagtggatctgctggcaaaccctgaacctgtctcctgcgcttgctctacagttctgaagttgaaaatccttttcatgcctagcatctgcttgagttataaaccccaaggcagccatgtcatagactagtgttactcttgttttgacttgttttagtgctccct

SEQ ID NO: 203828 - DNA, 167 bp, Homo sapiens
tacagaatatatattttgtcacaatttaatcatgtattcaatagaataaagaagcacagcaaacatacaaatgctgagatttagcctgctaaagtaaggaagacattcagaaagtaagacttacccccaacaaaccctggcctccacttcccctgcttacacatcca

SEQ ID NO: 203829 - DNA, 414 bp, Homo sapiens
atgttacatgtttgagcatttaaactgaatttggacagggcttctatttccagaaccttctaactctatttctttgtgacctgatagtcttgctctccagggtaaaagaagaggatggaaatggctgtggggcgcctgagctgggccctggcatgatggcaagatgccgttctgggttcactgggatggctcaaggggagtttggaaaccctcctaacatgtcatctgaaatctgggaccacagttccggctggaacacttgtcactaaagctgctgataagcaaagggtgtatcactggtatgggtaacagttgtgggaggaggaggggtctgacagatagccggatgattttaatgtttatattccactggggtaagctctaacaaagacccatcatttcccagataaccaa

SEQ ID NO: 203830 - DNA, 348 bp, Homo sapiens
ggcagcagcaatcaccatgacagagaaaaagaacatagagactctgaatgttcctcagccaccacccaattctagttatgaatgtcagctccgtttgtgtcttgccacaggcaaagccctcaaacttttggtgtgcagcacagacacagtatgccacatgcagaggcggtgactcgcagcagaaggagtggaactatgtagtcagcggtggttcttttctggcagacctctcactaacaaaatgaaattggaagagccaaagatcccaaaggactgtgctgtacaggttagagtgaggcaaccttttcaaaacccaacaccagttgagaactgaattggtcccattgg

SEQ ID NO: 203831 - DNA, 617 bp, Homo sapiens
atagacagatataaagttaaaaaaaaacacctatgtgttatcttttgagacattgtaaacatttggggttattttatttccgagatttaaaaagcataattataggcacatcacctatttagttttatactgttttttttgtttgtttgtttttgtttttttcccccacaaaacttcaaacaagaatttaagctttatagttttggtctttgggactgttctaacaacaaattaactctgttaaaattcttatatagtcaatctgctaatttttgtatttttagtagagatgaggtttcaccatgttggccaggctggtctcaaactcctgacctcaagtgatctgcctctcttggccccacaaagtactgggattacaggcatgagccaccacccacagccagttaagtgatttttgacaaaggtgcctagaacaatcagtgggagaagagacagttttttcaacaaatagttgtggcaatactgcctatgtaagagaatgaggttggacctttactttataccatgtaaagaaaattaacttgaaatggactaaagacctaaacttaagagctataagtataaaacaggggcaaatatttatgccactagatgtg

SEQ ID NO: 203832 - DNA, 383 bp, Homo sapiens
aagctagagggacatatttatagactgtgagtaactgcaacgtactagagatgtagcaagagtacatatctcccctctccctcttcgtcttctttgccctctccgtctccatctctctcccatctcccctcttccctctccttttcccttctggcctcttccctctgtcttctcccatctccctctccctcctcatcttcctcctcatcttcctctcttggataacccagctcccgaagcatcccccagctcatcctcctcctctgaggcctggttctcattcaaattgctaatagactgcaggtgagtcttaatcattattaaaagaaggaggggaaacacatgtattgagcatgttttcatatagactaaacatcatttag

SEQ ID NO: 203833 - DNA, 591 bp, Homo sapiens
tttgcttttaggaaaggtcagaagacaagaaactgccccttcctgattttggatgttgttgtctgaagatgtgatggttggtactgtggcaaccacattggatcatgagggcaaaaccaagggaataggagaagttaacaagaacattactgagcccctgaagaaccaaccctagaaccgccctattttcagattcctgttatgtgagataatacagtatttatgtttaattagctcttataagaatattctatgacttggagccaaatgcattctaacggatataacattctggaaccagtttcttaattttgttttataaacagattataaatagagaagcaaagtttttccaactggagtggaataatctgagaggccttctctcatggatggctaatatggtacaggagtcatgaatgaagagaggctgttatatagaacgttctgaactctgatggaggtgctgaacaataaggaggattaacaagtgatgtgacagaagctatccaaagggaaaggaccaatggctcattccccacccatttaaggagccaaagctcttggcaatctgaacatagttatcgatta

SEQ ID NO: 203834 - DNA, 246 bp, Homo sapiens
ttataaaaaaatctaatctgccagtttagcgttttccaccaactcggggagctgaaactttcacaggcttcacaatcttttgcttaggtgctgcctttgtaggtgccttagcagcagccattgcagtctttttagatgcttgcttagcctttttgcttccttagcagccctgatagcttgttctcgttgagttggtggaaaacgctaaactggcagattagatttttaaataaagattggattata

SEQ ID NO: 203835 - DNA, 221 bp, Homo sapiens
tttgttgattctctccattttggtgtctttctcttttagatattgtatcaatctttagaaaaggcatagtctacttgttataaatcgttaggatactgcctcccccagggtctaaaattacatattagaggggaaaagctgaacactgaagtcagttctcaacaatttggtggaaaacgctaaactggcagattagatttttaaataaagattggattata

SEQ ID NO: 203836 - DNA, 160 bp, Homo sapiens
tttcaatgtcacagctggatcagagcaacctactatttagtctactattttcatgtgaacacggagtacttgtgtcagctttttcatcttgttaccaatttgacttcattatttggacttttctaaggctgtaaataaacgctaaggttactaatttcaa

SEQ ID NO: 203837 - DNA, 563 bp, Homo sapiens
caggctgttttacaggcagtgttttctggatattcatcagcctggccttaagaatgtcccttttattttgatgccaagaagtcaaaccatccacttctacctcccctgtatgctctgttgtcgctcttctagaacagattccaccttggggatgcagataccttttcccctccagataagaaatacatcaaagtaaatgtgcacaatataagaataaggttgacggtcctaaataccaaagaaatgtcataggacattgaagaagcaatagactagtcatagtggctcagctgaaaggactttggctgggaattctattaatacctctcattgtgtggtgagcattttcttcgtccttgtctaattttcctgcatggtaaccttctctctgtgggtctctgcccgtggccagctgcgtccccatgagaaactcaccaccctcgtgctgaaggaacacttcaataaccctgtaggatataagggaagggggaggggaggcaaagtagagaaacaatggtcccatccttttcttgttgaaatagaaatgagaaggggaaatccat

SEQ ID NO: 203838 - DNA, 679 bp, Homo sapiens
gctatgtagtggtcataggccattgctttgagtatgaagatctcaatgtctccaaggaagtgagtgataaatagctgtatcatgcagttattataggaaacgatcttcctttctgttagtaggtcaatcattagcttgggggccacagtggatatgtagcaaagatctgagagtgcgaggtaattaaggaagaaatacatgggttggtcaattagctaaatgtacatgatagaaatcattatgatgaagttttccatccaaatagcaatgtagcaaaatacaaataatacaaaccaaaaaacttcaatgttcttgttttgagaaagtcccaggagaataaagacagtgacaatattcctattttccatgaaccagtgcagaaagaatgcataaaagccacctgaaaggacattaagcataagtcagtgtcagaaatgtcatggagagtattgatgataatactaatattatgcaactatgtttaagggatatgattacagaatttcagacaatgaaaactgatatttaataaaaatattttctttttctaattagtatcatgatgatttctagaagtcatttttgggacattataacattgataaaatgaatgcattcaatcagtcaatttaaaaaatgtttaaataaatgtattcaatccattttaaacacggttaaa

SEQ ID NO: 203839 - DNA, 384 bp, Homo sapiens
gcagccaggtccctagtggcttcacatccgaggaaactgtggagcatccgtcattctacccgagggttggaataactcactgttgcagatacttccattatgtaactcagccgagggtattctgcacttgtcacagcagaggtcagccatgattctgtagagtagtgcaatgattcaagtgacttttaactattgttgcccaagatgcaatgatagagaatcatggagtttttaagatgagtggttgatttcctttttactccattaaatgccatggcttttcaatgttgcatcatcatctagttctgtatcttaacccttcagcaccctggtacacaccttgctaacaaacctgtaactctgaaatgtaatcgcagaaaaaag

SEQ ID NO: 203840 - DNA, 602 bp, Homo sapiens
gtctcccccccagtaaatagccccacctccaaacccccagcatcctaaccacctcctcccttctgggctccccgacctttgtctccacgggagcctcccctccctagcatcctgtgtcccagctggaagcagatggaggggaggggctgccaaacccctctccaccccactggatgcctcacgggctctctggtgggagccttcctccttcgactttttctctcagagctgatgctgttgagtttgggttgggaggggggacagacagagggaggtgtgtccttgagtttgagcttgtggggagattcgttgtggtggtgagtgggtggtaagaaacaatgaatttgcagggatgaatgcagcctgggactttggaaagcagcctcttttgttggaggctgggtgaagtcagaaagctaaacaaaattgctgatacagttactcctttatcactcctttcttcttcgctgaaggggctgaagttactaggaaactcactataggagaggagttaagagtgcaggtttcaaatcctggctgtggcaattatcaactctgtgacttccagcggagtccttgccttctctgtgcctcaacaccct

SEQ ID NO: 203841 - DNA, 348 bp, Homo sapiens
tccccagcagccattcctaaaaactggcctcttgtagtaatagatcttaaagattttttctttactataccattacatgagaaggataagcctcgatttgccttctctgtgccttctattaatcagagacatgctacaagccaaatgggtgagacatccggtcatgtatggtgacattgtctgtcgccatttgctcatatggagatttctaaacaattaaaaactgacaatagacctgcttatactagtcatgcttttcaaactttcctacagctttgggctatgacccataaaacaggaattccttacattatagaccaggcacatcaaacgttacaacgcatgttg

SEQ ID NO: 203842 - DNA, 448 bp, Homo sapiens
ccagacgtgatgacactcaggaagagcttgcacactggttgttctcaaatccagctttctcttcgaatcttagtggagttctttaaaagggaaacaattttatccataggatcttttctacttttttttttaagttcctgaggtaagtctgatgtgtattcacagttaagtaccgggcagaggtaggagggtgggtttccaaggccagtggaagagcttccataaaggcagggaataccagtcaccatgaatggttttaggaagagcaagtcaagggaggtaagtgtggaggaaagagatgatgtggaagctggatcatcgcgggccttgtgtgtgttgagctcagcaatttgaattttatcccaacattggaggaggagtcatttgtgctttcgaagtccagtttggggctttggcctctggcagcattttggaggaggaattgatg

SEQ ID NO: 203843 - DNA, 499 bp, Homo sapiens
  misc_feature (65)..(65): n is a, c, g, or t
actctcgtaggaaataaatagccctttcaagattcctcagctgcctcaccccatgcacatgtgcntggggtgtggcctagaagggagtgatgttcttactctggtggtctgtgcttctgaacacaggctacatgcacacactgacaactaccaataaacagacaggggaaggtctttcatccagcctgggcaacacagcaagagtctgtctctttaaaacaaacaaacaacaaacaaaaaacacttctgtctagtgatttaaaacaattgacattcttcctagcaattaaatgtaatactgtatagtagtttgtgaagaggttagtaagtcctaatttgaatttgtgttaaaataaaagacacaaaatgcacattaaaatgtttctcatctctgttttctgaggactgctgcatgtcacaggttttaaaaatacacattttctatctgtgacctttcacatacatacctttgtcaagctcaactggagggcttaatctc

SEQ ID NO: 203844 - DNA, 502 bp, Homo sapiens
taccaacatgcatttgggttaagggaaggagactaagtcaaatttagtcaaatcttcctgtttggagctaggcttggtcctgtagtcccagctacttgggaggtttacacaggagaatcacttgaacccaggagtttgaggctgtactgcactatgatcgcacctgtgaacagccactgcactccagcctgggcaacacagcaagagtctgtctctttaaaacaaacaaacaacaaacaaaaaacacttctgtctagtgatttaaaacaattgacattcttcctagcaattaaatgtaatactgtatagtagtttgtgaagaggttagtaagtcctaatttgaatttgtgttaaaataaaagacacaaaatgcacattaaaatgtttctcatctctgttttctgaggactgctgcatgtcacaggttttaaaaatacacattttctatctgtgacctttcacatacatacctttgtcaagctcaactggagggcttaatctc

SEQ ID NO: 203845 - DNA, 228 bp, Homo sapiens
gggattacaggcacaagccattgtgcctggcctgcaatcatttattctaatcttggttgagagataagaaaactgaggccggaagagccaggccacctggctactgggccagtgttctttcctagcactatttctcttcaaactttcaatctagcattgaaggctcttcctacatttctacctttaatctccccttcccttcaacataaccaacctctcagctgggta

SEQ ID NO: 203846 - DNA, 181 bp, Homo sapiens
aagaaaagccaaagaggcaggaggaaaactaggagagtatattatcaccaaagccacgggaagagagtgagttttcagtcctgtctagcattgcaaagagctcagtaaaatggagattttttttttttgagatggagtcttgctgtgtcgcccaggctggagtgcagtggcgtgatctcgg

SEQ ID NO: 203847 - DNA, 265 bp, Homo sapiens
ggtgcattttatcattttgagttctgctttggaaatcctgtgattggaggggtatgtggtaatcaccagtacttagaaactgcctgggaaattcattcgttcattcacccagtacagacagggcatacccacctgcaggccactgccagagacgctggtggagcagagtcgtggagtgtgtgttctggcggagaggcaggtgctgaactgaatgacccaacagtagacttgcagatggcaaaaggtgccgtgagggaaatagaca

SEQ ID NO: 203848 - DNA, 491 bp, Homo sapiens
ctcccacctcagttacttgagtagctgggactacagaagcaccccagtatgtctggctagtttttaaatatttttggtagagacaagatctccctgtgttgcccaggctgctctcaaactcgtggcctcaagaagtcctcccgcttggactttccaaagtgctggattacaggtgagagccacctatttacttcaaatctcacagtatacgcttagctgtcccttgctgccatactggccgtgagtcgtgacctcaacctgttctaaatttttaagatgattaaagtggacagtgcctcacgtaaacaccaccaccagagtgaataaccaggggcccagcttcctcctgaaggtgcatttatatgtttatgtcaaatgcacaatcacaacccttgtgcattattggactgcctgtattaaaagagaatgttttgctgagaaggttgagtgccctggaaggaagttgctcaatctaagtggaaaccaaaccc

SEQ ID NO: 203849 - DNA, 447 bp, Homo sapiens
tgtctttggaaggaaaggaaaggatgggagaggggctggaagcattggctagtagatgatcgaggctttctataccaccaccaaggtgtgtattttctcatcatcctggttgtgtcaggctgtccctagagatcaccctgacctcagtgtttaagaagaagggccagatgcagtggctcatgcctgtaatcctagcactttggaaggccgaggcaggcagatcacctgaggtcaggagctcgaggccagcctggccaacaaggagaaaccctgtctctactaaaaatacaaaaattagccaggcatggtggtaagcacctataaccccagctacttgggggctgagacaggagaattgcttgaacctgggaggcagaggttgcagtgagccgagaccacgtcgttgcactccagcctgggcaacaagagtgaaactctgtctcaaaa

SEQ ID NO: 203850 - DNA, 484 bp, Homo sapiens
catggcagttaggaatcataatcagatgacctgccttccagacccctccaaaccagtttctttacactactcttcaaaaccaagcaagttcatttatctttgctaaggatttagttcagtcagggcttcatttctattttggattttaataattatcttgagtttgtagcagcagtatgataaggagtgaatttgaaatctaggctatgaatgtttattgtatttcttacagttaactcctttaatctctctgcttcactatttttataaaaaaaggccaataactccagagtgcttttgaggattctggtacataaaataatacaaaggtctatatgaaaatgttaagttagtaacttaatacttctaatttgccaggaatttttaaatgtcattatatttgaataagcaaataaaaagacctttagaattgtaacccacagccatccttagacatggagacctttgctaggattcctcccca

SEQ ID NO: 203851 - DNA, 446 bp, Homo sapiens
gagttgggatggctgtgcatggcatttgtgagggttcctgtgatttctgtgttttctccccgtgaggggtccagggcccagggtggcagtggacagctgcagggatggtgctggggcatgcaggagctgacagtggtggctgagccccttttcagggggtctctgacagatgcctgctgaaacactgaggctactcctacccccgacagctctcagttaacaagtggttggaatgaaaattgtacagcctctatggaaaacagtagacagatttctcaatacaactgctttttgtgtgttaattttataccctgctgtagtcccagctactcgggaggctgaggcaggagaatggcgtgaacccgggaggcggagcttgcagtgagccgagattgcgccactgcagtccgcagtccggcctgggcgacagagcgagactccgtctc

SEQ ID NO: 203852 - DNA, 597 bp, Homo sapiens
  misc_feature (23)..(23): n is a, c, g, or t
agctcggggttgctgcctggccnaggccggcgcatgttggaacacagactctctgcccttccaccccaagcctggtgggcgagtgagtctgccccacaccagcacactgctctgccgttggtgggcacccgttggtgtgtgttgagctgggtgttgtacctcggtgtctgcgtggagaaatgcgaacagtgagtgccacagcacagccacggaatggtcgtcatcggcttcagaaggggaatgaaaggggcagcaccgtgggtgttgatgatctccgaggctgcctgtttagagcgtcccttccctgagatggaggcgtagcttcaccgtgtagtgtttaagctttaaaacgtgaaatgcagcgaggccgacagtgagtagtaggaagctcagaaatgggatgcccgcactgccttcagttcaccctccattgtccattgccgctggcatacccaggtcagcgcctgcaggcccctgtctcaaaagatgtggccggcttcatgtcccggtactgcctgaagcgtcacctcagcaccgctagcttcacactggccacacccacctccactcagcagtctccatgctgtagcccaaagc

SEQ ID NO: 203853 - DNA, 478 bp, Homo sapiens
ctggtgacaaaatatcttgtgtaaagttcaagggacagtgcgtcatatgttgttcctaggaggagggtagtggtgagggtgtttattataataatgtttgtgtattcggctatgaagaatagggcgaaggggcctgcggcgtattcgatgttgaagcctgagactagttcggactccccttcggcaaggtcatcatgtcaactaaaccttagcattttccaatctttaataaatgggaaggggagctgaacgcaaacatgattaaaaccacttcctagaactcagaggtgaaggcaccacaaaacattggctagtaggcaatatgatggattgttatcttttgtcaatcaacttgaaatgtttaggaaagactgtcaaaaaattcttaaaacatttcctcataatatagttggatttttaaaatctttgtactctttatttcaatgaataggcctgaatgacaaaatatggataaaca

SEQ ID NO: 203854 - DNA, 510 bp, Homo sapiens
ttttttgcctggccctgttacttacctctgggctctttccattttctttgatacctgaggatttattatttgatgttttgattcttcctgaatagacagagtgatttaaaaagaaatacatccaatcatttcattcctgtttctttatattcattgaatggctttttgctgctcttaggaaacaggaaaaggagctgcttcaacaaggcctccaagactgtagtgatctagctgggcacagtggctcacgcctgtaatctcagcattttgggaggctgagacaggtggatcatgaggtcaggagatcgagaccatcctggttaacacagtgaaaccccgtctatactaaaaatacagaaaattagctgggcgtggtggcgggcgcctgtagtcccagctactcaggaggctgagacaggagaatggcgtgaacctgggaggtggagttttcagtgagccaagattgcaccactgcactccaggctgggtgacagagcgagactccgtctc

SEQ ID NO: 203855 - DNA, 609 bp, Homo sapiens
acagcaacaggctaattgtgtttacataacacgagattgtttagctccagaacacatcagtgtcaaaacaccaaggttctgcacagcgacagcgacagtggggcaggaaagatgtcatccttctccaggaactcaggcagcatttcccaaggcccggaaaaaccccagcccacaaataggacatcagccctccagtatgtccacccacccagctggctgctgggcgcagccaggactctcagaatctgcctgtgtcgggctggccgtgggaataagccagattcaggtttaactgaggcacaaggtggggtccaggaagccgcttcggggctgcccatgcagccacagccacagggaggccccgagcagcctcccttccggagcttcccaccagcactcccacccagctgcctccgagaattctggaaccccaagcagaggtgcccagcacagggtaggccagcctggggctcagacttgtgggggtaggtactctccactcccttcttgggaacaacgtcctagccctggactctgtgtgcgaaccctcaggcccccgtccaagtctttgcaagctgggtccagagctggaagctgagggagagcagc

SEQ ID NO: 203856 - DNA, 444 bp, Homo sapiens
ctacccacagggtgccacagcacgcatgtctttcccagtagcaaaggcgctgtgtctcaaaagctggctatcttattcatttctgagtcaaactctagaccatgcttgcctcttcaggcacttggctctctcagcacaaatataacaggtctttgcactccaggcccttgccaagagtgaactctggaggcctgagccatgtggaatcaggcctgaagtgccctcctttaccctgtggcaccaaagcctgcttcagatggctgggccacatcctgccggtctgccaagaagagcttgggggcactctggccacaacagtcaagcatcctgggggcctccttcccattaaggccctcaggtttcgcacttatttccccagaacttatctgtgccttccacagcccacatggccccgggctggacttccaggggctttgttccctt

SEQ ID NO: 203857 - DNA, 247 bp, Homo sapiens
aacccttgtaattacatgggctcacccagatactgcaggataatcttgttttaaggtcagctgattagcaacattaattccatctgtactcttaattcccccttcctatgtaattatgcggtgtaacataggacatgagcagttggggggtcattactttggccaccactgtgatactttggccaccaccatgactattttgtgccaggtactgaggtaagcactggtgaattaaacatgaataaca

SEQ ID NO: 203858 - DNA, 401 bp, Homo sapiens
aatcataatgagagctcacatgtcattgggtgcttctgatgcaccccacacttgccaagtgctttattttacacagcttttctcatctgatcctcaaagtcacttatgagttaagtaccaataattttcttttcttttttttttttttaaagagacagggtctcactctccaggatcttgctttccagggcaacacctattgcccaggctggagtgcagtggcacagccagctcactgtaaccttgaactcctggctcaagcgatcctcctgcctcagcctcctgagcagttgggaggctgaggcaggagaattgcttgaatccctgggttacggaagttgcagtgagccgagatcacaccactgcactacagactgggtgacagaatgagactctgtctc

SEQ ID NO: 203859 - DNA, 3181 bp, Homo sapiens
ggtctggagcgcggccgccgctgtcactgttggtgcgggcgcgtcggggccgggccggggcactgtaaatggcggcggagggaggcggagcggcggccacgctcagcccagatcccccgaaactttaggttcgaagccccacaactttccgggaagcgctgccgctccggaggcgtggacggaaggggaagccgaggcgggaagtctgggggaatcggcagggagccggggagactcgaacccgcggcgggggcggagtccgccagtgcctcgcgcctccgcggcccccgcctctttctctgcaccctccccgcggccggagccggagccggagccggagccgtagtcgcagccgcagccgcagccgcgcgccgggcctcgcaggcagcggcgcggcgagcgcagccgggccccctcctcgcgacctccgggccctgttgctcgggcgcacctggcgcgtgtgaggccggggccggcgttttcgggaagctagcaggaggccgggccacgcgcagcccctgccggcccaggttcctggggccgggccccgagtagtgcatgcggggcggggcggccgtgagccggaggcgaagatggaaggcttaacgctgagcgatgcggagcagaaatactattcagatctcttctcctactgcgacattgagagcaccaagaaggtggtggtcaacgggcgggtgctggagctgttccgggccgcgcagctgccgaacgacgtggtcctacagatcatggagctttgtggtgcaacaagacttggttattttggaagaagtcagttctacattgctttgaaacttgtagctgttgcccagtctggtttccctttaagagtggaaagtataaatacagtaaaggaccttcctctgccaagatttgttgcttcaaagaatgaacaggaatctcgccatgcagcctcatattcttcagattctgaaaatcaagggtcgtattctggtgtaattcccccaccacctggcagggggcaagtgaaaaagggatccgtaagccatgatacggttcagcctcgtacatctgcagatgcacaggaacctgcatccccagtagtttcaccacagcaatccccaccaacttctccacacacatggaggaagcacagccgtcatcccagcggtgggaatagtgagaggcctctcgcgggacctgggccattttggtctccctttggtgaagcacaatcaggttcttctgctggtgatgcagtgtggtcagggcattccccacctccacctcaagaaaactgggtcagttttgcagatactccaccaaccagtactcttttaaccatgcatcctgcttctgtccaggaccagacaacagtacgaactgtagcatcagctacaactgccattgaaattcgtaggcaatccagtagttatgatgatccctggaaaataacagatgaacaaagacagtattatgtaaatcagtttaaaaccattcagcctgatctaaacggatttattccaggatctgcagctaaagagttttttacaaaatcaaaacttcctattcttgaactttctcatatttgggaactctcagactttgataaagatggtgcattgacactggatgagttttgtgctgcttttcatctggtggttgctaggaagaatggctatgatttaccagaaaaacttcctgaaagcttaatgcccaaactgattgatttggaagattcagcagatgttggggatcagccaggtgaggtaggttattcaggctctcctgctgaagctcctccaagcaagtcaccatcgatgccatcactaaaccagacatggcctgagctgaatcagagcagtgagcagtgggagacatttagtgaacgctcttcaagctcacaaactctgacccaatttgattctaacattgcaccagctgatcctgatactgctattgttcatccagttcccattcgtatgactccaagcaaaatccacatgcaggaaatggaacttaaaagaactggcagcgatcatacaaatcccactagcccattacttgtgaaaccatctgaccttttagaagaaaataagataaattcatcggtgaaattcgcttctggtaatactgtagcagatggttacagtagttcagactcttttacttctgacccagaacagatcgggagcaatgtaactcgtcaaaggtctcattcaggaacgtcgcctgataacactgcaccaccacctccccctccaaggccacagccctctcattctagatcatcatctttagatatgaatcggacctttacagtcaccacaggacaacaacaggctggagttgttgcccatcctcctgcagtgcctccaagaccacagccctcacaggctcctggtcctgctgtgcatcgcccagtggatgccgatggcctcataactcacactagtacctcacctcagcagataccagagcaaccaaattttgcagatttcagtcagtttgaagtatttgctgcatcaaatgtaaacgacgaacaagatgatgaagccgagaaacatccagaagtcctgccggctgaaaaagcttctgatcctgcaagttctcttcgagttgccaaaacagatagtaaaactgaagaaaagacagctgctagtgctcctgccaatgtgagcaaaggcacaacaccacttgctccaccacctaaacctgttcgaagaagattaaaatcagaagatgaattaaggccagaagttgatgaacatacacaaaagacgggtgtcttagctgctgttcttgcatcacaaccttctattcccagatctgttgggaaagataagaaagctattcaggcatcaattagacgtaataaggaaaccaacaccgttttggccagattgaatagcgaattgcagcaacaattaaaggatgttcttgaggagagaatttccctggaagttcaactggaacaacttcgaccattctctcacctataagccaattgccgttaactgtgaacatacttgtttttaagtggttttgggttcaaagccaatttggagacctagacattcagctcactgcttaactcaacattaaattttatgattctgttttgccctatatgttcaccgttgtatttaagtatcttttattttttaatttcgacaataaaaaggtcaggatggcgttt

SEQ ID NO: 203860 - DNA, 1796 bp, Homo sapiens
tgttatttttattgttgtaatgttactttattttctaatattttctgtttgcggttggttgaatcctcagctgtggaacctacagatacagaaccacagatttggagggccacattgtatatgtactattttgtgacttattttgaatatttctgcatcattaagtattcattattttttctagactataacttgctttgtctactgtgtaaatatgccatgatttatttgtagttaattttttacagttaataacactaggatgaactgttagcctattagccaatctttgactatctctggcttgaaacagcatatcacttatatttgtttggagtagatagagcaaaaagtaaagaaatgattattattaaataggacatatcccatttatcagcagatggttacagtagttcagactcttttacttctgacccagaacagatcgggagcaatgtaactcgtcaaaggtcagtatttctgtcaatgaaaagcatgttaaactatcttgctgcgttttaatgtttaaaactatttagaaccaagcacaaatgattttgttctctgaaagctgttaggttactttttgatttatgtaaaagacaagtaattttgatcctttccaacttgaatagaaaaacaaaaagaaccctgactttctaaatggtatgttgtggaagctctaaaaagaggtgataacttcttgacgatagaagttttataagtcctttttgtacctaaacaacgagaatctgtcaagtaatacatgtatagccttatggtaagtaccaaaagaattctgtgttttaaaacaccatccaaaagcacagcccagtggtgggccacctccccaccctgaagttctgcgttacatataacctttcaggcacaaacaagaagggtgtgggatagggtggaggaggctagagatttgtctgcaagggctttaccatccactaaaagctgtgtgcaggacagaagcatctttctctcctcactttttgcacgtgttgagtatcattttgctgtgtgcccagtggatgtagcgaggatgcagaatctccaagcagcttagagtcagaaggctgcttgtcttcctttctgattcttcatgtagttcttcctgtgtttcttagcattctcagtcatcttggattttactctgctgtttattcccatatatgcagatcagattaccagaggccttggagactcttttcagaatatgaaagactttggtagcaaagaagtgaatctctagggcgagttgagtttgagcatagtcacctctaaaatgagatggcctctgcggacacatgaaagggtacttcagcttaccaaaatccagaacttaataggttgaaagctaaccatatctgaaagtagactttcctttatacaattattttttttcagactattattacttttaattgaatgggaaagcgtaacactaagtatgcagtctattatgaaatcatgttgacaactaagtttcttttcaaaatttttgaggccgagcacttctgtaatcctagcactttgggaggctaaggtgggcggatcacctgaagtcaggagttcgagaccagcctggccaacatggtgaaactccgtctctactaaaaatacaaaaattagccgggcatggtagcatgcgcctgtaatcccagttacttgggaggctgaagcaggagaatcgcttgaacccaggaggcggaggttgcagtgagccaaaatggtgtcactgcactccagcctgggcaacagagtgagactgtctcaaaaaaaaaaaa

SEQ ID NO: 203861 - DNA, 1675 bp, Homo sapiens
  misc_feature (1)..(3): n is a, c, g, or t
  misc_feature (233)..(233): n is a, c, g, or t
  misc_feature (1301)..(1301): n is a, c, g, or t
nnntacatatgtgtaaaatatgtgcacgtacataatagaatcatctttcaggggtcgcactggcaagtcgcactgacttgctttgttttgaacaaaactttgattcattaggatcacaaaatcagtacattaacatttgaatgttcaaagaagaatttgatgttattctttctttctttagtcaaggcatgcctctttagcatttttacttggtggacatttatatcacttanactttgctcctgtattgtgttttattttaactctgtaaggctttaaatctcttccatagagattgcaataaatcattactatacttttgattgtgaactcctcaccttacattacaagtgacccagaataaatataaaatgttgacggaaaaatagaaattactgaattttgttaaacctatgaaacacaacttgcagtgcaacctctgaattactttgctaaatcttctccagtgatcttttactccatctttctcatcatgctgacttgtctctcctctgtctgttcagcagtgggagacatttagtgaacgctcttcaagctcacaaactctgacccaatttgattctaacattgcaccagctgatcctgtaagtcaatcacttagcttgcttgtttgagattaattttattaacccaaatttccattcattatcgtttttagctgatatgcatgattcagtggagtgcttagagggaagtggcggcaggctttttggtttttgtgtgcttaatggtgggaaagacattttttgccattccttttttctagttattttgttgagagaaaactacgtttttaaaatctggtacatgtgtctagagaagcattttttgtgacaatctattttgttaaccttatcatttgctaattaagtgtatattttatatacatactgtttatttcagtgtagtgactctttatgtattatctgtatgcttacacatcatgtaatatgtcctacatatgtaactatttatgcaatgtcatcttttattttgacatgccaaatgacatggcttttatttaattagtatgttgagtcctgttagagagaatcaagttcagcaatacaagatgttggtcaaatattccgcttatgcaaaggagcctctgtcttgtcttcttgtggcttactgtgttgctttgaaaatgctacaaagttcatatcctgatttaaaaaataaattctgtccccatagagttaatttaatatatgctacacctgtcccttgggttttttgaaaaccttagctgttaatcgttcttctccctgttcacttcnctgctttttctttttctttctctctctgtcttttttttttttttaagacaaggatgtgctaataagcactttccaaaaagaaaagagggagtaagcagaaagtgaagaaatgtgtaaaggcagaatttttaaaatgagctgagtagaaagatatggagaaaatgacataagtcgttctttctagatgatctgatcaaagacagccagcatttattaattaaatgtaaaaatggtcttgtcatctaaagagattttgaagaagtggcatttaaagataaagtataccattagcagttaatgggcctttgatgtggtttgttttttgtttttgttttttgagttggagcctgggcaacagagcgagactccatctc

SEQ ID NO: 203862 - DNA, 876 bp, Homo sapiens
aaaaagaaattttgcttaataactttattaaaaaaattgttagccacataaaataatcagttgtttagggtacatcataaacagtgctatcttaatttattgtaacacttacatacttgagtgttgagaaaatgtcatgctaataagatcctttgctgcttagccaagtgtaaatgtttaaaaagaaaaaagctctgatatcagtagtatgaccaattatcatggggtgaattttgcaggtctcattcaggaacgtcgcctgataacactgcaccaccacctccccctccaaggccacagccctctcattctagatcatcatctttagatatgaatcggacctttacagtcaccacaggtaggggctagagaaccataatatacattatcatttaattttaaagttaatccaacacacatacacattttatttttgtttctattacatgtcttttaaaaatatttatctggtcgagtgtggttgctcatgcctgtaatcccagcactttgaggggcaggcagatcacttgaggttatgagttcgagaccagcctggccaacatggtgaaaccccatctctactaaaaatacaaaaattagccggatgtagtgatgcatgtctgtggtcccagctactcgggaggctgaggtgggagagtcccttgaacctgggaagcagaggttgcagtgagccaagattgcatcactgcactccagcctgggtgacagagtgagaccctgtctccaaaaaaaaaaaaaaaaattatctgaaggaaaattttggattaaaagacagcagatgagaggcaatttcttttcttaatgactacttaaagtgtgtttgagtgcaaataatgaagatgggaacctgagaga

SEQ ID NO: 203863 - DNA, 817 bp, Homo sapiens
aaaaagaaattttgcttaataactttattaaaaaaattgttagccacataaaataatcagttgtttagggtacatcataaacagtgctatcttaatttattgtaacacttacatacttgagtgttgagaaaatgtcatgctaataagatcctttgctgcttagccaagtgtaaatgtttagtctcattcaggaacgtcgcctgataacactgcaccaccacctccccctccaaggccacagccctctcattctagatcatcatctttagatatgaatcggacctttacagtcaccacaggtaggggctagagaaccataatatacattatcatttaattttaaagttaatccaacacacatacacattttatttttgtttctattacatgtcttttaaaaatatttatctggtcgagtgtggttgctcatgcctgtaatcccagcactttgaggggcaggcagatcacttgaggttatgagttcgagaccagcctggccaacatggtgaaaccccatctctactaaaaatacaaaaattagccggatgtagtgatgcatgtctgtggtcccagctactcgggaggctgaggtgggagagtcccttgaacctgggaagcagaggttgcagtgagccaagattgcatcactgcactccagcctgggtgacagagtgagaccctgtctccaaaaaaaaaaaaaaaaattatctgaaggaaaattttggattaaaagacagcagatgagaggcaatttcttttcttaatgactacttaaagtgtgtttgagtgcaaataatgaagatgggaacctgagaga

SEQ ID NO: 203864 - DNA, 506 bp, Homo sapiens
agagcaaatggcttaaagaaagcaaatggtgttgcaaagtgctaactatgaatgtcttcaaaaatgcttattattaatggaattcttgtcttaaagagcaaaggcacaacaccacttgctccaccacctaaacctgttcgaagaagattaaaatcagaagatgaattaaggccagaagttgatgaacatacacaaaagacgggtgtcttagctgctgttcttgcatcacaaccttctattcccagatctgttgggaaagataagaaagctattcaggcatcaattagacgtaataaggaaaccaacaccgtgaaaccccgtctctactaaaaatacaaaaaattagccgggcgcggtggcgggcgcctgtagtcccagctactcgggaggctgaggcaggagaatggcgtgaacccgggaagcggagcttgcagtgagccgagattgcgccattgcagtccgcagtccggcctgggcgacagagcgagactccgtctcaaaaaaaa

SEQ ID NO: 203865 - DNA, 2565 bp, Homo sapiens
tttttgagatggagtttccctcttgttgcccaggctggagtgctatggcatgatctcggctcactgcaacctctgcccccccgggttcaagtgattcttctgcctcagcctcctgagtagctgggattacaagcatgtgccaccacgcccggatcatggagctttgtggtgcaacaagacttggttattttggaagaagtcagttctacattgctttgaaacttgtagctgttgcccagtctggtttccctttaagagtggaaagtataaatacagatttgttgcttcaaagaatgaacaggaatctcgccatgcagcctcatattcttcagattctgaaaatcaagggtcgtattctggtgtaattcccccaccacctggcagggggcaagtgaaaaagggatccgtaagccatgatacggttcagcctcgtacatctgcagatgcacaggaacctgcatccccagtagtttcaccacagcaatccccaccaacttctccacacacatggaggaagcacagccgtcatcccagcggtgggaatagtgagaggcctctcgcgggacctgggccattttggtctccctttggtgaagcacaatcaggttcttctgctggtgatgcagtgtggtcagggcattccccacctccacctcaagaaaactgggtcagttttgcagatactccaccaaccagtactcttttaaccatgcatcctgcttctgtccaggaccagacaacagtacgaactgtagcatcagctacaactgccattgaaattcgtaggcaatccagtagttatgatgatccctggaaaataacagatgaacaaagacagtattatgtaaatcagtttaaaaccattcagcctgatctaaacggatttattccaggatctgcagctaaagagttttttacaaaatcaaaacttcctattcttgaactttctcatatttgggaactctcagactttgataaagatggtgcattgacactggatgagttttgtgctgcttttcatctggtggttgctaggaagaatggctatgatttaccagaaaaacttcctgaaagcttaatgcccaaactgattgatttggaagattcagcagatgttggggatcagccaggtgaggtaggttattcaggctctcctgctgaagctcctccaagcaagtcaccatcgatgccatcactaaaccagacatggcctgagctgaatcagagcagtgagcagtgggagacatttagtgaacgctcttcaagctcacaaactctgacccaatttgattctaacattgcaccagctgatcctgatactgctattgttcatccagttcccattcgtatgactccaagcaaaatccacatgcaggaaatggaacttaaaagaactggcagcgatcatacaaatcccactagcccattacttgtgaaaccatctgaccttttagaagaaaataagataaattcatcggtgaaattcgcttctggtaatactgtagcagatggttacagtagttcagactcttttacttctgacccagaacagatcgggagcaatgtaactcgtcaaaggtctcattcaggaacgtcgcctgataacactgcaccaccacctccccctccaaggccacagccctctcattctagatcatcatctttagatatgaatcggacctttacagtcaccacaggacaacaacaggctggagttgttgcccatcctcctgcagtgcctccaagaccacagccctcacaggctcctggtcctgctgtgcatcgcccagtggatgccgatggcctcataactcacactagtacctcacctcagcagataccagagcaaccaaattttgcagatttcagtcagtttgaagtatttgctgcatcaaatgtaaacgacgaacaagatgatgaagccgagaaacatccagaagtcctgccggctgaaaaagcttctgatcctgcaagttctcttcgagttgccaaaacagatagtaaaactgaagaaaagacagctgctagtgctcctgccaatgtgagcaaaggcacaacaccacttgctccaccacctaaacctgttcgaagaagattaaaatcagaagatgaattaaggccagaagttgatgaacatacacaaaagacgggtgtcttagctgctgttcttgcatcacaaccttctattcccagatctgttgggaaagataagaaagctattcaggcatcaattagacgtaataaggaaaccaacaccgttttggccagattgaatagcgaattgcagcaacaattaaaggatgttcttgaggagagaatttccctggaagttcaactggaacaacttcgaccattctctcacctataagccaattgccgttaactgtgaacatacttgtttttaagtggttttgggttcaaagccaatttggagacctagacattcagctcactgcttaactcaacattaaattttatgattctgttttgccctatatgttcaccgttgtatttaagtatcttttattttttaatttcgacaataaaaaggtcaggatggcgttt

SEQ ID NO: 203866 - DNA, 3100 bp, Homo sapiens
ggtctggagcgcggccgccgctgtcactgttggtgcgggcgcgtcggggccgggccggggcactgtaaatggcggcggagggaggcggagcggcggccacgctcagcccagatcccccgaaactttaggttcgaagccccacaactttccgggaagcgctgccgctccggaggcgtggacggaaggggaagccgaggcgggaagtctgggggaatcggcagggagccggggagactcgaacccgcggcgggggcggagtccgccagtgcctcgcgcctccgcggcccccgcctctttctctgcaccctccccgcggccggagccggagccggagccggagccgtagtcgcagccgcagccgcagccgcgcgccgggcctcgcaggcagcggcgcggcgagcgcagccgggccccctcctcgcgacctccgggccctgttgctcgggcgcacctggcgcgtgtgaggccggggccggcgttttcgggaagctagcaggaggccgggccacgcgcagcccctgccggcccaggttcctggggccgggccccgagtagtgcatgcggggcggggcggccgtgagccggaggcgaagatggaaggcttaacgctgagcgatgcggagcagaaatactattcagatctcttctcctactgcgacattgagagcaccaagaaggtggtggtcaacgggcgggtgctggagctgttccgggccgcgcagctgccgaacgacgtggtcctacagatcatggagctttgtggtgcaacaagacttggttattttggaagaagtcagttctacattgctttgaaacttgtagctgttgcccagtctggtttccctttaagagtggaaagtataaatacagtaaaggaccttcctctgccaagatttgttgcttcaaagaatgaacaggaatctcgccatgcagcctcatattcttcagattctgaaaatcaagggtcgtattctggtgtaattcccccaccacctggcagggggcaagtgaaaaagggatccgtaagccatgatacggttcagcctcgtacatctgcagatgcacaggaacctgcatccccagtagtttcaccacagcaatccccaccaacttctccacacacatggaggaagcacagccgtcatcccagcggtgggaatagtgagaggcctctcgcgggacctgggccattttggtctccctttggtgaagcacaatcaggttcttctgctggtgatgcagtgtggtcagggcattccccacctccacctcaagaaaactgggtcagttttgcagatactccaccaaccagtactcttttaaccatgcatcctgcttctgtccaggaccagacaacagtacgaactgtagcatcagctacaactgccattgaaattcgtaggcaatccagtagttatgatgatccctggaaaataacagatgaacaaagacagtattatgtaaatcagtttaaaaccattcagcctgatctaaacggatttattccaggatctgcagctaaagagttttttacaaaatcaaaacttcctattcttgaactttctcatatttgggaactctcagactttgataaagatggtgcattgacactggatgagttttgtgctgcttttcatctggtggttgctaggaagaatggctatgatttaccagaaaaacttcctgaaagcttaatgcccaaactgattgatttggaagattcagcagatgttggggatcagccaggtgaggtaggttattcaggctctcctgctgaagctcctccaagcaagtcaccatcgatgccatcactaaaccagacatggcctgagctgaatcagagcagtgaggatactgctattgttcatccagttcccattcgtatgactccaagcaaaatccacatgcaggaaatggaacttaaaagaactggcagcgatcatacaaatcccactagcccattacttgtgaaaccatctgaccttttagaagaaaataagataaattcatcggtgaaattcgcttctggtaatactgtagcagatggttacagtagttcagactcttttacttctgacccagaacagatcgggagcaatgtaactcgtcaaaggtctcattcaggaacgtcgcctgataacactgcaccaccacctccccctccaaggccacagccctctcattctagatcatcatctttagatatgaatcggacctttacagtcaccacaggacaacaacaggctggagttgttgcccatcctcctgcagtgcctccaagaccacagccctcacaggctcctggtcctgctgtgcatcgcccagtggatgccgatggcctcataactcacactagtacctcacctcagcagataccagagcaaccaaattttgcagatttcagtcagtttgaagtatttgctgcatcaaatgtaaacgacgaacaagatgatgaagccgagaaacatccagaagtcctgccggctgaaaaagcttctgatcctgcaagttctcttcgagttgccaaaacagatagtaaaactgaagaaaagacagctgctagtgctcctgccaatgtgagcaaaggcacaacaccacttgctccaccacctaaacctgttcgaagaagattaaaatcagaagatgaattaaggccagaagttgatgaacatacacaaaagacgggtgtcttagctgctgttcttgcatcacaaccttctattcccagatctgttgggaaagataagaaagctattcaggcatcaattagacgtaataaggaaaccaacaccgttttggccagattgaatagcgaattgcagcaacaattaaaggatgttcttgaggagagaatttccctggaagttcaactggaacaacttcgaccattctctcacctataagccaattgccgttaactgtgaacatacttgtttttaagtggttttgggttcaaagccaatttggagacctagacattcagctcactgcttaactcaacattaaattttatgattctgttttgccctatatgttcaccgttgtatttaagtatcttttattttttaatttcgacaataaaaaggtcaggatggcgttt

SEQ ID NO: 203867 - DNA, 3423 bp, Homo sapiens
ggtctggagcgcggccgccgctgtcactgttggtgcgggcgcgtcggggccgggccggggcactgtaaatggcggcggagggaggcggagcggcggccacgctcagcccagatcccccgaaactttaggttcgaagccccacaactttccgggaagcgctgccgctccggaggcgtggacggaaggggaagccgaggcgggaagtctgggggaatcggcagggagccggggagactcgaacccgcggcgggggcggagtccgccagtgcctcgcgcctccgcggcccccgcctctttctctgcaccctccccgcggccggagccggagccggagccggagccgtagtcgcagccgcagccgcagccgcgcgccgggcctcgcaggcagcggcgcggcgagcgcagccgggccccctcctcgcgacctccgggccctgttgctcgggcgcacctggcgcgtgtgaggccggggccggcgttttcgggaagctagcaggaggccgggccacgcgcagcccctgccggcccaggttcctggggccgggccccgagtagtgcatgcggggcggggcggccgtgagccggaggcgaagatggaaggcttaacgctgagcgatgcggagcagaaatactattcagatctcttctcctactgcgacattgagagcaccaagaaggtggtggtcaacgggcgggtgctggagctgttccgggccgcgcagctgccgaacgacgtggtcctacagatcatggagctttgtggtgcaacaagacttggttattttggaagaagtcagttctacattgctttgaaacttgtagctgttgcccagtctggtttccctttaagagtggaaagtataaatacagtaaaggaccttcctctgccaagatttgttgcttcaaagaatgaacaggaatctcgccatgcagcctcatattcttcagattctgaaaatcaagggtcgtattctggtgtaattcccccaccacctggcagggggcaagtgaaaaagggatccgtaagccatgatacggttcagcctcgtacatctgcagatgcacaggaacctgcatccccagtagtttcaccacagcaatccccaccaacttctccacacacatggaggaagcacagccgtcatcccagcggtgggaatagtgagaggcctctcgcgggacctgggccattttggtctccctttggtgaagcacaatcaggttcttctgctggtgatgcagtgtggtcagggcattccccacctccacctcaagaaaactgggtcagttttgcagatactccaccaaccagtactcttttaaccatgcatcctgcttctgtccaggaccagacaacagtacgaactgtagcatcagctacaactgccattgaaattcgtaggcaatccagtagttatgatgatccctggaaaataacagatgaacaaagacagtattatgtaaatcagtttaaaaccattcagcctgatctaaacggatttattccaggatctgcagctaaagagttttttacaaaatcaaaacttcctattcttgaactttctcatatttgggaactctcagactttgataaagatggtgcattgacactggatgagttttgtgctgcttttcatctggtggttgctaggaagaatggctatgatttaccagaaaaacttcctgaaagcttaatgcccaaactgattgatttggaagattcagcagatgttggggatcagccaggtgaggtaggttattcaggctctcctgctgaagctcctccaagcaagtcaccatcgatgccatcactaaaccagacatggcctgagctgaatcagagcagtgagcagtgggagacatttagtgaacgctcttcaagctcacaaactctgacccaatttgattctaacattgcaccagctgatcctgatactgctattgttcatccagttcccattcgtatgactccaagcaaaatccacatgcaggaaatggaacttaaaagaactggcagcgatcatacaaatcccactagcccattacttgtgaaaccatctgaccttttagaagaaaataagataaattcatcggtgaaattcgcttctggtaatactgtagcagatggttacagtagttcagactcttttacttctgacccagaacagatcgggagcaatgtaactcgtcaaaggtctcattcaggaacgtcgcctgataacactgcaccaccacctccccctccaaggccacagccctctcattctagatcatcatctttagatatgaatcggacctttacagtcaccacaggacaacaacaggctggagttgttgcccatcctcctgcagtgcctccaagaccacagccctcacaggctcctggtcctgctgtgcatcgcccagtggatgccgatggcctcataactcacactagtacctcacctcagcagataccagagcaaccaaattttgcagatttcagtcagtttgaagtatttgctgcatcaaatgtaaacgacgaacaagatgatgaagccgagaaacatccagaagtcctgccggctgaaaaagcttctgatcctgcaagttctcttcgagttgccaaaacagatagtaaaactgaagaaaagacagctgctagtgctcctgccaatgtgagcaaaggcacaacaccacttgctccaccacctaaacctgttcgaagaagattaaaatcagaagatgaattaaggccagaagttgatgaacatacacaaaagacgggtgtcttagctgctgttcttgcatcacaaccttctattcccagatctgttgggaaagataagaaagctattcaggcatcaattagacgtaataaggaaaccaacaccgttttggccagattgaatagcgaattgcagcaacaattaaaggatgttcttgaggagagaatttccctggaagttcaactggaacaacttcgaccattctctcacctataagccaattgccgttaactgtgaacatacttgtttttaagtggttttgggttcaaagccaatttggagacctagacattcagctcactgcttaactcaacattaaattttatgattctgttttgccctatatgttcaccgttgtatttaagtatcttttattttttaatttcgacaataaaaaggtcaggatggcgtttaaaaaaaaaaaagaaaaaaaaagacaaaaaaaaaaaaaaaaaagacacacaacaacaaaacaacaacgagacgaacagaaaaacgacgaagcacacgccgagaaaacaggaaacagccagcacaccgagaggagacagaacaagaaacagaaaacaaagaacgactcagggggcggggcgaggcagagaaggagagtgaccacgagtgcgggcgggcggcgacaccacagatagagagcgcg

SEQ ID NO: 203868 - DNA, 1479 bp, Homo sapiens
agaatttctctatttttaaattgcagatgttggggatcagccaggtgaggtaggttattcaggctctcctgctgaagctcctccaagcaagtcaccatcgatgccatcactaaaccagacatggcctgagctgaatcagagcagtgagcagtgggagacatttagtgaacgctcttcaagctcacaaactctgacccaatttgattctaacattgcaccagctgatcctgatactgctattgttcatccagttcccattcgtatgactccaagcaaaatccacatgcaggaaatggaacttaaaagaactggcagcgatcatacaaatcccactagcccattacttgtgaaaccatctgaccttttagaagaaaataagataaattcatcggtgaaattcgcttctggtaatactgtagcagatggttacagtagttcagactcttttacttctgacccagaacagatcgggagcaatgtaactcgtcaaaggtctcattcaggaacgtcgcctgataacactgcaccaccacctccccctccaaggccacagccctctcattctagatcatcatctttagatatgaatcggacctttacagtcaccacaggacaacaacaggctggagttgttgcccatcctcctgcagtgcctccaagaccacagccctcacaggctcctggtcctgctgtgcatcgcccagtggatgccgatggcctcataactcacactagtacctcacctcagcagataccagagcaaccaaattttgcagatttcagtcagtttgaagtatttgctgcatcaaatgtaaacgacgaacaagatgatgaagccgagaaacatccagaagtcctgccggctgaaaaagcttctgatcctgcaagttctcttcgagttgccaaaacagatagtaaaactgaagaaaagacagctgctagtgctcctgccaatgtgagcaaaggcacaacaccacttgctccaccacctaaacctgttcgaagaagattaaaatcagaagatgaattaaggccagaagttgatgaacatacacaaaagacgggtgtcttagctgctgttcttgcatcacaaccttctattcccagatctgttgggaaagataagaaagctattcaggcatcaattagacgtaataaggaaaccaacaccgttttggccagattgaatagcgaattgcagcaacaattaaaggatgttcttgaggagagaatttccctggaagttcaactggaacaacttcgaccattctctcacctataagccaattgccgttaactgtgaacatacttgtttttaagtggttttgggttcaaagccaatttggagacctagacattcagctcactgcttaactcaacattaaattttatgattctgttttgccctatatgttcaccgttgtatttaagtatcttttattttttaatttcgacaataaaaaggtcaggatggcgttt

SEQ ID NO: 203869 - DNA, 1392 bp, Homo sapiens
tgggaactgataggtctcaatttggctgatgaagaagaagagtcataacttacccaggtttttaatttttgaagaactggcagtattgttgttaccttggttaaaatagaaaagttagggcagaggatgatgaagttatgttttagtcactgtgagtttagaatggtgaggaaaagtgaagtgttaagtgaaagggaaaatttggaagttttcatttgatacctaaacagcagtcagagatacacgaagaaaatcaagattgtttgctattatgggaataggcaggagtatgccaggagggcttcatgtaatagaggtaagaagcaaagtgagatctgatgaaaggctgtgagatttggtctttaggttacatacagaccatgtaacaagttagtacttgccttctaatacttaacaaacattcttagaaatctttatcatgtagtcacattcattcagcctatttcttctattaacaaagtgattatacagttactaaaaagaagaactttgtattcatgcaggacaacaacaggctggagttgttgcccatcctcctgcagtgcctccaagaccacagccctcacaggctcctggtcctgctgtgcatcgcccagtggatgccgatggcctcataactcacactagtacctcacctcagcagataccagagcaaccaaattttgcagatttcagtcagtttgaagtatttgctgcatcaaatgtaaacgacgaacaagatgatgaagccgagaaacatccagaagtcctgccggctgaaaaagcttctgatcctgcaagttctcttcgagttgccaaaacagatagtaaaactgaagaaaagacagctgctagtgctcctgccaatgtgagcaaaggcacaacaccacttgctccaccacctaaacctgttcgaagaagattaaaatcagaagatgaattaaggccagaagttgatgaacatacacaaaagacgggtgtcttagctgctgttcttgcatcacaaccttctattcccagatctgttgggaaagataagaaagctattcaggcatcaattagacgtaataaggaaaccaacaccgttttggccagattgaatagcgaattgcagcaacaattaaaggatgttcttgaggagagaatttccctggaagttcaactggaacaacttcgaccattctctcacctataagccaattgccgttaactgtgaacatacttgtttttaagtggttttgggttcaaagccaatttggagacctagacattcagctcactgcttaactcaacattaaattttatgattctgttttgccctatatgttcaccgttgtatttaagtatcttttattttttaatttcgacaataaaaaggtcaggatggcgttt

SEQ ID NO: 203870 - DNA, 3075 bp, Homo sapiens
ggtctggagcgcggccgccgctgtcactgttggtgcgggcgcgtcggggccgggccggggcactgtaaatggcggcggagggaggcggagcggcggccacgctcagcccagatcccccgaaactttaggttcgaagccccacaactttccgggaagcgctgccgctccggaggcgtggacggaaggggaagccgaggcgggaagtctgggggaatcggcagggagccggggagactcgaacccgcggcgggggcggagtccgccagtgcctcgcgcctccgcggcccccgcctctttctctgcaccctccccgcggccggagccggagccggagccggagccgtagtcgcagccgcagccgcagccgcgcgccgggcctcgcaggcagcggcgcggcgagcgcagccgggccccctcctcgcgacctccgggccctgttgctcgggcgcacctggcgcgtgtgaggccggggccggcgttttcgggaagctagcaggaggccgggccacgcgcagcccctgccggcccaggttcctggggccgggccccgagtagtgcatgcggggcggggcggccgtgagccggaggcgaagatggaaggcttaacgctgagcgatgcggagcagaaatactattcagatctcttctcctactgcgacattgagagcaccaagaaggtggtggtcaacgggcgggtgctggagctgttccgggccgcgcagctgccgaacgacgtggtcctacagatcatggagctttgtggtgcaacaagacttggttattttggaagaagtcagttctacattgctttgaaacttgtagctgttgcccagtctggtttccctttaagagtggaaagtataaatacagtaaaggaccttcctctgccaagatttgttgcttcaaagaatgaacaggaatctcgccatgcagcctcatattcttcagattctgaaaatcaagggtcgtattctggtgtaattcccccaccacctggcagggggcaagtgaaaaagggatccgtaagccatgatacggttcagcctcgtacatctgcagatgcacaggaacctgcatccccagtagtttcaccacagcaatccccaccaacttctccacacacatggaggaagcacagccgtcatcccagcggtgggaatagtgagaggcctctcgcgggacctgggccattttggtctccctttggtgaagcacaatcaggttcttctgctggtgatgcagtgtggtcagggcattccccacctccacctcaagaaaactgggtcagttttgcagatactccaccaaccagtactcttttaaccatgcatcctgcttctgtccaggaccagacaacagtacgaactgtagcatcagctacaactgccattgaaattcgtaggcaatccagtagttatgatgatccctggaaaataacagatgaacaaagacagtattatgtaaatcagtttaaaaccattcagcctgatctaaacggatttattccaggatctgcagctaaagagttttttacaaaatcaaaacttcctattcttgaactttctcatatttgggaactctcagactttgataaagatggtgcattgacactggatgagttttgtgctgcttttcatctggtggttgctaggaagaatggctatgatttaccagaaaaacttcctgaaagcttaatgcccaaactgattgatttggaagattcagcagatgttggggatcagccaggtgaggtaggttattcaggctctcctgctgaagctcctccaagcaagtcaccatcgatgccatcactaaaccagacatggcctgagctgaatcagagcagtgagcagtgggagacatttagtgaacgctcttcaagctcacaaactctgacccaatttgattctaacattgcaccagctgatcctgatactgctattgttcatccagttcccattcgtatgactccaagcaaaatccacatgcaggaaatggaacttaaaagaactggcagcgatcatacaaatcccactagcccattacttgtgaaaccatctgaccttttagaagaaaataagataaattcatcggtgaaattcgcttctggtaatactgtagcagatggttacagtagttcagactcttttacttctgacccagaacagatcgggagcaatgtaactcgtcaaaggtctcattcaggaacgtcgcctgataacactgcaccaccacctccccctccaaggccacagccctctcattctagatcatcatctttagatatgaatcggacctttacagtcaccacaggacaacaacaggctggagttgttgcccatcctcctgcagtgcctccaagaccacagccctcacaggctcctggtcctgctgtgcatcgcccagtggatgccgatggcctcataactcacactagtacctcacctcagcagataccagagcaaccaaattttgcagatttcagtcagtttgaagtatttgctgcatcaaatgtaaacgacgaacaagatgatgaagccgagaaacatccagaagtcctgccggctgaaaaagcttctgatcctgcaagttctcttcgagttgccaaaacagatagtaaaactgaagaaaagacagctgctagtgctcctgccaatgtgagcaaaggcacaacaccacttgctccaccacctaaacctgttcgaagaagattaaaatcagaagatgaattaaggccagaagttgatgaacatacacaaaagacgggtgtcttagctgctgttcttgcatcacaaccttctattcccaggatgttcttgaggagagaatttccctggaagttcaactggaacaacttcgaccattctctcacctataagccaattgccgttaactgtgaacatacttgtttttaagtggttttgggttcaaagccaatttggagacctagacattcagctcactgcttaactcaacattaaattttatgattctgttttgccctatatgttcaccgttgtatttaagtatcttttattttttaatttcgacaataaaaaggtcaggatggcgttt

SEQ ID NO: 203871 - DNA, 3133 bp, Homo sapiens
ggtctggagcgcggccgccgctgtcactgttggtgcgggcgcgtcggggccgggccggggcactgtaaatggcggcggagggaggcggagcggcggccacgctcagcccagatcccccgaaactttaggttcgaagccccacaactttccgggaagcgctgccgctccggaggcgtggacggaaggggaagccgaggcgggaagtctgggggaatcggcagggagccggggagactcgaacccgcggcgggggcggagtccgccagtgcctcgcgcctccgcggcccccgcctctttctctgcaccctccccgcggccggagccggagccggagccggagccgtagtcgcagccgcagccgcagccgcgcgccgggcctcgcaggcagcggcgcggcgagcgcagccgggccccctcctcgcgacctccgggccctgttgctcgggcgcacctggcgcgtgtgaggccggggccggcgttttcgggaagctagcaggaggccgggccacgcgcagcccctgccggcccaggttcctggggccgggccccgagtagtgcatgcggggcggggcggccgtgagccggaggcgaagatggaaggcttaacgctgagcgatgcggagcagaaatactattcagatctcttctcctactgcgacattgagagcaccaagaaggtggtggtcaacgggcgggtgctggagctgttccgggccgcgcagctgccgaacgacgtggtcctacagatcatggagctttgtggtgcaacaagacttggttattttggaagaagtcagttctacattgctttgaaacttgtagctgttgcccagtctggtttccctttaagagtggaaagtataaatacagtaaaggaccttcctctgccaagatttgttgcttcaaagaatgaacaggaatctcgccatgcagcctcatattcttcagattctgaaaatcaagggtcgtattctggtgtaattcccccaccacctggcagggggcaagtgaaaaagggatccgtaagccatgatacggttcagcctcgtacatctgcagatgcacaggaacctgcatccccagtagtttcaccacagcaatccccaccaacttctccacacacatggaggaagcacagccgtcatcccagcggtgggaatagtgagaggcctctcgcgggacctgggccattttggtctccctttggtgaagcacaatcaggttcttctgctggtgatgcagtgtggtcagggcattccccacctccacctcaagaaaactgggtcagttttgcagatactccaccaaccagtactcttttaaccatgcatcctgcttctgtccaggaccagacaacagtacgaactgtagcatcagctacaactgccattgaaattcgtaggcaatccagtagttatgatgatccctggaaaataacagatgaacaaagacagtattatgtaaatcagtttaaaaccattcagcctgatctaaacggatttattccaggatctgcagctaaagagttttttacaaaatcaaaacttcctattcttgaactttctcatatttgggaactctcagactttgataaagatggtgcattgacactggatgagttttgtgctgcttttcatctggtggttgctaggaagaatggctatgatttaccagaaaaacttcctgaaagcttaatgcccaaactgattgatttggaagattcagcagatgttggggatcagccaggtgaggtaggttattcaggctctcctgctgaagctcctccaagcaagtcaccatcgatgccatcactaaaccagacatggcctgagctgaatcagagcagtgagcagtgggagacatttagtgaacgctcttcaagctcacaaactctgacccaatttgattctaacattgcaccagctgatcctgatactgctattgttcatccagttcccattcgtatgactccaagcaaaatccacatgcaggaaatggaacttaaaagaactggcagcgatcatacaaatcccactagcccattacttgtgaaaccatctgaccttttagaagaaaataagataaattcatcggtgaaattcgcttctggtaatactgtagcagatggttacagtagttcagactcttttacttctgacccagaacagatcgggagcaatgtaactcgtcaaaggtctcattcaggaacgtcgcctgataacactgcaccaccacctccccctccaaggccacagccctctcattctagatcatcatctttagatatgaatcggacctttacagtcaccacaggacaacaacaggctggagttgttgcccatcctcctgcagtgcctccaagaccacagccctcacaggctcctggtcctgctgtgcatcgcccagtggatgccgatggcctcataactcacactagtacctcacctcagcagataccagagcaaccaaattttgcagatttcagtcagtttgaagtatttgctgcatcaaatgtaaacgacgaacaagatgatgaagccgagaaacatccagaagtcctgccggctgaaaaagcttctgatcctgcaagttctcttcgagttgccaaaacagatagtaaaactgaagaaaagacagctgctagtgctcctgccaatgtgagcaaaggcacaacaccacttgctccaccacctaaacctgttcgaagaagattaaaatcagaagatgaattaaggccagaagttgatgaacatacacaaaaatctgttgggaaagataagaaagctattcaggcatcaattagacgtaataaggaaaccaacaccgttttggccagattgaatagcgaattgcagcaacaattaaaggatgttcttgaggagagaatttccctggaagttcaactggaacaacttcgaccattctctcacctataagccaattgccgttaactgtgaacatacttgtttttaagtggttttgggttcaaagccaatttggagacctagacattcagctcactgcttaactcaacattaaattttatgattctgttttgccctatatgttcaccgttgtatttaagtatcttttattttttaatttcgacaataaaaaggtcaggatggcgttt

SEQ ID NO: 203872 - DNA, 2530 bp, Homo sapiens
ggtctggagcgcggccgccgctgtcactgttggtgcgggcgcgtcggggccgggccggggcactgtaaatggcggcggagggaggcggagcggcggccacgctcagcccagatcccccgaaactttaggttcgaagccccacaactttccgggaagcgctgccgctccggaggcgtggacggaaggggaagccgaggcgggaagtctgggggaatcggcagggagccggggagactcgaacccgcggcgggggcggagtccgccagtgcctcgcgcctccgcggcccccgcctctttctctgcaccctccccgcggccggagccggagccggagccggagccgtagtcgcagccgcagccgcagccgcgcgccgggcctcgcaggcagcggcgcggcgagcgcagccgggccccctcctcgcgacctccgggccctgttgctcgggcgcacctggcgcgtgtgaggccggggccggcgttttcgggaagctagcaggaggccgggccacgcgcagcccctgccggcccaggttcctggggccgggccccgagtagtgcatgcggggcggggcggccgtgagccggaggcgaagatggaaggcttaacgctgagcgatgcggagcagaaatactattcagatctcttctcctactgcgacattgagagcaccaagaaggtggtggtcaacgggcgggtgctggagctgttccgggccgcgcagctgccgaacgacgtggtcctacagatcatggagctttgtggtgcaacaagacttggttattttggaagaagtcagttctacattgctttgaaacttgtagctgttgcccagtctggtttccctttaagagtggaaagtataaatacagtaaaggaccttcctctgccaagatttgttgcttcaaagaatgaacaggaatctcgccatgcagcctcatattcttcagattctgaaaatcaagggtcgtattctggtgtaattcccccaccacctggcagggggcaagtgaaaaagggatccgtaagccatgatacggttcagcctcgtacatctgcagatgcacaggaacctgcatccccagtagtttcaccacagcaatccccaccaacttctccacacacatggaggaagcacagccgtcatcccagcggtgggaatagtgagaggcctctcgcgggacctgggccattttggtctccctttggtgaagcacaatcaggttcttctgctggtgatgcagtgtggtcagggcattccccacctccacctcaagaaaactgggtcagttttgcagatactccaccaaccagtactcttttaaccatgcatcctgcttctgtccaggaccagacaacagtacgaactgtagcatcagctacaactgccattgaaattcgtaggcaatccagtagttatgatgatccctggaaaataacagatgaacaaagacagtattatgtaaatcagtttaaaaccattcagcctgatctaaacggatttattccaggatctgcagctaaagagttttttacaaaatcaaaacttcctattcttgaactttctcatatttgggaactctcagactttgataaagatggtgcattgacactggatgagttttgtgctgcttttcatctggtggttgctaggaagaatggctatgatttaccagaaaaacttcctgaaagcttaatgcccaaactgattgatttggaagattcagcagatgttggggatcagccaggtgaggtaggttattcaggctctcctgctgaagctcctccaagcaagtcaccatcgatgccatcactaaaccagacatggcctgagctgaatcagagcagtgagcagtgggagacatttagtgaacgctcttcaagctcacaaactctgacccaatttgattctaacattgcaccagctgatcctgatactgctattgttcatccagttcccattcgtatgactccaagcaaaatccacatgcaggaaatggaacttaaaagaactggcagcgatcatacaaatcccactagcccattacttgtgaaaccatctgaccttttagaagatgaattaaggccagaagttgatgaacatacacaaaagacgggtgtcttagctgctgttcttgcatcacaaccttctattcccagatctgttgggaaagataagaaagctattcaggcatcaattagacgtaataaggaaaccaacaccgttttggccagattgaatagcgaattgcagcaacaattaaaggatgttcttgaggagagaatttccctggaagttcaactggaacaacttcgaccattctctcacctataagccaattgccgttaactgtgaacatacttgtttttaagtggttttgggttcaaagccaatttggagacctagacattcagctcactgcttaactcaacattaaattttatgattctgttttgccctatatgttcaccgttgtatttaagtatcttttattttttaatttcgacaataaaaaggtcaggatggcgttt

SEQ ID NO: 203873 - DNA, 3001 bp, Homo sapiens
  misc_feature (2627)..(2627): n is a, c, g, or t
ggtctggagcgcggccgccgctgtcactgttggtgcgggcgcgtcggggccgggccggggcactgtaaatggcggcggagggaggcggagcggcggccacgctcagcccagatcccccgaaactttaggttcgaagccccacaactttccgggaagcgctgccgctccggaggcgtggacggaaggggaagccgaggcgggaagtctgggggaatcggcagggagccggggagactcgaacccgcggcgggggcggagtccgccagtgcctcgcgcctccgcggcccccgcctctttctctgcaccctccccgcggccggagccggagccggagccggagccgtagtcgcagccgcagccgcagccgcgcgccgggcctcgcaggcagcggcgcggcgagcgcagccgggccccctcctcgcgacctccgggccctgttgctcgggcgcacctggcgcgtgtgaggccggggccggcgttttcgggaagctagcaggaggccgggccacgcgcagcccctgccggcccaggttcctggggccgggccccgagtagtgcatgcggggcggggcggccgtgagccggaggcgaagatggaaggcttaacgctgagcgatgcggagcagaaatactattcagatctcttctcctactgcgacattgagagcaccaagaaggtggtggtcaacgggcgggtgctggagctgttccgggccgcgcagctgccgaacgacgtggtcctacagatcatggagctttgtggtgcaacaagacttggttattttggaagaagtcagttctacattgctttgaaacttgtagctgttgcccagtctggtttccctttaagagtggaaagtataaatacagtaaaggaccttcctctgccaagatttgttgcttcaaagaatgaacaggaatctcgccatgcagcctcatattcttcagattctgaaaatcaagggtcgtattctggtgtaattcccccaccacctggcagggggcaagtgaaaaagggatccgtaagccatgatacggttcagcctcgtacatctgcagatgcacaggaacctgcatccccagtagtttcaccacagcaatccccaccaacttctccacacacatggaggaagcacagccgtcatcccagcggtgggaatagtgagaggcctctcgcgggacctgggccattttggtctccctttggtgaagcacaatcaggttcttctgctggtgatgcagtgtggtcagggcattccccacctccacctcaagaaaactgggtcagttttgcagatactccaccaaccagtactcttttaaccatgcatcctgcttctgtccaggaccagacaacagtacgaactgtagcatcagctacaactgccattgaaattcgtaggcaatccagtagttatgatgatccctggaaaataacagatgaacaaagacagtattatgtaaatcagtttaaaaccattcagcctgatctaaacggatttattccaggatctgcagctaaagagttttttacaaaatcaaaacttcctattcttgaactttctcatatttgggaactctcagactttgataaagatggtgcattgacactggatgagttttgtgctgcttttcatctggtggttgctaggaagaatggctatgatttaccagaaaaacttcctgaaagcttaatgcccaaactgattgatttggaagattcagcagatgttggggatcagccaggtgaggtaggttattcaggctctcctgctgaagctcctccaagcaagtcaccatcgatgccatcactaaaccagacatggcctgagctgaatcagagcagtgagcagtgggagacatttagtgaacgctcttcaagctcacaaactctgacccaatttgattctaacattgcaccagctgatcctgtaagtcaatcacttagcttgcttgtttgagattaattttattaacccaaatttccattcattatcgtttttagctgatatgcatgattcagtggagtgcttagagggaagtggcggcaggctttttggtttttgtgtgcttaatggtgggaaagacattttttgccattccttttttctagttattttgttgagagaaaactacgtttttaaaatctggtacatgtgtctagagaagcattttttgtgacaatctattttgttaaccttatcatttgctaattaagtgtatattttatatacatactgtttatttcagtgtagtgactctttatgtattatctgtatgcttacacatcatgtaatatgtcctacatatgtaactatttatgcaatgtcatcttttattttgacatgccaaatgacatggcttttatttaattagtatgttgagtcctgttagagagaatcaagttcagcaatacaagatgttggtcaaatattccgcttatgcaaaggagcctctgtcttgtcttcttgtggcttactgtgttgctttgaaaatgctacaaagttcatatcctgatttaaaaaataaattctgtccccatagagttaatttaatatatgctacacctgtcccttgggttttttgaaaaccttagctgttaatcgttcttctccctgttcacttcnctgctttttctttttctttctctctctgtcttttttttttttttaagacaaggatgtgctaataagcactttccaaaaagaaaagagggagtaagcagaaagtgaagaaatgtgtaaaggcagaatttttaaaatgagctgagtagaaagatatggagaaaatgacataagtcgttctttctagatgatctgatcaaagacagccagcatttattaattaaatgtaaaaatggtcttgtcatctaaagagattttgaagaagtggcatttaaagataaagtataccattagcagttaatgggcctttgatgtggtttgttttttgtttttgttttttgagttggagcctgggcaacagagcgagactccatctc

SEQ ID NO: 203874 - DNA, 406 bp, Homo sapiens
  misc_feature (49)..(50): n is a, c, g, or t
  misc_feature (69)..(69): n is a, c, g, or t
agtgccgtacgaggtgacggggataataatctcctctagaaagaaatanncataagctaaaacaacagntgtgaaacatatatgtagcaaaggcacaacaccacttgctccaccacctaaacctgttcgaagaagattaaaatcagaagatgaattaaggccagaagttgatgaacatacacaaaagacgggtgtcttagctgctgttcttgcatcacaaccttctattcccaggtaatcaaagctattcctagacacatttaattactaggaagaaaaagcacgacaattaaaaataatcaaactggcccaaagtgctgggattacaggcatgaaccactgctcctggcccacaaaaatatttttaataaaattaccttcaggttatgtgtatcagttgtatatg

SEQ ID NO: 203875 - DNA, 3283 bp, Homo sapiens
ggtctggagcgcggccgccgctgtcactgttggtgcgggcgcgtcggggccgggccggggcactgtaaatggcggcggagggaggcggagcggcggccacgctcagcccagatcccccgaaactttaggttcgaagccccacaactttccgggaagcgctgccgctccggaggcgtggacggaaggggaagccgaggcgggaagtctgggggaatcggcagggagccggggagactcgaacccgcggcgggggcggagtccgccagtgcctcgcgcctccgcggcccccgcctctttctctgcaccctccccgcggccggagccggagccggagccggagccgtagtcgcagccgcagccgcagccgcgcgccgggcctcgcaggcagcggcgcggcgagcgcagccgggccccctcctcgcgacctccgggccctgttgctcgggcgcacctggcgcgtgtgaggccggggccggcgttttcgggaagctagcaggaggccgggccacgcgcagcccctgccggcccaggttcctggggccgggccccgagtagtgcatgcggggcggggcggccgtgagccggaggcgaagatggaaggcttaacgctgagcgatgcggagcagaaatactattcagatctcttctcctactgcgacattgagagcaccaagaaggtggtggtcaacgggcgggtgctggagctgttccgggccgcgcagctgccgaacgacgtggtcctacagatcatggagctttgtggtgcaacaagacttggttattttggaagaagtcagttctacattgctttgaaacttgtagctgttgcccagtctggtttccctttaagagtggaaagtataaatacagtaaaggaccttcctctgccaagatttgttgcttcaaagaatgaacaggaatctcgccatgcagcctcatattcttcagattctgaaaatcaagggtcgtattctggtgtaattcccccaccacctggcagggggcaagtgaaaaagggatccgtaagccatgatacggttcagcctcgtacatctgcagatgcacaggaacctgcatccccagtagtttcaccacagcaatccccaccaacttctccacacacatggaggaagcacagccgtcatcccagcggtgggaatagtgagaggcctctcgcgggacctgggccattttggtctccctttggtgaagcacaatcaggttcttctgctggtgatgcagtgtggtcagggcattccccacctccacctcaagaaaactgggtcagttttgcagatactccaccaaccagtactcttttaaccatgcatcctgcttctgtccaggaccagacaacagtacgaactgtagcatcagctacaactgccattgaaattcgtaggcaatccagtagttatgatgatccctggaaaataacagatgaacaaagacagtattatgtaaatcagtttaaaaccattcagcctgatctaaacggatttattccaggatctgcagctaaagagttttttacaaaatcaaaacttcctattcttgaactttctcatatttgggaactctcagactttgataaagatggtgcattgacactggatgagttttgtgctgcttttcatctggtggttgctaggaagaatggctatgatttaccagaaaaacttcctgaaagcttaatgcccaaactgattgatttggaagattcagcagccctgatgctctgatgatgtcaggggcagagcagaacccacaggagggaggcagggttgacacagtgttccagcaggaggctaggttggaacactgcatcagatgttggggatcagccaggtgaggtaggttattcaggctctcctgctgaagctcctccaagcaagtcaccatcgatgccatcactaaaccagacatggcctgagctgaatcagagcagtgagcagtgggagacatttagtgaacgctcttcaagctcacaaactctgacccaatttgattctaacattgcaccagctgatcctgatactgctattgttcatccagttcccattcgtatgactccaagcaaaatccacatgcaggaaatggaacttaaaagaactggcagcgatcatacaaatcccactagcccattacttgtgaaaccatctgaccttttagaagaaaataagataaattcatcggtgaaattcgcttctggtaatactgtagcagatggttacagtagttcagactcttttacttctgacccagaacagatcgggagcaatgtaactcgtcaaaggtctcattcaggaacgtcgcctgataacactgcaccaccacctccccctccaaggccacagccctctcattctagatcatcatctttagatatgaatcggacctttacagtcaccacaggacaacaacaggctggagttgttgcccatcctcctgcagtgcctccaagaccacagccctcacaggctcctggtcctgctgtgcatcgcccagtggatgccgatggcctcataactcacactagtacctcacctcagcagataccagagcaaccaaattttgcagatttcagtcagtttgaagtatttgctgcatcaaatgtaaacgacgaacaagatgatgaagccgagaaacatccagaagtcctgccggctgaaaaagcttctgatcctgcaagttctcttcgagttgccaaaacagatagtaaaactgaagaaaagacagctgctagtgctcctgccaatgtgagcaaaggcacaacaccacttgctccaccacctaaacctgttcgaagaagattaaaatcagaagatgaattaaggccagaagttgatgaacatacacaaaagacgggtgtcttagctgctgttcttgcatcacaaccttctattcccagatctgttgggaaagataagaaagctattcaggcatcaattagacgtaataaggaaaccaacaccgttttggccagattgaatagcgaattgcagcaacaattaaaggatgttcttgaggagagaatttccctggaagttcaactggaacaacttcgaccattctctcacctataagccaattgccgttaactgtgaacatacttgtttttaagtggttttgggttcaaagccaatttggagacctagacattcagctcactgcttaactcaacattaaattttatgattctgttttgccctatatgttcaccgttgtatttaagtatcttttattttttaatttcgacaataaaaaggtcaggatggcgttt

SEQ ID NO: 203876 - DNA, 4552 bp, Homo sapiens
ggtctggagcgcggccgccgctgtcactgttggtgcgggcgcgtcggggccgggccggggcactgtaaatggcggcggagggaggcggagcggcggccacgctcagcccagatcccccgaaactttaggttcgaagccccacaactttccgggaagcgctgccgctccggaggcgtggacggaaggggaagccgaggcgggaagtctgggggaatcggcagggagccggggagactcgaacccgcggcgggggcggagtccgccagtgcctcgcgcctccgcggcccccgcctctttctctgcaccctccccgcggccggagccggagccggagccggagccgtagtcgcagccgcagccgcagccgcgcgccgggcctcgcaggcagcggcgcggcgagcgcagccgggccccctcctcgcgacctccgggccctgttgctcgggcgcacctggcgcgtgtgaggccggggccggcgttttcgggaagctagcaggaggccgggccacgcgcagcccctgccggcccaggttcctggggccgggccccgagtagtgcatgcggggcggggcggccgtgagccggaggcgaagatggaaggcttaacgctgagcgatgcggagcagaaatactattcagatctcttctcctactgcgacattgagagcaccaagaaggtggtggtcaacgggcgggtgctggagctgttccgggccgcgcagctgccgaacgacgtggtcctacagatcatggagctttgtggtgcaacaagacttggttattttggaagaagtcagttctacattgctttgaaacttgtagctgttgcccagtctggtttccctttaagagtggaaagtataaatacagtaaaggaccttcctctgccaagatttgttgcttcaaagaatgaacaggaatctcgccatgcagcctcatattcttcagattctgaaaatcaagggtcgtattctggtgtaattcccccaccacctggcagggggcaagtgaaaaagggatccgtaagccatgatacggttcagcctcgtacatctgcagatgcacaggaacctgcatccccagtagtttcaccacagcaatccccaccaacttctccacacacatggaggaagcacagccgtcatcccagcggtgggaatagtgagaggcctctcgcgggacctgggccattttggtctccctttggtgaagcacaatcaggttcttctgctggtgatgcagtgtggtcagggcattccccacctccacctcaagaaaactgggtcagttttgcagatactccaccaaccagtactcttttaaccatgcatcctgcttctgtccaggaccagacaacagtacgaactgtagcatcagctacaactgccattgaaattcgtaggcaatccagtagttatgatgatccctggaaaataacagatgaacaaagacagtattatgtaaatcagtttaaaaccattcagcctgatctaaacggatttattccaggatctgcagctaaagagttttttacaaaatcaaaacttcctattcttgaactttctcatatttgggaactctcagactttgataaagatggtgcattgacactggatgagttttgtgctgcttttcatctggtggttgctaggaagaatggctatgatttaccagaaaaacttcctgaaagcttaatgcccaaactgattgatttggaagattcagcagatgttggggatcagccaggtgaggtaggttattcaggctctcctgctgaagctcctccaagcaagtcaccatcgatgccatcactaaaccagacatggcctgagctgaatcagagcagtgagcagtgggagacatttagtgaacgctcttcaagctcacaaactctgacccaatttgattctaacattgcaccagctgatcctgatactgctattgttcatccagttcccattcgtatgactccaagcaaaatccacatgcaggaaatggaacttaaaagaactggcagcgatcatacaaatcccactagcccattacttgtgaaaccatctgaccttttagaagaaaataagataaattcatcggtgaaattcgcttctggtaatactgtagcagatggttacagtagttcagactcttttacttctgacccagaacagatcgggagcaatgtaactcgtcaaaggtctcattcaggaacgtcgcctgataacactgcaccaccacctccccctccaaggccacagccctctcattctagatcatcatctttagatatgaatcggacctttacagtcaccacaggacaacaacaggctggagttgttgcccatcctcctgcagtgcctccaagaccacagccctcacaggctcctggtcctgctgtgcatcgcccagtggatgccgatggcctcataactcacactagtacctcacctcagcagataccagagcaaccaaattttgcagatttcagtcagtttgaagtatttgctgcatcaaatgtaaacgacgaacaagatgatgaagccgagaaacatccagaagtcctgccggctgaaaaagcttctgatcctgcaagttctcttcgagttgccaaaacagatagtaaaactgaagaaaagacagctgctagtgctcctgccaatgtgagcaaaggcacaacaccacttgctccaccacctaaacctgttcgaagaagattaaaatcagaagatgaattaaggccagaagttgatgaacatacacaaaagacgggtgtcttagctgctgttcttgcatcacaaccttctattcccagatctgttgggaaagataagaaagctattcaggcatcaattagacgtaataaggaaaccaacaccgttttggccagattgaatagcgaattgcagcaacaattaaaggatgttcttgaggagagaatttccctggaagttcaactggaacaacttcgaccattctctcacctataagccaattgccgttaactgtgaacatacttgtttttaagtggttttgggttcaaagccaatttggagacctagacattcagctcactgcttaactcaacattaaattttatgattctgttttgccctatatgttcaccgttgtatttaagtatcttttattttttaatttcgacaataaaaaggtcaggatggcgttttctggagggtagattgtgtttgttggcacacccaccttttctgttccctagcatctgggatatgcaatgcttctatggctaataccacacaccaatttaatttatagaatgggctcctcatttacatctcagtcacagactcagaaataaattgtcagtttgtccttttatgtttaatattttacataaagcatctattctataaaaatctttagaaagagtttcccatttaattttgattttaaagaattatattggataaggtggttttcaccataagctaatttactctctgcagccgtctacattcttcacaaatcatgtggtacattgaagcctcttttacatgtcaacttgtgacaaatacaaacatgtgagattttatattttccttgtggaaatgtgatcaacttcatcagcgacttcgaactattttatgagattcaataattcagcagtcatgtaaacttatgaaataggtatgagtaatggcctttcttaatttttttaagtattgttttaaaacttctgaggatatcagttattcccagaataaagggaaattccttaggatttctagtttacctttagccatcttgtcactcattcttttgctatacagacaagtttttcctattaatgagtttctggagtatgccttattcaggacaatatgctgttttagattttgtttaatattaaatgatatatacatttcgatccattgctaacagcagatattccctttaagatttattctgtctataggatcatagattttaaactgcatggatatatcttggcagaatcagaagtgtggttttacaccaataaaacagcataatattttaacttttgttcatctttttaacaagatttaaagttttaagaaatagaagattttgtattttcatttctgaaagaaaaaatgtttaaatactatagattcacagtcctaaactgcaccgatagactttgttactgtaaacaagaatttgaagaacaagggaaactgacaacctcaagcttccaagattaatacaatttttacctgacaatatctaggtaaaaatatacatcagctgaagtttccaagtggctttcagtatggctttagttgttaaataataaatttaaagcattaaaggcccaggaaactactcaacacctgtttttctgagtgtctttgttttcaaagaaacatttttactcagctgtatttcattacaagcaagttttgctgtttccatttagttttgttttttaaaatatgctttttaaaaatagccttctaatttaacaatgtcaaaaatatttgttaaagcttcttagaatttagccttccaataaataacacttaaaaattataga

SEQ ID NO: 203877 - DNA, 1226 bp, Homo sapiens
aaaaagaaattttgcttaataactttattaaaaaaattgttagccacataaaataatcagttgtttagggtacatcataaacagtgctatcttaatttattgtaacacttacatacttgagtgttgagaaaatgtcatgctaataagatcctttgctgcttagccaagtgtaaatgtttaaaaagaaaaaagctctgatatcagtagtatgaccaattatcatggggtgaattttgcaggtctcattcaggaacgtcgcctgataacactgcaccaccacctccccctccaaggccacagccctctcattctagatcatcatctttagatatgaatcggacctttacagtcaccacaggacaacaacaggctggagttgttgcccatcctcctgcagtgcctccaagaccacagccctcacaggctcctggtcctgctgtgcatcgcccagtggatgccgatggcctcataactcacactagtacctcacctcagcagataccagagcaaccaaattttgcagatttcagtcagtttgaagtatttgctgcatcaaatgtaaacgacgaacaagatgatgaagccgagaaacatccagaagtcctgccggctgaaaaagcttctgatcctgcaagttctcttcgagttgccaaaacagatagtaaaactgaagaaaagacagctgctagtgctcctgccaatgtgagcaaaggcacaacaccacttgctccaccacctaaacctgttcgaagaagattaaaatcagaagatgaattaaggccagaagttgatgaacatacacaaaagacgggtgtcttagctgctgttcttgcatcacaaccttctattcccagatctgttgggaaagataagaaagctattcaggcatcaattagacgtaataaggaaaccaacaccgttttggccagattgaatagcgaattgcagcaacaattaaaggatgttcttgaggagagaatttccctggaagttcaactggaacaacttcgaccattctctcacctataagccaattgccgttaactgtgaacatacttgtttttaagtggttttgggttcaaagccaatttggagacctagacattcagctcactgcttaactcaacattaaattttatgattctgttttgccctatatgttcaccgttgtatttaagtatcttttattttttaatttcgacaataaaaaggtcaggatggcgttt

SEQ ID NO: 203878 - DNA, 3520 bp, Homo sapiens
ggtctggagcgcggccgccgctgtcactgttggtgcgggcgcgtcggggccgggccggggcactgtaaatggcggcggagggaggcggagcggcggccacgctcagcccagatcccccgaaactttaggttcgaagccccacaactttccgggaagcgctgccgctccggaggcgtggacggaaggggaagccgaggcgggaagtctgggggaatcggcagggagccggggagactcgaacccgcggcgggggcggagtccgccagtgcctcgcgcctccgcggcccccgcctctttctctgcaccctccccgcggccggagccggagccggagccggagccgtagtcgcagccgcagccgcagccgcgcgccgggcctcgcaggcagcggcgcggcgagcgcagccgggccccctcctcgcgacctccgggccctgttgctcgggcgcacctggcgcgtgtgaggccggggccggcgttttcgggaagctagcaggaggccgggccacgcgcagcccctgccggcccaggttcctggggccgggccccgagtagtgcatgcggggcggggcggccgtgagccggaggcgaagatggaaggcttaacgctgagcgatgcggagcagaaatactattcagatctcttctcctactgcgacattgagagcaccaagaaggtggtggtcaacgggcgggtgctggagctgttccgggccgcgcagctgccgaacgacgtggtcctacagatcatggagctttgtggtgcaacaagacttggttattttggaagaagtcagttctacattgctttgaaacttgtagctgttgcccagtctggtttccctttaagagtggaaagtataaatacagtaaaggaccttcctctgccaagatttgttgcttcaaagaatgaacaggaatctcgccatgcagcctcatattcttcagattctgaaaatcaagggtcgtattctggtgtaattcccccaccacctggcagggggcaagtgaaaaagggatccgtaagccatgatacggttcagcctcgtacatctgcagatgcacaggaacctgcatccccagtagtttcaccacagcaatccccaccaacttctccacacacatggaggaagcacagccgtcatcccagcggtgggaatagtgagaggcctctcgcgggacctgggccattttggtctccctttggtgaagcacaatcaggttcttctgctggtgatgcagtgtggtcagggcattccccacctccacctcaagaaaactgggtcagttttgcagatactccaccaaccagtactcttttaaccatgcatcctgcttctgtccaggaccagacaacagtacgaactgtagcatcagctacaactgccattgaaattcgtaggcaatccagtagttatgatgatccctggaaaataacagatgaacaaagacagtattatgtaaatcagtttaaaaccattcagcctgatctaaacggatttattccaggatctgcagctaaagagttttttacaaaatcaaaacttcctattcttgaactttctcatatttgggaactctcagactttgataaagatggtgcattgacactggatgagttttgtgctgcttttcatctggtggttgctaggaagaatggctatgatttaccagaaaaacttcctgaaagcttaatgcccaaactgattgatttggaagattcagcagatgttggggatcagccaggtgaggtaggttattcaggctctcctgctgaagctcctccaagcaagtcaccatcgatgccatcactaaaccagacatggcctgagctgaatcagagcagtgagcagtgggagacatttagtgaacgctcttcaagctcacaaactctgacccaatttgattctaacattgcaccagctgatcctgatactgctattgttcatccagttcccattcgtatgactccaagcaaaatccacatgcaggaaatggaacttaaaagaactggcagcgatcatacaaatcccactagcccattacttgtgaaaccatctgaccttttagaagaaaataagataaattcatcggtgaaattcgcttctggtaatactgtagcagatggttacagtagttcagactcttttacttctgacccagaacagatcgggagcaatgtaactcgtcaaaggtcagtatttctgtcaatgaaaagcatgttaaactatcttgctgcgttttaatgtttaaaactatttagaaccaagcacaaatgattttgttctctgaaagctgttaggttactttttgatttatgtaaaagacaagtaattttgatcctttccaacttgaatagaaaaacaaaaagaaccctgactttctaaatggtatgttgtggaagctctaaaaagaggtgataacttcttgacgatagaagttttataagtcctttttgtacctaaacaacgagaatctgtcaagtaatacatgtatagccttatggtaagtaccaaaagaattctgtgttttaaaacaccatccaaaagcacagcccagtggtgggccacctccccaccctgaagttctgcgttacatataacctttcaggcacaaacaagaagggtgtgggatagggtggaggaggctagagatttgtctgcaagggctttaccatccactaaaagctgtgtgcaggacagaagcatctttctctcctcactttttgcacgtgttgagtatcattttgctgtgtgcccagtggatgtagcgaggatgcagaatctccaagcagcttagagtcagaaggctgcttgtcttcctttctgattcttcatgtagttcttcctgtgtttcttagcattctcagtcatcttggattttactctgctgtttattcccatatatgcagatcagattaccagaggccttggagactcttttcagaatatgaaagactttggtagcaaagaagtgaatctctagggcgagttgagtttgagcatagtcacctctaaaatgagatggcctctgcggacacatgaaagggtacttcagcttaccaaaatccagaacttaataggttgaaagctaaccatatctgaaagtagactttcctttatacaattattttttttcagactattattacttttaattgaatgggaaagcgtaacactaagtatgcagtctattatgaaatcatgttgacaactaagtttcttttcaaaatttttgaggccgagcacttctgtaatcctagcactttgggaggctaaggtgggcggatcacctgaagtcaggagttcgagaccagcctggccaacatggtgaaactccgtctctactaaaaatacaaaaattagccgggcatggtagcatgcgcctgtaatcccagttacttgggaggctgaagcaggagaatcgcttgaacccaggaggcggaggttgcagtgagccaaaatggtgtcactgcactccagcctgggcaacagagtgagactgtctcaaaaaaaaaaaa

SEQ ID NO: 203879 - DNA, 2831 bp, Homo sapiens
ggtctggagcgcggccgccgctgtcactgttggtgcgggcgcgtcggggccgggccggggcactgtaaatggcggcggagggaggcggagcggcggccacgctcagcccagatcccccgaaactttaggttcgaagccccacaactttccgggaagcgctgccgctccggaggcgtggacggaaggggaagccgaggcgggaagtctgggggaatcggcagggagccggggagactcgaacccgcggcgggggcggagtccgccagtgcctcgcgcctccgcggcccccgcctctttctctgcaccctccccgcggccggagccggagccggagccggagccgtagtcgcagccgcagccgcagccgcgcgccgggcctcgcaggcagcggcgcggcgagcgcagccgggccccctcctcgcgacctccgggccctgttgctcgggcgcacctggcgcgtgtgaggccggggccggcgttttcgggaagctagcaggaggccgggccacgcgcagcccctgccggcccaggttcctggggccgggccccgagtagtgcatgcggggcggggcggccgtgagccggaggcgaagatggaaggcttaacgctgagcgatgcggagcagaaatactattcagatctcttctcctactgcgacattgagagcaccaagaaggtggtggtcaacgggcgggtgctggagctgttccgggccgcgcagctgccgaacgacgtggtcctacagatcatggagctttgtggtgcaacaagacttggttattttggaagaagtcagttctacattgctttgaaacttgtagctgttgcccagtctggtttccctttaagagtggaaagtataaatacagtaaaggaccttcctctgccaagatttgttgcttcaaagaatgaacaggaatctcgccatgcagcctcatattcttcagattctgaaaatcaagggtcgtattctggtgtaattcccccaccacctggcagggggcaagtgaaaaagggatccgtaagccatgatacggttcagcctcgtacatctgcagatgcacaggaacctgcatccccagtagtttcaccacagcaatccccaccaacttctccacacacatggaggaagcacagccgtcatcccagcggtgggaatagtgagaggcctctcgcgggacctgggccattttggtctccctttggtgaagcacaatcaggttcttctgctggtgatgcagtgtggtcagggcattccccacctccacctcaagaaaactgggtcagttttgcagatactccaccaaccagtactcttttaaccatgcatcctgcttctgtccaggaccagacaacagtacgaactgtagcatcagctacaactgccattgaaattcgtaggcaatccagtagttatgatgatccctggaaaataacagatgaacaaagacagtattatgtaaatcagtttaaaaccattcagcctgatctaaacggatttattccaggatctgcagctaaagagttttttacaaaatcaaaacttcctattcttgaactttctcatatttgggaactctcagactttgataaagatggtgcattgacactggatgagttttgtgctgcttttcatctggtggttgctaggaagaatggctatgatttaccagaaaaacttcctgaaagcttaatgcccaaactgattgatttggaagattcagcagatgttggggatcagccaggtgaggtaggttattcaggctctcctgctgaagctcctccaagcaagtcaccatcgatgccatcactaaaccagacatggcctgagctgaatcagagcagtgagcagtgggagacatttagtgaacgctcttcaagctcacaaactctgacccaatttgattctaacattgcaccagctgatcctgatactgctattgttcatccagttcccattcgtatgactccaagcaaaatccacatgcaggaaatggaacttaaaagaactggcagcgatcatacaaatcccactagcccattacttgtgaaaccatctgaccttttagaagaaaataagataaattcatcggtgaaattcgcttctggtaatactgtagcagatggttacagtagttcagactcttttacttctgacccagaacagatcgggagcaatgtaactcgtcaaaggtctcattcaggaacgtcgcctgataacactgcaccaccacctccccctccaaggccacagccctctcattctagatcatcatctttagatatgaatcggacctttacagtcaccacaggtaggggctagagaaccataatatacattatcatttaattttaaagttaatccaacacacatacacattttatttttgtttctattacatgtcttttaaaaatatttatctggtcgagtgtggttgctcatgcctgtaatcccagcactttgaggggcaggcagatcacttgaggttatgagttcgagaccagcctggccaacatggtgaaaccccatctctactaaaaatacaaaaattagccggatgtagtgatgcatgtctgtggtcccagctactcgggaggctgaggtgggagagtcccttgaacctgggaagcagaggttgcagtgagccaagattgcatcactgcactccagcctgggtgacagagtgagaccctgtctccaaaaaaaaaaaaaaaaattatctgaaggaaaattttggattaaaagacagcagatgagaggcaatttcttttcttaatgactacttaaagtgtgtttgagtgcaaataatgaagatgggaacctgagaga

SEQ ID NO: 203880 - DNA, 758 bp, Homo sapiens
ggatggtggggctgttctagaggatcccagcaacattggactcgacctagccaccccatcagtcttagctctttcagaatgtccctcagacttccatctgatgaccctttttacaatgtcagtcttctgttgatattcaatataatctgaatttccttggatatcagtattggctgcaaatcttgtttggattggaaacctctaaggtacccctcttcctgttggaactgagagaaggaagtgtcaacaaaagttaagtcagaggtgagcagaaggggtgagggtcagacatctgaacgtgccaaccagcgtggagtagacatgaatggatcaaggtttgatgtactgggaggaagtccatgtagtcagacaattgctctacccagtggctctggggatagttaggagacctagacactgggaggacagtagcaatccataaaatgagctgtcccttacttaggaagcagttttttcataaataaggagtttggggcaaaggatatgcagtgaacctggtaaaaaaaatagcaccaacagctgagttcaggggccactcataggaccaagaatgagatgtgtttcagaatcattaaaactgaccaaagcaagtctccacgtcgtgagtttgagggatccaagttactgttcaggtaaaaaaggcaaaagtagatgccaagggatatggtttggctctgtgtccccacccaaatcccatcttgaattgtaatccccatgtgtcgaggccaatgacctgt

SEQ ID NO: 203881 - DNA, 495 bp, Homo sapiens
tgtgcgttgattgtttactaaggattattataagggcctgaaggtgtgggagtagagacagtttcaccatgttggctaggctgaactcgaattcctggcctccagtgatcatcccaccttggccttgcaaagtgctgggattacaggtgtgagccactgcctagcccagtgatccttgttctgaattactactgttatattcagaaaaaattaagttttagtgtcattttgttgaaaatgctgcagttatgtcaggctgttgtgtgttagagtacacgattgggaagtttaaatttttattctaggagatggcaaagaaagcgcaagcgccactttaaaatgacgatgaaagctttttaatttgatagaggtctttttattggcatggtacacatgcacttccactcatttgtattgatgggagtgatccctttaaccctaggttagctagagaagagaagtgtgtattaaaagaagtggttttttttttgtgat

SEQ ID NO: 203882 - DNA, 537 bp, Homo sapiens
ggaaaaggaatatttggtttgctgatcatctcattacagttgttccgttgtgtgtgctttgctggtttccgtgtgaaaatagtctagaatttgtgcatgactgaagacttttcagcagcagaaatttcatgccatagatattttttatcaaaactgttttacacttcttgttcatattacaaatagatgacaagcagctgagaccgtatctacccactccaatgagcaataatttgcaatcaagctgtctctaaacttgctctttcttaggtttataaatagtatgttctgtgaaagtattagaagtaaataataaagaaacaaatttaattcattgtgatggcatcttctaaaacataagtaatattgatttgggatttgtgaagatattaagcagtaatgaaacttgaattctccatactgggcagtcttttgattagcagaaaaatatggtcatgactttagagtttctccccaaagctcttaatcgtatcatttccacccttcattgtctcttattctttaacacttacactt

SEQ ID NO: 203883 - DNA, 212 bp, Homo sapiens
gcatcttcatcacaaaccaattccagatatgcagaggcttcttccctccctcatttacctgttttgtagccaaactgggtctcttgtgctctccttacctacctacccaatgtaactcctgagagaaactagcatagccacaaaagcaagggtgttcatccaggagattggaatctggaaagacaatttcttattttctgtgtaaaacttaa

SEQ ID NO: 203884 - DNA, 391 bp, Homo sapiens
aaatagagttacatagaggataagcaacatcgtttcttagcagtaaaggtgtccttctggagagatagagcgtgccattattctggcttgatattaacaggtcaggccaggtgcggtggctcacgcctgtaatcccagcactttgagaggctgaggcaggtggattacctgagttcaggagttcgagacctgcctggccaacatggagaaacgccatctctactaaaaatacaaaattagccgggtgtggtggcgcatgcctgtaatcccagctactcgggaggctgagacaagataatcgcttgaacccaggaggtggaggttgcagtgagctgagatcctgcgctgcactccagcctgggcaacaagagtgaaactccatctcaaaaaa

SEQ ID NO: 203885 - DNA, 590 bp, Homo sapiens
ttacaggtgaggaaactaaggcacagttagggtcttttttgtgtgttttttctcttatttatttctttaactgcccaagaccaccctgctttataaacactaatcaaatgagtatgaggctctatcactcttttttttttttttaaacttgaatacatggcttttaggccgttcagtttctgacaaattaaaaaatgttttaaccccttttcttcttatagtaaaatagttcatagtgtaacagcttttcttagcaacacctttattctgtacccaggtatagtgtttcagtgtgcacccttgcttgtaaacagcttcttaatcttttctaagcccacaggtatagaaaacaccaaattagaaatgtcaaaacatatttatattgggcagtggtacaatttgacttatttgtgttttggaagcttaaaatgggggaaacaagaatatgtgtctatttattttggcttaatgaattatgtgtttctccagaattagctgtagcatcagagtagctgtaatatttgaaacagctcttcagaacttcagtcagtgtaaggaaggtttggttactgttaatgaatcaagttgga

SEQ ID NO: 203886 - DNA, 113 bp, Homo sapiens
atatggacgacaggctcctggagggaagcagctccctggtgtcagccagctagctacaaagcagcaaagccaagactcaggcccaggagcaaacacaagaccaggaccttact

SEQ ID NO: 203887 - DNA, 301 bp, Homo sapiens
aaagcaagcagaagaaataagagcagaaatcaataaaattaaaaaaaaaaataccgaattcaaagcgtggcacagtttgaaaaagaggcaataaaactgatacatttctctttgaccagaacgaaaagacacaaattataaatatcaacaatgaagggacagccaaaaagacagtaaaaggaaaggaaatttttttttttttcagactggagtgcagtggtgcaatctggacttactgcaagctccgcctcccaggttcacgccattctcctgcctcggcctcctgagtagctaggactac

SEQ ID NO: 203888 - DNA, 962 bp, Homo sapiens
ccttccccttcccatcttctcttgaagttacctagattgcgtctattatttgaatgactcgtacaaaagagatgctatttatcgggcaaaagccgggagttcgtgccctctacgcccgcaaggaaaactacaactcccatgaggacacgggtgagattgaggccgggctccgcctccttctccctggagcttggtggacgccttcccagtgccacgtggcggggagctgatctgatcgcgggcgtgacgacggcccgcacggctagctgcttggcccgcgggcctgggcagccctggagcgggaaacgcctccgtgagaacgcatggcttcaagcttctcccttgcgctcctgatcttaggctgatcgcttttacctttaggttgaagttgaacacagttcacactgtgctcttcctccccctctttctggaattccaggcaacagatttaacactttatgaatcttgaagagctgcactcctcctaaatattgcagttaatgctgatcctttggaagcctccgaaggccacaaggctgtgatgggagcctctggcttcagttgcctttctcacaccttattttaatactcaaggtaaacccttctgtacaactttagaaataactgtcaacctaaaggaaaaacggaggcaaagttaatataaatagagaatttatttgggccaagtctcaagaatgcaaactgggagcatcacttcaagttacccttaatttaatacatgatcttagcagcagtttcaagtgagttctttgttttgttggccaggaagcttgaactcttgtctcaaaggaattgatccttccatctctgcctcccaaagtactgggattacaggtgtgggcgactgcacccggctacaagtgaatttttaaaggaaaaaaaaagaagaggcccttgctaaattgtattccaagaatttacattaaaataacaacctatcc

SEQ ID NO: 203889 - DNA, 387 bp, Homo sapiens
ggacttgcgtgtggtttacaccccccaccccttagaacattgtagtcaaactaggatgtattaaattggcacatgaggactgctaaaaaaaattgtagaggaggtccactcctgagagggagtatttctagtctcagaactgccagttaggggtttgagaccttggacaggtctctcatctctgcaagcctctacaaaatgggagaacacctagattgcaggactagctgagatgagagacctgtccaaggtctcaaacccctaacaggcagatcacttgagctcagaaatcccaaccctgcagctacaggagataggggtctcttctaaggaagtcacagcagtttttatgcagagcttgagctggtaatttgaaaccttgagctc

SEQ ID NO: 203890 - DNA, 234 bp, Homo sapiens
atccttgttaagtgctgaaatctgtttgtacagagttgtgcatccatcatcataaccaggtcatacatttttggcagtaagaccacagaaattaggctggactctcagcagtgcaccacatcaggaggtgtatggctgtcctgtctcacttctggtggtgataaccctggtcacccagttacattggtgtcctccaagcatctctagcacagagaccctgttttctccccttgt

SEQ ID NO: 203891 - DNA, 376 bp, Homo sapiens
tgtcggtgtgtgtgatgtcagtgtgttgtgtgtgggttgatatgtgtatgtgtgatgttggtgtgttgtgtgtgcatttatgtgtgtgtggtgtctgtgtgtgtgatgtcagtgtgttgtgtgtgggtgtatatttgtgcatcatgtcagtgtgtgtgatgtcagtgtgttgtgtgtgggtttatgtgtgtgtctgattttggtgtgttgtgtatgggtttatgtgtgtgtggtgactgtgtgtgatgttggtgtgttgtgtgggtttatgtgtgtggtgtctgtgtgtatgatgtcagtgtgttgtgtaggtttatgtgtatgtgatgttggtgtgtgtaatgtcagtgtgttgtgtgtgggtttatatgtgttt

SEQ ID NO: 203892 - DNA, 310 bp, Homo sapiens
ctgtctctaagcagattataattaaccaacaagggttggcctgagctctctgtggggactgggtggatacctgtcatacataagtgcttttgctttaatgggtcagcttaaagccctttctggctgtcctcccacccaagaggtaaaatggggtgatgtttgtgcccatgactacataggccattccttaccagccaagtggtctgggcagccacctgtgcttccacccgcatctggagccctcgggtggggtgtttccattttctccattccccttgacaccagcagatccaggcaggcccgtgttctg

SEQ ID NO: 203893 - DNA, 174 bp, Homo sapiens
gtgtccctttgcagcaccacctaaaaaagatccccatcttcccaggggtgctccccttggccagcctctccggacagcctccactccccaacacaaagtactaagagggtaggcacctcggcgccttgtccttgaccttctgactcttcctacagcgatcttaaaagggaaaca

SEQ ID NO: 203894 - DNA, 402 bp, Homo sapiens
attttggagttatcttaaaagctttcatttttccatcactcagtatcttaataagacacatagtcctctcaaacatctctaattcatcccttctctgcttacactaatacagacctagtatgggccctacttaccttctccttgaactactggtttccctgctttcagcttctcatttcaatccttgcaccaaaccagctagtcagcaatgtttctaaaacaaaaaatctaatgactctccctcagttaaatcatattggcacactaattcctattgaacaggacccaggcactcttatgtgtcatctgatgaggtacctagtacagtacctcacttataaagttaaatatactgtttattttattgacataaacatatctttttcccccaccaaagtgggc

SEQ ID NO: 203895 - DNA, 286 bp, Homo sapiens
gccggcccgtatctctacattacttagaggagaatgtatatctttataatattgggtcttctcatccaagggcatgacaggtctctccatatctttttaagttttcttcatataagccttgaacatttcttaagtttattccttggtagtttctttgttactgttaatttactttatttcttcattattatttttaactggttacattattttattagtttactattatatgccaaactattgattttacaaatacatttcatagtaagagctaatgttagagata

SEQ ID NO: 203896 - DNA, 222 bp, Homo sapiens
ggatatcagaaaatgttggggtgctgtctacgtctcctaaaaaggaacagttccgcaggctgctgaggaggttctaagagttgtccagctacagaaacacgatgttggatgactcctcagacctaagtatctgtgatatttagatgattcaataaaagacctatagatttggaaaaaaataaaaacaagtcacattgaaaatcacaaagcataagccatcta

SEQ ID NO: 203897 - DNA, 471 bp, Homo sapiens
atttcacctgtttctctgtatttttgtaacatgtctattagacaactcaaaattacatatgtgactcacgtttttccattggatagcattggtctggagcctcatttactccattatgcttgtggctgaacctagaataatctagtaatccttacttagaaatctatagtcatgttaaagagttttggtgacaacatcagtgtctgtcatcactagcactcgctgttctaaaccctttccatgtattagctcatttagttctcaaactgacactcacaaaaccctcctcctgcccccatgataggagacccatgtccttagtatcactgttgttatttaaattctaactggaaagaaactttaggttagactccattcacctgttatcatttagataaaagtgaaattgtacttgtaattttatctcaaaataaataaataatatgaataaaactcgaggaagtaacaatc

SEQ ID NO: 203898 - DNA, 242 bp, Homo sapiens
tcatgaaagccacgcacttccatcctttctgaaggtgcacatgtttttttgggggggtctttcttctttgtacaaggcagccatgtccttagtatcactgttgttatttaaattctaactggaaagaaactttaggttagactccattcacctgttatcatttagataaaagtgaaattgtacttgtaattttatctcaaaataaataaataatatgaataaaactcgaggaagtaacaatc

SEQ ID NO: 203899 - DNA, 569 bp, Homo sapiens
aagaaattggacactttttggcttcttttggttttcttgtaattgaaataaaaacaaaaacaaaaaaatggccagtgcagtggcttacacctgtagtcccagcactttgggaggccaaggtgggcggattgcctgagtccaggagtttgggaccagcctaggcaacatagcaaaaccccctctctaccaaaaatacaataaattatacgtgcatgggtggtgcacgcctgtggccccagcaactcaggaagctgaggtgggaggatcactggagtcctggaggggtggaggttgaactgagctgtgatcctgccactgtactccagcctgggttgcagagtgagacctgtttcaaaaaagataaaataaaaaaaggagaaatagttgatctgcatattctgtaaataaaatagctaaatagctgtctcttcatacatatatgtgtgtatatatacataagtgaatatatgcacacatgtgtaatttctttgaacatatttgttaagaattaggcatggaaaggacttcagcaacaattttttggggttatttactggggtggatctgct

SEQ ID NO: 203900 - DNA, 354 bp, Homo sapiens
ttgtcttgaaaagtagctgatttgtccagatgtggtggctcatgcccgcaatcacagcacttcgggaggcagaggcgggtgggacacaaggtcaggagtccaagaccagccctaccaacacggtgaaaccctgtctctactaaaaccacaaaaattagccgggtgtggtggtgcgcgcctgtaatcccaacactttgggaagctgagacaggcggatcacctgaggtcaggagttcgagatcagcctgaccaacatgatgaaaccccgtctctaccaaaaaacataataaataaataaacagtcctacaaatgtatgggtcaaaaacagtaagagttattcttcactcctgtaa

SEQ ID NO: 203901 - DNA, 410 bp, Homo sapiens
gaaactgactgataatcctaaaataagtgtttgagtacctcttcaaagtcatttagctcaaccgtttattttatgaaagtcttgagaggttaagtgggttattctttcagaaaagcaagggcacattaaggctgttggtgtagatttaatcaaacttcctaacagaaaaaaatacaatgtgtcaaaactagatggttttgcatccataaatattaatactatgtacaccaaaatattttttattctggtattttacatttttgtcataaagaggcaagggttggtctgtgcttagtccagtctctctcccttgctggcaagaaatgtgagcttgtgtcattgtgagaggctcctccccagagccctggcctgcatctgtatcactctggggcttagaggcaatgggccta

SEQ ID NO: 203902 - DNA, 644 bp, Homo sapiens
aggagaaatggcatgggggccaagtcatgatgaccacacagcaagcctgtgagtgatgttattatgggagtaaccaccaggtccaagtcactcccagcccctggtgtaagcatcaaggtggaggctaaaatgaaaaccaatcgaggctgcatcctatctcaaggattaggtgatatttggcaccagaagctggagtactctgggtgaaccatccagatttttctgccaagggaagggaagttgttgagtgatttgggagcctagagaatgccctctgtgggaggagagggagacaacgattgtgtttctttcactggagaccttatctccaccctccagcagcctggagaactagcagaaagtcatcctgctttcacttgctctgagcattgcaaaagttttcatagtttccagaagcttactttcccttcagcactttttaaaacctacttaccaattttatggactacttatttgacgttgtatgtgatttacaatgtgaaaaatcccaactggtctactttatgaccaggaagacggtcctactgagctttggaattgctgtacctgttctttgagctataatatatagctcaggtattttggggatattgcatccaaatctaaaatgtaagctgaaagaa

SEQ ID NO: 203903 - DNA, 333 bp, Homo sapiens
ctgtttccgtaggcttatcattttcttcttccggtagtggattttggctttctctttcctcttctcctccagggtggctgtcactgcgtggtacttccagccaacctcgtgagccaggtgccccagataggcaaactttcttgtaggcttcagacgcacaaccttgagggcagcaggaaccaccatccgctttttcttgtcgtaaggcggtgggatgcagtcaaacaccttgaggcggtccagagcggcctggcctcgcttggtcttgtggggcagcatacttcgcacagtcagccagaagatggggctgggggcccggaagaagaaaatgat

SEQ ID NO: 203904 - DNA, 514 bp, Homo sapiens
gaatcgagccggtaccgggtcgaggagaagctccagtatgaattatcttatgtgtagtaagatttgaagatcgattaaaacctttgccgcattcttcacatttgtagagtttctctccaacatgaattattttatgtgtagtaagagttgagagttgcttaaaagctttgccacattctaagcatttgtagcgtttctctccagtatgaattatcttatgtgtagtaagggttgaggactggctaaaagctttgccacattcttcacatttgtagggtttctctccagtgtgcatcctcttatgtctagttagggttgaggaccatataaatgctttgccacattcttcacacttgtagggtttctttctagtatgaattttcttatgctcagtaagggttgaggaccagataaatgctttgccacattcttcacacttgtaaggtttctctccagtatgaattatcttatgtgtagtaagatttgaggatcgattaaaagcttcaccacattc

SEQ ID NO: 203905 - DNA, 483 bp, Homo sapiens
gctctccagggcagctgtcctccatgcaatgatccagcaattcatacagctttagcctgttgctctaccaactccacaccagacctggttctttgacaaagagaatgagaagctcagatgctgtggagagacttttcgcggctttggcctgaaagtgacacatattgcttctgctcccgtttcctgggccagaagttgttatatggctctgcctaactgcaagcgtctgggaagcatagtctcccatctgcccagaaagaagaagagagctggatattgctgaacactggtaatggcatgttgtccaatcatgcttcccagaaaccggcatagtccaaatggtctgtgctccaagtgaacagaaaaaaaccctaagtctgctgccacctatacaaactaacaaagcaaaacacctcccattgtgatttctcatttctatagagtgttgaagtttccctaaataaattgtccctttcatagaat

SEQ ID NO: 203906 - DNA, 377 bp, Homo sapiens
attgcttatgtctagatttgatttgaaggtagtccttttactaccataggtggcaaagagctccaaatgtccacttgcagattctacaaaaagagggtttccaaacttctcaatctaaagaatggttcagctctgtgggatgaacacacacataacatagaagttgctcagaatacttctttctagtttttttgtgaagatatttcattttccacaataggcctcaaggcactccaaatgaccaattgcaagttatacaaaaagattattacaaaactggtccatcaatagaaatgttcaactctgggaaatgaatacacgtatcaccaagaggttgttcagaatgcttctatctagtttttatgtgaatatatttt

SEQ ID NO: 203907 - DNA, 417 bp, Homo sapiens
gagacagagtttggtctgttgcccaggctggaatgcagtggcacgatctcggctcactgcactccagcctgggtgacacagtgagaccctgtctcaaaaaaggaaaagaaaaaaagaagtggaatcatacagtatttttccttctgtgtctagcttctctctcttagcatgttatgtcacctatcagaacttcattcctttttccaagaacattccattgtatgtatatactgtgttttatttatccattcttcttttgatggacatttggtttgcttcccccttgtagctcctgtaaataatgttgctgtgaacaccgatgtagaagtatctgtttgagtccctcctacgcctatttgtaaagctgctctaactcctttttgaaacaagtgggagcagaaataagtgtttactcat

SEQ ID NO: 203908 - DNA, 466 bp, Homo sapiens
gctattgaactgaaccattagttctaatttcaaatatagtactttctgttctaaagtggttaagtcttcataataaattcaaattatcctgaaattatgtatcccttcatctattttgtccatctttttctcttttttcttgaacatatgattcatagttattttaaagttattgtctgctaactccaatatctgactcacctgctggcctgcttttattgccttatttatgattcacatgatcttgcttcttagcatgtctcataattctttactgcatgctaaacactatagagtccttatataatgttattacctacctataaaaaagacaaaaaagggctccctttgtactctggtaagcaggtaaggagggagctcatcatccaatgagggatggcgctaggttgggttgtcattttttaggaccctgtctgcttttgccttaaccctgtttctttttttt

SEQ ID NO: 203909 - DNA, 338 bp, Homo sapiens
agactggtcccacctgaaagattaggaatataagcctcaaagaactcccagaaagatgagatctaaacacaaattgtctttttatgaaacatagagaaacggaagatgcgtttaaaatgtatgacgcattttgtaaaactataaagaagaatgatctgaaaggtagcctactggaagtcattagaaagaatcaatgtccaaagcaatgaaaaaataactcaatgttcatgcctatgcaataaagcagggaagagaccacttctttagccaaatgagaaggaaactgagaatagacctactgatggtattcaagttcatcaagagttgttattaagttg

SEQ ID NO: 203910 - DNA, 492 bp, Homo sapiens
attttgttatagcagcacaaaaggtctaagacaatgactgaaggacggagctataggactcaaaagaccctggtcttgaagccagaaagacctggctttgccagtagcatggtatttcaattaagtatgattaaacactcttcgagggaatagaaaggggaaggaagaatggagatggatcatttgtttcatgccttttacttacgtgtaaggaattatgagcaggtgcctatggattttggaatatgcttctctaacactataaaaattagaaagtgaaacttatagccacaaatgtccatttaaaatttctaatgacaatggaagaaattatttagactctctcctatactattacaccatacatcattgcaaaacattttttttcattttgcccaacctccactcctgtcattccaccactcctatagtatctaaaatatagtttcttttagagagattggtgcaccactcaacttgtcagcttgaggg

SEQ ID NO: 203911 - DNA, 273 bp, Homo sapiens
cctcaggccaagtcggccacctgtttttctatagcttgcgggctacctgccctaagaatggttttcacagttttaaatgcttacactttaaatggttatagaagtacctgtctttattcttggccattcaggtttccttttctgtgaatttcctatccataattttcttacgaatttgtagtagttctttataaatttattcattcatccaacagatatttattaagtacctctgtcatgtggcagcgctgtaaataaagtgaacaaaacatt

SEQ ID NO: 203912 - DNA, 137 bp, Homo sapiens
tcccaaggtataagaccaaactacctgattctgaagcagtaacataaagaataaagtgaatacatagtgtcttataaataggtcgcagataccatggaaagagagtctgaaaatgagagatgaatgttccttccaca

SEQ ID NO: 203913 - DNA, 750 bp, Homo sapiens
gaactaactcttttaacctcattcaatgagctaatatgtgtaaaacacctggcgtataggatgcactcaataaatgctaattcttctcctcccccctctattaagagctgacaaaatcattcaggacaaagtataaatgactaattccattaaggtgttgtattttcaggctgaatttgcattttaatgagacaaggtgttttaatccaagggaatgaatcatattagtggaattgcaagctactgttgagtaaatgacatgggggattttagtctgttttttggtttgtttgttttttaaagaggtatccattgattctgtttagggaaggggggtcaaagtgtggaagcctcctgtcacccttgaaatgacttccacattcatgaaacaaatctagactgagtgcctcatttgaatcaggtcttgaagatacagcagaaaaccagctaacttggtccttcccattgctggacttagagcctagtgaggaggacaagaaggaaacgcctcacaataagatcaggtgctgtcgggcagggaatgagaggaacttcgggaactgcgggttgggggaagggctgcctaatctaacagaagtgttgttaagacctaaaccaggttgtcaaccctgcattttctcgtatcgattgatttcaaatcctgatgcctgggtcccacccccgagactctggggtattttctgtgcatcaggattcttaaaagctcccccaaatgattctgatgggcag

SEQ ID NO: 203914 - DNA, 571 bp, Homo sapiens
agtcaattatatccagattatttattgtttttctctcttttggatgcagtccttagcatacttgactattgcactttggtattgttttctgggaacacttagggcttttaaatttttttaactttttatttattttttagtaaaaataaactgttttccctaaagttccagtttccctctgagtgtaactggtgatgggatgctggcctagaatataagtggacattgaccttagagactatgcctactgtgtacagatgatgttccttaaaggtatataattcaaaatattttaaatgagccaaggaggttaattcagatgcttgcatttggtctttcttaaagcacctttatataaacaagaagggctataaatacacatgattttcaagtgtctgcatatcttgtgcagccttctggtaatgttcaggtaaaatataatgccttccctaaagattatttttaaatttttctttctattccttttcaacccctcactctcatagcccaagctgcattttatgctgtatgacagagttacaaataaattggcttattcttggattacaca

SEQ ID NO: 203915 - DNA, 447 bp, Homo sapiens
cagcaggcaaaagagagaatgagagccaagcaaaaggggcttccccttataaaaccatcagaaccagccccatgatttaattatctcacactgggttcctcccacaacatgtgggaattatgggagctacaattcaagaagagatttgggtggagacacagccaaaccgtttcacactccaatctcccagactttggggaaatgttcatgtgtgcggagggtcttttcaaccttccagctctgccttccagcaagttaaacactttcctttacaaagatgaaagagaaagaggaagctcttgccatgtaagtaacacaaagctaacagtttcatggaccacaaatgcatttttatctataaaaggaaaaataattttaattgcctttatgttctagaaaagcagcactatttctaattggtacattgagcaattatgtttaaactag

SEQ ID NO: 203916 - DNA, 214 bp, Homo sapiens
caggcgcgtgccactatgcctggctagtttttatattttcagttgggacgggatttcaccatgttggccaggatggtctcgatctcctggcctcgtgatccaccgcccttggcctcccaaagtgctgggattacaggcgtgagtcaccatgcctggcctgtcacttaccttaaatgttgtttatacccaaggtgataatcaaaatatctaatga

SEQ ID NO: 203917 - DNA, 155 bp, Homo sapiens
aagaactcttaaaactcaacaacaaccaaaaatacccaatgacaaaaatgggcataattttgaatatctatttctccaaagatatggccaagcagcatatgaaaagatattcagcaacattagtcattaggaaaatgccaatcaacataatttat

SEQ ID NO: 203918 - DNA, 154 bp, Homo sapiens
tatgtacccaataatgagattgatggatcatatggtagttctgttttaaatggtgttgagacaactggatattcacatataaaagaatgaaattagactcttatttcatatgcaaaaatcaactcaaaatggattaaagagttaaatgtgagat

SEQ ID NO: 203919 - DNA, 741 bp, Homo sapiens
cagagtcttgctctgttgccaggctggagtgcagtggtgcaatgttggctcactgcaaccgccgcctcccagttcaagcaatttttctgcctcagcgtcccgagtagctgggactacaggtgtgtgccaccatgcccagctaatttttttttatttttagtagagacgaggtttcaccatgttggccaggatggtctccatctcctgacttcgtgattcccccgccttgacctcccaaagtgctgggattacagccgtgagccactgtgcccggcctggccttggagattgttagtaggaaaattcatatcccccacttctcatgtctgcatatgctaggactgcaactggaatatttttgagcgctttaaaggccctacttccaaatatggtcataatggggggtcagaacttcaacatgttaatttgggtgggtgagaggcacaatttagtttgtaatatctactatcccacagatgtaaacgacacacaccaaacattcatctatatctccctcagttctgaactaggtagcaaatgaaaataacatttttcaggacaccaagacccttcacatagaccaaggtaaggcatatgaatttaattccaaatacaataagaaaatttcagagtttaagcagaaaagtaacacaatctgatttataaggattactctggccattgcatagaacatctgttttaaattactaagtctttttcaagcctatgtgacaagattct

SEQ ID NO: 203920 - DNA, 429 bp, Homo sapiens
ccacggagtaagaaccagaacgccagctgccccagcggcgctcgcaccatccacccttgaaattgccgtagaagagacagaaactgaaaaccatggtttcaggctgctaaaaacctaacatgaaacaaaacagaagaacaacaacaacaaaataaggttgctgaccagaactcaacagtgagggaatttacctcctgcttcatgcatgcaacatcaaaatagaagagtgacctatgggatccatggaggagctgcttcctgaatctgtgtaaagtagatcttgccgtgtgggtaactgtgactgcggtggccatgaagaggcacaactcagacctcggatctcctgctgcagagaacattgactgacagcccagcagctcctgtctggatctaccacctgttcacagtgaggccaacatcccccaggct

SEQ ID NO: 203921 - DNA, 354 bp, Homo sapiens
aactaacattctgaaagggatatgagtgatgtcattgaaaatgggaagctaggaagaaaaatcgatcagcttttcccaaaatggttcacatttcataaaacctttctgatgagctcaaggagggacgctatcagataacacaagagaaggaaacagaagttgtgtgcctgatgataaatcaacatagtagatataatgacctgtaactatgccaggtagacctaaccttattctctccctctcccttccaacgcccccacctcggctccctcttgttttgttttctctttccatcgccttctctttctccattttcttctctccctttgccattcacagtgtcttcctttcctt

SEQ ID NO: 203922 - DNA, 177 bp, Homo sapiens
agatgctgcatggctggtctcagtgttcattccgaacccccacactccagcgtgagtaccaaatggtcatgagcattgacggagcacacagtgtaccctgagttctaaagacgcaggactgtgtctgagctgccataacagaataccatatcaggtagctgacaaaaaaaaacaaaa

SEQ ID NO: 203923 - DNA, 372 bp, Homo sapiens
gtcgatccagaggatccctttgcgaaggaattgaccttatgcctcccacatctcaactcacatttgatggaatgaacaacaacaaaaaattattgagagaggcaaaagaaaccagatgttaaaaatcatggtgtgatttaggtataaatccgcgagaaggagatatactgctgggtttagatataaacctattagaagcactttttatttcaagcaggtgtgcaaagaaaaagtgctgacctgaattctgtgctctctaactaatggaataatctgcaggatgtaattagtaatggattaattaactaaggttgtttagttcatatacaacttaagagaacaatttaatctctttgtggtcaaatgttaaat

SEQ ID NO: 203924 - DNA, 233 bp, Homo sapiens
agaattcacagataggtgaggagggaatagtccttcacaggactacaaactctttgtgaatggaacagaagagaaggattttgaaaaattaactataatacttaatgggtacatttttaatgttaatgtgtgtgtgtgtgtttgtgtgttccagtatcctcagttgtaatttccctattccatgcaaattttaggacaaagatgaaacatacatgcatatgatattttgtaaa

SEQ ID NO: 203925 - DNA, 219 bp, Homo sapiens
cattgtacaaagtaagtccttccaccctagcatctataatcatgtttgtcttctcctagagattatgagttacctaagggcaagaaccttcttatccttttgcttaacacagggtttgatacctggtaggcataacttctcttaaaggtaataattcctttcctattgatccaatctcaaacctcatgtgctccctctgcctcttgtgctggagccagt

SEQ ID NO: 203926 - DNA, 344 bp, Homo sapiens
ggatcaggatgtggacacccccaaactggaccgtcaggccggggagagcctcaaggccaagtacctcatgccgccctttgtcacaatgacctccccgtcccacttcaccgccatcccggctaagcaccactctgcccatttcacccgatgcccatcaaagccccagcacccatcattcctggaataagaagcagacctcagtcagctctagggaggctgaggcggctccagggtctcactctgttgcccaggctgtagctcaatgggatagtcacagctcagtggagcctcaaactcctggtctcaagcagtcctgcctactacaggctccccagtaactgggg

SEQ ID NO: 203927 - DNA, 364 bp, Homo sapiens
cgccccctcggtccaggattaaaaagttgattcaggtggacaaggttggggtcacactggcccaactaaagtcatgtcacctctctcacatcgtagcattcttttatccttgttttacactcttaagagatagcataaagaagaaaatcaaaacccagaaaaggtttgctgtaattactccaataatttccttcagtgaaaatctcttatcactatgattttagtgacagaggaacaagcagagctctgacgtggggctgagtgcccactactaaagggcagaggctgccgccaggccaccaaggcccatctggccaggcaaggccacccagagccctcacgtttactccaaacggccattctt

SEQ ID NO: 203928 - DNA, 898 bp, Homo sapiens
tgaggaggctaaagtgggaggatcacttgagtccaggagtttgaggctacagtgagccatgatcgtaccactgcactccagcctccagacaacagagagagcccctgtctctaagaaaaaagaagaagaaaagaagatttcaaatttttctgttcagtggtttcttctctttaaaaacagaatgttatagggctcactggaattatataacatgttctcgtagatgtttaccaacttgttctgaattctgttgatgtattcagtcatatttcaaaatcagatttaaaataaaagtttttcatgcaattatgttgctttttaaataagatacactgaatatacattaaacactataaattaaaagatatagtttttatgatcagccccgccagttggtcaagacttcataaatgtgacttggcaaacttttgaacgtgaattttacatgcagtgcaactcaagcagaatgtataatttgttctggagacttggactgttttctggggttttaattgaaccagtgaaaggaatgtaactgttttgaatattgtggtttgagattaaacagagcattttaaaactagttaccattttttaatatgcaataagtggtttccctctcatttagctcatagacagggttagacactagaaagtaattatttgctttgactacttagcacattcttcattatcaaatgcatatattaataggcaaataaaatcagaaagcatacttttagttctaccataaatagtatcttggccctggccaggcacggtggctgacacctgcaatcccagtactttgggacgccaaggtgggcggatcacctgaggtcaggaattcgagaccagcctggccaacatggtgaaaccccgtctctactaaaataca

SEQ ID NO: 203929 - DNA, 533 bp, Homo sapiens
aggctagagtttagtggtgcattcatagatcactgtaacctcaaattcctaggctcaagtgatctccttccttagcctcccgagtcactacgactgcaggtgtgtgtcaccacgcctgcctgatttttaaatcttttgtagagatggggttttgctatgttgcctaggctggtctcaaacttttggcctcaagtgatcctcccatccctgcctcccaaagcactgggattgtaggtgtgagctaccaccccccagcctattccaagatttttaacctgaccatctgtaaagatggagttgccatttacagagatgggaaaattgtggaaggagctgacttggagggaaaattaagggtttggttttcgacatgtcaggtttgaaatatgttttgtagcaaattcagatgtcaaggaagagatggaaatatgagcagaagttcagagagattgagagagacagaaatctaggctaagatttgggaatgggcagagagagagaacagtatgccagaagccaagcaaaaaaaaaaa

SEQ ID NO: 203930 - DNA, 378 bp, Homo sapiens
cggcacgaggtgcctgcagtcccagctacttcagaggctgatcctcccatccctgcctcccaaagcactgggattgtaggtgtgagctaccaccccccagcctattccaagatttttaacctgaccatctgtaaagatggagttgccatttacagagatgggaaaattgtggaaggagctgacttggagggaaaattaagggtttggttttcgacatgtcaggtttgaaatatgttttgtagcaaattcagatgtcaaggaagagatggaaatatgagcagaagttcagagagattgagagagacagaaatctaggctaagatttgggaatgggcagagagagagaacagtatgccagaagccaagcaaaaaaaaaaa

SEQ ID NO: 203931 - DNA, 449 bp, Homo sapiens
tggcctgcctatgagaacggctcatgatctctatttcttctgcttaatgaccatctcgaagtaacaagtttagcctaaaataaacttgctaagttagcaaaggaagtccttagcagccaccatttctcgattcctccatcacctcccctgcccctcaactccctcatttctcccaagatatgggctccaggctgggcgcggtggctcacgcctataatcctagcactttgggaggctgaggtgagcagatcactgaggtcaggagttcgagaccagcctggccaacatggtgaaaccccgtctctactaaaactacaaaaattagtcaggcatggtgcacgcctgtaatcccagctactcaggaggctgaggcaggagaaccacttgaacctgggagtcagaggttgcagtgagctgagatcacgccactgcactccagcctggggaca

SEQ ID NO: 203932 - DNA, 371 bp, Homo sapiens
ttttttagagctatcatgagcttgtgtgaggaggttgattaaaaggagtgtcctcataggtcacgcatgcagccccatgacttggccatatctcaccttgtcagagctctatgcagatatttattctcaaatggatctgttagtgaattctattccatggtcaaatctttagcttgcagaagccatgttgaaggtaattcaacatgtgtggtcagcagtctcacctatgatgatgacccagattttcactgggtgtgatactggacacattcctttgttttttttttggttttttttttgagacagagtctcgctctgttgcccaggttggagagcaggggttcaatcttgtctgggcaccgagctcgaat

SEQ ID NO: 203933 - DNA, 449 bp, Homo sapiens
aagggcactgctggtcaggatgcccgtgcagagcgcccacctgggagtggggctattcccggggtgccgcccgccctgtgcttttacttccttgacccttcccctcctgaagctgggttccagccgtgaggttgacaaacttttgagtctcatcatcttctcccaggccttcaagggaaaccactaccctggagaacaagggcactgtggcttctgcttcagagaggtactgagagggtccaaactgcagctgtgtgactctgagcaggttactcaacccctctgggccagagtttcttcaccttcaacatagagaagaccaaagtacttatgccttctggaggtaccgggtggttcaggcaagtgcctggcacacaggaagcactgtctgagcgtcagctaggactgtcattttctcagagcaaactcaacccagcaggtacccgctg

SEQ ID NO: 203934 - DNA, 419 bp, Homo sapiens
aagaacatcagataagacaaggcttgagctgaccacagaaagaacagctagagatgggaaggagaatttcagaaaggggacctgcatgtacaaaaagtactgagacatgaaataataacatatattcagggaactgcctataatcttacatataagcacagggctacattaatgatgaaagaagaaataacaggataacccagtaatgacagtgacttaactgcctggagagtcaccagccacaggccaaattcttttctgccttgggaccattacacaccctcttcccttacctggagtattctcccggctaatgttcacttgtccttcagatttcagtacacatgtcacttccacagaggggcctttcttaccattccataccacaatagatttatcttggtattctctctcatagc

SEQ ID NO: 203935 - DNA, 580 bp, Homo sapiens
actgtagagcagttactaaaatccagcatggttctaaaaatcttagggtttagagtttagtcttgtatatgagagacatttctggtaactctttgtctattaaggtaaaggcttgcaggaatgtagttaaagaattagtggtcttcataatatataaaatatttcaactcaacagctggcctatactgatacatcagttgacaaagtcttcaagactgttttcaatacatttggctaacctgattttggtgtgtctcaaatgcatgtatttagtttctttctgtgtttcagtaagaattcctttatctcagaatagagtagttcctgtctttcatgtccgcccagagcctctgggaacagacacctcagtaggagggcctgaagaatgacacatttctgttgatgctttggtagagtctgaaatgtaggatagggagagactgtgaaataagattgctgggctttgatttcctattattggccagacttacccaccctttttccttggaataccttttcttccctgtctgctccattgatcgtagtcttaccccagatccccaaaccccagctcctgtag

SEQ ID NO: 203936 - DNA, 445 bp, Homo sapiens
aaagaatccaagcaaggatcatacatttaatttagttgtcagaatattttctatcttaagctggaaggcagctacacaggtgttgttattctttgtgcctctttgtatttcactattttaagtaatttttaaagaactactttcactcacaagtgtgaatcaattcaactcttatttacagaagtgaatcaccaggaacagtagccaatccccacatcctttctacctggcttcgggatgtaactcatcactgacatctgaaggcaggtgtgttcccaggtcctagaaactgactctgtcctgattgcagttgaacacattttggggacacctccctgactggccccaacctgtccagctagactcctcctgtcctctggaggtcatcaaagactgaggttgcaaagggcttctctgtttgcagagtaaacagagggggttgtga

SEQ ID NO: 203937 - DNA, 500 bp, Homo sapiens
gtgaaatgacagtcctacgctgccctatcctgtaagattaaacagagaagagttgcctctcaattattcaccccaaatatacagacaatgcaacaatatttcacagtaaattttgactatttgtggctctgcccctatttgtgctcaaaattgtaattcaataattattaatattatttatttatattttgtgctacttctcttaactgtgtttatgtcttaaccacatagacccttgttttccctactatatacacagtttttggccagcagctctcgtccaatgaaagagctcaagaaaatgtcttttttaaataacagaagacatgttgaagaaaaaaaaaacaactggaagattattttattctgaaacacagtcttgctcggtcacccaggatggagtgcagcctgtaatctcttcactgcaaccttcgcatcccgggtttaagcgattctcctacctcagcctcccgagtagctgggattacaagcgcgccacc

SEQ ID NO: 203938 - DNA, 467 bp, Homo sapiens
cagggcactgatgacaccattgatgttctcttcggggacaagtgcatgatcaaacttgaaagtactgtattagttttttcagaataataactaaatatgagagtgacccctaaagaatcatttggcaaacttgggtatcaaggctactgctaagtacatcgtcaacgaaaaatcacccgtgatgacattgcccatactaaatgttaagggtcataattatcactttattttgaattccaggagagtttaagaattgttgacatccagccaggcatggtggctcacacctgtaatccccgagctttcagaggcctaggcaggaggcttgcttaaggccaggtgttcaaaaccagcctggagacaacatagcaagatcctgtctctaaaaaaaatttaaaaatcagccaggcatggtgtacttgtagtcctagctactcaggaggctgaggcaggaggattggttgagc

SEQ ID NO: 203939 - DNA, 349 bp, Homo sapiens
cctcctatctggattttcaagtttcttttttgtttgtttgtttttggatgtttctgtttgctctgtctctttctttggaaagtacttgtaggatcagctgtttttgaagacgttagaaaatacagacaagaacattttcctcactttttaaaatggattaacatatggaggaagtgggataattttgattttgtcttagtcaaaatagcctattttaaatattttgttggctgggcatggtggctcacgcctgtaatcccagcacattgggaggctgaggcaggatcatggctggaagccaggagttagagaacagactgggcaacataacgagactcccattgccaca

SEQ ID NO: 203940 - DNA, 519 bp, Homo sapiens
attgaatgctacttgaaagaaaattattgatctataccacacataagagttttgaaatcttcccatcagagtatattgcacctttagcataaaaaaggctctgatttattttactttatttttttgcaaatagctgctttatagttctttaagttcaattcaatattactctttgttaaactttaaaaaagtcttcattactttcctttgttaaaccatttctgcattcttcagataatccaggatggtttcagtaattaaaataatttagcttcatcactgttcaacataatcactgttaagcatgttaattcagatactgatccttaacatttttgactgttatgatggaggcctggccacagacgtaccttgtgcatgtttttaaaaaacctaacctgttaataatctactccaggttctaccagtaacccaggggatatttgttttcttttgtggcttcttccaaggaatcatatcaaattcctttggaaaacttgtattatttgcatccatcgt

SEQ ID NO: 203941 - DNA, 344 bp, Homo sapiens
agcaggcagaggttactgctgaatctgtctgtcatgagccttcagaaggctgagtgaactgacttagcaccgggcacagcggtggatgctgacttttccagggaggaatgtggggttggagtttggtctcaggcctggagtactccttgaagtggtttctcttgtctcagtgatgtgagttcttctttaacttgtgattctcaaatgacggtgatcactgggaaagttggtacctgagcaagtcacatggtgtctagaggtgccaccacattccacaatagcgctttgtggggggatcacgcagtgggatcaggtgactggggcaggaggcgttgccagtgcca

SEQ ID NO: 203942 - DNA, 598 bp, Homo sapiens
ggttgaagtgatgacaaagaaagaaaccatggtccctttcctacaagtctagaagaaagaactttagggaagaaaacagtcacataaccgtatgggtagagatatattacaaatgcttcagaagcacagaagagggaagtaataacttggtcagtggaggtacttttcagctgtgtttactgtagagattataaaatatttatttttattaaatggagccagcaattttattactcatttggacatattttaaggtatacctcaaagatatttttaattttttaaccatatgagatatgtctaataaacatggcaataaggtccaatggcattcggccttttacatgtattgtgccaaataaagacaccaagattttaccaggctccttattcttgaggttatttctgctagtcaggagtagagtcaaatgagctctttgtaaatcactgtgtcagatttatagagaaaggaagcttgtaaaagtgtttcttgtggtcattaaatgccctttgttttctgcctagagcttgctatattgatggtctaaccaacatatccaagaaatttatggggttgtagttttgatctcactcagtg

SEQ ID NO: 203943 - DNA, 1001 bp, Homo sapiens
tggaccatatcttctggggagtttggtcatgaacatggtttcccatttgttgtggaccaaactgtgcccttccccttgaattcctgcgttgaagccctaactcccaatgcagctgtaattgaagatagggcttttagggaggtaattaaggttaaatgaagtcatagggcaggaccctaatctaataggattgatgtccttataagaagagggagagacaccagagatctctcctcccccctcacttgtaaacagaggaaaaatgaccggaggacacagcagggaggtgggtacaagccaggaagaggggcctcgccgggaactaaccctgacggcaccttgatccgggactttgggcctctcaaactgagaaatacatgtctgttgtttaagtcactccctccacagtaatctggatggcagcctgagcttaccaaggcaccgtctgcatcagccagggctctccagggagacagccaataggagatggatggatggatggatggctagatagacagacaagcggacagagagagagagagacaggcagacacagacagacaggcagacaaatggctagatagacaagcagacagagagatagagacagacagacacaaacaggcaaacagacaggcagacaaatggatagatagatgatagatagccaggcaggcagatagacacagacaggcagacagacagacagacagatgataggttgggttcagtgactcttacctgtaataaccagcacattggtaggctgaggccggtggatcacttgaggccaggagtttgagaccagcctggctaacagggtgaaaccccatctctactaaaaatagaaaaattagctgggcgtggtggtgcatgtctgtaatcccagccactcgggaggctgaggcacgagaatcacttgaacctgggaggtggaggttgcagtgagctgagatcacgccactgcactccagcctaggcgacaaagtgagactccatct

SEQ ID NO: 203944 - DNA, 394 bp, Homo sapiens
gtaagtcaagttagactaagctgaacctagaaaaaacgtagacacaatgatgcccatttaaaagcaatattaaaaaaaattaaacaatctagaagatcctcttgcagacttgatgcatagccataataataggcatctttccagtgtcatgaaagaggaacgtgctgcaccctataggctttggagacagacagctggagttagaaacagctctataatgctcggtgtgtgatcttgggtaggtatttagtgtcttgaggcatctgtttcttcatctgtaaaatgaagacaacagaagcacctcccacctgggaatattgacagtattgaatgagatgatgtcgtaaaacaatacggtgcctggtatataggaggagataaatacatattaact

SEQ ID NO: 203945 - DNA, 502 bp, Homo sapiens
cagaatgggttgctgtttttagcacaaaccatgcagggttgggtcacctcaaagcattttcttcagcctggcttgtactctataggggagttggtagtaggtgtggggaatctataggaacaatagagttagctatgagaactgacttcacaaaaagggaaatttcacacaccccaatttcagcttctaaagtgatatattttaaaagcttcatttgtatccttgtctgccagttacacagtatattactgttcaaacccagtagggtctgcaatcgaaaggtgctcttgcagcctgacattcacaaaccaaactggtcattctctttagtgtgattcagtaaaatctcagttaatgttttgggaaagggattctgatttatgacatttctgatttacaagggctttccttagaaaatacctttcggtttgatacttaccactggaaattggttcgatacttaccactggaaatctttataaaatatagtgatctgtttgct

SEQ ID NO: 203946 - DNA, 273 bp, Homo sapiens
agatgcctagaccccactccacagcgaatacatgaggaagtggtgtttttaaagcagttaattttttctaattaaaatcatatattaacattcaattacaaaaatatataacgtggccaggcgcagtggctcacgcctgtaatcccagaactttggaaggccaaggcgggcggatcggtggtataggctataccaccagtgttttgcttttcttatactgtaaaatggtgaaggtggggagtgttagtgatcagaagtggggtggtatagcct

SEQ ID NO: 203947 - DNA, 678 bp, Homo sapiens
tctgccatcagatatcaaggtacctgatgttagctgtaaacactgaaggtaaacaaattacctggggggaaaccattgccaaagggccatcccaagacacttctgctattcaattatgaaccttttaaacaatagattacatacactcaatataatttaggaaacttgcctgcctgtctcacaggtaaatccagctgttccgacatagtaatctggagcagcgttgagacaaaattcagagatttgtgtgcctacaaagaaaaaaagtccattttaaacttctgcaaataaatatactttaaaattacagatcaaagaggctccaatacatttccattgcttggcttgcacaaaaggctcttcataactggttccagtcttatttctcatcactcccttatattgaactttaaggaatttgatgacttaaattctaaaactttttggatgttttcattagcctgtatagcactgcacttcccatttatcccaactagcattcttttttctttaatttttgagacagagtctcactctgtcgcccaggctggagtgcagtgacgcaatcttggctcactgcaacctccgcctccccaggttcaagcgattcctctgacttagcctcctgagtagctgggaaataggcgtgagcaacaatccagactttcattcttttag

SEQ ID NO: 203948 - DNA, 382 bp, Homo sapiens
agacctgatcattaaactgggctttacaacaagaactgtactgtattcactttgtatctctagattctataaaatatagtagatactcacactgaattgaatgaatggatgatttaagagcagatatgattattgtgattaaacatttgtgtagccctgagcttgttggtagtttaggcaaaaaccatgtaacttgtataatagtcataatctaagaaaaatttaccatttcttcaaaacaggcagaatttttaattcttagaagtgtgttatttagtttccaaatatttggagattttccatctttctattactgatttctgatttaattccattgtggttccagaacacccttcctataacttaaattgttttaaatttg

SEQ ID NO: 203949 - DNA, 106 bp, Homo sapiens
caagtcctttgaggaatggcatggaatagcgtctaaggcattggtagcaattagctttggcgatgaggcaagctgtctttgtagtctaagtaagaaagatcttcac

SEQ ID NO: 203950 - DNA, 578 bp, Homo sapiens
gccttggcctcccgaagttctgggattacaagtgtgagccaccccacttggccagattttctcatttttcttgagtcagtttcagtagtttttatatttctaggaatttatgcatttaatctaaattattgaattagtggacatacggttgttcacagtattgccttataattccttttatttctgtaaggttggcattaatgccttctcttttattcttgattttagtaatttgagtcttttcttcttttatcttagtcagtctagctaaaggtttgtgaattttgttggtctttttaggacctttttttttttttttttttgagacagagtttcactcttgtcatccaggctggagtgcaatcttggctcactgcagcctccgcctcccgggttcaaacaattctcctgcctcggcctcccgagtagctgggattacaggcgctcgccaccatgcctggctaatttttgtatttttagtagagatggagtttcaccatgttggccaggctggtctcgaactcctgacctcaggtgatccgccctcctcagcctcccaaagtgctggattataggtg

SEQ ID NO: 203951 - DNA, 376 bp, Homo sapiens
gctgggtgtggtggctcatgcctgtaatcctagcactttgggtggctgaggtaggagaatggcttgaggccaggagtttcagaccagcctgggcaacatagtgagaccctgtctctacaaaaaaacagaaaaattagctgagagtggtggcacatgtctatagttccagctactagggaagctgagaccggaggatcacttgagcctagaagttcaaggctgcagtgaactatgatccttccactgcactccagcctgggagacagagcaagccccttttctctacaaataaaataaaaatcccccacagtcttgaggactatactatcttataataggtgtttagtaattatttgttgaatgaatgaatacaaaa

SEQ ID NO: 203952 - DNA, 4135 bp, Homo sapiens
  misc_feature (41)..(41): n is a, c, g, or t
  misc_feature (63)..(63): n is a, c, g, or t
cgccggtggctcggcggcggcggcggcggcggcggcggcgncggcgtcgtctacctccagctnctcctccctcctcctccgtctcctcctctctctctccatctgctgtggttatggcctgtcgctggagcacaaaagagtctccgcggtggaggtctgcgttgctcttgcttttcctcgctggggtgtacggaaatggtgctcttgcagaacattctgaaaatgtgcatatttcaggagtgtcaactgcttgtggagagactccagagcaaatacgagcaccaagtggcataatcacaagcccaggctggccttctgaatatcctgcaaaaatcaactgtagctggttcataagggcaaacccaggcgaaatcattactataagttttcaggattttgatattcaaggatccagaaggtgcaatttggactggttgacaatagaaacatacaagaatattgaaagttacagagcttgtggttccacaattccacctccgtatatctcttcacaagaccacatctggattaggtttcattcggatgacaacatctctagaaagggtttcagactggcatatttttcagggaaatctgaggaaccaaattgtgcttgtgatcagtttcgttgtggtaatggaaagtgtataccagaagcctggaaatgtaataacatggatgaatgtggagatagttccgatgaagagatctgtgccaaagaagcaaatcctccaactgctgctgcttttcaaccctgtgcttacaaccagttccagtgtttatcccgttttaccaaagtttacacttgcctccccgaatctttaaaatgtgatgggaacattgactgccttgacctaggagatgagatagactgtgatgtgccaacatgtgggcaatggctaaaatatttttatggtacttttaattctcccaattatccagacttttatcctcctggaagcaattgcacctggttaatagacactggtgatcaccgtaaagtcattttacgcttcactgactttaaacttgatggtactggttatggtgattatgtcaaaatatatgatggattagaggagaatccacacaagcttttgcgtgtgttgacagcttttgattctcatgcacctcttacagttgtttcttcttctggacagataagggtacatttttgtgctgataaagtgaatgctgcaaggggatttaatgctacttaccaagtagatgggttctgtttgccatgggaaataccctgtggaggtaactgggggtgttatactgagcagcagcgttgtgatgggtattggcattgcccaaatggaagggatgaaaccaattgtaccatgtgccagaaggaagaatttccatgttcccgaaatggtgtctgttatcctcgttctgatcgctgcaactaccagaatcattgcccaaatggctcagatgaaaaaaactgctttttttgccaaccaggaaatttccattgtaaaaacaatcgttgtgtgtttgaaagttgggtgtgtgattctcaagatgactgtggtgatggcagcgatgaagaaaattgcccagtaatcgtgcctacaagagtcatcactgctgccgtcatagggagcctcatctgtggcctgttactcgtcatagcattgggatgtacttgtaagctttattctctgagaatgtttgaaagaagatcatttgaaacacagttgtcaagagtggaagcagaattgttaagaagagaagctcctccctcgtatggacaattgattgctcagggtttaattccaccagttgaagattttcctgtttgttcacctaatcaggcttctgttttggaaaatctgaggctagcggtacgatctcagcttggatttacttcagtcaggcttcctatggcaggcagatcaagcaacatttggaaccgtatttttaattttgcaagatcacgtcattctgggtcattggctttggtctcagcagatggagatgaggttgtccctagtcagagtaccagtagagaacctgagagaaatcatactcacagaagtttgttttccgtggagtctgatgatacagacacagaaaatgagagaagagatatggcaggagcatctggtggggttgcagctcctttgcctcaaaaagtccctcccacaacggcagtagaagcgacagtaggagcatgtgcaagttcctcaactcagagtacccgaggtggtcatgcagataatggaagggatgtgacaagtgtggaacccccaagtgtgagtccagcacgtcaccagcttacaagtgcactcagtcgtatgactcaggggctacgctgggtacgttttacattaggacgatcaagttccctaagtcagaaccagagtcctttgagacaacttgataatggggtaagtggaagagaagatgatgatgatgttgaaatgctaattccaatttctgatggatcttcagactttgatgtgaatgactgctccagacctcttcttgatcttgcctcagatcaaggacaagggcttagacaaccatataatgcaacaaatcctggagtaaggccaagtaatcgagatggcccctgtgagcgctgtggtattgtccacactgcccagataccagacacttgcttagaagtaacactgaaaaacgaaacgagtgatgatgaggctttgttactttgttaggtacgaatcacataagggagattgtatacaagttggagcaatatccatttattattttgtaactttacagttaaactagttttagtttaaaaagaaaaaatgcagggtgatttcttattattatatgttagcctgcatggttaaattcgacaacttgtaactctatgaacttagagtttactattttagcagctaaaaatgcatcacatattcatattgttcaataatgtcctttcatttgtttctgattgttttcatcctgatactgtagttcactgtagaaatgtggctgctgaaactcatttgattgtcatttttatctatcctatgttaaatggtttgtttttacaaaataataccttattttaattgaaacgtttatgcttttgccaacacatcttgtaacttaatatactagatgttaaggttgttaatgtacaaaaaaaaaacccttatactcacctgcgttttcatttgtttgacatttgtctattattggatttcattatcatatgaacttgtcagtgggaaacaaactgtctaaaaatttttctcttacgtttaacatacaatcatgtgaaatttaggcagagttcgataaattactggcaaaaacaaaactcttttataaagattttctaatgttgactttaatactctaacatggtacaaaccaaatggtaaaatcccaagtcatttcttttttcatctctatttagcaacagaattaagtggatgaagatattctactatgcattaaatcttgaactttataaaacatgtacaaaaattgtacaagataagttccacctggtaatgtctttccctaatacagggttgcgcttgcattggaccctagggatttgcactaaaattatatcaaggtctcagatgagcttagtgcacaagcactatcactttaaatactattatttgctaccacagcaactatatatttccatagcttttggctgggggcgggggacatttttattacaacttgaaattgctttgctggtttcatatttatttgttgtatttaaaaaatacattgttgtaagagtgattttttcaatatattttattcctgggggggatcatgctacactctcaaaagaaaattaagaaatcattcagatcatcccccctttttaagtagtgtgaattgcaaaacccaacatattttttttactgtcagttgcggtttatttattctttaactgtctgttttagtagtttaatgattatgaaaaatgtatctgtgtgtgatttgctatttattaaattttaagtactttgctgaatgtcattttaaagcatgtttgaagtcttgtgtatttgtctgtgttaatgctgtcaggaggaactgactaagatgttttaatatgtatcaaaaattaaaatgattttttttattgccttgaggtactttttaaatcaaa

SEQ ID NO: 203953 - DNA, 4078 bp, Homo sapiens
  misc_feature (41)..(41): n is a, c, g, or t
  misc_feature (63)..(63): n is a, c, g, or t
cgccggtggctcggcggcggcggcggcggcggcggcggcgncggcgtcgtctacctccagctnctcctccctcctcctccgtctcctcctctctctctccatctgctgtggttatggcctgtcgctggagcacaaaagagtctccgcggtggaggtctgcgttgctcttgcttttcctcgctggggtgtacgcttgtggagagactccagagcaaatacgagcaccaagtggcataatcacaagcccaggctggccttctgaatatcctgcaaaaatcaactgtagctggttcataagggcaaacccaggcgaaatcattactataagttttcaggattttgatattcaaggatccagaaggtgcaatttggactggttgacaatagaaacatacaagaatattgaaagttacagagcttgtggttccacaattccacctccgtatatctcttcacaagaccacatctggattaggtttcattcggatgacaacatctctagaaagggtttcagactggcatatttttcagggaaatctgaggaaccaaattgtgcttgtgatcagtttcgttgtggtaatggaaagtgtataccagaagcctggaaatgtaataacatggatgaatgtggagatagttccgatgaagagatctgtgccaaagaagcaaatcctccaactgctgctgcttttcaaccctgtgcttacaaccagttccagtgtttatcccgttttaccaaagtttacacttgcctccccgaatctttaaaatgtgatgggaacattgactgccttgacctaggagatgagatagactgtgatgtgccaacatgtgggcaatggctaaaatatttttatggtacttttaattctcccaattatccagacttttatcctcctggaagcaattgcacctggttaatagacactggtgatcaccgtaaagtcattttacgcttcactgactttaaacttgatggtactggttatggtgattatgtcaaaatatatgatggattagaggagaatccacacaagcttttgcgtgtgttgacagcttttgattctcatgcacctcttacagttgtttcttcttctggacagataagggtacatttttgtgctgataaagtgaatgctgcaaggggatttaatgctacttaccaagtagatgggttctgtttgccatgggaaataccctgtggaggtaactgggggtgttatactgagcagcagcgttgtgatgggtattggcattgcccaaatggaagggatgaaaccaattgtaccatgtgccagaaggaagaatttccatgttcccgaaatggtgtctgttatcctcgttctgatcgctgcaactaccagaatcattgcccaaatggctcagatgaaaaaaactgctttttttgccaaccaggaaatttccattgtaaaaacaatcgttgtgtgtttgaaagttgggtgtgtgattctcaagatgactgtggtgatggcagcgatgaagaaaattgcccagtaatcgtgcctacaagagtcatcactgctgccgtcatagggagcctcatctgtggcctgttactcgtcatagcattgggatgtacttgtaagctttattctctgagaatgtttgaaagaagatcatttgaaacacagttgtcaagagtggaagcagaattgttaagaagagaagctcctccctcgtatggacaattgattgctcagggtttaattccaccagttgaagattttcctgtttgttcacctaatcaggcttctgttttggaaaatctgaggctagcggtacgatctcagcttggatttacttcagtcaggcttcctatggcaggcagatcaagcaacatttggaaccgtatttttaattttgcaagatcacgtcattctgggtcattggctttggtctcagcagatggagatgaggttgtccctagtcagagtaccagtagagaacctgagagaaatcatactcacagaagtttgttttccgtggagtctgatgatacagacacagaaaatgagagaagagatatggcaggagcatctggtggggttgcagctcctttgcctcaaaaagtccctcccacaacggcagtagaagcgacagtaggagcatgtgcaagttcctcaactcagagtacccgaggtggtcatgcagataatggaagggatgtgacaagtgtggaacccccaagtgtgagtccagcacgtcaccagcttacaagtgcactcagtcgtatgactcaggggctacgctgggtacgttttacattaggacgatcaagttccctaagtcagaaccagagtcctttgagacaacttgataatggggtaagtggaagagaagatgatgatgatgttgaaatgctaattccaatttctgatggatcttcagactttgatgtgaatgactgctccagacctcttcttgatcttgcctcagatcaaggacaagggcttagacaaccatataatgcaacaaatcctggagtaaggccaagtaatcgagatggcccctgtgagcgctgtggtattgtccacactgcccagataccagacacttgcttagaagtaacactgaaaaacgaaacgagtgatgatgaggctttgttactttgttaggtacgaatcacataagggagattgtatacaagttggagcaatatccatttattattttgtaactttacagttaaactagttttagtttaaaaagaaaaaatgcagggtgatttcttattattatatgttagcctgcatggttaaattcgacaacttgtaactctatgaacttagagtttactattttagcagctaaaaatgcatcacatattcatattgttcaataatgtcctttcatttgtttctgattgttttcatcctgatactgtagttcactgtagaaatgtggctgctgaaactcatttgattgtcatttttatctatcctatgttaaatggtttgtttttacaaaataataccttattttaattgaaacgtttatgcttttgccaacacatcttgtaacttaatatactagatgttaaggttgttaatgtacaaaaaaaaaacccttatactcacctgcgttttcatttgtttgacatttgtctattattggatttcattatcatatgaacttgtcagtgggaaacaaactgtctaaaaatttttctcttacgtttaacatacaatcatgtgaaatttaggcagagttcgataaattactggcaaaaacaaaactcttttataaagattttctaatgttgactttaatactctaacatggtacaaaccaaatggtaaaatcccaagtcatttcttttttcatctctatttagcaacagaattaagtggatgaagatattctactatgcattaaatcttgaactttataaaacatgtacaaaaattgtacaagataagttccacctggtaatgtctttccctaatacagggttgcgcttgcattggaccctagggatttgcactaaaattatatcaaggtctcagatgagcttagtgcacaagcactatcactttaaatactattatttgctaccacagcaactatatatttccatagcttttggctgggggcgggggacatttttattacaacttgaaattgctttgctggtttcatatttatttgttgtatttaaaaaatacattgttgtaagagtgattttttcaatatattttattcctgggggggatcatgctacactctcaaaagaaaattaagaaatcattcagatcatcccccctttttaagtagtgtgaattgcaaaacccaacatattttttttactgtcagttgcggtttatttattctttaactgtctgttttagtagtttaatgattatgaaaaatgtatctgtgtgtgatttgctatttattaaattttaagtactttgctgaatgtcattttaaagcatgtttgaagtcttgtgtatttgtctgtgttaatgctgtcaggaggaactgactaagatgttttaatatgtatcaaaaattaaaatgattttttttattgccttgaggtactttttaaatcaaa

SEQ ID NO: 203954 - DNA, 3939 bp, Homo sapiens
agttctggcggctgggaagtccagcatcgaggcactggcagatttgatgtctgcttgtggagagactccagagcaaatacgagcaccaagtggcataatcacaagcccaggctggccttctgaatatcctgcaaaaatcaactgtagctggttcataagggcaaacccaggcgaaatcattactataagttttcaggattttgatattcaaggatccagaaggtgcaatttggactggttgacaatagaaacatacaagaatattgaaagttacagagcttgtggttccacaattccacctccgtatatctcttcacaagaccacatctggattaggtttcattcggatgacaacatctctagaaagggtttcagactggcatatttttcagggaaatctgaggaaccaaattgtgcttgtgatcagtttcgttgtggtaatggaaagtgtataccagaagcctggaaatgtaataacatggatgaatgtggagatagttccgatgaagagatctgtgccaaagaagcaaatcctccaactgctgctgcttttcaaccctgtgcttacaaccagttccagtgtttatcccgttttaccaaagtttacacttgcctccccgaatctttaaaatgtgatgggaacattgactgccttgacctaggagatgagatagactgtgatgtgccaacatgtgggcaatggctaaaatatttttatggtacttttaattctcccaattatccagacttttatcctcctggaagcaattgcacctggttaatagacactggtgatcaccgtaaagtcattttacgcttcactgactttaaacttgatggtactggttatggtgattatgtcaaaatatatgatggattagaggagaatccacacaagcttttgcgtgtgttgacagcttttgattctcatgcacctcttacagttgtttcttcttctggacagataagggtacatttttgtgctgataaagtgaatgctgcaaggggatttaatgctacttaccaagtagatgggttctgtttgccatgggaaataccctgtggaggtaactgggggtgttatactgagcagcagcgttgtgatgggtattggcattgcccaaatggaagggatgaaaccaattgtaccatgtgccagaaggaagaatttccatgttcccgaaatggtgtctgttatcctcgttctgatcgctgcaactaccagaatcattgcccaaatggctcagatgaaaaaaactgctttttttgccaaccaggaaatttccattgtaaaaacaatcgttgtgtgtttgaaagttgggtgtgtgattctcaagatgactgtggtgatggcagcgatgaagaaaattgcccagtaatcgtgcctacaagagtcatcactgctgccgtcatagggagcctcatctgtggcctgttactcgtcatagcattgggatgtacttgtaagctttattctctgagaatgtttgaaagaagatcatttgaaacacagttgtcaagagtggaagcagaattgttaagaagagaagctcctccctcgtatggacaattgattgctcagggtttaattccaccagttgaagattttcctgtttgttcacctaatcaggcttctgttttggaaaatctgaggctagcggtacgatctcagcttggatttacttcagtcaggcttcctatggcaggcagatcaagcaacatttggaaccgtatttttaattttgcaagatcacgtcattctgggtcattggctttggtctcagcagatggagatgaggttgtccctagtcagagtaccagtagagaacctgagagaaatcatactcacagaagtttgttttccgtggagtctgatgatacagacacagaaaatgagagaagagatatggcaggagcatctggtggggttgcagctcctttgcctcaaaaagtccctcccacaacggcagtagaagcgacagtaggagcatgtgcaagttcctcaactcagagtacccgaggtggtcatgcagataatggaagggatgtgacaagtgtggaacccccaagtgtgagtccagcacgtcaccagcttacaagtgcactcagtcgtatgactcaggggctacgctgggtacgttttacattaggacgatcaagttccctaagtcagaaccagagtcctttgagacaacttgataatggggtaagtggaagagaagatgatgatgatgttgaaatgctaattccaatttctgatggatcttcagactttgatgtgaatgactgctccagacctcttcttgatcttgcctcagatcaaggacaagggcttagacaaccatataatgcaacaaatcctggagtaaggccaagtaatcgagatggcccctgtgagcgctgtggtattgtccacactgcccagataccagacacttgcttagaagtaacactgaaaaacgaaacgagtgatgatgaggctttgttactttgttaggtacgaatcacataagggagattgtatacaagttggagcaatatccatttattattttgtaactttacagttaaactagttttagtttaaaaagaaaaaatgcagggtgatttcttattattatatgttagcctgcatggttaaattcgacaacttgtaactctatgaacttagagtttactattttagcagctaaaaatgcatcacatattcatattgttcaataatgtcctttcatttgtttctgattgttttcatcctgatactgtagttcactgtagaaatgtggctgctgaaactcatttgattgtcatttttatctatcctatgttaaatggtttgtttttacaaaataataccttattttaattgaaacgtttatgcttttgccaacacatcttgtaacttaatatactagatgttaaggttgttaatgtacaaaaaaaaaacccttatactcacctgcgttttcatttgtttgacatttgtctattattggatttcattatcatatgaacttgtcagtgggaaacaaactgtctaaaaatttttctcttacgtttaacatacaatcatgtgaaatttaggcagagttcgataaattactggcaaaaacaaaactcttttataaagattttctaatgttgactttaatactctaacatggtacaaaccaaatggtaaaatcccaagtcatttcttttttcatctctatttagcaacagaattaagtggatgaagatattctactatgcattaaatcttgaactttataaaacatgtacaaaaattgtacaagataagttccacctggtaatgtctttccctaatacagggttgcgcttgcattggaccctagggatttgcactaaaattatatcaaggtctcagatgagcttagtgcacaagcactatcactttaaatactattatttgctaccacagcaactatatatttccatagcttttggctgggggcgggggacatttttattacaacttgaaattgctttgctggtttcatatttatttgttgtatttaaaaaatacattgttgtaagagtgattttttcaatatattttattcctgggggggatcatgctacactctcaaaagaaaattaagaaatcattcagatcatcccccctttttaagtagtgtgaattgcaaaacccaacatattttttttactgtcagttgcggtttatttattctttaactgtctgttttagtagtttaatgattatgaaaaatgtatctgtgtgtgatttgctatttattaaattttaagtactttgctgaatgtcattttaaagcatgtttgaagtcttgtgtatttgtctgtgttaatgctgtcaggaggaactgactaagatgttttaatatgtatcaaaaattaaaatgattttttttattgccttgaggtactttttaaatcaaa

SEQ ID NO: 203955 - DNA, 577 bp, Homo sapiens
tcagaagacagtggagtaacgtatttaggatactcagggatggaaaatgggagctaagggtttagccacatagaacttcaggtataaaggccacagacaaacttgcaagaaataaggacatatttttcccataaatagttactgcggaatctcctggagaatatatgttaggtaatcagaatgatgggagaaatatccatgtaaggactgctggcagtgattggctgctcaaaaaacataaaaataaagacaaccatacaactcttgacaaaaccatacaacaccatcaataaattagtcttgccaaaaaagaaaggaaaaatacaacttaatataatcaagcctttagatctaactgtcaatttccaggagaattggacagagagagaggggaatgtgaattagtgaattagataaataatatcatggggctgcaatcagcaaaccccaggctgtgtgaaactctacaggacaaacaaccctgtttcttcaacaaaatttccaggatagagagggagacagagagagaggaaaggtacagattaaaagagatataagagatatattaactggccaa

SEQ ID NO: 203956 - DNA, 478 bp, Homo sapiens
gagatgctggctggtgggatgtagcagccttgagtcagggcagtgacagtagaaagtgaagaaaatggggaaatgtctctgtttaatggctgtgaattctagagagacatgaggaaaccaataaagttttgtctcatgctatacacagaagattctaggacttgtatcataaatgttgaacccactctctcaactgacctccacaaggcactgtgaacactcctactctttcttgaatgcttttaaacaagtctgtgttaatgggccaagtctggcctgccatctatttttataaataagcttgtattgtaactcaatcaagttcatttgtttacatgttgtctatgaccacttttgcactaaagtggaagaattgagtaattgcaatagagactatatggctcacaaaacctaaaatattaatatctgtctcttaacaaataaaaatttgcccatctctgctctgaaagaatgtaag

SEQ ID NO: 203957 - DNA, 302 bp, Homo sapiens
ctggctcctgcacccactcacctgggtgctcctgcgtgctccccctaccatgaggagttgagagctgcggactgaggaagtaaggcacccccgtcgcgaggcccacgaaagggtcaaggaaaatttcttgtttcattgggtttctggcacttgcatctgaaagagctacagagacacagggctgtgattagaagcccgatctttccccctacggtccgtatctgatccttgcacatggtgctagtgatagaccaagatctcttcttgtctctgaaagaggacagacagaagctacagttgcc

SEQ ID NO: 203958 - DNA, 202 bp, Homo sapiens
ggtagggaggtggttttgaagatgacatgaaatttggtgtttgagtagatgagatttaattttcggaaaacatttcactcataaaacggatatcaacccagtgtcagcactgacctcctgatgtcaatgtcatcatgcaagcatagctaaaataagcctcaaagtaaaacaaagaaacattgcatctcagcacaacacgatt

SEQ ID NO: 203959 - DNA, 557 bp, Homo sapiens
gggagaggaagttggggtacacaggtgtaggcacgctcagtcctcacagcccccaagagaagtccatggataatcagtaacactgacaaatcaaacattacaacataaacacgtttaggagcccagatgtaaatattttttaaaaaaataactaaaagacggccgggtgcggtggctcatgcctgtaatcccagcactttgggaggctgaggcgggcggatcacgaggtcaggagatcaagaccatcctggctaaaacagtgaaaccctgtctctactaaatttacaaaaaaattagccgggcgtggtgactggcgcctgtagtcccagctactcgggaggctgaggcaggagaatggtgtgaaccccgggaggcggagcttgcactgagctgagatcgcaccactgcactcaagcctgggtgacagagcgagaccccgtctccaaaaaaaaaaaactaaaagactttatgtggctccattttaccttttagacaatatgcatgtattactttgataaaaataaaagtaactgaaagaaatccatgtagttaagaac

SEQ ID NO: 203960 - DNA, 474 bp, Homo sapiens
ggcccatccttacagtgggatgatcgaatcttaaaagggaaggcagttctgacacctgctccagcacggatgaacctcgaaaacacaatgccaatgcaggaagcctgtcacgagaccacgtgctgtccggctgcacttgcatggagctcccaggacaggaagagtcacaggtagggaaaggggaggcaggctgctgggggtgggggctgactgctcatgggtagggtttccttttggggtgagggaactgttctggaattggatagtggtgacgggcacagaactttgtgcttctattaaaagccactgaatttatttattttattttaatttttgggtgacagagcgagaccccgtctccaaaaaaaaaaaactaaaagactttatgtggctccattttaccttttagacaatatgcatgtattactttgataaaaataaaagtaactgaaagaaatccatgtagttaagaac

SEQ ID NO: 203961 - DNA, 927 bp, Homo sapiens
  misc_feature (927)..(927): n is a, c, g, or t
ttaaaataaaaaggttgaaaaagttataccatgtgtatggaaatggcttaactcagcaggcctgggttattcaaaccctacatatttccaagaaatttgcatttatgactggcccttggtcaattcctagaaaccaagttcttggaatgatatgtctaatatggatatttttgcaagactgagaccttgggctatgctgtatcagttttcaagatagtttatgcaaacaatgtgacatatggtgaacacctgcttttcctctgaggatctggatcttgagaaactgaggctagttacacaggtgctgtatgcccacaaaaaaaaaaaaaaaaaaaaaaaaaaaaaaaaaaaaaaaaattccagaaacgcggggcacacccaagtggggggctacacctttcgcggggggagacattctctttaacaccgggtggtgcccaaaacaccatttgcgaagagggaaacaacagctgggtgcgcggggggaaaaccacccggtgatacagggggaccactacaacaggtcttcacccggggtgtccctgagtaattcccacacgggggggggcgctatacccctacacgggatttcagcccgcggaaattttgacacgtcgcaaacaacggtggtgtatttgtggttttataagagaacttttgggaaccgcggggggggttttccaaaaaaacaacggggggcggagggagattatctggtggtacccttaacaatgtggtgtaaacttctaacacaagaaggggggtgtccgcctaattggttacaaattactccaaaaacgttgttttgaaggcgcgaggattttatatcagaagagattttcaaacaagcttgtttgtggtcccactctctggtaaacatataaaggaaggggtagaataaacagaatataatcgagacaaacatgn

SEQ ID NO: 203962 - DNA, 857 bp, Homo sapiens
tggtgattgtataacataatatattaagttatcttagggcatagcatttgcattatgcattttctttactctcgtttcatttgttttccttctctcatgcagtaagaagtatatttttgtggattaccctatcaggaaacaggaacttttattaaatttcttgttggcatgacctctttcttgataatacctgaggaagttgttagtttagtatttcataaagagagcagggttaattgcaaacaatcataccttcatgataaattgaaccatttataaatacctacagtaattatgatctgacaaatgtatacaaccaccaattacttttttccaggatcctgatgctctgtgcccattctggctggtctttccttctagtgtcttaactgatgggatgatggttcacttctctgactccagagctgcccgtggtcaaagttcagccctcatgtattttgtgcatttctgtgtggctggtgaaaatccacatgtgtaatttgccgacggttcctcatttcccccatactttcctcctcctgtgattgcttctcacagtccctgcttctgtcttttgtggaaggaactttatttgcattcttagttgcaggagagaaaaatgacatctaaaaaaaaaaaaaaaaaaaaaaaaaggacctctcatacacaccccacctcaacacacacaaaaaaaaggggggggggggaaaaaaaaccccgggggggcgccactccccccccttttttaaaagggcgcccacaagggggataaaaagacgagtgcggggggaaacaccgtcgggggacaacgtctctgtggtctggaggcaaccccctcggggggtcttgggaccccc

SEQ ID NO: 203963 - DNA, 488 bp, Homo sapiens
gaaacattgtagctgcatgtgagtggtgtgaatacatccatcttacagttttcttagggttcacatctaagtgactgaatgtgagagatgcctaattcaattatcatgtattggatgttgttttgcttcttttgagtttttaaagataaaatttgaaggtaagaattagagctaaaatctcaagaataatcttaaaatcctaattttcagaggtataagtatgtataatatacatatttatatgatatgtaaatatttatgtgtttatatacatataaacacatttttagattaaaaagagcaaacaacttattttttaatgactagtataatcacgaagttctttgcaaataatttattgtctaaaatatagaaattgcaaattttatatgacaatgtcaaaaattggtcaggaaccaaattttagaatgaaaatttttactttacaatacatagctaaatccaattttttttttttttttttttct

SEQ ID NO: 203964 - DNA, 369 bp, Homo sapiens
gcgaggtgatctagaggatccctcataggttcgctggggattaagttagttccattccacatttaagacaataagcagagaatggctaaaaaagccaatttgttttgggctttgtttgatgacagtagagaaggtttaacctagggcttttaaagctctttctagagctgaaaggagcaagtcaaaatgattttataactaattgtgacagtggagttttttagattagctatgttcttaaagcaagttagagttctttgttttctgggaaaatacttaagattctattctagaggtgttttgaaagacattgtggagaaagtattatggcctgcccagtatgccttaggagtacctgaaacggcaaga

SEQ ID NO: 203965 - DNA, 1200 bp, Homo sapiens
gccgctgcactccagcctgggagacagagcaagactccgtcacaaaaacaaaaaacaaaaaactgtcatatcaaaaactaaactaaaatggtaatatctgttagatattacaaagtcaggcaaattatgattcatggcagccactaatgacccaaaggagagaaagaataattagcagattctaacctaatgggaaaaaaactaaatgaatagggatgggggacttacattctgttagaggaaattgaggctgtcatataaaaggaataggtaaggcaaactgtaaattcctgtttacacaaatgcccttctgataaatctctgcattgcccacagtccatgattacctctcccttattttaagtaatatttaacacattaaaaatggattaccacccaaggaattgctcccgacccagaaagtgcaggtagtgttgaaggtttgaggggaagaggaatgattagagttggttgtgtctcaggaagaagccaacaggaggaaccttattttgagtcaggtaaagaaggtgggagtgaggaggcatcccggtggccaggtatgaagctgggagctgattgctgcacattactcagctgaattaaatgtgccctcacatctgtgtgtgtgcgtacatgcaaatgtacatgtgtatgagttagttggaggggtagacctttattttcctgtcctgtaactttcctttgcaaactaatctgtattcagaacagtgttgcagttaagaaccacccagcttgtccatgaaacaggttctctcaccccatctccccagttttagagaaggcaggaaagaaaaggcagtgcttttcttttttcctggccgtatgcggggcaggaagaagccagcagagcttgaaagagaaagtaaaccttctgggaaataaacggcttggcttccctattgtggaggaggagtgcaaattattagggggatgtttgggtagtttttgtagaagccatttctgaaaactgatttggattagtgaaggtaagcccaatttaggaaaaccctgcccagtctggtgtcagccacctgtttcccgctttgtttgattgatttgattagtttgtggtattctgacctctcatttttattacaagagttggaagatttgagtctgaacttgagcacctgcttcggtgaaagcttcctaaaatgcatgttttttcacattttttct

SEQ ID NO: 203966 - DNA, 306 bp, Homo sapiens
caagcagttaatacagactcacatatggcattgaggacatcattaaaactcagtaagacaaaaatattgcctgatattaaagcagccacagagaaaagcaggaaagtttactgggagaaaggatgggaggagaatactgcctaatacttcctcattggaataaccacacctaggcattagtattaccccagagcaagagcttcttagagacagacacagaaagactacctcagccggcatgaggcctttctcttttattgatacggagctccaagaagccccattttaagtctgtatttcttactg

SEQ ID NO: 203967 - DNA, 379 bp, Homo sapiens
tgtgtgtgcttatgtatgctaactgatttggaaatcagtattaatgagcagttaatgattgtgggacaagaaagcattaaaaaatcttaaagagtttggctgggcatggtggctcatgcctgtaatcccagcactttggaagtcccaggcaggtggatcacttttgttaggagtttgagaccagcctggccaacatggtaaaaccccgtctctactaaaaatacaaatattagccaggcatggtggcattcacctgtaatcccagctacttgggaggctgaggcaggagaatcacttgaacccgggaggtggaggctgcagtgagccaaggtcacaccactgcactccagcctgggcaacagagtgagactctgtctta

SEQ ID NO: 203968 - DNA, 514 bp, Homo sapiens
tctctgccatccactgaaggcaggatagatagaggcaggcagacaatctgaacaaaatgagctttccaggaaggtgcaaaactggaggcagagatacctggcaacactgagcactgaaatctcctttcttttgcctgattgcatttatatgaaaggtccagaacaggcaaatttgtagagacagaaagtagattagtggctgcctagggctgggtgggcggatgggaacaaaggggttgggagcagatggggagtgaatgactgctcatgagtccagagttgctttttgaagtaataaaaatatgctaaaattgatcatggtgattgttacacaactctgtgaatatactaaaaaccactgaattaaaagtaaaggcagtaattaaaattctaggggttttttttttttttttttttgggaggcaaagtctggctctgtcccccgggcggaagggcaggggcccaacctgggcccagggaaacccccgcccccagggttccccgcatcccccgg
